United States Patent Application Publication US 2004/0214272 A1 - sequence listing, part 43

SEQ ID NO: 179838 - DNA, 1039 bp, Zea mays
  Clone ID: MRT4577_95593C.1
tcaaaaaagcgcaaatagtcacgtctatcttataaatataccctcacacattaaaacagtaacattcaagaggttgggctaggacatcattgggatgctgaagtaatatcgcattgtctatgtattgaccaagcatgagtttataattacgatttgatgttttcaattatttatatgatgaacatagttcagaaatatatcgagataaatctcaatcaatatattgattatttctaggaaacacacaccggtatgagggcaccattatcgagtacatctcatatgtaatctaaaagatggcacctccaacgatgggttgctgccacgacaaggcagggttcatcaaagagaactggctgtatggtagcaattgttgctgctgtaggaaggcagtgaccaatgggttaggcactgctagtggattaagtaactgttgtcgctgttgtaggtacgcagcagagttcgacacagtcagttggttgaatggaagcagctgttgtaggtaggcggcagggttcaccatggctagttgactgagcgctggcagaaactgctgcaattgttgttgttgttggtatgcagctacgtttgccagagcaagtgggttggatgcaagcagctgctgttgcaagtaggcgacagggttcaccacatctagttggctcagtgctggtaggaactgttgttgctgttgcgttgcgatggtttgtatggttagatgtgccaaggattgttgttgcaattggttaattggttgttgtaaggcgcttgccgcaagcgcttgttgtagcctgtaggcttgcacagctaggtgttcgaagcccattgaagtaactggtgggaggaactgtggtataatggcactaggagcaagtgagcattgtggaataatgaacgcatttgttgcgctcacaaaaagggcaagaagcgcaaggagggctaatatcttggtagccattgttgttaagtcgttgctaggtagcttcgcttggtgtgtttctgaatgctcaaaatattatgggtgatccccgcgtacctg

SEQ ID NO: 179839 - DNA, 362 bp, Zea mays
  Clone ID: MRT4577_95594C.1
gcctttacggccccttttcttctcgaggtcggaggggatgcatccccagagccagagcagctgcctgcagcgcctgcaacacgaagagaagcggatagtgcgggtgctggtaatggcggaagcggtgatggcggaacttgcggatcactctaacgtccttcatacctatgcaggctgcgcgcactgacgctagctcgtgagcctggtgagagaaattaaaacgaccctgcgtgaggagatactaagcgctggggagtaccgtgcatcacagaagagtgaatacagtgcagggagcgctaatgagatatgttgcaagaaggtgcagtgtgtgctcgagaagatggctacaatgcaacacactc

SEQ ID NO: 179840 - DNA, 352 bp, Zea mays
  Clone ID: MRT4577_95595C.1
ggccggtagccatgataaaaccctgccgactacctacaacagatacaactgctttcatctaacccgctggctgtgaccaatagacctacatacctgcaacaacaattgttggaacagattgtaccaggtctgactcagctatgttgtggcaaaccctgctgcctacttgcaacagctgcttccattcaaccaactgactatgtcgaactctgctgcgtacctacaacagcgacaacagttacttaatccactagccaggggtaacccattggacgctgccttcctacagcagaaacaattgctggcatacaaccaagttttctttgataaacccctgtcttgtcgaggcagc

SEQ ID NO: 179841 - DNA, 1827 bp, Zea mays
  Clone ID: MRT4577_95596C.1
cgcttcgccgtctgccttctgggccttcctttttaacggcctctatccctagcaagttcattctcacggtccaaccatgggtaacgagaagtcccacatcaacattgtggttattggccctgtcgactctggcaagtcgaccaccacaggacaccttatctacaagcttggaggctttgacaagcgtgtgatcgagaggttcgagaaggaggctcctgaaatgaacaagcggtccttcaagtacgcgtgggtgctcgacaagctcaaggctgagcgtgagagaggtttcaccattgatatcgctctgtggaagtttgagaccaccaagtactactgcacggtcattgatgcccgtggacaccgtcacttcatcaagaacatgatcactcgtacctcccaggctgactgtgctgtccttatcattgactcaaccactggtggttttgaggctggtatctccaaggatggccagacccgtgagcatgctctccttgctttcacacttggtgtgaagcagatgatttgctgctgcaacaagatggatgctactacacccaagtattccaaggcccgttatgatgagattgtgaaggaagtctcttcctacctcaagaaagttggatacaaccctgataagattgcctttgttccaatctctggttttgaaggtgacaacatgattgagaggtccaccaaccttgactggtacaagggcccaaccctacttgaggctcttgacaagatcaccgaggccaagaggccttcacacaagcccctgcgtctagccctccaggatgtgtaccagattggtggtattgggactgtaccggttggtcgtgtggaggctggtgtcatcaagcctggtatggtagtcacgtttggtccaacaggcctgactaccgaggtgaagtctgttgagatgcagcacgaggcacttcaggaggctcttccgggtgacaatgttggcttcaacgtgaagaatgttgctgtcaaggatctcaagcgtgggtttgtggcctccaactccagggatgaccctgccaaggaggctggcagcttcacctcccaagtcatcatcatgaaccaccctgggcagattggcaacggctatgcccctgtgctggactgccacacctcccacatcgctgtcaagtttgctgagctcattaccaagatcgacaggcgctctggcaaagagcttgagaaggagccaaagttcctgaagtacggtgatgctggtatggtgaagatgataccaaccaagcctatggtggtggagacattctccgcgtatcctcctctgggtaggtttgccgtccgtgacatgaggcaaacggtggctgtcggagtcatcaagagtgtggagaagaaggacccaactggagccaaggtgacgaaggctgctgccaagaagaaatgatctatctggctggtgctgtgcttgcttgttggttacctcgtggaagcttaaaatatctcgtcttgttgacatccttgcagttgtcgcgtgaacaagtaatctatgatggcaatgtttgcctggtcatgaagtattattactttcgttgaaaccgtgatgctattaagacttaattttttttatggaaaaaaaaaaaaaaaaaaaaaaaaaaaaaaaaaaaaaaaaaaaaaaaaaaaaataaaaataaaaaaaaaaaaaaaaaaaaaaaaaaaaataaaaattattataattaattttttttttaatatatttaaaaaaatatattgggggggcccccccgggaaatattcgggccgtgttcctctgggggtcaccctttttttttcttttgggggggtttttttaaa

SEQ ID NO: 179842 - DNA, 502 bp, Zea mays
  unsure (1)..(502): unsure at all n locations
  Clone ID: MRT4577_95597C.1
cgaggtaaatctcaatcaatatattgattatttttaggaaacacatgccgctttgagggccccattatcgagtacattttatatgtaatctaaaaaaggcaccttcaacgatgggttgctgccacaacaagggagggttcattaaaaaaaactggttgtatgggagcaattgttgctgctgtaggaagggaaccaccaatgggttagccaccgcttgtggattaaataactgttgtcgctgttgtaggtacccagcaaagtttgacacagtcagttggttgaatggaagcagctgttgcaagtaggcagcagggtttgccacagatagctgagttagagctggtacaatctgttgcagcaactgttgttgcaagtatgtaggtgcattaaccacagcgagagggctagatgaaatcagttgttgcttttgtaggtaggcggnagggtttaccatggctagttgactgagcgctggtaaaaactgttgcaattgttgttgttg

SEQ ID NO: 179843 - DNA, 250 bp, Zea mays
  Clone ID: MRT4577_95598C.1
gaaaaaaggggcgaccacgcgtacggaaacgtcaggtcatgatcacgccgtcatttattgtgatcatcaagttcctgacggacgggcgggcgctatggctacatcggggagtacgagtacgtggatgaacacaaagctgggaagatcgcggtggaactgaacggaaaactgtataaatgtggtgttaacagctcacgtgttgataaaagcgcataggaaatcgaaggatggacggcgatgctacttacat

SEQ ID NO: 179844 - DNA, 706 bp, Zea mays
  Clone ID: MRT4577_95599C.1
taggggccatcagatccaagaagagggaaaagcaccaaggaccttacggagaccgaaaaaagaaacacagcgtttctaattattgattcgtcgggcttaacagtttaatcttcccctccagccatgggtaaggagaatgctcacatcaacattggggttattggccacatcgactctggcaagtcgacaaccaccggccacctgatctacaagcttgtggggattgacaagcgggggatccagaggtttgagaaggaggccgctgaaatgaacaagcgggcctttaagtatgcttgggggcttgacaagctcaagggtgaacgggagaggggtatcaccattgatattgctctgcggaagtttgagaccaccaagtactattgcgccgttattgatgcccctggaccccgtgactttattaagaacatgatcactggtacctcccaggatgactgtggtgcccttatcattggctccaccactggaggttttgaggctggtatcctccaaggatggccagacacgtgagcatgctctccttgcgttcacacttggaatgaaacataagatttgctgctgcaacaatatggatgcaaccactcccaaatactccaaggcaccttatgatgagattgcgaacgaatactcatcttacctcaagaaagttgggtacgaccctgataagatagcatttgcttccatctct

SEQ ID NO: 179845 - DNA, 439 bp, Zea mays
  Clone ID: MRT4577_9559C.1
gagctcactattcggcggccgccctcttacgttcgcttgcatgcgacagaaatacgcacacagatgacataaaaccagcaaaaagatggctgcccggcctctgctacgtacactgtacgatcctgcagctacacagtcacaggctcacagaccacatcttgtctgcgaattaacggctatcgtcagtcaggcgcgctccgatatctctgtgaaagagatggaggtgcgcgatggctactgagacgaccgctgggacgaccgatccatgaccgaggtcagcaggggtgacccacatggccctggttccaatcttcaggtgctccaaaatccgtgatcacgtgctggcttgcttatcgttttcgtgtccacggtcggcttgcctcgtaaagtggtcaacaccggacacatgcccgggcggcgatttatggcgtttcgggtg

SEQ ID NO: 179846 - DNA, 290 bp, Zea mays
  Clone ID: MRT4577_955C.1
agctttcatctagctgccatacaggcggcaagttgctgactaacttaccgagaggggtactactacgcatgcatgcaagtgggggggttacagaaactgtcaacgatacacttcatccacggacaccagatggtcatctacgattcggccagtcgcaaagcctcttcttaccggaacgagaaggccagggtgacacattattccgtatgctatgcttgattgactcaatcatatgaggagacacgctcttaactttacgctagagcgagcatgcatatatacatacatcc

SEQ ID NO: 179847 - DNA, 238 bp, Zea mays
  Clone ID: MRT4577_95600C.1
gggggggcaaacaaaggggtttcatggggaaaaggtaaaaacccccccttggccaaaaaaaatttttcgcgggaaattttcagggaaaggggctcccaaaaaatttccaaccctttgggcaacaaaaaggggacattggtggggacccccccaaacttaggggttaaaaaaaccaacacctcctttctttaaagggccacggggtttccctggggatttcttttttcttcttaggggg

SEQ ID NO: 179848 - DNA, 431 bp, Zea mays
  Clone ID: MRT4577_95601C.1
aaaaacccaaccaatatattgattatttttaggaaacacatgccggtatgagggccccattatcgagtacatctcatatgtaatctaaaagatggcccctccaacgatgggttgctgcctcgacaagacaggatttatcaaaaaaaaccggttgtatggcaacaattgttgcttctgtaagaaggcacccaccaatgggttaccccctgccaatggattaaaaaactgttggcgcttttgtaggtacccaacaaaattccacataattagttggttgaatggaaacaacttttgcaagtaagcaacagggtttgccacaactagcttaattaaaactggtacaatttgttgcaacaattttttgttgaagtatttaggggcattggccacaaggagcgggctaaaataaaacacttttttcttttttaagt

SEQ ID NO: 179849 - DNA, 361 bp, Zea mays
  Clone ID: MRT4577_95602C.1
tttctgttgcatcacttgttgttgcaggtatgtaggtgcattacccacagcgagagggctagatgaaagcagctgttgctgttgtaggtaggcggcagggttcaccatggctagttgactgagcgctggcagaaactgctgcaattgttgatggtgctggtatgcagatacgtttgccagagcttgtgggctgaatgcatgcagctgctgttgcaagtatgcgacaggtttcaccacatctagttggctcagtgctgctaggaactgttgctgctgttgcgttcctatggtttgtatggttagatgtgccaaggactggagttgcacttgtctaaccgagggacgatgcgcgcttggcgct

SEQ ID NO: 179850 - DNA, 298 bp, Zea mays
  Clone ID: MRT4577_95603C.1
gttattactcgctctttccatagacaattttttttttttattatggaaaaaaagtcccccacatgccaggggctttctagacttaccggaaacatgcacaccattggttgcgggccaattaaggtttgccgggttaaacagttgaaaaaagtaatttgaaaaggcgaacatgaatacgccaggtccagaggaccaaggttttaaaaaaacccggttatggcgcccatcgcattggacggttctggggccaaccaaggaagccttctttaggggggccttcaaaaccttttttttacag

SEQ ID NO: 179851 - DNA, 833 bp, Zea mays
  Clone ID: MRT4577_95604C.1
ccggccgggaggtatgaactttactctgaataatacaatctgtccctgtttcctctcctgttctcgtctcctacctctgctccttctctactatctcctcattccattagcagtagctaacaattggtatcagagctccaccgatcctcggatcctcgttccatggcgtcttcttcatccatcggcatcaacttcatccaggtgctggaacatcagacgcgcgccctcttctcggagttggacaagcgtcttcaggctcgcgacgacaaatgggagttccgtgttgccgtcctggagtcccgcgcggcggattcggagcgccaactcgacaacgtctcctccgacctgcgaaccgacgtcgcggcccagatctcagtggtggaggcgctcgagtccattgtcgttgattcgacacagcacatggattcggtttcgtccagcattcgtgcagatccggaggtgcgccaagcggcggtggacgcgaccgcggaggatcggcgccaccacttcgaagccgccaccagctcacacatcacggaactcgaatcgaccacccaagtgttcgagctctggcatccccgcatcgactccgcgatcaaccatctccacccctccatggtcaaggttcgagcagcgatcgacaccagggacctacagtggtcgcctgatgcgcacggcggcggctctggcggccttctcggagagccgggtggtgaaccaactgaaatcagcggcgctgctcatgccggtggcctacctcgcccacatcaacacccccatcggcatcctgctatccaaagcgttcgtcggcgaggtgctcttggacttcctcg

SEQ ID NO: 179852 - DNA, 372 bp, Zea mays
  unsure (1)..(372): unsure at all n locations
  Clone ID: MRT4577_95605C.1
nnncccagcgcgctccgcagacgcccacttagcttccgctattcaccaaaaggtccccttctgccctccgccctatctatccatggaaaggcggcacggcttcttcgcggcgctgcgggaggaggtggcgcgcgggctgtcgccggcgcgggcgcgccgcaagccggacgccacggacctggccgccgcgctcagcttcaccggagtggcaggcgccggcgagatgctggcgccgctcatggaggggcccgatccggagcccagcgacgacggggacggcagcggccgccgaggtgccgcgcgcgggaggaaggaaggctggggccactgggtgcgcgtgcagttcgcgcgggccccgtcctcggcggtcgc

SEQ ID NO: 179853 - DNA, 206 bp, Zea mays
  Clone ID: MRT4577_95606C.1
ttcttcgctctcaaaccctaaccctagggctagccctctcccggcggaccgacgatgccttatgctggcggcggggcggcggacgatgaggagttccgcgccgaggtggtggtgcgcctcatcaacgaggagtactagatctggaagaagatcacacccttcctctacgtcctcgtcatcacccatgcgctcgtatgtcccttctt

SEQ ID NO: 179854 - DNA, 192 bp, Zea mays
  Clone ID: MRT4577_95607C.1
ctctctcctcgcaaaaccattcacctcctgacaaaagcttctctctcctcaaccatacccccccccccccccaaaacaaacttacaaccagtccacactcaacacagacctcccatcacactggtttcgttctcagtcccaacactaattccacaccatctcactgaaatataaaaaaaattctaatcacat

SEQ ID NO: 179855 - DNA, 397 bp, Zea mays
  Clone ID: MRT4577_95608C.1
gggggttgttggggggggccaatattggggtttaaaaaataagaggaaggactggaagccctgggctttggcgtcaatgggtttgaaaaaagtgtagaaaaaaaagtttaggggggggggggggcactggttcaggaggggggggggaaggacggaaatttgggggggggggttagggaggagaaatttttttttttatgatggtcggtaggggttggggggaaaaaagaaggaagatcagtcgtggtggaaaaggtattactgtggaaaggtggaaaaaaaaatagggcggaaaaaaaaaaggaaaagggggggggggttaaggggggggggtttgaaaaatttggggggggggtttaggcccgttgtttggtggggaaaaccatgggcgccgtcg

SEQ ID NO: 179856 - DNA, 900 bp, Zea mays
  Clone ID: MRT4577_95609C.1
ggccgggcttctcaatcaacccaaccattccaccgattccctcgtcgacagccgtagtgtgctcggtgcccgatgccatgctttccgtccgtagtctgtaccactaccgtgcgcgtcttaagcatccgtgcacctggcccagtgactgcctgcctttgccttccactggttcgcttctccctctcctgcgcttggctgctgcttgcccgttgagcacacagcacagcagggggggccgtgcctgcacagccgcggcgatgagggactgggcgccgtcgatcatcgcgacggcgctgttcgcgctcctgtgcccgggcggcgtgctgcagatgcccggccggcaccgccccgtcgacctcatgaacatgaagaccagcttcccgtccatgctcgtccacgccgtcatctacttcctgctgctcatgctcttcctcgtcatcctgcagcctcacctctacatctgacgtgagcgtgttccccaccccttcacacaagcttctagcatgtttcagtttcttctttcttgggatgcagttttgggcccttttaatagctttgtaaccttatgaaccagaggattatatacgtaactaggtgagtacccgtgcgttgcaacggaaacatataatactatgataacttatatacaactgctaatgctgttgctacagcgggcgtaccttacctttggatctggccgaggccacggctagccatgacgagcgactcgagatggagctcctcccgtcctccgtcgcgtcgcacaccttctccctctggtcaccccagcacacgttgatcgccacgcacagctgtatgcgtccagcatggtgcgtccagcatggtgcgtgcagcacaaacgcggcatcagtattaccatctagacgcagcttgccccat

SEQ ID NO: 179857 - DNA, 2660 bp, Zea mays
  Clone ID: MRT4577_9560C.1
ttgggtacctcgaggctggccggggctccggggttagtattcagtttccttatcggctgctgcccatttcgccccctcccgtcttttcccttccgcgtcggtctcctcccccactcttctacttcttgctgtcgtcgtcttctctcgactccccgtcccctccctctgcctctcccacccgccgcttccggattccgccgcccgtgccctcgccaccaggaattccactcggagtaaggagtgttttcccccgctgcttgcttcgcttctccggtcccgggacccgccccgctttcgcccgacttagattccacttctgtccgttcgctcgctcgctcgctcgtttgctcttatcccccttgctttgctcgttcgttcgattggagctagccgctgcgtggattcctcggctcgccgtccggatctggcctcgctgagctgcagctgccgcgaatcccgactcgattcggccgcgctcggatctcgccggactagcggggaccgaggcctctcgattcgcctcgggggcgagatggatcatgtggtcggaggcaagttcaagctcggcaagaagatcgggagcgggtcgttcggggagctcttcctagctgtgaacgtgcagaccggagaggaggtcgccgtcaagctggaaaatgtcaagacgaagcacccgcagcttcactacgagtccaagctatacatgcttctccaaggaggaactggcattccgcacctgaagtgaacccatcgccaggcgaggcaagggctacctccctccgaccggctgcactcgcgagaggcgctcgcgatgagctactgcagcgcagcctggagcttctgtcccgcggtgacgccgggagaagaaagtgatggcaaggaaagcgagcatctcatagcaggcggaagggaagaacgcttgtttgcgactcagtaaatgacaggattcgtcaacagtttccctggggcttaggtttatataattagactatcggactcgcaaagaattactagggatcttcaaactcataagcacatcccatacagagagaacaagaacctcactggaactgcacgatatgcgagtgtcaatacccaccttggcgttgagcaaagcaggagagatgatttagaatctcttggttacgttcttatgtacttccttaggggcagcctaccatggcaggggctgaaagcagggaccaagaagcagaaatatgacaaaatcagcgagaaaaagatgctcactcctgtggaggtactctgcaaatcgtatccatcagaatttatctcctatttccactactgtcgttcattgcggtttgaagacaagcctgattactcttacctgaagagactattccgcgatctctttattcgggaaggataccagtttgactatgtgttcgactggaccattctgaagtatcctcagataggctccaacccgcggatgagggcaggtgaaaggactagtggagctgctggaccctcaatggacaagattgagaaggccacaggagaagcagccggtagaaggaatcttagtggtcctgtgaaccagactgacagttatgcacaacgaccgcgtgagaccgtatctatgtcattaaaggaaattatgcatagcactgaccggtctggggaaaggaccatggagagaccacgtacatcctcgcgcacaggcagtgcatcccgtagagctgttgcatcaagcagcaggcaagcctcatctgtggaaccaagtgagcagcagtatagccgggcaagcagattgttctctagcaacagtggcagtcgcccatctagcacccagagggtcaacccatcgccaggcgaggcaagggctacctccctctcacgggcggcagtcgcgagaggcgcccgcgacgagccactccaccgcagcctggagcttctgtccctcggtggcggcgggaaaaggaagtagtggcaaggaaagcgagcatctgagagcgggcggaagggaagaacgcttgtttgcgactctgtaaatgacaggattcgtcaacagtttccctggggcttcccatagtttccttggtgctccggtctgttgtaccattgcttcatagatagcaacgattccttgttaaacgtgtgctgtgttgcaggttgcgttagggccaagtcctagcctttgtgatggtgattacatttaggggtggtcaagattcacttatttatgtttcttcaccctttcctggactcggcgacttttttcatgtcgaactctgaattttcttattcaacagaagttgataaaaaaggacttcctgtgttatgcttattcaacagaagttgataatgataataaaagaagaggcatcctgtgtaaaaaaaaaaaaaaaggggcatgctgtttctcccattgcttcatagataccaccgacaccctgttacccacgcgtccggttgcaggttgcgttagggccaagtcctaccctttgtgatggtgattacatttaggggtggtcaagattcacttatttatgtttcttcaccctttcctggactcggcgacttttttcatgtcgaactctgaattttcttattcaacagaagttgataaaaaaggacttcctgtgtaaaaaaaatacaaataaactaaatgaatatctagactagacaaaaaaaaacaa

SEQ ID NO: 179858 - DNA, 730 bp, Zea mays
  Clone ID: MRT4577_95610C.1
gtggcggccgattggagccctcgagcccggccgggcttggcaatcaacccaaccattccaccgattccctcgtcgacagccgtagtgtgctcggtgcccgatgccatgctttccgtccgtagtctgtaccactaccgtagtaccgtgcgcgtcttaagcatccgtgcacctggcccagtgactgcctgcctttgccttccactggttcgcttctccctctcctgtgcttggctgctgcttgcccgttgagcacagcagggaggcgatgagggactgggcgccgtcgatcatcgccacggcgctgttcgcgctcctgtgcccgggcggcgtgctgcagatgcccggccggcaccgccccgtcgacctcatgaacatgaagaccagcttcccgtccatgctcgtccacgccgtcatctacttcctgctgctcatgctcttcctcgtcatcctgcagcctcacctctacatctgacgtgagcgtgttccccaccccttcacacaagcttctagcatgtttcagtttcttctttcttgggatgcagttttgggcccttttaatagctttgtaaccttatgaaccagaggattatatacgtaatatgcgatccgtagcttccgttgggcaataaagaactgaagtttccctgcttcctgaaaaaaaaaaaaaaaaaagcggccttcagagtgtgtcagtttatctgtacacaaaaaaaaaaaaaaaaaagcggcc

SEQ ID NO: 179859 - DNA, 235 bp, Zea mays
  Clone ID: MRT4577_95611C.1
attacaagttcatcaaaaaacgccggggacaagaaaagacacgcccattctggccccgaaaaaacgaaaaagcgttacaaatacaccggggaaaggtatttcagccaatcaagggaccaccccccgctgtctggggggaaaaaaatactggaaaccggggggctggaaaggttacccctgtcccacgaggggggggggagaggggcaaaaatatgaaggcatttgaaaaaggggg

SEQ ID NO: 179860 - DNA, 344 bp, Zea mays
  Clone ID: MRT4577_95612C.1
gggggcgccatgagctggccagcgatgggggaggcgcggatccccccaccaagccaccacagtgaggatgtagaagctctggtgagggcaaatggggggtggaatggtagatgcggcagttaaactaaccaaagttgttcttgctttggggctgcgaggcgcgcgtttacgccagtgcaggcagcgtgacttgccgtcagcggagctctacgactacgcatcttcgtatttgcaggcaatttcccctacccgtcagttccctgaaataagaaccctggtctcagaaatttactcctgatatgatataaatcttattatctcagaaaaaaaaaaaaaaaaaaaaa

SEQ ID NO: 179861 - DNA, 670 bp, Zea mays
  unsure (1)..(670): unsure at all n locations
  Clone ID: MRT4577_95613C.1
gctgataaaagaaacaacaaaactgagtacagtactgtgccgaaacctagcccagccgacccagtggcaggtagagttggcccacaatgaacagcccgcgaccgcaccacacatcttacaaaaaggaccttcgcgctcaaactaatccacatcggtccttgccactattgatcttactcactgacagattcatttaagtccctcagattccactcttttacaaagttctagccacaacgccgcagtgcagaactccggcggtctgcgccagatcgaccacggtggcgcttcattgacgacggcgagggcatcgacacaggctcttcgaagctgtcggtacgcgcgcgagattaaccggggatgacgcagttcaaagggtcgacggtgaagcggtctgcgacaacgttctgcggcagcgagaccctgttctgagcagtagacaccggtagagttaatgatccttcttcggtgagcttcacttgttgatggagagcacataacacgtgttatcttggtgtgtcactgcttcgagtatcatggccacggtaaggtgaacacagaagaaaactgaacacttgatggcgaggcacataataccacttanaagaaattactaggtgtcgagatggtactaaataccatgcatgtccacgctattntaatttaactg

SEQ ID NO: 179862 - DNA, 277 bp, Zea mays
  Clone ID: MRT4577_95614C.1
acttagtcgcgtgacacaccaagataacacgtgttatgtgctctccatcaacaagtgaagctcaccgaagaaggatcattaactctaccggtgtctactgctcagaacagggtctcgctgccgcagaacgttgtcgcagacgcttcaccgtcgaccctttgaactgcgtcatccccggttaatctcgcgcgcgtaccgacagcttcgaagtgtccccgctgccgaattaaacacgtgtctacgttcaccgtggatcagagcctgtgtcgatgccctc

SEQ ID NO: 179863 - DNA, 2101 bp, Zea mays
  Clone ID: MRT4577_95615C.1
ggatactccacctggttttaaagaagctcaaccagtccattcaactgaattcacagaagtgcactgttcaaagccaactgaatcagcagctgtagatgtcccaaatggaaacacatccattaccagcagctttgtggaaaagcttgttggtattcgtcctggttctgcaaacctcaatagctcaggggcaaatcaatcagcagccagaatacctgatccaattcatagtcatacagatgggcactcagatttttcgtcatcctttgagcacaataacatgactggcaaacatacttcaataagcgaacttctagaatttgaggggagtgctgatactggcaccaaaatatactcaactgacatgagaaataacgctgtgtctgcatcaagcttttcaagcattgcacaaaggtttcttgctaatacacttcagagaagaacttccaaatatactgatcttcctatgtcttctgagagggcaaatgctgatacaagtgcaaaatctgaatctactctaaatcctgttgtagaaccaagtgaagcggtatttgcagaggaaactaagtttgagaacaaaacagaaaatggaatggatggattgtccaaaacatcaatattttctagccgccattactctgagaaatcgtctccgccacttgagtacatgaaaatatcttttcaccctatgagcgcatttgagatgtcaaagctgaacctagatttctgtgatggaaatattcatgaaatttctgatgatatgatgttaccgacatttcagttactttcagagtcttccattccacagccaggcagtggttctgagtctgaagatgacacctttggtaggtcatatagttattcttcatatgatgatctgagtccccggctatattcaaactctgaggcatgggatcaagatgatggaactggactggaggaacatgagttatatgatgattcaaatcagataggatcctcaacagcacctttatctagctacatgggattcgagcagatgaacttatctgacatgaagtcagatatttcacttgcaaacgttggggatcagaatgtaataggcactttacaatcctgtactgttgaagaacttccaaactttgatacattgatgtccagaagtgatgatcaaaatggtgaaacccccattccacataatctggggaatatgacaccagatgaagatcagttgccaccaccacctcctctccccccaatgcagtggaggatgacaagacaaacaacttcactagaagaggaaacttgcattacaactaaagatatgcttagaaaaacttctagcctaccacatatacacacctctgcccaggaagaacactgtcctccaactgcaccattggatctacaagggcatgctggggaagtgggtgtccagaaaactggtggggtacgagaaattactaatcctcctagtatcatcgatataaaatcaagtttgcttcagcagatcagggataagtcagagcagctgaagcttaatggacatgaaaggtcaaaaaaagcagtaggcggtgacattaaaagcttagacgaaagggaggagttgcttcagcaaatcaggagcaagaccttcaatttaagacgcacaaacgcatctaaggcagatggctcatcacaatctacagccagttccaacgttgcagcaattttggagaaagccaacgctatccggcaggctgtggccagtgatgagggtggcgatgatgatacatggagtgatatatgaccacctaattgcagacgtgcatggtagtcttttcctgtatattaagctattacaagatgaagtgattaaatgtgaataccatccttttcttcattgtaattagattttgcaggtcttgttttgtacctttcttagttcatattagtgaatcctaccgtaggtcggctgtggtcgtggaaatgtcagagcatttccacattatgtaaatgcatctttattatttatttatgatagtgagaacagctgaatagctgataaaaataagcatactaatctatctttttatcattgtattgattttttttgcaatgataataatatggagcatgatgttgc

SEQ ID NO: 179864 - DNA, 193 bp, Zea mays
  Clone ID: MRT4577_95616C.1
ctcgatcggcttacactccgacaccatccacctattcacccgcctattcctccgcatggcggggtgcatcctctgcatatcgtctcccatagacactacctccgagtccgccatccccgcttcctttgcatcactcaaagccgccgtcgtaattcactgcaacatcccttaccctcgcgctgaccatcacaag

SEQ ID NO: 179865 - DNA, 962 bp, Zea mays
  Clone ID: MRT4577_95617C.1
gcattgtacctttatttctaaaatccaaacagtccttccgaaagcacctttaattcacttaatttttctaattacatttttaatcctaaaaccaactttaccagagagctcttgattttagacatccaacaaaatttatcccatgatttttggaattttctatgatttttagctcaatttacaagtttgctgataaaagaaacaacaaaactgagtacagtactgtgccgaaacctagcccagccgacccagtggcaggtagagttggcccacaatgaacagcccgcgaccgcaccacacatcttgcaaaaaggaccttcgcgctcaaactaatccacatcggtccttgccactattgatcttactcactgacagattcacttaagtccctcagattccactcttttacaaagttctagccacaacgccgcagtgcagaactccggcggtctgcgccagatcgaccacggtggcgcttcattgacgacggcgagggcatcgacacaggctctgatccacggtgaacgtagacacgtgtttaattcggcagcggggacactggagcacagttatcgacagcgacgacggaatagcgggtccgacaagctcaatcccatagcttccatgcggtagagttcaaattaagtgtgcagagagtatcactgaccttcgaagctgtcggtacgcgcgcgagattaaccggggatgacgcagttcaaagggtcgacggtgaagcggtctgcgacaacgttctgcggcagcgagaccctgttctgagcagtagacaccggtagagttaatgatccttcttcggtgagcttcacttgttgatggagagcacataacacgtgttatcttggtgtgtcactgcgcgactaagttgatctcagatttcacaaggaccataattaccaccattttattcatttcaccggctgatgcattggaacttactttacttg

SEQ ID NO: 179866 - DNA, 353 bp, Zea mays
  Clone ID: MRT4577_95618C.1
tagagcgcgttctcaccattctatggggggggggcgacgggaggtctcaggcctctaaggacagacactcctccgcgcgattgcaacgcggtgcttatcaagtcggcactccaccgacttgaggttatagacgcgtgctcggaccagtgcgaggtccacatggggcaggagtggctagcaagctgtcacgaccgcctactaggtagcatactgcgctcacgtcgcgcgtgcaggaaccagcgagctcaacatgaacgcgcggctgtactgccatgtcgacctcacgccggaactgcatgggatggaacacggtatcccaaagcctaagacaggccacaatccgtaatgggccg

SEQ ID NO: 179867 - DNA, 187 bp, Zea mays
  Clone ID: MRT4577_95619C.1
cggacgcgtgggatttgcaaaatccccaccgtcacagttcaaatgggggtgcccaaatcaggggtggggatctcgtagtcaaggcttgcggtgaacgacgagtacaacgcaaaatttcatgaactataaccgcggcacatctttccgttcattgtgttcacgatcgatgacactgccatggagaaca

SEQ ID NO: 179868 - DNA, 1834 bp, Zea mays
  Clone ID: MRT4577_9561C.1
ttgtaaaaaaaaaactccaaaagggggaattggggcccgggcctaatgctgcaatcgtgtcaagttaagctcattctttgaaacagtttcctctggtatatcctcgcaacattcttgtaactagcttggtagctagtacacttgaacaacaatcacgcgaggtacctagtaaggtctttagtatacgtactaatttgacaaataatcccacacatcacacatttgattgaaactaccagtctagttaatccccaacatcacacgctgctgttcgtcctaaccaactaatttcacgtacacgagatgagatgcgcacttgctatacggctatacatactacactgatacacctgcgaaatcgttctcgcatttcctcttgcgaatttttaaccttcttcactcacgtgccatgctgttaccacgtcccccagctcaacccggagctcctcccacccgaacgcctcgtcctcgtcgccgtggccgccctccagcctcagctccaccagcatcagctccggcgacacctccgacatctccatcgacatggccacgaggcccggcaggacgcccagcggcaggcgctcggcccccttcttccccacaatgaagtagccgagcctcgcgccggcctgcgcgagccgctccaccgcccgctccggggacgccgtcgtcatgaaccgcttctcgcggcggcgcctgccctcgccgaacaggcccgacaggtccagcccgggggacatggagatgatgtcgaaggcgttcagcgccggcggggcctggaacgccagctcgcgctccgcctggccgtccaggaggccgccgagctgggagtccacgctgagcgagcgcttgaaccaggggtggccggcgagctccgcgacggcgaggcgcgtcgccgggttcgggtccagcaggcgcgccacgaggcggcgcgccggctgcgacacccaccgcgggaccgtgtactcccggcggtgcgccctgcggcacatgtcggcgatgttggcgtcgtcgaaggggaggtggcccgcgaggaggacgaagaggatgaccccgcaggaccacgcgtccgccttggcgccgtcgtaggccctgcgccggagcacctcgggcgccgcgaacgccggggtgccgcacgccgtgtgcaggcgcccgtcgtcgcggaccgagtccgggagcgccgcgaggccgaagtcggacaccttgaggttgccctcggcgtccaggagcacgttctgcggcttcacgtcgcggtggaacaccccgcgcgcgtggctgtagatgagcgccgacgccagctggaggaacacgcgccgcgccgcgtgctcggggagcctgcgggacggcagcgacgccagccgggacaggaggtccccgcccggggccagctccatcacgaggtacaccttggagcgcgtcgccagcacctcgtggaggcggagcacgttggggtggctcaggcggcgcatggcggacacctcgcgcaggagccgcgacgccatgcccgtggcggccagcccggccttgtccagcaccttcacggccacggggtcgcctccgccgaggcagcgcgcgtggtataccttggcgaagttgccccggccgaggaggtggccgagctcgtacttgccgaggagcggggggccggccttggcggacgacttgctcttggccatggcgcgcgcggcaccaaggcggcgggcagggcaagccgccttcttcggctttggtggttagtttacagggtgctgccttggtggtgccaaggtatataaacaaacaaggagggagtggttgagtcttgtacgctgtttgtgtatgtatggcgctcgtg

SEQ ID NO: 179869 - DNA, 397 bp, Zea mays
  Clone ID: MRT4577_95620C.1
gcgtagctcggaattcggctcgagggtagaggctctattatttaattttacagatgggtggtttgtcggcggggttcaatgggaaaagggcgggaacaaacacccgaactgaccgaacgactatgcgacatgagagcatgtcattattcctgcaactacgcctaccaagatgtggcgcatgacatcactctaggagatgattatttttttagtgagtacccgattgtagataagaggttagcgcatgctgtaatcagattggagatggtacttaatctgatatttggcggaggtgaagctgttgatataccagtactagtgcagtcacagctgtaataagagggcgcatagctcttacaaggatgtgtccatcacgtcgtatgtacattaataaatg

SEQ ID NO: 179870 - DNA, 370 bp, Zea mays
  Clone ID: MRT4577_95621C.1
aggtggggttttttaaaaaactttatacggggacaaaattaaattagaggcccaagtagtgggaaacacaaaacaaccagtttcatgtgaacaggtggctaaaccacaaaaatgcacctgctctgcccaaaggcagctttaaatcaacagctgcctctgccaggggcaaataaatgttttgtttagataacgaacttgaagcgcaaaacaataaatccgcgacgcatcaaaaatcataaaactgtggcccattctcatggtacaggttacatatcccctctacggggcagtatttctgcaagaaatgtaaagagtctaagcctgatgccactaccatagattttgcctcacgctttcaagaatacacaaa

SEQ ID NO: 179871 - DNA, 605 bp, Zea mays
  Clone ID: MRT4577_95622C.1
gtaaaaggcaacagacaggataggctgcataaacatagagctggttcgtctgaacatttacatacaacccaaaaggtcacatcgcttcccggaaagagaaacaaaataaacaagagcaggaaaacccaaaaggtcggttcggttctttgatgatcccttccaagagaaagtagggaaaagaagaggaagaaaccacgaagaaagatgatacaagctcagaagacgttttcttcttcacagcacaccaacatcactgcaaggaagtgtctaagaggtaaacactggacactcagttaccgtcctcttctggccaggaggtgctgttagagatgaagagaggtcagatgtcttcagaacgcgcagcctcttcaccgaagaaacaaacatcccccaggggacatcgccaaccagcaccctatcgccttcataatcctcataaaccagagtgtactccccagttccatctagtaaacccgatatcgccacctcttcctgtgaacactcctttgcgccggcagccagagggtcttgttgggctgcaagaagcccccggaatagcttgtcgacagacagagacagctcatcgtaactaccggaggcactca

SEQ ID NO: 179872 - DNA, 787 bp, Zea mays
  Clone ID: MRT4577_95623C.1
ctcgagccgaacagacaggataggctgcataaacatagagctggttcgtctgaacatttacatacaacccaaaaggtcacatcgcttcccagaagagaaacaaaataaacaagagcaggaaaacccaaaaggtcggttcggttctttgatgatcccttccaagagaaagtagggaaaagaagaggaagaaaccacgaagaaagatgatacaagctcagaagacgttttcttcttcacagcacaccaacatcactgcaaggaagtgtctaagaggtaaacactggacactcagttaccgtcctcttctggccaggaggtgctgttagctgcatgacaaacgcgaggttatcagcaatctggacgcagccaaggtaatggagagatttgatcagttgtgtgttagagagaggtactgacagatgaagagaggtcagatgtcttcagaacgcgcagcctcttcaccgaagaaacaaacatcctgcaggtttgtctgccttcttcccattctgatgttcaagggatgctctgctagaggtggccagatttcttctgaaggcacgaactggaggccacccaataaccggggtatttggagatctgaagttggaccataagatagtgatgaagacatgagaatgaagcatagtagtggatgcatatatagacatgcattataatatgctgataaatgaaatatatatatatatatgctgtttgcttcctggaaatgattcatgttcagaacagatactaacagcttgaaatctaaagttttgtggtattctgc

SEQ ID NO: 179873 - DNA, 492 bp, Zea mays
  unsure (1)..(492): unsure at all n locations
  Clone ID: MRT4577_95624C.1
cacgccaancccaccacagcccagaaccgaccccccggccccgcccaccanccggggggcgcgcgggcacgccgacgcccacaccgccgacggcgagcnccaccncgccaccggcggcagcgaggggcgagggggcnaacaccgcaggcggaggaggagccgagcccngccgagccgaaggggcagcagncgccgagcgacgcgnnccnggcgcggggggccgnggcgcaggccgagnacaccgagaccaccggcaacggcaccaccacagacgcccacggccggcagaagcnccccgccagcaacaacaacgccacccacaacagcgacgggcacacacccaacgaccacgcagaggacggagncaccgacggcggagccgcgggggaagccaggcgggcgacaaaaccgcaaaagccccccgggacagagggaaggaagaccngaccaacaaggacggaggcgggaaagcagccacggccgcagcgaaca

SEQ ID NO: 179874 - DNA, 467 bp, Zea mays
  Clone ID: MRT4577_95625C.1
taataaattcagtcttctatagtaaaaaaaaaaaaataaaaaaaaaaaaaaaaaaacaaataggggaacctaaaaaataaagaaaagaaaaaaaaaaattaaaaaaaactaaaaaaaactgggggcggccgccttagagatcccaactctcctaccccttgatgccctctttaaacgttctttttcgggtcccctaaattaaataccctggccctcttttaaaaacttcatgatcgtaaaaaccctcgttttcccaaatttaatcgacttgctgcaaatcccctttacccaagttgtcttattagcaaaaaggccccccccgttcgcctttccaaaaagttgcccagccttattgcctaatgggcccccccctttaacgcccctttaagcccgggggttgttttttttccccccaaattaacctttacatttgcaaggtcctttagacccgtttcttttgttttttt

SEQ ID NO: 179875 - DNA, 280 bp, Zea mays
  Clone ID: MRT4577_95626C.1
gatttcttcttttattttttaagatcaggatgatctggtttaactttggggcgttaagacacatggccatggccctagggtagcatatgcacgccacacagtttgtacgatacgtggacagttgagagacagtaccacccacctaatccgccatagcccgtcttgcctgttaggcggagagcattaaggtgggaggagcacgcccttcagctcattcaggtactgcatccgtgggtcacccggcttgccccgggccaaggatgccaacaccctgtccacc

SEQ ID NO: 179876 - DNA, 351 bp, Zea mays
  Clone ID: MRT4577_95627C.1
caaaaaaaaaaaggcccccaaaaagggggtgttttttaaacctttgggttgtttccccctttttggaattcgaccttgacccccaacaaaggggttccctttcctaaaattgggaagcctcagttttttttaggggtgggggggcctgcggccaactaaattagctggggggggaggggccataccccgttgggccggttgaatcgaggggaattcaaagctttttaaaattggccgttggaagggtaaacggctttgggtttccatttcgccgggatgacctttttggggaagacctttttgccgaactttcttttaaggcgtatggaaaaggggccctttacccccttg

SEQ ID NO: 179877 - DNA, 323 bp, Zea mays
  Clone ID: MRT4577_95628C.1
ttttcgggcttttaaaaaaattaacaacgactgaacaacccacaaaaacacaccacaggtgcacaccaccatttcagacccaacacaaacgcttcctatgcatcaaacaccagccgaaaggacaaaccatcaaaggcactctctcccacagtactattagacacaaaaccaaacactacattaccaacattaaacacagaaaccatgcacacaccagcaccatcatgcaaagctaaccattgtcgcaacaaaaaccacaagcaagcacatcttcaagccaaaaatggtaacgcagtgcacccatcgatgcctagaagcaatgg

SEQ ID NO: 179878 - DNA, 221 bp, Zea mays
  Clone ID: MRT4577_95629C.1
ataggtgacacaaaataaaaaaaaaaaaaaaaaaaataaaaaaaaaaaaaaaaaaaaaaaaaaaaggacgtgccacgctccggatctcacaactagtcacaagcctgcttctccatattccacaatccacacatccggaccgagcgcgaccccacctcccagatctcatctgcgacgacctcctccctcccgatcccgctccgtctccccccaccgccacc

SEQ ID NO: 179879 - DNA, 1249 bp, Zea mays
  unsure (1)..(1249): unsure at all n locations
  Clone ID: MRT4577_9562C.1
cctcgaggccggccgggacagacccagtccccagctcttgcttgtattcttctcgccgagctgcgttgacaccctcgccatgagctcagggacgacgacaacggaggaggagagcggcaaggggccgccgccgcagcaccagcaccacttcgtgctggtgcacggcgcctgccacggcgcgtggtgctggtacaaggtggccacgctcctggcctccgcgggccaccgcgtcacggcgctcgacatggcggggtgcggcgccagccccgtgcgcggcgaggacgtggcgtccttcgaggactacagccgcccgctcctggacgcggtgggagcgcttccgcccggggagcgagcggtcctcgtcggccatagcttcggcggccagagcctcgcgctggccatggagaggtaccctgaacgagtcgccgtcgcggtgttcgtctcggccgccatgcccgccgccggcaagcccatggcgctcgtcttgcaagagttttcgcgagaaatagggccagatttttacatggactgcatatacagcaccggcagcgaacctgagcatccggtggagacacttctgctagggccagagtacttggccaagagactgtaccagctcagccctcctgaggacctgaccttggcaatggcgatggtgaggccgtctcgatggttcgaggacgacgcgacgctgaggagggatgacgggctgacggcgggcaggtacggcgccgttaggcgggtgtgcgtcgttgccgaggacgacgcgtcgtggtcggcggagttccagcggcgcatggcctcgtggagccccggcgccgaggtgaggggcctgcggggagccgaccatatgcccatgctctccaagccagcggacctctcggacatgcttgttgaggtagccaacaagtacagttccgatttggaggaccctgcctgatcgtagtaggatcagcgacgtatggtttctgaatcggtggtgatcgggaagatgttcaaatcttattgcatccacaccatcaccatgaaattattaagatgtacaatctgactttttgatatggtagggcttcattttgaaacccacaggcttctaaattccataatcaggtaggataatggaactagcttcattctatacatcagatgactattatgcctcttacttttctctatagncaaagaaaatctaagaatggaaacattatactgattttattaataaataatggttatctcagtttttatt

SEQ ID NO: 179880 - DNA, 354 bp, Zea mays
  unsure (1)..(354): unsure at all n locations
  Clone ID: MRT4577_95630C.1
gggnncntagtaaggcccttcgcaggggttgtttttttttccgtctttttggttgggaaaacttggtttaaacggtcccggggcccagttcccgtttaaaacgtccaatttccccccaaaggtccgggaaattgcccttgtccttgtaaaatgataaggggtgggactttttttttggggttttttttttttttttgggaacattgaactttcgggttttgacgccccagaaaagaaaagccttttttggggccctttaagggttgcccgggcagtttttctttgattttggcaataaggctttttttttggccgggccctttggggccgggggcttaggcccccccggttttt

SEQ ID NO: 179881 - DNA, 1814 bp, Zea mays
  Clone ID: MRT4577_95631C.1
cctcgagccggcaggaacacgccgccgtcttctgcggttctgccgtttactcctccactttggcctcctcacttgcaagatgaattacttacgcatcgtcgttggaattggatgacttattgattgtgcttgtggtcctgttacgtggtcttatttaatcttcgcctccagccatgggtaaggagaagtctcacatcaacattgtggttattggccacgtcgactctggcaagtcgacaaccaccggccacctgatctacaagcttggaggcattgacaagcgtgtgatcgagaggtttgagaaggaggccgctgaaatgaacaagcggtcctttaagtatgcttgggtgcttgacaagctcaaggctgagcgtgagaggggtatcaccattgatattgctctgtggaagtttgagaccaccaagtactattgcaccgttattgatgcccctggacaccgtgactttatcaagaacatgatcactggtacctcccaggctgactgtgctgtccttatcattgactccaccactggtggttttgaggctggtatctccaaggatggccagacacgtgagcatgctctccttgcgttcacacttggagtgaagcagatgatttgctgctgcaacaagatggatgcaaccactcccaaatactccaaggcacgttatgatgagattgtgaaggaagtctcatcttacctcaagaaagttgggtacaaccctgataagattgcatttgttcccatctctggttttgagggtgacaacatgattgagaggtccaccaaccttgactggtacaaaggcccaaccctgcttgaggctcttgatcagatcaccgagcccaagagaccctcagacaagcccctgcgtctccccctccaggatgtgtacaagattggtggtattggaactgtgccagttggtcgtgtggagactggtgtcatcaagcctggtatggttgtcacctttggtccaactggcctgactactgaggtgaagtctgttgagatgcaccatgaggctcttcaggaggcccttcctggtgacaacgttggcttcaacgtgaagaatgtcgcggtgaaggatatcaagcgtggttatgtggcctccaactccaaggatgaccctgccaaggaggctgccagcttcacctcccaggtcatcatcatgaaccaccctggccagatcggtaacggctatgccccagtgctggactgccatacctcccatattgctgtcaagtttgctgagctgattaccaagatcgacaggcgttctggcaaggagcttgagaaagagcccaagttcttgaagaacggtgatgctggtatggtgaagatgattcccaccaagcccatggtggtggagacattctcgcagtatcctcccctgggtaggtttgctgtccgtgacatgagacagacggttgctgttggagtcatcaagagtgtggagaagaaggacccgaccggtgccaaggtgaccaaggctgctgccaagaagaaatgatgcgacctgtcgttgatgcagcgtctgcttttccaatacgtagctgagatgttccattttggcataagttttgtatgctgtggttgctgacttgctgttaccttgtgaactgttgagctctactattgggtgcccgtttatctgtttatgtagcatcttgttatttcacctattgcaatacaagaatgctatatatgacatatgttagacatttgggcaatgttaaatggatttttaccaagtcgtctagttaaatttatgcccttgttccattttcaatagtttatttttttttgg

SEQ ID NO: 179882 - DNA, 483 bp, Zea mays
  unsure (1)..(483): unsure at all n locations
  Clone ID: MRT4577_95632C.1
acgcgggagcgcaacaaagggtcattattccacaaggtcactttggttctaagttcactatattccaaggttcttcccaccagtacttttatgggcctctaaacccacctgtgggaggctatttggttcaacaagagaactgtggggagcgggttacaacaacacaaatgcgcaattgcgacaaacaatacttggcgcatctaacaatacaaaccatcgcaacgcaacagcaacaacaggtcctaccagcactgagccacctagccatggtgaaccctgtcgcctacttgcaacagcagctgcttgtgttcaacccacttgctctattaaacgtagntgcaaaccagcaacaacaacaactgcaacagattctgccagcgcttagtcaactagccatggtgaaccctggcggctacctacaacagcaacaactggttttatctatcccgctcgctgtggccaatgcacctacatacctgcaac

SEQ ID NO: 179883 - DNA, 1939 bp, Zea mays
  Clone ID: MRT4577_95633C.1
ccggccggggcagcacattcttccccgagtcgccgtcgtctgctccgggctgctgttctgcgcctccacaaggctttggcctctgttgtaagatctgctttatttccaccctactaatgtgtaccaggccttttctaagctggtcacagtggttgcaacttcagatcgatatctaagctgatcactgtgtttgcgacttcagatcgagattctgatcctttagtattgtgtgatttttactggtgtttctaataatcgattcatccggtgtaacagttttaagcttcacctccagccatgggtaaggagaagtcccacatcaacattgtggttattggccatgtcgactctggcaagtcaaccaccaccggccacctgatctacaagcttggaggcattgacaagcgtgtgattgagaggttcgagaaggaagccgctgaaatgaacaaacggtccttcaagtacgcttgggtgcttgacaagctcaaggctgagcgtgagagaggtatcaccattgatatcgctctgtggaagtttgagaccaccaagtactactgcactgtcattgatgcccctggacatcgcgacttcatcaagaacatgatcacgggtacctcccaggctgactgtgctgtcctgatcattgactccaccactggtggttttgaggccggtatctctaaggatggccagacccgtgagcatgctctccttgctttcacccttggggtcaagcagatgatttgctgctgcaacaagatggatgcgaccactcccaagtattccaaggcccgttacgatgagattgtgaaggaagtttcatcctacctcaagaaggttggatacaaccctgacaagattgcctttgtccctatctctggttttgagggtgacaacatgattgagaggtccaccaaccttgactggtacaagggtccaaccctgcttgaggctcttgaccagatcaccgagcccaagaggccttcagacaagcccctgcgtctgcccctccaggatgtgtacaagattggtggtattggaactgttccggttggtcgtgtggagactggtgtcatcaagcctggaatggttgtcaccttcggtccaactggcctgaccactgaggtgaagtctgttgagatgcaccacgaggctctccaggaggcccttcctggtgacaacgttggcttcaatgtgaagaacgttgctgtgaaggatctcaaacgtgggtacgtggcctccaactctaaggatgaccctgccaaggaggctgctagcttcacctcccaagtcatcatcatgaaccaccctgggcagattggcaatggctatgccccagtgctggactgccacacctcccacattgctgtcaagtttgctgagctcataaccaagatcgataggcggtctggcaaggagcttgagaaggagcccaagttcctgaagaatggtgatgccggtatggtgaagatgattcccactaagcccatggtggttgagaccttctctcagtatcctcctctgggtcgttttgctgtccgtgacatgaggcagacggttgctgttggagtcatcaagagcgtggagaagaaggacccaactggtgccaaggtgaccaaggctgcaataaagaagaaatgatgcgtcctcccatgtgccctcgtttattttgtacttgtgcccgtatacttcgatctgttaaaatctattggttgtgtgccctgtgtctgttgtttgggtatctatactgttattttgagacatgttgacttgcatggtcatctggattgggttcgcatttctgagtcatttgtcttgacatgaaaatcttgctttttttcttgatcttaaaacctaggttgtctttgttgcggggttgattctaatattaaaggggacatttgggattttgcgcaaaaaaaaaaaaaaaaaagcggcc

SEQ ID NO: 179884 - DNA, 285 bp, Zea mays
  unsure (1)..(285): unsure at all n locations
  Clone ID: MRT4577_95634C.1
nnccttaatacccttttttttttttttattaaaggtgtttttttttgagaaagtaccgggggttttaccccccaaaaccagggaaacgaacattaccaagcgaaacagcaaaaaaggtcgggaaatgaggagaagaccggaaaaaacccaaaaaaaaataaggtggaaagattggcaccaaccaaacgcgaaaaaagattattcactgaatgcaataagcaaagaacaagcacaagcccacatataacagaaccaaatgaggggcaaacttaagggcccaaggac

SEQ ID NO: 179885 - DNA, 347 bp, Zea mays
  Clone ID: MRT4577_95635C.1
cggacgcgtgggtgagcattcacaaacacaccaagcgaagcacattagcaacaacctagcggcaatggctaccaagaggtggtgcctccttgcgcttcttgcgctttttgcgagcgcaacaaatgcgttcattattccacaatgctcacttgctccaagttccattattacacagatcctcccaccagttactttaatgggcttctaacacccatctttgcaagcctataggctacaacaagcaattgctgcgatgcgtttacaacaaccaattttccagttgcaacatctattcttggcacatctaacatttccaaccattgcttcgcaatatcttcaacaatttc

SEQ ID NO: 179886 - DNA, 420 bp, Zea mays
  Clone ID: MRT4577_95636C.1
acgagttactaccagcactgatccacgtagttttggtgaaccctgacgtctacttgcaagagcagctgcttgcatccaacccacttgatgtggcgaacgtagctgcaaaccagctacaacaacagctacaacagtttcagccaacgctcagtcaactagccatggtgaaccctgacgtctacgtacaacaacaacaactgctttcatctaacccgctcgctgcgggcaatgcacactacatacctgcaacaacaattgctgcaacagattgtaccagctctgactcaactagctggggcaaacccatgtgcctacttgcaacagctgcttacatgcgaccaactgactctggcgaactctgctgacgacctacaacagcgacaacagttacttaatccattgttagtggctaacccattg

SEQ ID NO: 179887 - DNA, 218 bp, Zea mays
  Clone ID: MRT4577_95637C.1
cggacgctaggcggacgcgtgggcggacgcgtggggtcttcaacctcgagtcctcaacatcactgtcctgacgcctcattctgcggtcgccgtcgcctagctgcgaagtgctcggtctccacctctgtttcatctccctgtcggaccaaggacaccttgacgtcgacttccttcactggactgcggccaacaccgggctccaagcatcctgactcttg

SEQ ID NO: 179888 - DNA, 493 bp, Zea mays
  Clone ID: MRT4577_95638C.1
ggggataaatctcaatcaatatattgtttatttctaggaaacacatgtcggtttgggggccccattgtcgagtccatctaatatgtaatctaaaagagggcccctccaacgatgggttgctgcagggcagggttcataaaaaaaaactggttgtatggcaccaattgttgttgctgctgcagaaaggtaccaaccaatgggttacccactgccaatggataaagaaactggtggcgctgttgtaggtccccaccaaagtttgacacacccagttggttgaatggaaccaactgttgtaagtaggcatcagggtttgccacagttagctgagtcaaagctggaacaatttgttgcaccaactgttgttgaaggtacttaggtgcattgcccaccgcgagcgggctaaataaaagtagttgtaggtaaacggcagggttcaccatggctagttgactgagcactggcataaactgttgcaactgttgttgttgct

SEQ ID NO: 179889 - DNA, 770 bp, Zea mays
  Clone ID: MRT4577_95639C.1
gccggccgggcttcggatcacctatagtatttcgagcattctcaagcacaccaccgccaagcatattagaaacaacctaacaacaatgtgctaccaagatattatccctccttgcgcttcttgcgctttttgcaagcgcaacagaggcgttgcattattccacaatgctcactggctccgagatccattatgacacagatcctcccaccagttacttcaatgggtttcgaacacccagatgagcaagtctataggatacaacaagcaattgcggtgagcgtcttacaacaaccaatttcccagtagctacaacaatccttggcacatctaacaatacaataccatcgcaacacaacagcaacagcaattcctaccagcactgagccacctagccatggtgaaccctgccgcctactcgcaacagcagatgcttgcatcaaacccacttgatctggtaaacgtagactgcaaaccagccacaacgacagatgcaacagtttctgccagagctcattcaactatgcatggaggaccctgtcgcctacctactacagcaacaactgctttcatctatcccgatcgctgtggccaatggacctacatacctgcaacaacaattggtgcaacagattgcaccatgatctgactcattctagctcgtggcaaaccctgctgcctacttgcaacagctgcttccattcaaccaactgactatgtcgaactctgctgcgtacctacaacagtgacaacaggtacttaatccactagcg

SEQ ID NO: 179890 - DNA, 314 bp, Zea mays
  Clone ID: MRT4577_9563C.1
gaaataacaatatatatgtaatcttagtaaattaattgcaacaattcatctttctacagggtacctttctgttcactggaagcataccgctaccacagtaaacaaaggaacatgaacctatgttataaagaaaaaagatcataaattgaagctaatatcacatgaacatacagaacaacaaataaactagttccaagccccaatcaggtcaacaatattcttttatggacgtaacatatgcaaaaatgcctaaacatctacactaagaatcagagcaagaatcctaaaaccaaagcgatctcatcttatcatga

SEQ ID NO: 179891 - DNA, 559 bp, Zea mays
  Clone ID: MRT4577_95640C.1
cacgcgtacgtaagctcggaatccggctcgagattaaaggttatctctaaggtcctaaacaatccttctttcaaaaacataccgagaaaggtgtggaaatgacgacaccatcattggtagagtctctagttcttcaactccatgagatctcagctgtcaaatttggcaacttcaagctcaaatctggcatcttctcaccaatctacatagacctccgcctcatcatatcttacccttctctcctccaacagatctttcaaacccttatttcttcagtctcttccacttcctttgacctcgtatgcggtgtcccttacactgccttacccattgctacatgtgtctctcttgctcaaaacattcccatggtcatgcgccgcaaagaaatcaaagattatgggcctgctaaagctattgaaggcgatttcaagcctggccaaagttgcttaatcattgaggatttggttaccagtggcccgtcaggtttggaaactgcggcgcctttgcgtgctgggggaataaagatcagtgatgctgttgggttgatcgaaagagagca

SEQ ID NO: 179892 - DNA, 489 bp, Zea mays
  Clone ID: MRT4577_95641C.1
gcgcctccatttcggactctgtcccttgcaagttcaatctcacctccaaccatgggtaaagagaagtcccacatcaacattgtggttattggccatgtcgactctggcaagtcgaccaccacaggacaccttatctacaagcttggaggcattgacaagcgtgtgatcgataggttcgagagggaggctgttgaaatgaacaagcggtccttgaagtacgcgtgggtgctcgacaagctcaaggctgagcgtgagagaggtatcaccattgatatcggtgtgtggaagtttgagaccactaagtactactgtacggtcattgatgcccctggacaccgagactttataaagaacatgatcactggtacctgccaggctgactgggctgtccttataattgactacacaaatggaggagtagaggctaggatttcaaaaggtggagaaactcgtgaacatcctctcctcgcgttaaccctatggagtgaa

SEQ ID NO: 179893 - DNA, 610 bp, Zea mays
  unsure (1)..(610): unsure at all n locations
  Clone ID: MRT4577_95642C.1
ttttcaatactcttgggcgcttgacaagctcaaggctgagcgtgcagtataggtatcaccattgatatcggtctgagtaagtttgatacccatatactactgcactgacattngatgcccctgcaacatacgcgatttcatcaagaacatgatcacggatacctaccaggctgactgcgctgctcttatcattgactccaccactggaggctgtgaggccggtatctataaggatggccagacccgcgagcatgctctccttgctttcacccttgaggtcaaccaaatgatttgctgctgcaacaagatggatgcgactactcccaagtattccaaggcccgttatgatgagattgtgaaggaagtttcatcctacctcaagaaggttggatacaaccctgacaagattgcctttgtccctatctctggttttgagggtgacaacatgattgagaggtccaccaaccttgactggtacaagggtccaaccctgcttgaggctcttgaccagatcacggagcccaagaggccttcagacaagcccctgcgtctgcccctccagnatgtgtacaagattggtggtattggaactgttccggttggntcgtgt

SEQ ID NO: 179894 - DNA, 682 bp, Zea mays
  Clone ID: MRT4577_95643C.1
aagttatttttatctccgctccgacctctctactatccatgctcctccgactccttcttagttagctaagtacagggatcaacatgactcagtccaaggagaagcactgccaattgaaggccgacgccggcagccgtccaagacctacccgcatgaggatcatcacccgtccgtaagaacggcttcatcgtcatcacaaaccgcccgtgacaggttgtgcaggtacctacctcagagactggtaagcatgaacatgtcaaatgccattttgttgccatacaaatattcctagggaataagctccaacatattgctccttcgtcgcacaactgaggtattccgcatgtgaaacgcaatgactaccatctgattgatatatcataagatgcatttgtgagccttcttacttcagatagcaactctacacgatgatcttatactcctcaactgatgagactcttgcgggccagatccaggaagggttctgaaagcgacaaggatcttgctgtgactgtctcactcagctatgggggaggagcacatctgcgcgctgaatgatggtgcgcccaagaaacttcgctgacttggcatactgtatctcactatctagatcgaatagagaagtgtatcaagcattgctacagagacatgcatctggcttgagctggcttttgctatggca

SEQ ID NO: 179895 - DNA, 389 bp, Zea mays
  Clone ID: MRT4577_95644C.1
gagctatcgaaccacgttacgcaccatagaacatacccgtgagaagctaagaccccgtcgttgctcaccacagcatcatcgacgagccgtgctagctcaaggatggagaacaacaggcagcagcagcatgcgccgtcgacgccaggtcagatcctgatgcgatcgactgagagtacgagtaacatggatgctgagacatgacgtgcatgcaggctacccgactgcggctgcaagcttgtagcaggaacacgtaggcacgaaaggacgactccggcagaagacgacgcttctcggggataaaggcttcatcgaatgatgcatctaggcgctctgatgatgctggatctgcgagatgtgctgcgactaggcacgcagctagcggtcatcta

SEQ ID NO: 179896 - DNA, 680 bp, Zea mays
  Clone ID: MRT4577_95645C.1
ggccgcttttttttttttttttttgtttttttttttttttttttttttttttttttttttttttttttttttttttttttttttttgggaaaaatctcaatcaatatattgattatttttaggaaacacatgccggaatgggggccccattatcgagtccatctaatatgtaatctaaaaaagggcccctccaacgatgggttgctgcctcaacaaaacagggtttatcaaaaaaaactggttgtatggcaacaattgttgctgctgtaggaaggcagcgaccaatgggttagccactgctaggggattaagtaactgttgccgctgttgtaggaacccaccaaagttcgacataatcagttggttgaatggaaccagctgttgcaagtaggcaacagggtttgccacaactagctgagtcaaagctggtacaatctgttgcaacaattgttgttgcaggtatgtaggggcattggccacagcgagcgggctaaatgaaaacaattgttgctgttgtaggtaggcggcagggttcaccatggctagttgactgagcgctggcaaaaactgttgcacctgttgttgaggctggtttgcaactacatttgccaaagcaagggggtttgatgcaagcaactgctgttccaagtaggcggcagggttcaccatggctagggggc

SEQ ID NO: 179897 - DNA, 421 bp, Zea mays
  Clone ID: MRT4577_95646C.1
atgaatttggagtgcggtgggtgcactcaattgcgcaggtgaaaattagcgacaagtgctgcgtgtgtcgtgctgttaacaacaagatggggtaaagccaccctcatatggtggacggtaagggcttctatccgcatgccattgacaagagcgtgctggaactgggtctaggcactggtgcccccaccgacagaagccatgggttgtgaacacagtgcgaggacacgatactgccttgcgattcgatcgctgagcagctggcagtgcaggcctaagaggataggtaacgacgataggaggatgggcgacaccaaggtgaatggatgtaacatgcgccccagcatgaagtgaagtcatcaactgtaggcgtatgacagggcggaagagcgggatagggaacgggaggaaaaggaaggggcgg

SEQ ID NO: 179898 - DNA, 429 bp, Zea mays
  Clone ID: MRT4577_95647C.1
ggggccaaaaaagttaattactataattgggggcccgggtaattaaaacaaaaacaaaaaaagcggggcttgcaaaagtggaaaaaccccacagggggggttttattcatccaaaggaaggccccccgtttaaaaaagacggggggctttgaatctgcccgcccgcgggcggggggcccaaccaccccaggaaggatcggggggacctttggggcccaaaagggaaaaaacggggagtcaacgttgggggggcccatcggggacccccgcccggggggggcaatttttttgaacaccgttttgaaacccaggcccaggcccccgttgttggactggcccacaaaccccgccacaaaggacccccccggcgaacgggttttaacccttaagcacttgccggaggggggctggcccttttgcccggggggc

SEQ ID NO: 179899 - DNA, 2599 bp, Zea mays
  Clone ID: MRT4577_95648C.1
cgacggcctgaccgctcccaccttctccgcctcgtcgtccgacgttcctgctgcataactaccacctgcagacctcctatcgtttcttcctcgcccggtcgtccccctttcccccgcggccccgcccccatgtccctcgcgtacgcgcccataccgtaccgctcccgaaacactagggcgcggcacgcaccctcctcgtgagcgcggggtcgggcgcaggcggcatggcgccgcaggccgcggggtcgacccctgcggtggcggcgctcgggttcctcctcccgacctgctgggagatcgaggtcacgtgcgccgccgcgatgatcctcgtcgcgctctacgctgcgtacgagctcctcaacccgcgccccttccaggctgcagcggcgggcgacgccgacgagctcctcgtgcgggggctagacggcaccaacaaggggggtgcgagcggccgttctgcgtatgtagtgaagctagaattgttggctgctaggaatttgatggcggcgaacttaaatgggacatctgacccgtatgcattgatcacttgtggtgcagagaagcgtttcagctccatggttcctggctcaagaaacccaatgtggggagaggaattcaatttttttgttgatagtcttcctgtaaagataaatgtcacgatatatgactgggacattgtatggaaaagcacaatccttggttctgttactgttcctattgagtctgagataccgagtgggccagtttggcatacacttgacagcacatcgggccaggtttgtcttcatattaaagtaatcaaggttcatgaaagttcctccagggctctcaatagctcagctgaggctggcgctcgtagaaggatttccttggataagcaaggtcctactgtagttcatcaaaagccaggtcctttgcagacagtttttgaactacctccagatgaggttgttgaccacagttattcatgtgcacttgagaggtcatttctgtatcatggacgcatgtatgtctcttcatggcatatttgctttcattcaaatgtcttctcaaagcaaatcaaggttgtgattcctttgagagatattgacgagataaggagaagtcagcatgcagttattaatccagctattacaatatttcttcgaatgggagctggaggatttggtgttcctccattaggatgtccagatggaagagtcaggtacatgtttgcatcattttggaacagaaaccatacatttagagcattgcagcgagctgtgaagaacttccaaatgatgatagaggctgagaaacaggaacgtgctcagtctgcattacgtgcacatagtagttcaagaaaaaatagcaagaaggagataaatatcccagaagattgtgctgcattaacaggacagttacaaccttttgtcaaagaagaagttttggtccctgtattcaatggaacttttccatctactgcagagcacttctttagtattcttttaagtgatgactcgaactacataacagagtatcgaacatttcggaaggataaagatataaatctgggccaatggcacattgcagatgagtatgatggccaggtgagggaacttaattgtaaatcaatatgccatagtccaatgtgccctccttattcagcgatgacagagtggcagcatatagttctttcagctgacaaaatggatctggtatgtttctactgtacaacagaatgttccattatgacagataatagttcttggtaatttgcttgatctcataagtaatatggatctgggtcatgttgttttttctttgtaaaaggtgtgtctatttttggctaagggtatgagtaggtggatgtgcgttgtttgggctcctgccattttttcttcttaatataatgatgcgtagctctcctgtggattcaagaaaaaaaaaatattgacctctcaccattatttgtaggtatttgagacagtacagcaagtacatgatgttccatttggttccttctttgaggtgcattgtaggtggtctgtgaaaactatcagttctagcctgtgcagtcttaacataagtgctggtgcacatttcaagaaatggtgcataatgcagtctaagataaagagcggtgctgtggatgagttgaagaaagaagtcaaggaaatgttagactttgcacaggggtatatgctcaaagttaggtctccggaccaagagaacagtaatctcgcccaacaagacaacgtggcaccggatgcagtgtctggcgatcaatgattatttcaggttgtgcctcctgatttagggtggggtgacagctgccatgacaacgaattatgatgttatacacagaagggcaggtggacctgtaactagtccacatgaaccacatctaacatgttaagctgacttccaaaagatgggtggaccgtgtattgtgtgtgtaaacttcttttcctttcattccgctatccattctggcagtttggctgatgtatatagttgtaaaaacaagtatagtgctgactgcggacagttcagcggtgcgttgtttcaagataaacaaagaaagaaacaaaagagaaatattcgcaccagaaccatc

SEQ ID NO: 179900 - DNA, 1035 bp, Zea mays
  Clone ID: MRT4577_95649C.1
gggattttacctattgcccccctgtttttccctttgtgaagctattgcttacccggctagcttcccggagtcacagaacatcatcagctcactctcttctccatcctcttctcggttatcccaccaactccccaaccccaccccaaagatcaggtttcgatccgcgaacccactcccaatcctccaaagatcaccgctctcagacccctcctccccggcaatggccgccggtggccccgcgctgctgcgtgccctcctcgtcgcggccctctgcgccgtcccgtggcgggccgaggcggcgatcgggatgaactggggtaccgtgtccaaccaccgcgcgccgcctggcgtggtggtggacttgatgcgcgcgaatcggatcagcaaggtgaagctcttcaacgccgacccgggagtcctgcgcgcgctcgccggcagcggcatccaggtcatggtcggcgttaccaacgacgagctcgcaagcatcgcggggtcgcaggcggctgcagacgactgggtcgcgcagaacgtgtcccgttacgtcggccgcggcggcgtcgacatccgatacattgctgtgggcaatgagcctttcctgacaagctaccagggtcaattccaatcatatatcattccagcgatgacaaatattcagcaatcactggtgaaagctaatcttgctagctatgtaaagctagtagttccctgcaatgctgatgcttatcagagtgcttctgttccatctcaaggagtatttaggactgaattgactcagctaatgacccagctggctgcttttctgagttctagtggggctccatttgtcgtcaatatctatccattcctcagtctttatcaaaattcagatttcccacaagattatgcgttctttgaaggatctactcacccagtagtagatggtccgaacgtgtactacgatgcatttgatgggaactttgacacattaatttctgctctcagtaaaattggctacgggaacctaccaattgcaattggtgaaattggttggcctac

SEQ ID NO: 179901 - DNA, 386 bp, Zea mays
  Clone ID: MRT4577_9564C.1
ccccccccccaaaaaaaaattaaaatttatgaatgggattacaaaaataccctaccaaaaaaaaaaaattccaaaattgggaggcccccgtcaaaaaaaaaaaaaaacgcttggttttgggagccaccaaaaaaaaaaaaaaatccaacccccgggtttatatattggggggaaactaaaaaaacccgaaaaaaaaaaaaagcacccaaaaaagcatatattttaaaaatatcccggtcaggaaaatggttaaaaaacacgaaaaccctcttttcaaaccaaaaaaatttccaatggcgtttttaaaaaaaaacaatgtttttttacccgaaccaatatcatttatgtccacattgaaaaacctcaccccctggcattaaaatttt

SEQ ID NO: 179902 - DNA, 775 bp, Zea mays
  Clone ID: MRT4577_95650C.1
gcacgaggccaggtgagggaacttaattgtaaatcaatatgccatcatccacagcggcaacgttattcagcgatgacagagtggcagcatatagttctttcagctgacaaaatggatctggtatttgagacagtacagcaagtacatgatgttccatttggttccttctttgaggtgcattgtaggtggtctgtgaaaaccatcagttctagcctgtgcagtcttaacataagcgctggtgcacatttcaagaaatggtgcataatgcagtctaagataaagagcggtgctgtggatgagttgaagaaagaagtcaaggaaatgttagactttgcacaggggtatattctcaaagttaggtctccggaccaagagaacagtaatctcgcccaacaagacaacatggcaccggatgcagtgtctggcgatcaatgattatttcaggttgtgcctcctgatttagggtggggtgacagctgccatgacaacgaattatgatgttatacacagaagggcaggtggacctgtaactagtccacatgaaccacatctaacatgttaagctgacttccaaaagatggttggaccgtgtattgtgtgtgtaaacttctttttcctgtcattccgctatccattctggcagtttggctgatgtatatagttgtaaaaacaagtatagtgttgactgcggacggttcagtggtgcgttgttcgaagataaacaaagaaagaaacaaaagagaaatatttgcaccagaaccaaaaaaaaaaaaaa

SEQ ID NO: 179903 - DNA, 387 bp, Zea mays
  Clone ID: MRT4577_95651C.1
agaacggtcaaccctgtatccgtccgatgctattactgctggactctggaatgttattacagagtccagcagtaatagcatagaacggtcaaccctgtatccgtccgatgggaatcctatatgccgatcttcttctcaaacttctggactctgtaataacattccagctgctttcgcaccatggtagttggttttggtagagacaagtctgttacaatttttttaccttagctttccaattattgtgtcgcaataatcgaattaattgttgctgggggattttttttggggggtgggtgggtggacatgcatttgttggctgggatgtatccatgatgagagggggttactacctatttattgccattgaatggaattggtccattt

SEQ ID NO: 179904 - DNA, 717 bp, Zea mays
  Clone ID: MRT4577_95652C.1
agctcactctcttctcctcctgttctcggttatcccaccaactccccaaccccaccccaaagatcaggtttcgatccgcgaacccactcccaatcctccaaagatcaccgctctcagacccctcctccccggcaatggccgccggtggccccgcgctgctgcgtgccctcctcgtcgcggccctctgcgccgtcccgtggcgggccgaggcggcgatcgggttgaactggggtaccgtgtccaaccaccgcgcgccgcctggcgtggtggtggacttgatgcgcgcgaatcggatcagcaaggtgaagctcttcaacgccgacccgggagtcctgcgcgcgctcgccggcagcggcatccaggtcatggtcggcgttaccaacgacgagctcgcaagcatcgcggggtcgcaggcggctgcagacgactgggtcgcgcagaacgtgtcccgttacgtcggccgcggcggcgtcgacatccgatgtggagcattggtaattcgaattatgtgaagaagctggtccatttgctcatcttttgttcagtttggtgcctttgctaagatatcgatacattgctgtgggcaatgagcctttcctgaccagctaccagggtcaattccaatcatatatcattccagcgatgacaaatattcagcaatcactggtggaaagctaatcttgctggctatggaaagctagtagttccctgcaatgc

SEQ ID NO: 179905 - DNA, 2417 bp, Zea mays
  Clone ID: MRT4577_95653C.1
cgggtcctcccccctgcataacgcggacgcgtgggttccttcctcccctggtcgcccccgcctccatggccctcgcgtgcgcgcccataccgctcccgagtccctaggacgcggcacgcacccttctcgcgggcgcgggcgcgggcgcgggcgggggcgcgggcgcgggcgcgggagcaggcatggcgtcgcaggtcgctgggtcaaccccggcggtggcggcgcttgggttccttctcccgaccttctgggagatcgaggtcacgtgcgccgccgcgatgatcctcgtggcgctttacgttgcctacgagctcctcaacccgcgctcctcgcaggcggcagcggcgggcgacgccgacgagctcctcgtgcgggggctggacggcgccgacaagttcaaggggggtgtgagcggcccctctgcctatgtagtgaagctcgaattgttggctgcaaaaaatttgatggcggcgaacttaaatgggacatctgacccatatgcattgatcacttgtggtgcagagaagcgtttcagctccatggtccctggctcaagaaacccaatgtggggagaggaattcaatttttttgttgatagtcttcctgtaaagataaatgtcacgatatatgactgggacattgtatggaaaagcacaatccttggctcttttactgttactgttgaatctgaggtaccgagtggaccaatttggcatacacttgacagcacatcaggccaggtgtgtcttcatattaaagtaatcaaggttcatgaaagttcctccagggcaataaatagctcagctgaggctggtgctcgtagaaggatttccttggataagcaaggtcctactgtagttcatcaaaagccaggtcctttgcagacaatttttgaactgcctccagatgaggttgttgaccacagttattcatgtgcacttgaaaggtcatttctgtaccatggacgcatgtatgtctcttcatggcatatttgctttcattcaaatgtcttttcaaagcaaatcaaggttgtgattcctttgagagatattgatgagataaggagaagtcagcatgcagttattaatccagctattacaatttttcttcgaatgggagctggaggatttggtgttcctccgttaggatgtccagatggaagagtcaggtacaaatttgcatcgttttggaacagaaaccatacatttagagcattgcatcgagctatgaagaacttcgtaatgatgatagacgctgagaaacaggaacgtgctcagtctgcattacgtgcacacagtagttcaagaaaaaatagcaagaaggagataaatgtaccagaagattgtgctgcattaacagggaagttacaaccttttgtcaaagaagaagttttggtccctgtattcaatggaacttttccctgtactgcagaacagttcttcagtattcttttaagtgatgattcaaattacataacagagtatcgaacggatcggaaggataaagatataaatctgggccaatggcacgttgcagatgagtatgatggccaggtgagggaacttaattgtaaatcaatatgccatagtccaatgtgtcctccttattcagcaatgacagagtggcagcatatagttctttcagctgacaaaatggatctggtatttgagacagtacagcaagtacatgatgttccatttggttccttctttgaggtgcactgtaggtggtgtgtgaaaactatcagttctaactcgtgcagtctcaacataagtgctggtgcgcatttcaagaaatggtgcatcatgcaatctaagataaagagtggtgctgtggatgagctgaagaaagaagtgaaggtgatgttagactttgcgcaggggtatatgctcaaagttagctctcctgaccaagagaacagtaatctcgcgcagcaagacaacacggcgccggatgcgccttctgatacagggtgacagccgccatcacatgacaacgaatcatgccattacgatgttatacacagaagggcaggtggaccagtaactagtagtccacatgaaccacatctaacatgttaagctgacttccaaaagaatgggtggaccgtgtgtagcgtgttaagttcgtttcctgccattgctctatccgtttttggcagtttggctgatgtatatatatagctgtaaacacacgcaaatataaagtggtggctgtggcaggccagtgtgttgtttgagtataaaaacaaagaaagaaacggaagagagaaatatttgccacagaaccaacgcttctcgagtcacagactcacaggggggcatatgttgtgcaaataaaagcttgatgtcctagaaacaactttgcaactgtcagtttgttcaaaaaaaaaaaccaagggcggccaatatagagga

SEQ ID NO: 179906 - DNA, 679 bp, Zea mays
  Clone ID: MRT4577_95654C.1
ctcgaggccggccgggaccaatttgcgaccaccccccatctccactccaccccaaaccgtcgccatgttcgccgcccgctctttcgcccgcgccgctccgcgccaggccattgcccgcgctcctgcccgcgccggccgccgcaactacagctccgagagccccaagcaatttgccggtgccgaggacaacgagttcaaccgtgagcgtgctcacattgagcagcatgccggcgagtctggcgagttctggcgcaagctttcgctctacgtcgccgtcccctgcatcatcgtcgccagcgtcaacgcaaaggtgaggtgggatgcccactgggagcacgtagcccacgaggagcacgagcacccccgctctgagaggcccgagtacccctaccagaacattcgcaccaagaactacttctggggagacggtgacaagacccttttctggaacgacaaggttaactaccacaagaaggacgagtaagcgctttgcgcgtcactgcttctatacaagtgatgtcatatatgccattctcaagcctaaacccccttatctagagagcaaaccgccagggctgaatgtgtgtacatagtacgacgagagcaagcatgctgagagagacggtagatcagcaaatgcatttttcccttttataaaaaaaaaaaaaaaaaagcggcc

SEQ ID NO: 179907 - DNA, 1196 bp, Zea mays
  Clone ID: MRT4577_95655C.1
aaaaaaaaaaaaaaaaaaaaaaaaaaaaaaaaaaaaaaaaaaaaaggttcaactcctaccactaccacagcaccagcgacggaccgggcaggcagagaaaaagcagaccagacgagacctctcgcgttccgtcctcctccctgcccctgctgccgttccccttcttcctcagttctcccgcccgctgctgccctccgtccgcgtccagatcccgccaccaaccgatccggcgccctccagcatggcgggggcgggggcgaaggcggcgggagccctggctctggcgctcgtgctcgcgctcgcgggggccaactccgagggcgacgcgctctcggcgctgcgccggagcctcagggaccccggcggcgttctgcagagctgggaccccacgctcgtcaacccctgcacctggttccacgtcacctgcgaccgcgacaaccgcgtcacccgcctagatcttggtaatttgaacttatctggtcatctggtgcctgagcttgggaaactggagcatcttcagtatctggaactttataagaataacattcaaggaacaatcccttctgagcttggcaatttgaagaatctaataagcttcgacttgtacaagaacaacatttcggggacaatacctcctgcccttggaaagttgaagtcccttgtattcttgcgtctcaatggcaatcatttgactgggcccatcccaagggaactcgctggaatatctagtctcaaagttgttgatgtttcaagtaatgatttgtgcgggacgattcccacgtctggaccatttgagcatattcctctgagcaactttgagaagaacccgcgcttggaaggtccagagctacaaggcctggccatatacgacaccaactgctagagggcaccacgaagaaaagaactgctagaaagtaacgagcgaacaaggttaccagaaattgggcgatatagatttactaggtctggatctgtaatcctccctgcatagctcttattcgtaactcgctgtcggcacgaaagttggtgtgtgttttagcagaatgctttctgtccgtgaaagtaaacttgaaactgcttattacgactgaaatgatattgtcgttccccccaaaaaaaaaaaaaaaaaaaaaaaaaaaaaaaaaaaaaaaaaaaccaaaaaaaaaaaaaaaaaaaaaaaaaaaaaaaaaaaaaaa

SEQ ID NO: 179908 - DNA, 326 bp, Zea mays
  Clone ID: MRT4577_95656C.1
ccttattactcttttttttttctacaaaccgcaaatagatcactaaggaccgcctaatgtttatttaaaaaaatataatagccaatcttcagaacccattgttgtaaaacttgaaaccataataccatatacacccgttgttttggctcgtgccactcttgcatattcatatttaggggaaggaagccatacatttgtcaatttagtggtgccgtccaaagttcaaccaggttttgtacagggcctctcgcctgtgacagccccctggacgttaaaattcaaaccatgctaccttcggaaggcgacccgattggatacttttcacc

SEQ ID NO: 179909 - DNA, 1339 bp, Zea mays
  Clone ID: MRT4577_95657C.1
ttggccgggcacgaactctcggcaacggatatctcggctctcgcatcgatgaagaacgtagcaaaatgcgatgcgtggtgtgaattgcagaatcccgcgaaccatcgagtttttgaacgcaagttgcgcccgaagccttctggcggagggcacgtctgcctgggcgtcacgcctttagcgtgggacagacgagagaagaccagacgagacgtcgtgcgtcgcgtcctccctgccgttccccttcttcagttctcccgctgctgctgccgctgccaccctccgtccgcgtccagatcccgccaccccaaccgatctgccggcctccagcatggcggcgggggcgggggcgagggcgagggcgaaggcagcgggagccctggcgctggcgctcgtgctcgcgctagcgggggccaactccgagggcgacgcgctctcggcgctgcgccgcagcctcagggaccccggcggcgtgctgcagagctgggaccccacgctcgtcaacccctgcacctggttccacgtcacctgcgaccgcgacaaccgcgtcacccgcctagatcttggtaatttgaacttatctggtcatctggtgcctgagcttgggaaattggagcatctgcagtacctggaactttacaagaacagcattcaaggaacaatcccttctgagcttggtaatttgaagaatctaataagcttggacttgtacaagaacaacatttcggggacaatacctccttcccttggaaagttgaaatcccttgtattcctgcggctcaatggcaatcatttgactgggccgatcccaagggaactttctggaatatctagtctcaaagttgtcgatgtttcaagcaatgatttatgtgggacgattcccacatctggaccatttgagcacattcctctgagcaactttgagaagaacccacgcttggaaggtccagagctacaaggcctggccatatatgacaccaactgctagaaggggcaccacgaacaaaagaatcgctagaaagtaatgggcgaacaaggttacgagaaattgggcgatatagatttactaggtctggatctgtaatcctccctgcatagctcttattcgtaactcgctgcctgcacgaaagttggtgtgtgttttagcagaatgctttctgtccgtgaaagtaaacttgaaactgcttattatgagtgaaatgatgatgttatttcccttgccaaaaaaaatggaggcccctagtttttttacccgaacttgtcggtagtacgatttaagcgaaccagtttatccctgctgtggcaaatttatggaaggacggtcatgatatcgatcgacttg

SEQ ID NO: 179910 - DNA, 877 bp, Zea mays
  unsure (1)..(877): unsure at all n locations
  Clone ID: MRT4577_95658C.1
gccggcctggtcgggagagtgctacggcgtcaatcctttctatcctcgtcgtgcccagcttctcttccctcttttcccctcactgatgaaccctagccgccgtctccatgccggatcccgcacccgagcctgccctcgccggcgccggcgctgctgtgtgcagcccctcgcctcaacattcagttcacagattttcagttcagtgatattcaactgaaactggatggtaagttttcagtgaccatgttgaggcgaacaacagttcatgtcactgaaaatagaatgaccatgcatttttcatagaatggccatattcagttcacagaaataaatggaccgcagttcacagattagaattcagttcacagattacaaccggaattcagttcacacagattaaatggactgcagttcacacagcagttcatagattagaattcagcggctagggttgccatgctgcctgtgccgtacaccatcacacagctagagctagttcaattccctttcccttcccgttgtcacccctctgttcagtccacaccacaccctcctcaaccgcaccgtcgtcgtctagccgactagcggcgggagctatagcttcgacgagccgacgacaaacaccaacaggaggggaaaggagggaagagaagctagggcctagggagggaggagagctgctgggagacgacgacgagaagactggcgccgtaacgctagccgtccgtgacctgcgcctgatagaccttactgaaagatcgcaaggctaacaacgacgactgctgatggtatttttctattatggcaaaagagagacttgtatcctttctattttgataaacatgtgtacaccgaattgaagctcagntctgcaaaa

SEQ ID NO: 179911 - DNA, 184 bp, Zea mays
  Clone ID: MRT4577_95659C.1
cgaaatagagactgtattcactggtgcgtggacaaaagggggtcacatcacttgaacctcaaagtgttttgagacaggagctctgttagatagcgccatagtgactacaataggaagacacggatacccatctttcggattagaaattggggacgacggaatccatagtaaaccgctaaacagg

SEQ ID NO: 179912 - DNA, 337 bp, Zea mays
  Clone ID: MRT4577_9565C.1
agggattaacacggggaagacgattattgtcccacaactgtaaggaaaaatacttcttgactgatacagaatcataccgacgcaccgaactaagaaaaattactgggagactgctattttgcctttgcaaacaccaaacacatatgagggcgtaacaacctgtggaggttcacgggcggttactatgaaggtgctcggaggctcaagacggaggatggcgccatccgaggcccaaggtggagttcaatcagaaaaccctgcccgtttcttacgctgacaaactcaataatgcgcaagaagccttgccaacctagagaggctgccatgggctcgctac

SEQ ID NO: 179913 - DNA, 574 bp, Zea mays
  Clone ID: MRT4577_95660C.1
ctttcccttcccgttgtcaccccgtccatcgcccaggtctctgttcagtccacaccgttgtcgtctagccgactagcggcgggagctatagcttcgacgagccgacgacaaacaccaacaaggaggggaaaggagggaagagaagctagggcctagggagggaggagagctgctgggagacgacgacgagaagactggcaccgtaacgctagccgtccgtgacctgcgcctgatgcttgttagtttgtgtcgaattgtaaccggaatcgttccagctaatcaaagtttatataaattagagaagcaatccggttagtaatcattccgactcaccaatccggcacaaacgaagaaggcatgaaagatcgcaaggctaacaacgacgactgctgatggtatttttctattatggcagagagaagacctgtatcctttctattttgataaacatgtgtacaccgaattgaagctcagttttgtaggaagtgagtcgtttccgttgaacatattcatggacgccactcgtgttttgttgatcgacattaattctatacacgatgcttgggtttagaat

SEQ ID NO: 179914 - DNA, 142 bp, Zea mays
  unsure (1)..(142): unsure at all n locations
  Clone ID: MRT4577_95661C.1
cacaaccgaagcccttgtacaactcgccgccgctgntgctagggagcttccatccgcgcgcacctacaacgagagctagcagcagtagcggccgttatcttgtcgcaccggatccgtacgtgtacccaagtcccagcctaga

SEQ ID NO: 179915 - DNA, 399 bp, Zea mays
  Clone ID: MRT4577_95662C.1
tttaagcgtaccgggttctgtttgtgtagtgagtcatctactgggacgttgtatggcaggcatgtaataagcatgtacctgatttgtttgaatgcatgtctatttaactcagtctgtactaatgattgttcagagttttggcgctcgacagtcctgcatttaacgcaattagatttagggccggaggggaattgggcagcttgagcaccagggggactaaaatgacactctacaggggactgcgctgatgtctgacctggcatcagtggggcgttatatattactggagggctttctacactagcttggtagattgttcatgaagacgagctaaaatgagctgtttaactctatggagatggtttaatcggacctactgactatggggttaatatggtt

SEQ ID NO: 179916 - DNA, 387 bp, Zea mays
  Clone ID: MRT4577_95663C.1
gggaccctcgaggccggccgggtcaatcaccactgttcagctgaactcctgactgaatggccatgtgacgatctctcgctgatcccttccacggagctcctcgtttggagctcgccacaaccactccgagcgctggcggtaccagatcagagagcagcttatgcgaaggtcgacgaggagaacgacaagccctccctgttctggaagcatcaccgaggcgctggacttctcgcagcctcggccgaagaacgacgccgagatgctgaacgagaccaggaacccgaccacaggcgcgaggcagcgtgacgaggaagcggtacgcaccacttacgcggaagattgctgccacctaccaggatttcttcaagtcatatgatgaagtcgacg

SEQ ID NO: 179917 - DNA, 351 bp, Zea mays
  Clone ID: MRT4577_95664C.1
cctcgccgggcccgacacgaccgacgtgcagcgcgaggcggagatcacgctgtgcatgtcggacgcgagcgggggcagggtcgcgagcctgctctaggcacgcgaggacgacgacggtgtgcacactctcacggagctctgcgagggcggctagctcttcgaccggatctgtcacacggaagcaactactccaagcccgccgccaacaacctcgtccgcaccatcgactaagtagtgcacactgtgccacgagaacagcatgaggcacatggaccgcaagactgggaactgcctagatcaaaacacgtccgaggagtacactataaaggtcatgcaatatagtctgttcac

SEQ ID NO: 179918 - DNA, 488 bp, Zea mays
  Clone ID: MRT4577_95665C.1
cagatcacagaccacaccgcagtagaatcggagcgtgtcttgaagatgactacaagaacttccactacctcctcagactggaaggatgattgtgttcttgccgcacattccctagtccacgacctctggtgcattgtcactgtagacggaacatcgaactctgcccttggttactccgccttttctgtgtcgattaataatctcttcagtataactgccgctgcgtctactgatgggtgacttttgctgaatgaactataagctggaggagccgaaagctggatgctactgctagagacgtagtttgttatactgtcctgcagattcatgtcaggctgacagactagtctgcaacgatcacttctcgcaccattcttggagatatcaacacaatcatgcctgtacgtcccttatgaatctgatcaacgtagttacttgcactagcatgtattggcgcaggatatgtcctgttgctgctgacatgtcac

SEQ ID NO: 179919 - DNA, 641 bp, Zea mays
  Clone ID: MRT4577_95666C.1
gaagaatgtagcgtcccctgatgctctgctggcaatgatgcttgcgtgtctgcagagcaaagaggcagagagcctgaacaattcgtttggcccttttcttgtgcttggcagcctgatcagatgccaatgcgatcccatatctccccatatctgatagggaaaataaaatctctccgcgtctgctgcactaccggctggtggttgtgctcgccagcgcggttgaatcccatctcacctcccctcatctgccgtcgtccggtgactgacaggacgaggctccttttccgcaccagcagcgccctctccacttgatgatggcctggcctgctagctcgagaagaagaaatgggcaagcagtggcaatgagatggatgttcttggtttagcagttcttgcaatgcgaaattggacctgcggaaaaggaatgggcaactgattggccatgaacagtccaagggcttttgctgtaatctgctcgcgtccaaattaatccaggaggatgagagtgtgagactgacacatgcacagggatcacgccaggtatataaacacgcaagtggcccacccaccggcgacggctttcgatccgagaacaatccgtcgtccgagttggcatctttggccaaaccagtatcattgcc

SEQ ID NO: 179920 - DNA, 627 bp, Zea mays
  unsure (1)..(627): unsure at all n locations
  Clone ID: MRT4577_95667C.1
agctctgggggcgagtgatgcttgcgtgtctgcagagcaaanggcagagagcctgaacaattcgtttggcccttttcttgtgcttggcagcctgatcagatgccaatgcgatcccatatctccccatatctgataggngaaaataaaatctctccgcgtgggggggagtaccggctggtggttgtgctcgccagcgcggttgaatcccatctcacctcccctcatctgccgtcgtccggtgactgacaggacgaggctccttttccgcaccagcagcgccctctccacttgatgatggcctggcctgctagctcgagaagaagaaatgggcaagcagtggcaatgagatggatgttcttggtttagcagttcttggtcgttgcctgaatcctgcacattttactactacagttgtgagccagaattgcacagatctgcctgaattcttcttctgaatatccacagcaatgcgaaattggacctgcggaaaaggaatgggcaactgattggccatgaacagtccaagggcttttgctgtaatctggttgggtccaaattaatccaggaggatgangagtgtgagactgacacatgcacagggatcacgccaggggggtgaaggggatg

SEQ ID NO: 179921 - DNA, 657 bp, Zea mays
  Clone ID: MRT4577_95668C.1
ggccgctttttttttttttttttgccttaaattttattcaatttatttgtttttttttaggaaacacagtttgttttgagggctccatggacccaaacatctcatatgtattctaaaagatggcacctgcaacgatggcctgctgcaaggcaggggtcatcaaagagaactggctgtatggcagcaattgttgttgctgctgcaggaaggttgcgaccaatgggttacccactgccaatggattaagtaactgccgtcgctgctgaaggtacgcagcatagtttgacacacccagttggctgaatggaagcaactgttgtacgtaggcagtagggtttgccacagctagctcactcagagctggtacaatttgttgcaacaactgttgttgtaggtacgtaggtgcattgcccaccgcgagcgggctagatgaaagtagttgtaggtagacggcagggttcaccatggctagttgactgagcactggcataaactgttgcagctgttgatgatgctgatatgcagctacgttcgccagagcaagtgggttggatgcaagcagctgctgttgcaagtaggtgacagggttcaccacggctaggtgggtcactgatggcaccaactgttgttgttgttgttgcgttgcattggtttgta

SEQ ID NO: 179922 - DNA, 450 bp, Zea mays
  Clone ID: MRT4577_95669C.1
cgggacctacttggatgtaccccgttccaggtggccaatgcacctacgtccctacaccaacagatgctgcaccaaattggcccaggtctgactcaactagctgcggcaaaccctgctgactacttacaacagttgcttacattcaaccaactggctgtgtcaaactctgctgcgtacctacaacagcgacaacagttacttaatccatagccagtggctaacccattggtcgctaccttactgcagcagcaacaacaattgctgccatacaaccagttctctttgatgaaccctgccttgcagcaacccatcgttggaggcgccatctttcagattacatatgagatgtactcgacaatggtgccctcataccgacatgtgattgctagaaataatcaatatattgactgagatctatctcgatatattcctgaactatgatcatcatat

SEQ ID NO: 179923 - DNA, 857 bp, Zea mays
  Clone ID: MRT4577_9566C.1
gaccggatgcgccccgccccgaccctgctcgccctcaccctcgacgccgcgctcctccgcatcgccaccctccgcgacctctcccgcctccccgaccacatcctcgtcgacctcttccgcagaacccttagtgctggtaagctgacagagagagtcctcaaattgtttctggcaaccgactgcgaggagatcatcttgcttgttcagctcctcaacattaagcagccacttctaccggtccttcccacgaggtgctctgagaagttctagtactgctgctgcttagatcaggctgattagctgtgaagatgtctttggaagttcatgatagcgaggttgacattgtgattgcagcactccagcccaacctgacctctttctttcaggcgtggcagccatttttctcccggtttgacatcattgttgtcaaagacccagagttgacagcagatcttcagatcccttcaggttttaatgtgaaggtttacacaaagtctgacattgatggactgcttggtgccacatccatcaacttctctggccactcatgccgttactttggataccttgtctcacgcaagaagtatgtcatctcgattgatgacaactgcctcccagcaaaggaccctgctgggatgactgttgatgctgttacacagcacatgatcaatttgaagacacctgctactcctttcttcttcacacactgtatgacccataccgcaagggtgctgactttgtccgtggataccattcagcctgcgtgagggggttgaatgcatgctctcatgtgggctctggctgcacatgcggactatgacccaatgacacatgtcgtgaagcggaaccccacgcac

SEQ ID NO: 179924 - DNA, 585 bp, Zea mays
  Clone ID: MRT4577_95670C.1
gcggggatctcccataatattttcagcattcagaaacacaccaagcgaagcgcactagcaacgacctaacaacaatggctaccaagatattagccctccttgcgtttcttgcccttttagtgagcgcaacaaatgcggtcattattccacagtgctcacttgctcctagcgccattattccacagtttctcccaccaggtacttcaatgggcttcgagcatccagccgtgcaagcctataagctacaactaacgcttgcggggagcgccttacaacaaccaattggccaattggaacaacaatccttggcacatctaaccctacaaaccatcgcaacgcaacaacaacaacattttctggcaccactgagccacctatcagtggtgaaccctggcgcctacttgcaacagcagctgcttggattcaacccacttgctctggcgaacggagctggataccaacaacaacaacagctggaacaggttatgccagcgctcagtcaactagccatgggggaacctggcggctacctacaaatggtttcatttaacccgctcgctgtggggcatgcggggtacatacctg

SEQ ID NO: 179925 - DNA, 310 bp, Zea mays
  unsure (1)..(310): unsure at all n locations
  Clone ID: MRT4577_95671C.1
ctcttattgtaaataaatgntgcagagactactaggagtactgctgtcgggtggagacagtagtnntataatggtgagattgatgaaagaagtacnnagcaagagtccgcgatctcaaagagagcacatactacatggagggtaacacttggcatccagagtntgaaacagtttattgcaaactatgagtgaacattggttatggaagacataagncgcttaatcggcttgcgtttggtctaaatcgagctgaaatacagcccaacccatatacgactgtaggtgaactgagtgaaccaacttgagccat

SEQ ID NO: 179926 - DNA, 567 bp, Zea mays
  Clone ID: MRT4577_95673C.1
aacaactacgaacgcatacacgacctacacatggctaccagtatttatccctctttgcgcttcttgccctttttgcgagcgcaacaaatgcgttcattattccacaatgctcacttgctcctagtgccattattccacaggtcctccctccagttacttcaatgggcttcgaacacccagctgtgcaagcctacaggctacaacaagcgcttgcggcgagcgtcttacaacaaccaattgcccaattacaacaacaatccttggcacatctaaccatacaaaccatggtaacgcaacagctacaacaatttctaccaacactgagccaactagctgaggggaaccctgtcacctacttgcaacagcagaagcttgcatacaacccactagctctggcaaacatagttgcataccaacaacaacaacaatagcaacaggttctaccatagcttacacaactagccatggtgaaccctgccgcctacctacaacagcaacaactgattgcatgtacccctctcgatgtggctaatgcacctacatacctgcaacaacagttgttgcaac

SEQ ID NO: 179927 - DNA, 646 bp, Zea mays
  Clone ID: MRT4577_95674C.1
gccggccgggcttgcgatcacctataatattttgagcatttagaaacacaccaagcgaagcgcactagcaacaacctaacaacaatggctaccaagatattatccctccttgcgcttcttgcgcttttagcgagcgcaacaaatgcgtccattattccacaatgctcacttgctcctagtgccattattccacagttcctcccaccagttacttcaatgggcttcgaacacccagctgtgcaagcctataggctacaactagcgattgcggcgagcgtcttacaacaaccaattgcccaattgcaacaacaatccttggcacatctaacaatacaaaccatcgcaacgcaacaacaacaacattttctaccatcactgagccacctagccatggtgaaccctgtcgcctacttgcaacagcagctgcttgcatccaacccacttgctctagcaaacgtagctgcataccagcaacaacaacaactgcaacagtttctgccagcgctcagtcaactagccatggtgaaccctgccgcctacctacaactgctacaactgtatttcatctagctgtggtcgatgtggcctatgcacctacatacctgcaagctgaattgatggaacacattgctaccatctctaacta

SEQ ID NO: 179928 - DNA, 333 bp, Zea mays
  Clone ID: MRT4577_95675C.1
atggagctcgatagtatggtactgatttctaaaaatttcaacaggtacaatgttgagttggttgacaccgtccaggatttgtgcaagcaacttgagaccaactcggtcgagtttgaagttttcatagctagtggtgtgatgcccaaggcggtcaaggttcttcaggataagaagttcaaaatgaaagagcaaatggttgatacgaagaagacccttgttgccttcaagaatacaatagaccaaggcaaagccactaacaaatatctagccgagaagctagactcagccaacaagcctaaagacatggctctggttgagaagaagaaatactaa

SEQ ID NO: 179929 - DNA, 386 bp, Zea mays
  Clone ID: MRT4577_95676C.1
gagcattcagaaacacaccaagcgaagcacattagcaacaacctaacaacaatggctaccaagatattatccctccttgcgcttcttgcgctttttgcgagcgcaacaaatgcgttcattattccacaatgctcacttgctccaagttccattattacacagttccttccaccaggtacttcaaaggccctatgaacacccagctgtgcaagcctataggctacaacaagcaattgcggtgagcgtcttacaacaaccaaattctcagttgcatcaacaatctttggcacatttaacattactaaccatcgtaacgtattagcaacatcattttctaccagcactgagtcacctagccatggggaacccttccgcttactttcaac

SEQ ID NO: 179930 - DNA, 404 bp, Zea mays
  Clone ID: MRT4577_95677C.1
ttctgagccatacgaaaccactcatgcgactcgcgactatcaacaacctagcaccactggctaccctgatttcttggttccttgcgctggttgcactgtttgcgagcgcaacagatgcgtccattattcgacaatgctcactcgctcctatgtccattattccacagtccctcccaccacttacttcaatggcctgcgaacacccaactgcgcaagcctataggctacaacacgcgatggcggcgagcgtcttacaacaaccaattgcccaattgcaacaacattccttggcacatctaacaatacaaaccatcgcaacgcagcagcatcaacagttcctaccatcactgagccacctagccatggtgaaccctgtcgcctacttgcaacatcatctgcttgca

SEQ ID NO: 179931 - DNA, 482 bp, Zea mays
  Clone ID: MRT4577_95678C.1
atcgggataaatctcaatcaatattttggttatttctaggaaacacatgtcggtttgggggcccccttgtcgagtccatttcatttgtaatctaaaagatggcccccccaaccatgggttgctgcaaggcagggttcatcaaaaagaactggttgtttggcaacaattgttgttgctgcttcaggaaggtagccaccaatgggttagccactgccaatggattaaataactgttgtcgctgttgtaggtacccaccaaagtttgacacaaccagttggttgaatggaaacaactgttgtaagtaggcaacagggtttgccacaactagcttagtcaaagctggtacaatttgttgcaacaactgttgttgtaggtacctaggggcattgcccaccccgagcgggctaaattaaaatagttgtaggtagaccgcagggttcaccatggcttgttgactgagcactggcataaactgttgcaac

SEQ ID NO: 179932 - DNA, 1693 bp, Zea mays
  Clone ID: MRT4577_95679C.1
aaaatacatggacgatagctgatgattggggttctgaaaaccgttgcccatctcctgattcagatgctaaggacagtgcaaaagtggatgatctagaaaagtgtagtagcatcgtaggtgaggaccagaaagaaatccttccctcgaagttacattcacatgtttcgaccatgccacctgcaaggaagaagaaagcagaatctagaaagtattttccattcaggcagggatatcttgccgtagcaattcttcgtatcggagcacatgggatccatatgactgtagatggcaaacatatcacttcttttgcattccgagaggatttggaaccagggtttgtaggtgaagtaagaattgcaggagacattaaattgttatctgtgatagcaagtggcctgcctacaacagaggacttcgagcatgtcactgacttagaaatattgaaggctccacctgtgcccatggataaaccggttgatcttttcattggggtcttctctacagcaaataatttcaaacgccgaatggcagttcgcagaacttggatgcagtatgattctgttcgatcaggaaaagttacagttcgattctttgttggcctgcacaaaaatgagttggtcaatgaggaactctggaatgaagcacgaacatatggagacatccagttgatgccatttgtggattactatagcctgattctttggaagaccatagcgatctgcatctatgggacaaatgtcctgtcagccaactatgtgatgaaaactgatgacgatgcttttgttcgagtagatgaagtactttcttcccttgaccgaactaatgtcaaccatggactgctgtatggtcgtgtcaattctgattcccagccacatcgagatccatatagcaagtggtacataacccctgaggaatggcctgaggagagttatcctccctgggcgcatggaccaggatatattgtttcaaaggacatagctaaagaagtttacaggaaacacaagagtggggagttaaagatgttcaagctggaggatgtcgcaatgggaatatggatcaatgagatgaagaaggatggcttggatgtcaagtatgagaatgatgggaggattttggttgaaggatgcgaggatggctatgtgattgctcattaccaagaaccaagggatatgatgtgcctctgggatcagtttcagaaaacaaaacgaggaacatgttgcaaagaataacagaaatcatgcgaatggtgttttatgttacggtggctgctgttggccgttgcttgaatagacaccttcacgctaaaacgttcttgatgtatacagccctgcctaagaggattctaaaagagctggaactggaaggcaagcaaacaattttttggatatcttcaagtttgtttcgtctgcagtttgaagagtttcaagtcaaactacggcatgggatatgcattgtacacagaatgtagggttacatttgtttttggcataggtaggagggtactgctttgcttactgtgcggcgtataaaatagtatcttgctagaatgtaggatacagcgacggcagtttacgttaggatagactgagacagtcttaccagttaccattttttttgaaaggaatgcattttgcatcttgtgtaaagctgtttggtgtccattctcttgtataatcgattcaatgttcatccc

SEQ ID NO: 179933 - DNA, 365 bp, Zea mays
  Clone ID: MRT4577_9567C.1
aggcttccgacttagttttagccaacccttccgaaattccttgtccttggggtccaactttgtttggggcaccaagcctgcttggggtaggcctgggccattattgtttacgggacctggtgccgttgcctgtagttgggtgctaatccaatctgtggtaattcctgttggggtttttttggtaatatccgaatgggggtccatatttttttactggtcccttagggcatccaccgggttgttggcagagggaagaagaattgtacccggtggagctgaagatacctacgggttggaaaaaatccattggggatctacggcggccctttttgtaaagggcataacttttttgggtggggtttagc

SEQ ID NO: 179934 - DNA, 333 bp, Zea mays
  unsure (1)..(333): unsure at all n locations
  Clone ID: MRT4577_95680C.1
ggccgcttgtttttttttttttttcgggggggggggaataaagtattacaacgtgtgtgtgggagctcagatggcccgttatagggtaaccggctgcaccctgacgacgtgggagcatctggggggtggttggacacgcagcggcgatntgcctgctttttatcgttgtgtggtttttggggttgccgggggtctaatatnttttgtcttgcntggcttggtccgtggttgcctatgtcgcgcctgggtttgctggcgtgtcgtcgcgtgggcttggggtcgctgttgaagtgggccttggggctgcgctaggggtgggggtcgtgtcggggg

SEQ ID NO: 179935 - DNA, 628 bp, Zea mays
  unsure (1)..(628): unsure at all n locations
  Clone ID: MRT4577_95681C.1
ggccgcttttttttttttttttttctggggttttttttttttttattgagataaatctcaatcaatatattgattatttctaggaaacacatgccggaatgagggcaccattatcgagtacatctcatatgtattctaaaagatggcacctccaacgatgggttgctgcctcgacaagacagggtgggtcaaagaaaactggttgtatggcagcaattgttgctgctgtaagaaggcagcgaccaatgggttaaccactgctagtggattaagtaactgttgtcgctggtggaggtacccaacagagttcgacatagtcagttggttaaatggaagcagctgttgcaagtaggcaccagggtttgccacaactagctgagtcagagctggaacaatctgttgcaacaattgttgttgcaggtatataagtgcattggccacagcgagcggcctagatgaaaccatttgttgctgttgtaggtaggcggcagggttcaccatggctagttgactgaacgctggcagaaactgttgcagctgttggtgnggctgatttgcaactacgtttgccagagcaagtggattttgtgcaagcaactgctgttgcaagttggcaacaaggttcacc

SEQ ID NO: 179936 - DNA, 1026 bp, Zea mays
  Clone ID: MRT4577_95682C.1
ccgggctatagcctgattctttggaagacctagcgatctgcatctatgggacaaatgtcctgtcagctaagtatgtgatgaaaactgatgatgatgcttttgttcgagtagatgaaatactttcttctctcgaccgaaccaatatcagccatggactgttgtatggtcgtgtcaattctgattcccagcctcatcgagatccctatagcaagtggtacataacccctgaggaatggcctgaggagaattatcctccatgggcgcatggtccaggatatattgtttcacaggacatagctaaagaagtttacaggaaacacaagaatggggaattaaagatgttcaagctggaggatgtcgcgatgggaatatggatcaatgagatgaagaaggatggcttggatgtcaagtatgagaatgatgggaggatcttggttgaaggatgcgaggatgggtatgtgattgctcactaccaagaaccaagggatatgatgtgcctctgggataagtttcagaaaacaaaacgaggaacatgttgcaaagaataacagagataatgcaaatgatgctttattttacggtggttgctgttggccgttgcttgaacagacaccgtcacgctaaaacgttcttgacatttgacatatacagcccctcctaagaggaatcttgcagaactggatggcaagcgaagttttgggtatcttaagtttgtttcgtcccagtttgaagagtttctagtcaaactaggggatatgcattgtaggcagaatgcaggtcacatcttttttttttgggtaggtaggagagtgctgctttgcttactgtgtggcttgtaaaatactagtatcttgccagaatgtaggatacatgggcggcagcttacgttaggatagattgagccagtctaccattcttttgaaaggaatgcattttgcatctgatgtaaagctatttttggtgaccattcattctcttgtataatccatactcaagaattttcaaaaaaaaaaaaaaagggcggcc

SEQ ID NO: 179937 - DNA, 259 bp, Zea mays
  Clone ID: MRT4577_95683C.1
ccgaaagtgacagtggactggagatttcctcccagccttcggttgacgcgccccaccgcgcagtgatggtcctgagtcctgaccggtttggtggcatgtggcatccctgctctcactcacggtgccgttttccgatcagtaattggtaatccccttggtaactaatttgggtctatgctaagatgttcaccgatcagtatcagtagttctgtgcgcagtgtattgctgctgcctgatgctgggactgggatacagaatc

SEQ ID NO: 179938 - DNA, 736 bp, Zea mays
  Clone ID: MRT4577_95684C.1
ctcggggccggccgggcaactctccgtcgtcttctgtggttctggcgtctacgcctccaatttggcctatctcccttgcaagtttaagactgcatcttcagccatgggtaaggagaagccccacattaacattggggtcattggccacgtcgacctctgacaggtcgaccaccaccggccacctgatctacaagctagagggtattgacaagcgtgtaatacagaggtttgagaaggaggctgctgatatgaacatgcggcccttcaagtatgctggggtgctcgacaagctaaaggctgagcgtgagaggggtatcaccattgatattgctctgtggaagcatgagaccaccaagtattactgcaccgtcattgatgcccctggacaccgtgacttcatcaagaacatgatcactggtacctcccaggctgactgtgctggccttatcattgactccaccactggcggttctgaggctggtatctccaaggatggccagacccgtgagcatgctctccttgcgttcactcttggagtgaaacagatgatttgctgctgcaacaagatggatgcaacgactcccaaatactccaaggcgcgttatgatgagattgtgaaggaagtctcatcctacctcaagagagttgagtacaaccctgataagagtgcctctgtacacatctctggttctgagggcgacaacatgattgacaggtccaccaaccttgactggta

SEQ ID NO: 179939 - DNA, 325 bp, Zea mays
  unsure (1)..(325): unsure at all n locations
  Clone ID: MRT4577_95685C.1
tctattttcttttttttgggtttttttttagggatttgtgtctctttttactaaacgacaataaaatacatgctcgatcgctcacatggtagcatgnaatttaaaaaaacaactttcttattcccaccatttacaacacgacacaaattattttacacgaaagaagggtccaaattaaccttttcttgaagaaaaaaatccggcctcaacaataatataaatcacgcttaccaaaaaaacttgtagttcacagttactttctaggttaaaaagtcatttttttttaacaaatttctgagagcatcaaaaagctcgggaataccat

SEQ ID NO: 179940 - DNA, 239 bp, Zea mays
  Clone ID: MRT4577_95686C.1
tttttgcctgctgccgacgacaacgcaacccttgcagtcccaatcgctcacagcaggcatgggtggcacgcaggagtccatatctctggtgggcacgaagcgcggacacaactgcccagtgtcagcgatcgtgacctccatcgacgactcgccggacatgggatcctgctgctatgacatgaacttgctggcgtggaacctgatcaacccgggacagtccaccctggaatccgtagcta

SEQ ID NO: 179941 - DNA, 203 bp, Zea mays
  Clone ID: MRT4577_95687C.1
gcgttccgcccgtcgcggttcgcgccgcccgaaggggaggccgcggggctcgacatcaagggcgggtgcttgagttactgccggtcggtgtcggtcgccggtcctagcccgggatggcgctcggcctgtacgcgctggagctcgccgtcgcccagctcgcgcacgccttcaactggtcgctgcccgacggcatcaagccctcg

SEQ ID NO: 179942 - DNA, 247 bp, Zea mays
  Clone ID: MRT4577_95688C.1
caaagatgtccttgtacctgcatctcgacctcaccggcgtccggcggtggtatcacgatggaggcgttgctgggccgatggatcggggtggcagctgcactgtcgcgttcatcgacctcttagcgttcggatccgcctcatccttcgccaagtccttcgtgaagtccaacgtctccgcccacgacgtcgtcatcttctccaagtcatactgcccgtactacacaagaggtatagccgtgtttaagga

SEQ ID NO: 179943 - DNA, 267 bp, Zea mays
  Clone ID: MRT4577_95689C.1
cccacgcgtccgggctgtcaacaacactaccactagccagtcagctactggcctacagctagccgcctcctctcctgtcatgccagcccatctcatctccgacaagcgcaagcagagcactcggcatgaagcatggtaccgcatggacgcgcgcgttccgtgtcgcttgctaccatcgctctggcctctgcctggaccagccgctggcgttcggcggaactcgtgcgcttgtacgaggaagttcacgcacgtgaggagcaacgttgc

SEQ ID NO: 179944 - DNA, 345 bp, Zea mays
  unsure (1)..(345): unsure at all n locations
  Clone ID: MRT4577_9568C.1
tcccgtcgccacgcgtcgcaaagcgcagcgtgcagctgagcagcgccggcagctggatggcagtggatggagtgaaaaagagccgccagaaacagaggaagcaggctggggcttcgtagatggggaagtctccagccagggccgggcgaggggtggcgagtcagtctgcagtcgtcggtcggacaggtcagtcgggcgcacggcgcggtccaagtcgtcgcgagagaaaagcctgtgccgcggaacggacactcggggaaggcctggtgccgtgggcgctggtggtggggacggccgaagctgctgctacatccacctgcggagccgcatgctgntcatgggcag

SEQ ID NO: 179945 - DNA, 354 bp, Zea mays
  unsure (1)..(354): unsure at all n locations
  Clone ID: MRT4577_95690C.1
ttttcgaccacgcgcccggtggcacgaggtcggcgacaagaggcctgtttatttgttttggcggncttggcggcggctccccaggccccggctccgagtacggccacgagggccgcccgcaccacggcggcggcggatcccagtacggacacgagacacgcccgcaccacggcggtggaggaggaacacccgctgagagggattaggcttacaggacccaatgagaggatgggtgggcagaaactgcagtcaccgccacagggggaatgacttgaatcgagcgaacggaccgagaagactacccaggcacatggacaaaggcaattgcatatgaaacagcaggaattaaattat

SEQ ID NO: 179946 - DNA, 395 bp, Zea mays
  Clone ID: MRT4577_95691C.1
gggcgaaataaaaagggtgccaaaccccccccttaataatgcccttactcaaggaaaaacaaggttttggggataaacacaaccaattttgactgttctcggtgggggccccccccccaaaataagacattggttcattttccgcttaatttccaatgaaaatgttttccaaatcccaaatttttattgtttctttttgtcccatgaaatacattttctaaaaaattcggtccccctttttattttttacccgccaatatttcactctaaacaaaaactttgaagttggttttaattattttgggcaaggaaattcccacccctttaaaataaaactttggtttgcttgcttggggggcctttaatttgctctaaaaaggaaaaaaatttttttt

SEQ ID NO: 179947 - DNA, 355 bp, Zea mays
  Clone ID: MRT4577_95692C.1
ggcgacgtgaaggcctccaacgtgctgctgggcgcgagtctagacgccgaggtctgcgacctgcgcttcccgcacgtgtacttctcggccgcgctccagccgccggaggccagcgttgccagggccagggcgtcctcggcgccgatcgccgacggcatgggctccccggactacgaggacccgcacttcctcctatccggcgtcggcaccaagaagggcgacgtgtgcagactagggcgtgctgagtgtacgagctcctgagcgggaggtgggactactgcacagacacagggactgggctcgcccattgggtgagctcgatacatggaatgcgacgtagaagctgagcagaatg

SEQ ID NO: 179948 - DNA, 200 bp, Zea mays
  Clone ID: MRT4577_95693C.1
cggacgcgtgggcggacgcgtgggctcagttttcatgggcctttctgttcctcaatactgcaatgagtacacatctattgctggttatggtcctgttcacacacattcaagatgggtatgtaacatttgttctttttttccgtgaaatcttacaattctgtggaaagataaataaagtactcacatcggttgtcttgttc

SEQ ID NO: 179949 - DNA, 557 bp, Zea mays
  unsure (1)..(557): unsure at all n locations
  Clone ID: MRT4577_95694C.1
attttcccaacggctccgactctacatatttctaactagtgccggcgccctctcgcctccgcttctctgtgatgccctgtatcatgatgcagcccttactgcccttagagaccacctattgggaacatcctctgacagtttctcacgaaagcatctgacctcttcttcttcacacatgagaacgcgaagaggtcgcctgatgtttactactacatctatctcacctccaagcccttctgccaggcactcgtggactacctcatctctgcccctgagggagtgatgccccgctgacttcaccatcggcgcccacatgtccgcgaaaccattggaaggcgcttgcacctgacatctgaagccggaaccatcctgggatactttctgtgacaaccttgcggagagtgatacttggtcggaagcgacatcatagattanagctgatatcgtaacttgtcgtgtgaatccacgacggacctgctcgattgaatgagcatgcacgactactggatctctatctcttggcatggatactgcacatcggaacttgagaggcagaa

SEQ ID NO: 179950 - DNA, 240 bp, Zea mays
  unsure (1)..(240): unsure at all n locations
  Clone ID: MRT4577_95695C.1
ctgggttgtccttctcctcacgttgtctgctgttggatttgtgccgcatggaatgagaactgggtccgcaagagagcaatctgaacatgcctcttgtgtttgtctcnnntgnctgttacattgccacgccctgtttctcgggtctcctatttcactggttcactccatctggacatgactgccggactccaacctgattttcattgtcttcacgatgattctttgtttttgcgtttgcta

SEQ ID NO: 179951 - DNA, 268 bp, Zea mays
  Clone ID: MRT4577_95696C.1
gaacagtccgtctggatctgggcgtacggtgattaccaagagttttgtgagaagacggtagggtccctgacgcgattctgcacgagtggtgggaaaacttgatgctgcggctgtgcgttaggttcaggtgcctgtggtatgtgtgatcctgtgcttgaaatgtaggggtttagtcactttagtggatagaattgtggattgttgagtatgttggtgccacttgtgttttagtgtttacctaagcttgaaattgtcattcgatgggtac

SEQ ID NO: 179952 - DNA, 320 bp, Zea mays
  Clone ID: MRT4577_95697C.1
aaacacaaaagggctcagcgtcaccctttttctaccatgcaaactgacttcacactttttttgcagaaccacctaatcaccttattgtaagtggaaatgtgctggttgtcacatttccaaatgaccatccttgggacaaccacaaaccaaaaaggggtgattaaaataggctttatgtggggggggggttagcttaaagataacacttgtagcagccttatattccctaaatcccttaatgtttgtgggactgtgccgtgtttaacaattccgaattacccttctttggcccacccccaaacaaaaaggggggtttaaaa

SEQ ID NO: 179953 - DNA, 472 bp, Zea mays
  Clone ID: MRT4577_95698C.1
aagccgatcaacactacaagggctgcaaagtacactctcactacttgtaaccatgcctatgattccaaacccttctcttcctagggcctatatcatggtgggcggtgcggacggccctagcgtacatgcaacaacgcaatggtactcttggaactgaaacccatgactgctaggatcaataacatccatgcaacatccatttaatccgctgaaacccacaagaacccctggtgatgcggagccatatcattaagcaaattgacatatttactcttactgcgctgaatagcaaacaactcgcattcatgaggcaggactacctcatttatccgacatctaatccgaggatcaccaacgccgctttcagcatgacgactgtcccccatcttgcaaaagccatacacgcttcagtttctccactggactgaagatagtaacaaaactgttcgtgaataaaacctgaatcacccac

SEQ ID NO: 179954 - DNA, 133 bp, Zea mays
  Clone ID: MRT4577_95699C.1
actttcaggctccagagctctgcaaggcctctgcatgtcccctttcagggtccagagctctgcaaggcctctggctgtcccctttcaggctccagagctatgcaaggcctctgacctgtgccctttcaggctc

SEQ ID NO: 179955 - DNA, 528 bp, Zea mays
  Clone ID: MRT4577_9569C.1
ggcgggtatcttcatcccggcgtgcctgacctagatcagcgtcctcaatacgcccttctggtactactcgatggccgagcagcagtgctaaacacgacacgcacctacaactcttcattattggagcacatcctgataggatgagccctgggccgacgctagggctgtcatcatcaaccccctaatcgctaataccgtagcccatatggccgaggaacaagctgacctgatccgacgggggtaccctgacggactgtggtttgaccagctcgggtggagctgcggctaggcggagaacacagggagctgggcaccaaagagattaagaacgggctcctcgctcatgctgagaagaatgggcgcttggctccagggcgagtacacacgggaccggtcgcattgataacctctttgggcaccttgttgacactggccacgacacgcatcttgcaggcattcacacctaaatgaggcagctctgatgaaccttggcagttcgaggagtgctaccacacatgcatgcattga

SEQ ID NO: 179956 - DNA, 231 bp, Zea mays
  Clone ID: MRT4577_956C.1
tctatgaagccagcgtactttatcttgcaccactgacgatgacgacaactagggccaataggattggatgtgtggaagggacatcatgacagaccaaggcggccagagcaaggctattgagcgatacaagtgcagaggcggaaccagagatgacagttccatcactgttgacgcctatgacacagcatcctcacgttaatgcggtaagaccactgtctatctttgaccaaa

SEQ ID NO: 179957 - DNA, 685 bp, Zea mays
  Clone ID: MRT4577_95700C.1
ccatgggaagaaaagacacctcgtcctcctccgcggccaccggcggcgggaaaaaggagaaacctatgtcggtgtccgccatgctcgcctccatggacgctcccgcggccaaggccaagtcttccaaggccaaggccaaggccaagccttccaaggcgccggcgtcctcctacatgggcgacatcgacctgcccccctccgacgacgaggacgaggaggaggcccggctcgccgccgccgccaagcccaagccggcccgcgccgccgtcgtcgatctcagcgccggcgccgcgccgtcgcacaaggacgccaagaagaaggacaagcgcgaggccgtggcggccgcggccgccgaggccgccaggcaggaggcgctccgggacgaccgcgacgccttctccgtcgtgatcggcgcgcgcgtcccgggctcctccgccgacgacggcgccgtcgacgacaacgtcagggacgtcgtgctcgagaacttctccgtctccgcgcgcggcaaggagctgctcaagggcgcctccctccggatctcgcacggccgcaggtacggcctcgtcggccccaacggcatgggcaagtccaccctgctcaagctgctgagctggcgccaggtccccgtgccgcggaacatcgatgtcctgctcgtcgagcatgagatcatcggcgatgaccgctc

SEQ ID NO: 179958 - DNA, 469 bp, Zea mays
  Clone ID: MRT4577_95701C.1
gcaaaaaacatttatttaataatatgaggcaggcaaaacatgtaaaaatgtgagaatcgagctcctgggctgaactgaagcaaaaaaaatgatgagtaaatgggggtagagagaagacatgtttacaacattgttgcctaatcatgatcaccattggctcatagaataaactcgatactatcctgcacctgtcttggtccagtccttcaagctcttgttgcaccatacaaccatcacatgttattggaatttagtagtaaaatgcacatccatatagcaataatatagtttcatacttattggtaaatgcagagtattttctagtccttcaagcactattttcttggtccagtccttcaagcagcactattttctagtatgattttagccaaccaaaatagcatgccttccactgcagatggccttattagtccatcctaatttcacaagcatttcaatttagagggaa

SEQ ID NO: 179959 - DNA, 432 bp, Zea mays
  Clone ID: MRT4577_95702C.1
cgttgctgtcgccgccaccccgacgttctcctcatggtcgaggtgggctaccgcttccgcttcttcggcgaggacgccgccgtcgccgccgcggtgctcggcatcgtcgcgcacccggaccgcagcttcctcaccgccagcgtccccaacttccgcctcggcttccacgtccgccgcctcgttgccgcgggccacaaggtcggggtcgtgcgccagaccgagaccgccgccatcaaggccgcggccaggggcgtcggaggcgccccgttctcgcggggcttgtccgcggtctacacgcgcgccacgatcgaggccgcggcaggcgagctggagggtggcggcgccgccgcgcccgaggaggggagcagctaccttgtctgcatcgtggataaggaggtggaggcggcggggagggaggggccgacagcaacg

SEQ ID NO: 179960 - DNA, 451 bp, Zea mays
  Clone ID: MRT4577_95703C.1
acaagctttttttttttttttttttttgttttttttttttttttttttttttttttttttttttattttttttttttttttttttttttttttttttggaaatatattgggataaatctcaatcaatatattgattatttctaggaaacacatgccggaatgggggccccattttcgagtccatctcatatgtaatctaaaagagggcccccccaacgatgggttgctgcctcgacaagacagggtttatcaaaaaaaactggttgtatggcaacaattgttgctgctgtaggaaggcagccaccaatgggttagccactgctaggggattaagaaactggtgtcgctgttgtaggtccccagcaaagttcgacataatccgttggttgaatggaaacaactgttgcaagtaggcacacagggtttgccacaactagttgagtcaaagctg

SEQ ID NO: 179961 - DNA, 601 bp, Zea mays
  Clone ID: MRT4577_95704C.1
ggccgcttttttttttttttttttggtgtttttttttttttttttttttttttttttttttttttttttttttttttttttttttttttgggaacaacttttttaaatagggaaacacatgccccaaaaactcgcgccgggggcggggaatttactagaaaaacatgcccccaaagggcagtctcaagcagaacaattagcagcgggggcataaaaaacattacagaggtggaaaaaaaaccctagggagcatgtaacagctggggggacccctactgctaaacccactaaacggggggttaagaaccgagggaacatttttaaaacaaggggctaagggggtccaccagcgatctaagggggatttttaaaacaagctttcttttccagctaaaactaaacactggttcacctcgaccatcaaaagggcatgtatggaaacgggtaaatttgttaaggcggcccctttatggcaacctaaaacctctcctgcccttggttgggaccctcagacccaggtgaagaagaaacaaatgttatgggaagtcccttgggaccaaaacggccagcccgaccaaccctatgcgggtttgtatcaggg

SEQ ID NO: 179962 - DNA, 479 bp, Zea mays
  unsure (1)..(479): unsure at all n locations
  Clone ID: MRT4577_95705C.1
ttggcatcctctacacggccggccttgttttgggtttttttaatatatcgagnaaaatctcaatcaatatattgcattatttctaggaaacacacgtcggtatgagggcaccattatcgagtacatctcatatgtaatctaaaagaggcacctccaacgatgggttgctgcctcggcgggggggggggcatcaaanagaactggttgtttggcagcaattgttgctgctgttggaaggcggcgaccaatgggttagccactaccaatggattaagtaactgttgtcgctgttgtaggtccgcagcagagttcgacagagtcagttggttgaatggaagcagctgttgccagtaggcaacatggtttgccacagctagttgagtcagagctggtacaatctgttgcaccacttgttgttgccggtctgtatgtgccttgcccttcgcgggcgggcttgttgaaagctgctgttgtttgtc

SEQ ID NO: 179963 - DNA, 1606 bp, Zea mays
  Clone ID: MRT4577_95706C.1
ggacgagctctcgaccgcctcctctcccctcccccggctctgtctgttgacttaccccgtcagctttctagtcagctgctcccgttgcatggggaaggagaagtcccacatcaacattgtggtcattggccatgtcgactccggcaagtccacaaccaccggccacctcatctacaagcttggaggcattgacaagcgtgtgatcgagaggtttgagaaggaggctgccgagatgaacaaacggtccttcaagtacgcttgggcgctcgacaagctcaaggctgagcgcgagagaggcatcaccattgacattgccctgtggaagtttgagaccaccaagtactactgcaccgtcattgatgcccctggaccccgtgacttcatcaagaacatgatcactggcacctcccaggctgattgtgctgtccttatcattgactccaccactggtggtttcgaggctggtatctccaaggacggccagacccgtgagcatgccctccttgctttcactcttggtgtgaggcagatgatctgctgctgcaacaagatggatgccactacccccaagtactccaaggcacgttatgaagagattgtgaaggaagtctcatcctacctcaagaaagttggttacaaccctgataagattgcctttgttcccatttctggttttgagggcgacaacatgattgagaggtccaccaaccttgactggtacaatggcccaaccctgcttgaggctcctgaccagatcaccgagcccaagaggccttcagacaagcccatgcgtctagccctccaggatgtgtacaagattggtggttttggaactgtaccggttggtcgtgtggagactggtgtcatcaagcctgttatggtagtcacctttggtccaactggcctgactaccgaggtgaagtctgttgagatgcaccacgaggcaattcaggaggctcttccgggtgacaatgttggcttcaacttgaagaatgttgctgtcaaggatctcaagcgtgggtttgtggcctccaactccaaggatgaccttgccaaggaggctgccagcttcacttcccaggtgatcatcatgaaccacccggggcagatcggcaacggctacgcccctgtgctggactgccacacgtcccacatcgccgtgaagtttgctgagctcattaccaagattgaccggcggtcgggcaaggagctaggagaggagccaaagtttctcaagaacggtgacgccggtttcgtgaagatggtccccacgaagcccatggtggtggagactttctccgagtatcctccactgggtaggtttgcggtccgcgacatgaggcagacggttgcagtcggcgtgatcaagagtgtggagaagaaggacccaaccggcgccaaggtgaccaaggcggccgccaagaagaaatgatgatgatgatctgaatgtaatccatggttccctggtttctttgctggtcggagtattttgttgggtggtgctagtagtagttaacaaaaggataattttcatgggttcattgtctacctttggactgttgtgttcgatgattgcgtttttgcttaccacactatatatattggg

SEQ ID NO: 179964 - DNA, 511 bp, Zea mays
  Clone ID: MRT4577_95707C.1
acgggcacgcggaagcgcagcaaatgcgtgcattattaccaatgctgacatggctcctagctccattgttaccaggtcctgccaccagttactgtaatggccttcgaacacccagctgtgcaagcctataggctacaacatgcgaacgcggtgagacgtcttacaacaaccaatatgcccaattgcacacaacaatccttgacacatgtaacagtacaaaccatggcaacgcaacagcaacaacagttcctaccagcactgagccacctagccatggtgaaccctgtcgcctacttgcaacagcagcgtgcttgcatccaacccacttgctctaacagacgtagctgcaaaccagcaacaacaacaactgcaacagtttctgccagcgcttagtcaactagccatggtgaaccctgccgtctacctacaacagcaacaactgctttcatctagcccgctcgctgtggccaatgcacctacatacctgcaacaagaattgttgcaacagatt

SEQ ID NO: 179965 - DNA, 747 bp, Zea mays
  Clone ID: MRT4577_95708C.1
atacccctaatattgtgagcattcagaaaccaccaagcgaagctacctagcaacgacttaacaacaatggctaccaagatattagccctccttgcgcttcttgccctttttgagagcgcaacaaatgcgttcattattccacaatgctcacttgctcctagagccattataccacagctcctccgaccatgatacttcaatgggacttcgaacacctcagctgtgcaagcctacaggctacaacaagcgcttgcggcgagcgtcttacaacaaccaattaaccaattgcaacaacaatccttggtacatctaaccatacaaaccatcgcaacacaacagcaacaacagttcctaccagcactgagccaactagatgtggagaaccctgtcgcctacttgcaacagtaggtgcttgcatacaacccacttgctctggcaaacgtagctgcataccaacaacaacaacaattgcaacagcttctgccagcgctcagtcaactagccatggtgaaccctgccgcctacctacaacagcaacaactgctttcatctagccctctcgctgtgggtaatgcacctacatacctgctacaacaattgctgcaacagattgtaccaggtctgactcacttagctgaggcaaaccctgctgtctacttgcaacagctgcttgcattcaaccaactgactgtgttgaactctgctgcgtacctacaacagcgacaacaggtacttaatccaccagca

SEQ ID NO: 179966 - DNA, 730 bp, Zea mays
  unsure (1)..(730): unsure at all n locations
  Clone ID: MRT4577_95709C.1
attcggctcgaggacggcccagagatggtgacgcagtgccccatccgccccggcagccgttacacctaccgctacaacgccacggggcaggagggcacgctgtggtggcacgcgcacagctccatgctccgtgccaccgtccatggcgccattgtcatcaagcccaggaacggcgcccaggggtaccctttccccaaacccgaccaggagcggatcgttctgcttggcgagtggtggaacggcaacgtgttcgacctggagcgcaacgccttcctcacgggcaacctggtgcctcaggccgacgcctacaccatcaacggcaagccaggggacttgcacaggtgttcgggcggcagcaaccgcaggcccagaaccttcaagctcaaggtgcggagcggctcgacgtacctgctccggatcatcaacgcggcggtgaacacgcccatgttcttcaaggtcgccggccacagcttcacggtcgtgggagccgacgcgggctacacagcgccgtacgagaccgacgtcgtggtggtggcgccggggcagaccgtggacgcgctcatggccacggncgccgcgccgccgtcgcggcgccgctactacatgatggcctncccctacaacagcgcgcgcccgagccttccgttcaggaacagcaccgccacagccgtcgtggagtacgtcgacgtcggccagcagaacaagcagggaccgcngcggcggccggtgc

SEQ ID NO: 179967 - DNA, 719 bp, Zea mays
  unsure (1)..(719): unsure at all n locations
  Clone ID: MRT4577_9570C.1
ggccgctcgaggnccggccggttccgcggaaaaaaaaaaaaaaaaaaaaaaaaaaataacaaaaaaaaaaaaaaaaaaaaaaaaaaaaaaaaaaaaaaaaaaaaaaaaaaaaaaaaaaaaaaaaaaaaaaaaaaccggggaaaaagccccaaaacggaaaaggggggggggttttcataccccccaatttttttttccaaaattggggggggggattggggggaattgggaaatggaaggtttacttgccctaagaaaaaaggttggaaaaaaacaaaaaaagattttttttttttttaaaaaaaaaaaaaaaaaagggccccaagggccgggccccctcaaaaaaaagggaccccccggggcgggggaattccaaaaccagtttttccaaacccgccccccccggggggggcccgggaccccattccccccaaaagggggccaattaccccccccccccgggccgccttttaaaaacgccgggaggggaaaaacccgggggtaccccaattaaaccccttggaacaaatcccccttttccccgggggggtaaaaagaaaaaggcccccccccaatccccttcccaaaaattggcccccccgaaggggcaatggaaattggaaccgttaaaattttggtaaaaatcccggtaaaattttggtaaacccccccctttttttaacccaaagggccaaaacgggaaaaaccctttataactc

SEQ ID NO: 179968 - DNA, 509 bp, Zea mays
  Clone ID: MRT4577_95710C.1
gttgggttttttttttttttttttttttttttttttttttttttttatcgaggaaaatctcaatcaatattattgatttatttttagggaaacacatgttggtttgggggccccattgtcgagtacatcttatatgtaatttaaaaaatggggcgcggggacgatgggttgctgcaagggagggttcatcaaagagaactggttgtatggcagcaattgttgttgctggtgcaggaaggtagcgaccaatgggttagccactgccaatgggttaagtaactgttgtcgctgttgtaggtacccagcaaagtttgacacagccagttggttgaatggaagcaactgttgtaagtaggcaaaagggtttgccacagctagctgagtcagagctggtacaatttgttgcaacaactgttgttgtaggtacctaggggcattgcccaccggaagcgggctatatgaaagtagttttaggtagacgggggggttcaccatggctagttgactga

SEQ ID NO: 179969 - DNA, 540 bp, Zea mays
  Clone ID: MRT4577_95711C.1
gccggccgggccgggaccataatattttgaacattcagaaacacacctagcgaagtgcactagcaacgacctaataacaatggctaccaagatattagccctccatgggcttcttgccctttttgtgagcgcaacaaatgcgttcattatcccacaatgctcacttgctcctagtgccattattccacagttcctcccaccagttacttcaatgggcttcgaacacccagctgtgcaagcctacaggctacaacaagcgcttgcggcgagcgtcttaaacaaccaatttcccaattacaacaacaatccttggcacatctaacaatacaaaccatcgcaacgcaacaacaacaacagttcctaccagcactgagcctcctagccatggtgaaccctgccgcctacttgaaacagcaactacttgcatccaaaccacttgctctgccaaacgcagctgctaaccaccaacaacaacagcctgccaccgccttctgccagcacacagtccactaaccatgagtgaaccctaccgccctacct

SEQ ID NO: 179970 - DNA, 729 bp, Zea mays
  Clone ID: MRT4577_95712C.1
tggtacctcgaggcggccgggacggtgtttcccttgtacagtagtactccaaactgctacccggcttcctcagccgtcgtctcatctgccgccgccatactcctgtccacctgagtacctgaccggcatccttccccctcctgcccgatccctcgaggcggagatccctaggccgtcggccgggatggcgggggcgctggccctcgcggtgttgctcgccgtcgcgtcgctccatgctgaggcggtgtggctggacgtgccacagtcggggaccaagtgcgtgtcggaggagatccagtctaacgtggtggtgctcaccgactattccatcatgttacttcaccatatgggaacaccttgcatcacagtgagaattctacagttggtcaatttgcattcacaaccgcagaagctggaaactacgttgcatgcttctgggttgatagtgcagagaaaggatcaggagtatctgtgaatcttgactggaagattgggatcgcaacaaaagattgggatgctattgctaagaaggaaaaaattgagggtgtagaactagagcttcggaaacttgaagtggcagtgcaggccattcatcagaacttgatatacctcaaagaaagggaagcagagatgcgaactgtgagtgagacaacaaattcaaggggtccgtctggttcagtactctgtcgctatgggtctgcattgcggtatcgggttttgcaagtccga

SEQ ID NO: 179971 - DNA, 449 bp, Zea mays
  Clone ID: MRT4577_95713C.1
ggctgtcgatgacttatagcagccggccctccttttttctttttctcagatcagcggtgagcaggtaccacaccactctactgacgcccgacgagcagagtaacatcctccttcagccatggttaaggagaagactcacatcaacattgttgtcattggccatgttgactcttgcaagtcgaccaccactggccacctgatctacaagctaggaggtattgacaagcgagtgattgataggctcgagaaagaggctgccgatatgaacaagcggacattcaagtatgcttgggtgcttgacaagctcaaggctgagcgtgagagaagtattacaactgatattgccctgtggaagtttgagaccaccaagtactactgcacttgtattgatgccccgggacaccgtgacttcatcaaaaatatgatcactggcacttcccaagctgact

SEQ ID NO: 179972 - DNA, 1184 bp, Zea mays
  Clone ID: MRT4577_95714C.1
ctccatcgcgacaagaccagcatcacgtgaccgcctcatccgccgaggccaccccttgtacagtagtactccaaactgctacccggcttcctcagccgtcgtatcatctgccgccgccatactcctgtccacctgagtacctgaccggcatccttccccctcctgcccgatccctcgaggcggagatccctaggctgtcggccgggatggcgggggcgctggccctcgcggtgttgctcgccgtcgcgtcactccatgctgaggcggtgtggctggacgtgccacagtcggggaccaagtgcgtgtcggaggagatccagtctaacgtggtggtgctcaccgactattccatcatgttcgagtcccacccctattcgcatcccaccatcgccgtcaaggttacttcaccatatgggaacaccttgcatcacagtgagaattctacagttggtcaatttgcattcacaaccgcagaagctggaaactacgttgcatgcttctgggttgatagtgcagagaaaggatcaggagtatctgtgaatcttgactggaagattgggatcgcaacaaaagattgggatgctattgctaagaaggaaaaaattgagggtgtagaactagagcttcggaaacttgaagtggcagtgcaggccattcatcagaacttgatatacctcaaagaaagggaagcagagatgcgaactgtgagtgagacaacaaattcaagggtcgtctggttcagtactctgtcgctatgggtctgcattgcggtatcggttttgcaagtccgacaccttcaagggttcttcagaaagaagaagctcatttagagtctctctgtaagatgttgcgctgtggttcagatgttgttcaccttggaagggtacaattttgccttttacatggaacatttcacaccagtgatgactgatgggctacttgtactgtatgtaatttaagtacgattggatcgaaaatctatatttcagggaaaaaaatcttatatttaggctccagcacatacatgtaagtgtaaccaggggatagcccatctaggcatgttgtagaatgagactgaactcatcgtgacagcaaaatcgtggatacttaggcccttgttgccttccgatcggtcttatcgatgctagccctcgattattaaaaaaaaaaaaaaaaaagctgtg

SEQ ID NO: 179973 - DNA, 378 bp, Zea mays
  Clone ID: MRT4577_95715C.1
cgccgtctgacttctgcgcctacatgggggactctgtcccttgcaagttcaatctcacctccaaccatgggtaaagagaagtcccacatcaacattgtggctattgaccatgtcgactctggcaagtcaaccaccacaggacaccttatctacaagcttggaggcattgacaagcgtgtgatcgaaaggtacgagaacgatgctgctgaaatgaacaaacggtacttcaagtacgcgtgggtgctcgacaagctcaatgcttagcgtgagagaggcattaccattgatatcgatctgtggaagtgtgataccaccacagtactactgcacggacattgatgcccatggacaccgtgactttatcaaagacatgatcac

SEQ ID NO: 179974 - DNA, 744 bp, Zea mays
  Clone ID: MRT4577_95716C.1
attcctcccaactctccgtctgccttctgcgcctccatttcggcctctgtcccttgcaagctcgatctcacctccaaccatgccgtaaagataagtcccacatcaacattgtggttattgcccatgtcgactctggcaagtctaccaccacaggacaccttatctacaagcttgctaggcattgacaagcgtgtgatcgagagggttgataacgaggctgctgaaatgaataagcggcccttcaaggacgcgtgtgtgctcgaacaagctcaaggctgaccgtgagagaggtatcaccattgatattgctctagtggaaggttgagaccaccaagtactactgcacggccattgatgcccctggacaccgtggacttcatcaagaacatgatcactgctacctcccatgctgactgtgctgtccttatcattgactccaccactggtggttttgaggctgggatctcccacgatgggcagacccgtgaacatgctctccttgcgttcacccttggagtgaaccagatgatttgctgctgcaactagatggatgccaccactcccaaatactccaaggcgcgttatgaagagattgtgaaggcagtctcatcctacctcaagagagttgggtacaaccctgataagattgcctttgttcccatttctggatttgaggacgacacatgattgagaggccaccaaccttgactgttacaaggcccaaacctgcttgatgctcttgac

SEQ ID NO: 179975 - DNA, 549 bp, Zea mays
  Clone ID: MRT4577_95717C.1
ggccgcttttttttttttttttttctttttttttttttttttttttttttttttttttttttttttttttgaagagtataaggtatatacatgaaacggtttgcatgcagaccgctagtaattcaccaaaataatacaaagtaatgagaccttcctggcaatcccgttaaaaaaaaacaggcagaccaggattgatgctagacatgatcaaacccgaggcctaaacaaacaagtacctaaacatcaatacaccactttaatctttaatctatgaagtacagagcaagcaagaacagcttgatcaggaaccgggggagacataacgagcaaaggcgcattatgaaattagtagtatcgagtcccagtcgatctccatggaggggtatttgcgaaggccgaagctctcggaatcatcccatggcgcttctgagaagtcgagcagttgcatatccagcaccacgtcggaggacccaggggaggacacgtcgccgtctgcggaaaacgagctatcggagccggaggagcccggctcgctcttgacgtgtggac

SEQ ID NO: 179976 - DNA, 1082 bp, Zea mays
  unsure (1)..(1082): unsure at all n locations
  Clone ID: MRT4577_95718C.1
cggtaccggccttcccgggntccagtgcaaacaagctcgctcgcaagcgcaacccacccacgtctacggtctaccacacgaagcatcgtagccagccagccagctaaacccacaccacacatggccgggatcgtggtggtgttcgacttcgacaagacgatcatcgacgtggacagcgacaactgggtggtggacagcctcggcctcaccgacctgttcgagcgcctcctccccaccgcgcgtgcccgccgccgtcagggccgcgcacgcgctcggctgcgacctgcgcgtgctcagcgacgccaacgccttcttcatccacaccgtcctggaccaccacggcctgctcgcctgcttctcccaggtcaacaccaaccccagccgcgtcgacgcccacggccgactccgcatcgggccctgccacgacccgcgcgcggcgccgcacggctgcggcgtcggcacctgcccgcccaacatgtgcaagggcctcgtgctggaccgcatcctccgcgaggccgaggccgaggccgagaccgcatcctccgcgaagccgcgcgtcatctacctgggcgacggccgcggcgactactgcccggcgctgcggctggcgcgcacagacttcgtgatgccccgcaggggttaccccgtctgggacctcatctgcgaggaccccgcgcgcctgcaggcggaggtgcacccctggaccgacggcgccgagctggaggagacgctgctgcgcctcgtgcggagggcggtcgtggaggacgccgcgctgccgccgccgccgccgccgccgctcgactgcaagctcgagtccatgcccgtcgccgcgcaggacggtatgcccatcgtgccgctgggcgtcaagaactgatactgtctctggttcagaattgaggtcgccggttagagctccaacaaattccgggcgaggcacggcgtaccgttagtagcgtttcactaattttgtgcgtctgtggtgtatccgtcctgatcgagtctgttgctgctgaattggttacgactcgttgtatcttactaaaaaaggtaaagttaataatggattagacatggtactattt

SEQ ID NO: 179977 - DNA, 1593 bp, Zea mays
  Clone ID: MRT4577_95719C.1
ttgggaccctcgaggccggccatcccgcgctcggcgcacccgccggcccgaccgcgaaccaaaccagaagctgggcgccacgcgtggtttggcgaatctactccaccgagagaaggcgagaacccaacagcaccgaggctggctcgctacgctattcttagagcatctctgtaatattccctcggcatcttccccttcccgccccgacgcccggtatataaaggccgcctccaccgcggctccctagccatcgatcgagtgcaaacaagctcgctcgcaagcgcaacccacccacgtcttaccacacgaagcatcgtagccagccagccagctaaacccacaccacacatggccgggatcgtggtggtgttcgacttcgacaagacgatcatcgacgtggacagcgacaactgggtggtggacagcctcggcctcaccgacctgttcgagcgcctcctccccaccacgccctggaacacgctcatggacacgatgatgggggagctgcacgcgcggggcaggacgctggccgaggtgaccgaggcgctcagggcggcgcccatcgacccgcgcgtgcccgccgccgtcagggccgcgcacgcgctcggctggcgacctgcgcgtgctcagcgacgccaacgccttcttcatccacaccgtcctggaccaccacggcctgctcgcctgcttctcccaggtcaacaccaaccccagccgcgtcgacgcccacggccgactccgcatcgggccctgccacgacccgcgcgcggcgccgcacggctgcggcgtcggcacctgcccgcccaacatgtgcaagggcctcgtgctggaccgcatcctccgcgaggccgaggccgaggccgagaccgcatcctccgcgaagccgcgcgtcatctacctgggcgacggccgcggcgactactgcccggcgctgcggctggcgcgcacagacttcgtgatgccccgcaggggttaccccgtctgggacctcatctgcgaggaccccgcgcgcctgcaggcggaggtgcacccctggaccgacggcgccgagctggaggagacgctgctgcgcctcgtgcggagggcggtcgtggaggacgccgcgctgccgccgccgccgccgccgccgctcgactgcaagctcgagtccatgcccgtcgccgcgcaggacggtatgcccatcgtgccgctgggcgtcaagaactgatactgtctctggttcagaattgaggtcgccggttagagctccaacaaattccgggcgaggcacggcgtaccgttagtagcgtttcactaattttgtgcgtctgtggtgtatccgtcctgatcgagtctgttgctgctgaattggttacgactcgttgtatcttactaaaaaaggtaaagttaataatggattagacatggtactatttgtttctgtctaaacacgagggacgacggagtctgtctaaacaaatctccgagctgagcttgttgtgcgccataaaacagagagagagaggtaagctgtattcggtaccgcagttttgccgatggagctaaatacgttttcataaaaaaaaaaaaatgaaaaaaaaaaaaaaaaaagcg

SEQ ID NO: 179978 - DNA, 286 bp, Zea mays
  Clone ID: MRT4577_9571C.1
aagaatctagaaatgtactttcttatttctgggaagccacaaacatcagacaaaaaactttattattgaactataactcataagaaatctaaaagagggccggtcgcgtgggtcgtcccggggcttctcgggccggggcctgctggcgttcccgctttccctatggtgtgtcgttttccagcttggcgtgttcatggccgttgctgttgcctgtgtgggattgttgtgcgctcgcggttgctctcggcgtgcgagccggaggcgtgttgtgtgtggcctggggtgc

SEQ ID NO: 179979 - DNA, 650 bp, Zea mays
  Clone ID: MRT4577_95720C.1
gtgcggcgctcaggcggcgggttcgaatacctcatgaccctacactcccggagtggatagtaggtgatacagaagcctaagaagcatccgaaaatgaagtagatcctctaggccgttaggacgatatcgctcctcgagggccgcttcactaggcaggaatgcaggtatggtagcgaagagatctaggaagtcatccgggatagcacctatggccactgactccgcgctagccgcggcaagtacccaaagaacgtgatccgcaaggactccgacgagaagactgtgaaaaaccagctcgccaagtgcttgatcaagctcgacaacttcactcacctacatgcccacccactacaccctcgacgtcgatttcaaggatgacgccaccgatgaacacgacgcactctctacccatgagaagaaagtagacggctgccagaagcacaaagagcgtcttgacgacaagtacaataacggtgataacaggagggtctttacctggctccgcttctagatgctcggcctcccgaatagctctagctttaagtgtcgatactgctgtattggacacactcgatctctggtttcgcattatcatgaatatttcgggctgaggcctgggggtctcatacataaatttgctaatatatgtc

SEQ ID NO: 179980 - DNA, 647 bp, Zea mays
  Clone ID: MRT4577_95721C.1
ttctcgtctcaacacatatggttttaatcattttgcacttttggcaagggacgagccggtcatcacattaccatggtggacatttgagatttgcaaccttgttgtgcatagttttacacactaagcacccattgcaccgaaaaaatttgcaggatgaactagatgcaaaacctgaagagctggaaggagaagagttggaatctaagcttctagagcctgttgcagctctttcggtgcatccagtgcatgtcccaggaaacaagcaactagcttgccctacttcacagaaagttatagctaaatacgatgagctggctgcactacaagctgaaatggcattgtgatcaggattaacgcatggaccgaggaagcgcaatgacaagcctaatagcctgcaactgatgaaaggaatggtctctactacatgtattattgtccatcccatctttgtttaatggtcgtagctgctttatacaattattcctacctatgctagactgtgagccattgtatatcaatgtattttatcatattgatttcgtagcaacgtacgagcatatacctagtatatttataaacaatgtgtagcacttgccacatttaaacagctaatcttaaaaagacacgacatgcgaggattgttaatc

SEQ ID NO: 179981 - DNA, 653 bp, Zea mays
  Clone ID: MRT4577_95722C.1
tttttttttttttttttttgttcttttgtcggtctatttgttaaggatcaggttctctccctttttttttggcgaaaaaatgtaggcccctcagatatttgtttaatctgctcatacatctagctactagagatagcaagttaattaattatacgcaaagcaaattacagatctgttaaagttgaaccaagtctgttcatcggtaagaaattacatacagatatatgtctagctagctagggagagtcacgacgtagatgaatcgtacttggtgttggagaaatcgtagagcctgccggtgctggagaagatgatgaggccaacctccgcgtcgcagaggatagagagctccttcgccttcttcagcagcccgctccgcctcttggagaaggtcacctgcctgctcgtggagttgtctatcctccttatcactatcttccccctccccatccctccttctatctctcagatctagtctaggccggaccggatgggaaggaaggatcacacgggaagacgaagagctcgccggcggccggggggacgagcgatgactggtctgatgggggaattaaaggcggaagctatagcctagctactagaggccggttccattcctagccaccttccaaagagcggaacgggaagtgccg

SEQ ID NO: 179982 - DNA, 939 bp, Zea mays
  Clone ID: MRT4577_95723C.1
tctttctcctccatgcgctgcgcccctggcccctctgcccgagctcgcccatggcacgcagctgcgtcttcaagctcggtctccatctccatggcgccgtctgcccttgtcctgctccctagttccggctgagctcgcgccctgctccctggcatcgcaggctcgtcggtgttcctcccgttccctgctcggaccgcggcttttcccccggagctccctgtgctcgccatggccaccgcgcctgctccctggacggcgctcggattcctccttctcggccgtttccagcgcgcccatctccaacggcgcccggccaaagcctccctacgcgcgcgcctgctcccatgtcgcgccaccttagctcgctccctcaagctcgctgtgcccctgctttccacttccggtcgtccatggccgcgcgtcttcctcctacgcaggccactcgataactctccccaccgcacgctctccatggtcctaccaccggacgccattgcgcttgtctccctcggcgcgcctcgagctctctctactgcgtacccagcagtctcggatctcgccgatggttcatgctgttcttgtgctcgccttcatctccatggccctggtcgtcgcatagctgtacgcagcggaagcatggtgggttttggccgcgggcatggtcatgcgacgcgggatctgggcacgccgttgtggactccccgtcgatgcccccatgtactcgacgaaaagcctgagctataaatcatcgtggttcttgcagagttcgcgtcgaatttaatcctgcgtgagctgattcgctactactattattttgttatcgtggttcttgcaaagttcgcgtcgaatttaatcctgcgtgagctgattcgctactactattattttgttttaatgaatggattgatagatatgtaggttgtaaaaaaaaaaaaaaaa

SEQ ID NO: 179983 - DNA, 283 bp, Zea mays
  Clone ID: MRT4577_95724C.1
ctagaatccagaaagaagcacgtctcttatgatgattactattggaaaagaaaaatgatgctcatggtggaagcaactggaaaggttcaggagtttaccctaagaggtccagagatctcaggaagccttagtcttccagctcacagccttccccaggatggcctggcctctctgttctatgtgatggggtctagcattccttaaaattttgctgtcagcaagaatatatgggaacaatcctagcatcacattcaaaataggcctggcctgcacaattgcagaa

SEQ ID NO: 179984 - DNA, 591 bp, Zea mays
  Clone ID: MRT4577_95725C.1
ccggccgaggacccgttcgccccgtatcggtccctttctcctttctttttctaccgcccccttgttggtcgtgacccggtgcgaccaggaccgaatcctaaggagggcgggcgccgccgccgccgcctgttcttgttggacacggagaaacctggtccctactagaccgtgttgtcgatgtgcgggatccaagcgtttgcgcgcgcggactcgccagccggcgcactgacatgcgcgccgacggggatgaccctgtacgagttcatcacaagatgctagacctatgactcactgaccggatagtgcgaaacgtttaatcacctgtgggatcctgcagcatgtcacatgagcacatccgctcaagcacacatgcttgtaggctggaaggcgaatgatgaagctgttgtgcgtggctgtgatggctctgctcatatgcggccggctgcacaggtaccacatactgcagagaggctggtgatttgctgaattcggactatctaatggcttgtactgtgcacgactgcttgacagggtatgtcagcattataattatgtgcgtactagcgcgcgatcgcgccttctagaggcatg

SEQ ID NO: 179985 - DNA, 624 bp, Zea mays
  Clone ID: MRT4577_95726C.1
attaccgtgccggcctacttcaatgactcgcagcgccaggccaccaaggacgccggcgtcattgccggcctcaacgtcacgcgcatcatcaacgagcccacggccgccgccatcgcctacggactcgacaagaaggccaccagcactggcgagaagaacgtgctcatcttcgaccttggcggtggcacctttgatgtgtccatcctcaccattgaggagggcatcttcgaggtcaaggccacggctggtgacacccacctgggaggcgaggacttcgacaaccgcctggtgaaccacttcgtgatggagttcaagaggaaacacaagaaggacatcagcggcaacccgagggcgctccggcggctgcgtaccgcgtgcgagagggcgaagaggacgctctcctccaccgcccagaccaccattgagatcgactcgctctacgagggcatcgacttctacgcgaccatcacccgggccaggttcgaggagcttaacattactccgacaaccagcccggcgtgctgatccaggtgtacgagggtgagaggacgaggaccaaggacaacaacctgctcggcaagttcgagctgaccggcatcccgccggcgccacggggcgtgcccc

SEQ ID NO: 179986 - DNA, 454 bp, Zea mays
  Clone ID: MRT4577_95727C.1
gggcgacggacgcgtcctacgttcacttctgcccttccctaccaaacatttattcctactgatcgcttggcacacatcttgcgtgtgccaagataatagggcaggcatcactgcctccataaagcacccagatgtttcttcatactcaactgtacctccctgtatatatccacttgttgctctttccaatcgttgtactcgagggtctctaatctcattgctggcaagcaaaaggctcctctcccataattctctggtcagtgatttataactgactgttcgttttctctctatataacgagagatgtatatttgcgaacttgttatgcttatgttcgccaaccactatatattgttgctgaataattgcaacttcctacacaccgtattttgttgcacctgcatactcccctgaaattttgttataatcttactaacctcttttttttttttt

SEQ ID NO: 179987 - DNA, 292 bp, Zea mays
  Clone ID: MRT4577_95728C.1
cccacgcgtccgcccacgcgtccggccttggtaaagaacaagtccgatgataaatggatcacgagcccatccagatcttgggagttggttcaactggatgctgaattttccccacagatagtttcccttcttgctagttatcaagatggcactactgtccttcagaggacaattgatagaactctgagtgtgaagctgaagaagcatctattggcactgggttggagtattaagttgcagaaaggacgaaattcaagaaaatggccatcataaacacactacaagataccgg

SEQ ID NO: 179988 - DNA, 778 bp, Zea mays
  Clone ID: MRT4577_95729C.1
atcaaaggtgccaccgccaaggtcgaagatgagcacgttcttctcgccagtgctggtggccttcttgtcgagtccgtaggcgatggcggcggccgtgggctcgttgatgatgcgcgtgacgttgaggccggcaatgacggccggcgtcccttggtggcctggcgctgcgagtcattgaagtaggccggcacggtaatgacggcgttcttgatggtggtgctgaggtaggcctcggcgatctccttcatcttggtgagcaccatggaggagatctcctcggccgagaacttcttctcctcgcccttgtaggtcaccacgatcattggcttgtcggcggggcctgggacgaccttgaatggccacatcttcatgtccgcctgcacggacgggtccgagaagcgccggccgatgagtcgcttggcatcgaagacggtgttggtgggattcatggcgacctggttcttggcggcgtcgccgatgagcctctcggtgtcggtgaacgccacgtacgacggcgtggtgcggttgccctggtcgttggcgataatctccacccggtcatgctgccagaccccgacgcaggagtaggtcgtgccgaggtcgatgccgatcgccgggccctctcccttgttgccgcccttgcccgccatctctgctaaagccctgtgactatgagcgcgattcgaaatggaggactactttgtgcttttctggccggttcgctcgctgattgatgcttcggtctactgcctcccggccggcctcgaggtacccaatg

SEQ ID NO: 179989 - DNA, 203 bp, Zea mays
  Clone ID: MRT4577_9572C.1
ccttccctatttcaataatacattcaatttaaaatttacacttacacccatggtcacactggcccccacggaaaccagaaacaataccttactaatacaccaaaaaaaactacaataccaaggcttcattacaataatacaacacaatacattcttacgacaagtcaaaaccccccacattttccacccaaacaaaagcacct

SEQ ID NO: 179990 - DNA, 2489 bp, Zea mays
  Clone ID: MRT4577_95730C.1
tctctattttattgaaagccgggccgcctgccggtatccggtccggttttaattcccggccgacctccctctagacggcggccgccctcccaagggagggttcctttaatcctagatattcattgtctcgcatataggttaataaaggtttttagccatctaaaatagctttcgaagatatataaataccgccaatacatatgcagggctaatcactgtttatagccagggtactagtaaaaatgaacttaaacatgaacttgggggccctgtgtatggccaaaaaaaattgcataaaaataataataagatccactttgtaattgacgcaattatttaagcaaaaaatacatatatcagaatttcctcatttagtcgacttcttcgatcttgggtccagcaccgctgccaccagccggcgaagcatcctgatccatgccaccggccatgtcaggaccagcggcgccctgatacatcttcgcgatgatggggttgcagatgccctccagctccttcatcttgtcctcaaactcatcaacctcggcgagctggttgttgtcgagccaattgatggccccctcgacggcgtcatcgatctttttcttgtcgtcctccggtagcttggaggcgatcttgtcgtctctgatggtgttgcgcatattgtaggcatagttctcgagcgtgttcttggcgttcaccttcttctggtgttcctcgtcctcggctttgtacttctctgcctcctgcaccatcttctcgatctcctccttacttagccgtcccttatcgttggtgatcgtgatcttattcttctgtccggtggtcttgtcctccgctgacacgttgaggatgccgttcgcgtccatgtcgaaacacacggtgatctgggggacgcccctgggcgccggagggatgccagagagctcgaacttgccgagcagattgttgtctttggtcctggccctctcaccttcgtacacctggatgagcacgccgggctggttgtcggagtaagtggagaagacctgctccttctttgtcgggatggtggtgttcctggggatgagcacagtcatgacgcctccggccgtctccaggccgagcgagagcggcgagacgtcgagcaggagcagatcctgaaccttctcattgccctcgccagtgaggatggcggcctggacggccgctccgtacgcgacagcctcgtctgggttgatgctcttgcacaactccttgccgttgaagaagtcctggagcagctgctgcacgcgggggatgcgagtggagccgcccacgagaacgacgtcgtgcacgctgctcttgtccatcttggcgtcgcggaggcacttctccacgggctccatgcacttgcggaagaggtccatgttgagctcctcgaaccgggcacgggtgatggtcgtgtagaagtcgatgccctcatagagcgagtcgatctcgatggtggtttgggcggtggaggagagcgtcctcttagccctctcgcaggcggtcctcagccgccggagcgccctggggttgccagtgatgtccttcttgttcttcctcttgaactcctggacgaagtggttcacgagccggttgtcgaagtcctcgcctcccaggtgggtatcgccggcggtggccttgacctcaaagatgccctcctcgatggtgaggagcgagacgtcaaaggtaccgccgccgaggtcgaagatgaggacgttcttctcgccgtcgctgctcgacttcttgtcgagcccgtatgcgatggccgcggcggtgggctcgttgatgatgcgcatgacgttgaggccggagatgacgccggcgtccttggtggcctggcgctgggagtcgttgaagtaggccgggacggtgacgacagcgttcttgatggtggtgccgaggtaagcctcggccgtctccttcatcttgttcaggatcatggagctgatctcctcggccgagaactgtttctcctcgcccctgaactgcaccccgatcatgggcttgtcgccggagcccgggatcaccttgaaaggccatagcttggcgtcactctgcaccgacgcgtcagagaagcgccggccgatgagccgcttcgcgtcgaagacggtgttgatggggttcatggcgacctggttcttggcggcgtcgccgacgagcctctccgaatcggtgaacgcgacataagacggcgttgtacggttgccctggtcgttggcgatgatctcgactcggtcatgctgccacaccccgacgcacgagtaggtcgtaccgaggtcgatgccgatcgccggcccgtctccttttccggccatggagacgctctcgtcgagagtatcgtgaagaaggggaaaaaaatctccaggactcgcagagtatgcccgcgtacgtggaggaaatgaggaattaaggaagaacggaggaatgggcggacagcttatttgcatccaaccataccccggccggcctcgaggtacccaatg

SEQ ID NO: 179991 - DNA, 355 bp, Zea mays
  unsure (1)..(355): unsure at all n locations
  Clone ID: MRT4577_95731C.1
ccggaacgcaatctacgcgaggcaatctaggaatccacgagacccagacttctactagttcattgctgaatctcatccgacgccccccgattcgcccagcggcatcggagaacaagtccatggaagcccatccgaccggcgccgccatcccttcccccatggcggcaccacagccgccaccctcttccaccaccaccccgcccccaaccgctacaccacaggagccagccgccaccgccgtcaccgctgtgcgctctccccaacccgtgcgtttcgcattcctcgtcgtcgccgcgctcatgtccgcgtcgnggntcgncgagccgnncngcgcgctgttgttttccgccccccc

SEQ ID NO: 179992 - DNA, 336 bp, Zea mays
  Clone ID: MRT4577_95732C.1
ggaaccccggggcggacccacccgtccaagagtccttggcaaacggcaagcttttttttttggtcctggtggccaggaggtagggcctgaacctgaaaacccaccttttggtttgggttccaactaaggatcactaaaaagaatggcttttggtaggagggctcacagtaccagggatatggcatgcagattgcttggtcaaaatggcccaagttccaacacctcccccggcaaattgaaaatccaagccgacctggatttgtccagcgatgccaagaatcatctttttaaaaacttggtcggtttatcaggcctatttttgggcctagtttggtg

SEQ ID NO: 179993 - DNA, 304 bp, Zea mays
  Clone ID: MRT4577_95733C.1
cttgttgttaattcaagatacttggaccgcaatcaaatgataaggctgggaacaacccaatcaactgaaatgctcttgcctgctaacaattttctatatacaaaaaaacaccacagacttgtgaacacaccatgcttggctaaaaaaatcaaggacctgttcaaaactcaagcttggactgagtatttccctcaagatgtgccattttccaccttaacctaaaagcctcggtcacttgtgaattttaccttcccatataatgtggggggctgcacattctattgcagatacaggcaaggtctat

SEQ ID NO: 179994 - DNA, 1954 bp, Zea mays
  Clone ID: MRT4577_95734C.1
attgggtacctcgaggccggccgggatatggaccgcgagtattttaaacgctaaaatgtgacagtcgcccccccggcgacggagtccggcgaggcggggagctcaccgtcggcgagcgggggcagatcgcgcggcgcggaagtccgggcgagcgaagccaacagaaggtcctccggcaagcgatcgatctcgcagcaagcgggctccgtggctgccgtcgattccatcggttcccccgccttctcggctcctcgattttcacgattcttccgctgtcggtcttggggtgggggatgacggagggggagaaagctcactcctcttccctccccctggccccccccgcctccctcgccctgtccccccgcccccccccccccctcacccaccgcctccttctcctgctcctgctgctcccttagctagcgcggccggctgcgtcggcacgtcagggcgcggagaaaactcactcctctctctctctctcctctcgcctccgtcggccgtcgccatgacccgcgtcctcctccccctgcttctgctgttggcgctgcctggtgcgtatgcacgcccggcgcggcagtatttgggacagtgtccggggctggagtacaggctgccgccgttcgccgccgcgctccgggcaacctgccccgtctcgacggaggggtactcgtccccctacgaggttgttagtggggaggagcttctgaggatgttggatggcaaggaagagcacacggctgtccttttctatgcatcatggtgccctttctcgcaaagaaccagatcagtctttgatgatctgagctcaatgtttccacgggttaagcacttggccgtggaagagtccagcatcatgaaagccattttgtcaaggtaccatgtccgtgcactgccttccataataatagctcgcaactcacacgtgttctggcctcttggttcgaaagatctcgactccctggtcagcctttacactgctgctacaggtgaagagccagtggcatacatcggtagccggaagtggagcgcagcgcaaagcacagacggctatgcaaaggcttggaacagctcaattattagtgaaacagtgaagcgagaaccctacctagcattgagcatcctgtttatttgcctgagggtgttctttttcttcttcccaaagtcctttgccctcatccaagacttgtggaccggataccgcgagcagatcaacctcggaatcctcggcagattggcccagctgcttgaatgcgtgcctcacgccgtggatgtgaggaaggtgtggagcaagttgaggctcgtggttggagctaatgagaacggtagggtctgggcagccctaacttcgttgccccttggtgggcgaccttctccgatccacgggttgctgttggactgattggctcgaccatctaactgacagcaacaactaatatgcaatgattttatctgtaagcatttaagtaaggctctgggtttgttagattacgatccaactgtagatataatcttgatttgttatgggttttctataaatctacatgagccggtgatagaaaggtttaaatattaaatgtgatatatcgttggatcataatctaacagaccaggagtcttgtttgcatgattgtacataaagtctgattgcatattagttgttgctctgactgacagcacgagaacacgctggctgattcattgaattgcatcattgcatgcacttgacgaagtacatattgagacagataagtgaggtctctggctctctctgctcagaaacatgcatcctgtttgtagcatgtagtaaatcttagggacacaccgtggtggagcctttgtaaatcatactgtaacagtagtcgttttcatcatgtaatcggtaatggatgaatggtccatggacatccttcagtgtcgttttctgtacaagtctttgtttgcttcgcct

SEQ ID NO: 179995 - DNA, 374 bp, Zea mays
  Clone ID: MRT4577_95735C.1
ccgaaaaaaccggaaggggaaaccaaaattcccggggcccaaagggcaaccttttttgggaaaaggccccaaccccccccccgctacacggaaaaccccccccctttttgtcacaaaatggggccccaaaaggggcccccaaaacaaaccttttaaggaaccacggggtaaacccccccggggcctcaaaaaaaaaccccctttgccccaagttggggcccccccgtccctaaaaaaaacccaaaaaaccccggctgcggccccttttcttttaaaaggggtccaaaatctgggtaaagaaggggcacagggggaaaaaccccgttcccggaaccaacgccccccaaaaaaaccgccgggggggcaaaggcccc

SEQ ID NO: 179996 - DNA, 376 bp, Zea mays
  Clone ID: MRT4577_95736C.1
aaaaaaaaaaaaaaaaaaaaaaaaaaataattaaaaaaaaaactaaaaaaaaaaaaaaaacgagcgtcttttctaagaggctccatgcattacttacgcatgcttgcaacttcgtatctcttctatcgcatcaccttaattcaattcaatgcccgcatttttacaacttcaagactcgaaaaacctttgcgttcccgaattaaatcctcttggtgtaatttctcctttcaacagttaccttaatttcgaaattgccatcacatcacggctttgcctacaagggctcaacctgaatgacaaatggtacacgcacttaactggtccttaaatcgcaacatctttactgattacccccatcatgcccggtacatttgcc

SEQ ID NO: 179997 - DNA, 291 bp, Zea mays
  unsure (1)..(291): unsure at all n locations
  Clone ID: MRT4577_95737C.1
ccgacgcaacaaaanntttcttttgttggaagaggttagacggttgggagtgcagnagngtattcgaacttgtgaaagcaaagatgccaacactggaggaaatgaaagggtttgtgatttttttattattccatttatgcctgttgtgggggggggactttttttttttttatatgacatnggtctctgggtggggtggggtatatttttggagggttggtagccccagggcttggactgggactaggggtgggtggggcgttgtttggaggttttgttggggccgtgggg

SEQ ID NO: 179998 - DNA, 302 bp, Zea mays
  unsure (1)..(302): unsure at all n locations
  Clone ID: MRT4577_95738C.1
ggttggggttctttttttttttttattttcgttgtattaatggtttattctcctttccatttgttttgggtggcaaaaaaaacccccaaaatgaggcctcgcttgagggatggcttggtactccaaaccctttaacaagtgctgacgggagcccaccatttgaactttaggcgcccccccntnaccatacaaaaattttgtgggaccaacaaagacgtggggtccagaaacgacacaccggagccttggtgaaaggggacccttggaaacatcctggggggggggaaacatttcctgagggg

SEQ ID NO: 179999 - DNA, 1926 bp, Zea mays
  Clone ID: MRT4577_95739C.1
ccctcgaggctggccgggttccgtttccctcctctctccggactggcaacggaacctaaaccaaaagcaggcgagagtctagaccgcagcggaaggggagcaggcggcggccccgattgcggtaatggagctgtcgatgagtggcagctccctgcgaacgttcggccggtgcgtgaccttcctcgcgcgcgttgcctccgagctcgtgctccaggcgcaccccgccaagctggagatgcacacgcttaacagctcgcggtcggcgtacgcttcgatctccctagcgcgcgacttcttcgaccagtatcacctcgacgccgcggcttcggcaccgtcttccacgccgctgcagtgcagcgtcctcctcaagtccctgctcgccgtcctccgcacgccgcacgccgcgctcgaccgactcgccgtatccctcccagaacccgacgcacccaagctccagatcaccctccactgcctcaatggtgtgaggaagacgtactggatcgtgtgcagcgcagagcccgaggtgcagtcgctgtcgctagaccggggacggttcccgagccgcctagccattcggccgcgggagctggcgcggctgttgtccaacttccagtcctcgctgcaggagctcacaatcatcgctacagatcctgcttcagggttacctgatgctagcggtgacgtcgggggcaaggctgttgagctccggagctacaatgacccgacaaaagatgactgtgacactagactgcacacacaactgtggatcgaccctgccgaggagttcgtggagtttgttcatgctggtgatccggtggatgtcacctttggggtaaaagaactgaaggcttttttaacattttgtgaaggatgtgaggttgacatcctcctattctttgagaagactggcgaacctgttcttttggtcccgagattcggattggatgatggagcagcttctgattttgaagctactctagttctggctactatgactgtatcacaattatctgacagcgatgatgcccaacaaccagctacatcagcacaaaacgcgggagaaccaggggctgctgcaccaacactagttcctgaaaatgtctcgaaccatactaaaatatggtcggagctttcaggtagtactcccaaaagcattgaagctaacagagaaaatcatgcccagaagaagagaaacgcaagcactaatatgctgaacgacatgtcaatgctgcccaatgttacaaatgctccaagcaagccaccagttgcagataatgcaaacaatataatgcagcctttgcaaatggatcacatggaagaacgtcctgaaggtatcagtggtattcctcgatcacaacaccacccgagcaactgggtcggtgctgatgataacgacgatgacaatgaagacgacgaggagcttttagtccagacaacaccctactatatggactgaggataaatgctgattctaaaatatgtaggtgcatttcagcgtagtgtactatacgaacgaattaggaactagctgaaggctttacgtgtactcttgtagtcttatttctagtagggctggagttggtgactttgactgacgcagtaagaactctcttaacttaggtcatgtttgaatgcgttagagctaatagttaactgctaactagttgaagatgtctaaatagtctatctaatagttcaactattagctatttttaataaattacttaatagttagttagctaatttcgctatcatttttttagtcaactaactaactattagttctaatacattcaaatacctccttagtatctagtgtgactttcatttcttttcataatgtagagaaacattaaagttgatctgttccaattcgcatagatgttaaaagaaaaccgtgtgtttatatatgattcattcacttgt

SEQ ID NO: 180000 - DNA, 458 bp, Zea mays
  Clone ID: MRT4577_9573C.1
aaaaagggtaaggccgggaaataacataacccgggaactacgggaaagtttacaaatagggggggggggaaagcccttcactttcctttattgggcgatttctttcaaggtcccgaaaaaaaaaagaactaaatttgatacaggggggaaaaaaacaagccctaaaacggggtaccggtttgggggcgtccgggttcctatggttttccaagggtccggggcactgcccatttttttaaaaccgggaccataccgggccttgggagcagccacatgggctgggacgttgttaaaaggggtaccagccccgccgaaacccgaaaagaggtccaccccattccttttttgggaattaaaaaacatttcccgggggtggggatctaattgggggggctgcattgaaggggggggataattgggaaaaaagccaaccgggttgtttttagccggagaaaagg

SEQ ID NO: 180001 - DNA, 513 bp, Zea mays
  Clone ID: MRT4577_95740C.1
atcgggataaatctcaatcaatattttggttttttctaggaaacacacctcggtttgagggccccttttttgagtacatctcatatgtaattttaaattttgggcctccaacgatgggttgctgcctccacaagacaggattcatcaaaaagaactggttgtttggcagcaattgttgcttctgttggaagggggggaccaatgggttagccacttccaatggattaagtaactgttgtcgctgttgtaggtacccagcagagttcgacagagtcagttggttgaatggaagcagctgttgcaagttggcaacagggtttgccacagcttgttgagtcagagctggtacaatctgttgcaacaattgttgttgcaggtatgttggtgcattgcccacaacgagcgggctatatgaaaacagttgttgttgttgtccgttggcggcagggttcaccatggcttgttgactgagcgttggcagaaactgttgtagctgttggtgttgctggtttg

SEQ ID NO: 180002 - DNA, 360 bp, Zea mays
  Clone ID: MRT4577_95741C.1
gtcggaggccatgacgactgcgaggcttcgatcctcggcctccctacgcgttgcgtctgctcctccactactctgtgggtcccgtctcgactcctctcgccgtctccaggttcccatatttccaggtttctcattctattatctggttgcatttcccatcctccaggcctaaacgtcttgcaagacgcgacaactttcatgtgatcgactgcttgcacgcttagatactatgcgccacgattgctgctctcactatagaggctgaatgcagccttattgaccacctcctggagccgctaggattctcaactgcggactatgagccggacgctgtacgttcatatcctggggcagtctgat

SEQ ID NO: 180003 - DNA, 584 bp, Zea mays
  Clone ID: MRT4577_95742C.1
ccccatccccgccgccgcctcctctcggcatcttctccttcctcggagccttgggcaaagagaagactcacatcaacatcgtggccgttggccatgtcgactctgccaagccgaccaccactggccatctgatctacaagcttggaggtattgacaaccgcgtgatcgagaggctcgagaaggaagccgccgagatgaacaagaggtctttcaagcacgcctgggtgcttgacaagctgaaggccgagcgtgagaggggtatcaccattgatattgtcctgcgcaagatccagaccaccaagcactactgcaccgtcattgatgctcctggacaccgtgacttcatcaagaacatgattactggtacctcccaggctgactgcgctgtgctcatcattgactccaccactggtggctttgaggctgtaatctcccaggatgtccagacccctcagcatgccctcccttgattcccctcttggagtgaaggagatgatctgctgctgcaactaaatgtactacaccactccacaacccctccacagcgccccgttaccaaggaaattgccaaggcacgccctcct

SEQ ID NO: 180004 - DNA, 734 bp, Zea mays
  Clone ID: MRT4577_95743C.1
gccggccgggtccaaatactccccaactcgccgtctgccttctgcgcctccatttcgccctctgtgccttgttagctccatctcacctccaaccatgggcaatgagaacgtcccacactcaacattcgtggttatatgggcatgtcgactctggcaagtcgaccaccacaggacaccttatctacaagcttagtaggcattgacaagcgtgagatcgataggctccagaagggggctgctgaaatgaacaagcgcgccttcaagtactcgtgtctgctcgacaagctcaaggctgagcgtgagagaggtatcaccattgatatcgctctgtgcaagattgagaccaccaagtactactgcacgctcattgatgcccctggacaccgcgacttcatcaagaacatgatcactgatacctcccaggttgactgcgctgtgcttatcattgactccaccactggtgatgttgaggctggtatctccaaggatggtcagacccgtgaacatgctctccttgcgttcacccttggagcgaaacatatgatttgctgctgcaacaagatggatgcaaccactccacaatactccaaggcacgttatgaagagactgtgaaggaagtctcatcctacctcaagatagttgggtacaaccctgataagattgcctttgattccatttctggatatgagggcgaccacatgattgagaggatcaccaaccttgactgctacaa

SEQ ID NO: 180005 - DNA, 238 bp, Zea mays
  unsure (1)..(238): unsure at all n locations
  Clone ID: MRT4577_95744C.1
gttcgtatacaattactccgcctatgcgcttaacctaactgttgtactcacttatcccagggcagcagcccatcaccaaatgctccactcaaatctacacataatcgaaccctgctcctcaatattcaagccggcatcacatatattccatgcgacctcccttggtataaagcncatgaacgtccattatatacacctacacatatctatctatctcctttataacctgcaatacatc

SEQ ID NO: 180006 - DNA, 603 bp, Zea mays
  Clone ID: MRT4577_95745C.1
cctcgaggccggccgggccgggatcccccactcgccgtctgtcttctgctcctccatttcgtcctctgtcacttgcaagttcagtctacacctccaaccatgtccaaagagaagtcccacatcaacattgtggctattggccatgtcgactctgtgtagccgaccaccacaggacaccttatctacaagcttggaggcattgacaagcgtgctgatcgataggattgagaaggaggctgctgatatgaataagcggtccttcaagtacgcgtgggtgctcgacaagctctaggatgagcgtgagagaggtatcaccattgatattgctctgcggaagattgagaccgccaagtactactgcacggacattgatgcccctggacaccgtgacttcatcaagaacatgatcgactggtacctcccaggctgactgtgctgtccttatcattgactccaccactggaggttttgaggctgtgatctccgaggatggtcagacccgtgaacatgctctccttgcgttcacccttgtagtgaatcagaagatttgctgctgcaagatatggatgcaaccgctcccatatactccgaggcacgttatga

SEQ ID NO: 180007 - DNA, 539 bp, Zea mays
  Clone ID: MRT4577_95746C.1
atccaccacttgctctggcgaacggagttgcaaaccaccaacaacaacagttacagcagattctgcctacgctcagtctctagccatggagaaccctgccgcgctacgtacaacaacaacaactgctttcatttaacccgttcgctgtgggcaatgcacctacatacctgcaacaacaattgttagcaacagatggtaccacgctctgactcaactagctgtggcaaaccctgtggcctacttgcaacagctagcattccattcaaccaactgactctgtctaactctgctgcgtacctacaacagcgacaacagttacttaatccattggtagtggctaacccattggtcgacggcttactacagcagctacaattgatgccatacaaccagttctatttgatgaacactgtcttgctgaggtatcatacccatcgttggaggtgccattttttacattacatatgacatgtactcgataatggtgccctcataccgacgcgtgtatcctagagatcatcaatatattgattgacgat

SEQ ID NO: 180008 - DNA, 2667 bp, Zea mays
  Clone ID: MRT4577_95747C.1
ttgaacctggggaatctgtgaccgatgatcgtatattgggtgcccgcatgacaaaggccagctgtgtctcttccgttcctaggaagtatgaagttgtcgaggaggagcttagtgtataagatttgggggaattacagcgacaactgatagttgctttacctgaagtctattctgagaagttcgtgtcaaagaagaatggcaccgaaaacttggaacttccagaggttaaggattatcaaccccgaaaagtagcaggagatgaaattcttgagcaagaagtatatggcatagatccatacacacacaatctactgagtgacattatgcctgctgatcttgagttgtcacctaccgacaagcatatctttattgaggagttgcttctgaatacattgaataagcaagttaggcatttcactggttcgggaaatacccctatgacttacaaccttaggcctgtcattgaagagatccaaaggtctgcagaggataatggtgatagacgaacttcaaagatgtgcttggggatgctaaagaccatgagaaatcgctctgaacagaacttcgttgcttatagaaagggtctcggtgttgtttgcaacaaaaaaggtggatttggtgtcgatgactttgttgtagagttctttggggaggtttacccttcttggagatggtatgaaaagcaagatggtattaaacatatacaaaacaacagtgaagatcaagctcctgagttttacaacattatgttagaaaggccaaagggagacggagatggatatgacttggtttttgttgatgcgatgcacaaggccaactacgctagtagaatctgccactcctgcaacccaaactgcgaagcaaaagtgacagcagtgaatggtaaataccagattggagtttacacacttcgaccaattgcagaaggcgaggaaatcacttttgattacaattctgtaactgagagcaaagaagagcatgaagcatcagtctgcctctgtggaagtcaagtatgccgtggcagctatttgaatttttctggtgaaggagcctttgagaaggtattaatggaattccatggtgtgctcgataggcatagcctgctgctacaggcttgtgaaacagactctgtctctcaacaagacttaattgacttgggtagagctggtcttggtacctgtttgcttgctggtttgcctggatggcttgttgcttacacagctcacctggtgcggtttatataccttgagagacagaaactccctgatgagatcttaaggcacaatgtggatgagaagcgccagttccttatagaaataaacatggattctgagaagaatgatgctgaggttcaggcagagggagtattaaattcaagattacagcaaatagtgcatacacttgacaaggtgagatatgttatgagatgcatatttggagacccaaagaatgctcctcctcctcttgtaaggttgtctgggaaaagtctggtatctgccatctggaaaggggacagttcaatagttgctgaactcattcagtcgatggaacctcatgttgaagaagaggtacttagtgatctgaaggccaaaatccgtgctcatgatccgtcagagtctgaagatattgagggaggcatccggaattctctcttgtggctgcgtgatgaattgcgaactctttcatgcacttacaagtgccgtcatgatgctgctgcagatttgattcatttgtatgcttatacaaagtgcttcttccgagtccgggattataagacagtaaaatctccaccagttcatatcagtccgcttgacttaggccccaaatatgctgataaactgggaccaggctttcaggagtactgcaagacatacccagaaaattattgcttagcccagcttatctattggtatagccagaattcagaacctgaatctagattaacaagagctagaaaaggttgcatgtcgttgccagatgtctcatccttctatgtgaagtctgcaaagccatcacaagagcgagcttatggaaacagaactgtgagattcatgttatcgcgcatggaaaaacaggcacaaagaccatggccaaaggataggatatgggtgttcaagagtgatccgagattctttggtagtccaatgatggacaccgtgttgaataattccccgcttgacaaggagatggtgcactggctcaagactagaccaaatgttttcctaggctagtaaaaaaggtttgtaggcagataaggtggtatttggttctttctcctttttggagattttagtctacatgattctttttccgactcacaccttggctacctgatcatggggagtttagcttttagatagcagggtagtctcaccacccccatctgtacattcctctctccctactttccttgtagagatgtatctggttaataactgatagattcgtcattgatttgatgtagtgaattttccccataggaatgctccctcttttgtttcatgtaaatgcagaacaatttcaatcttgaattcagtaatgtgttacaggcattttgcatttctatggttcagttgggttgtttcagtcaataaaatggttttaagggctcaaaaatttaattcataggaaaaaatctgtgcatgagttttgatgattgaacctgtg

SEQ ID NO: 180009 - DNA, 781 bp, Zea mays
  unsure (1)..(781): unsure at all n locations
  Clone ID: MRT4577_95748C.1
gacgcctgcaggttccggtccggaattcccgggtcgacccacgcgtccgcccacgcgtccggtccctgggagggatgttcactgggcagcctccaggtcccccgccgccgccgcccgggctcccaggccaggcgtcgcttctgcaagcagcccctggggccccgagaccatctaacagcactttggtggacgagttggagtcatccttcgaggcttgctttgcttcccttgtgagtcaggattatgtcaatgggactgatcaggaagaaattcgaactggtgttgatcagtgtatccagaagtttttggacattgcaagacagacagaatgttttttcctacaaaaaaggttgcagttatctgtccagaaaccagatcaagttatcaaagaggatgtctcggaactaaggagtgaactgcagcggaaggatgcgctggtccagaagcacttgacaaagctgaggcattggcagcaggtgctggaggacatcaatgtgcagcacaagaagccggctgacatgcctcagggatccttggccttcctcgagcaggcgtctgccaacattcctgcacctctgaagcagacctaagcactcctgcctgtcttgcagccttgcagtcttgccagacacgtttccttacagacctggtgtgttggaaggactctgttgataatgagnttgtatcagnttctgtccctattatagggagggtttcatatgaagcccggaaggccttgatctatgatccctgcctcactnctctatactctaaactctga

SEQ ID NO: 180010 - DNA, 517 bp, Zea mays
  unsure (1)..(517): unsure at all n locations
  Clone ID: MRT4577_95749C.1
attgcgattggtacctcgagccgcccggtctcccaactctacgtatgccttctgcacctccattatcgtgctctgagccttgcaacatcaatctcacgtccagcatgggaaaagagaagtaccatatccatgttgcggccattggacaggacaactctggagagctcaaccaccacagcacacattatctacaagtttgaaggtattgagaagcgtgtgatcgagaggttccagaaggaggctgctgaaatgaacaagcggaccttcaagtacgcgtgggtgctcgacaagctcaaggctgagcgtgagagaggtatcaccattgatatcgctctgtggaagtttgagaccaccaagtactactgcacggtcattgatgcccctggacaccgtgacttcatcaagaacatgatcactgggacctcccaggctgactgtgctgtccttatcattgactccaccactggtggttttgaggntgggatncccaaggatggccagacccgtgaacatgctc

SEQ ID NO: 180011 - DNA, 278 bp, Zea mays
  Clone ID: MRT4577_9574C.1
ttgcataaaatagcactatcatggctctcgcgtgagtttcttttccagcgcagaggaagcgtaactacatcctgtgtggtgcgatgatgaacacttgagagccaccctcctcacgacgtcgcccacggccacgcgccgcaccgtcacgtgcatcctccgctctgtgtctagaattcgctccgacagagcgtcgccatgtccgggcgcgacattccatcaacgaccggccagcgtatgcttcatacacgaccgacgagaggtaaacgcctccttcctca

SEQ ID NO: 180012 - DNA, 403 bp, Zea mays
  Clone ID: MRT4577_95750C.1
gtcagagtttggtgctttaaactcgcgcggcgtgagtaatcctccaatgccaagcatgacgatgttgggggcacgtgcaatagcctgcttctccccgttgaaggagacaacctgtttttacagatgtgggcacaagaaaaccagccccaagtgtctgctcaacaatattgcctgcgtcaggtgggcgatgcttggcccttggtagatattttagcaagcatttttgagacgattccgccagcgatgacaactggagggatgcatgccagcatgacaagagatagaagccatcctttcacgaatgctatcacgaaaccgccgatgaaggttgccacaagctgttggaacttgccaacctgaagagtttttacaagtcaactttttgcacattttggtataagta

SEQ ID NO: 180013 - DNA, 345 bp, Zea mays
  Clone ID: MRT4577_95751C.1
caaatgcgttcattattccacaatgctcacttgctcctagtgccattattccacagttcctccctccagttacttcaatgggctttgaacacccagctgtgcaagcctacaggctacaacaagcgcttgcggtgagcgttttacaacaaccaattgcccaattacaacaacaatgctgggcacatgtaaccatacaaaccatgtgtagcgcatcagcaacaacaatttttaccagcactgagccaactagctgtggtgaaccctgttgactacttgcaacagtagttgtttgtcatgcaacctacttgatctgataaacatatttgcgtaccaacagcaacaaca

SEQ ID NO: 180014 - DNA, 476 bp, Zea mays
  Clone ID: MRT4577_95752C.1
accaagcgaagcgcactagcaacgacctaacaacaatggctaccaagatattagccctccttgcgcttcttgcccttttagtgagcgcaacaaatgggttcattattccacagtgatcacttgctcctagtggcattattccacagttcctcccaccaattacttcaatgggcttctaacatccagccgtgcaagcctataagctacaactaaagcttgaggcgagagccttacaacaaccaattgcccaattgcaacaacaatccttgggacatctaaccctacaaaccatcgaaacgaaccaacaacaacattttctgccatcactgatgcacctataaatggagaaccctgtcgcctacttgcaacagcaaatgattgcatacaacccacttgatctgaagaacggagctacgtaccagaaacaacaacagctgccagagaaatatgacaccgcgtcacccacctaaccatgc

SEQ ID NO: 180015 - DNA, 353 bp, Zea mays
  Clone ID: MRT4577_95753C.1
acccttccgtcccaaaagattcagcatattcactaagacggtgcacatcgtataatactccaacctcacgatgactaagatcatcagcatcaggacctcctagaacagaagaacatatgtcatcacatatttggtggacagaacccaatgaatctaaagctctatcccagccgatttccagcaaccgtgccttctttgcaagagtattgcatttcttcctagctcacccaagagctctcttcagtcgctctgtctcaacatgatagtgattcatgtcaaaccagtttgtatgatggaactgcacactacattctttcttgatgacagaaattaaagcatgagcggcgctttct

SEQ ID NO: 180016 - DNA, 519 bp, Zea mays
  Clone ID: MRT4577_95754C.1
tttgcgattgggtacctcgaggccggccggacttccttcccaacggcgccgtcttctgcggttctgccggttactcctccactttgtgctcctcacttgcaagtttaatcttcgcctccagccatgggtaaggagaagtctcacatcaacattgaggatattggccacgacgactctggcaagtcgacaaccaccgggcacctgatctacgagctgtggaggcattgacaagcgcgtgatcgagaggtttgagaaggaggccgctgaaatgaacaagcggtcctttaagaatgcttgagtgcttgacaagctcaaggctgagcgtgagaggggtatcaccattgatattgctctgcggaagatcgagaccaccaagatactattgcaccgatattgatgcccctggacaccgtgactttatcaagaaaatgatcactggcacctcccaggctgactgtgctgtccttatcattgactccaccactggtggttttgaagttgttatctcccaggatggcc

SEQ ID NO: 180017 - DNA, 842 bp, Zea mays
  Clone ID: MRT4577_95755C.1
actccccttctcagtcccctcccgccgccgcctcccctccgttcgttcttcttcttcgggttgggtagtttacgtctacccaccagccatgggtaaggagaagactcacatcaacatcgtggtcattggccacgtcgactctggtaagtcgacgaccactggccacctgatctacaagcttggaggcattgacaagcgtgtcatcgagaggttcgagaaggaagccgctgaaatgaacaagaggtctttcaagtacgcctgggtgcttgacaagctcaaggccgagcgtgagagaggtatcaccatcgatattgctctctggaagttcgagaccaccaagtactactgcaccgtcattgatgcccctggtcaccgtgacttcatcaagaacatgatcaccggtacctcccaggctgactgtgctgttctcatcattgactccaccactggtggatttgaggctggtatctccaaggatggccagacacgtgagcatgctctccttgctttcactcttggagtgaagcagatgatctgctgctgcaacaagatggacgccaccactcccaagtactcaaaggcacgttacgaagaaattgttaaggaggtctcttcctacctgaagaaggtcggctacaaccctgaaaaggttcccttcgtccccatctctgggttcgagggtgacaacatgattgagaggtccaccaaccttgactggtacaagggcccaaccctgcttgaggcgcttgaccagatcaacgagcccaagaggccctcagacaagcccctccgtcttcccctccaggacgttttacagattggtggcattggaactgtgcctg

SEQ ID NO: 180018 - DNA, 292 bp, Zea mays
  Clone ID: MRT4577_95756C.1
cactttaataaacactctcctaactatttcaacacattcttcaaccacccccccctcaagcacaagctccgcatctttcttcaaaaaaaaactctgaaaatattcccccgcccgacttcttgtcctctaccccccattgttcaattccagactttaaagtacaacattaagtcaatggcttggagaagctttaccctttaggaacttaaagctgcttgcatcccaaagaaacttgctccaaccatttgtatttctgttgatcacccccgcaaaaacaaattcctttaaggac

SEQ ID NO: 180019 - DNA, 345 bp, Zea mays
  Clone ID: MRT4577_95757C.1
ggggggcgagcagcccaaaagtccctggacatttgctttctcccccgagttcaaaaaccgaaaatacctgggttagggggaccggaatcaaaacccgaacggggggggttcaattttattacctgggttgaggggccaaggattaaacattcattgacctcaatgcttgccggggtcaaaatccaatccaagaaccgctcccaattctcaacatcaccaaatgctatatgtggcaggagccatcgatacaaacagggagcacttttgaactacttgctgcacttgcacaacttggttttttttcttttcccgcccactggccacgcatgggggcctaaattaacc

SEQ ID NO: 180020 - DNA, 788 bp, Zea mays
  unsure (1)..(788): unsure at all n locations
  Clone ID: MRT4577_95758C.1
cccagatccttaatggacaatgtgggagtttggaggcctgttgttacacctaaagggcctaaatctcttgagtctttgtctgctaacacattaactggtgcaagcccaagtctgtctatacaaagacaacctgttgtagatcttctctgtgccatgactctgcttgttcaacaatctacttcgtttgttgatatgtcacttgatatggatgacggggacggttcttttttctggctttccctggatgagcaaaagagacgtggattttcttgtgatccttctatggttcatgctggctgtggtggcctattaggaacatgccattcaaaggattgcgctggtgttgatttagtcgatccactttctgcagaggtttcagagccatccatgattagcttgttgcagtcagatataagagtagctcttaaagctgcctttgcaaacatggatggcccgttatcagtaattgattggtgcaggggtcgaggcaatgctgctgagtctgcaggtacgggagatgcatactcttttcagtactccagtggtgatatcctggagccgtcaagttcgttgtccattggtggagattcaatgagcccaccccagccaaccagtagcaatcgaggcatttcagatntagagttccaaaagggatatcanccgtgtcagaccaaccattgctgtcctcccttcaccttctatgctagtcggttaccaggatggattggttgaaggcctcggtgaatagtcttaaacatgggagaaagctcttttgaaccttatgcctt

SEQ ID NO: 180021 - DNA, 275 bp, Zea mays
  Clone ID: MRT4577_95759C.1
ggccgggaagacacagctaccgaatatataccataccctttctgcaatcaatcgctcgtttccaaatttccacagtcttgcatcctacggagaagacacgtgtctcttgacatcttgacatctaagttcttttaaccctacactcaacttcccacaccatccctaacatgccttccgagcctcaccccgggtccatcatggcccgcaacaaggaagacaccatcgaggccgagaccctcttctgtgcgcgccctgtgcgacaagccaaagaccat

SEQ ID NO: 180022 - DNA, 630 bp, Zea mays
  unsure (1)..(630): unsure at all n locations
  Clone ID: MRT4577_95760C.1
cccacgcgtccgcagagaagaatgctgaagcatgaggatgacaatgtcaaagttctcttggcaacatgtttctgtgaaattacaagaataactgcacctgatgctccctacaacgatgacattttaagggatatattctatctgattgtgggtacatttggcggactcagtgatgttaatagtcaatcctttggcaggagagttgctattcttgaaacagttgctagataccgagcatgtgttgtgatgttagatcttgaatgtgatgatcttattacaaacatgtttcaaacatttttaggagttgtcagtcaatgcaggcaataatgatccttattatagatgagagtgaagatgtacaggagagtcttctacgtgtactgctgtcagcattggggcagaaaaaaactggtgctgcaatgtctgctcgtaaacttgctcgcagtgtcattgagcattccgctacaaagcttgaaccttacataaagaagtttctaacgtcatcatgggctgggaatggcagttcttctaatgatcaaattgatcaccaggnagttgtatttgatttatatcagtgtgctccgaaagttcttaaggcgatcgtgccgtatattacntgggagctactgg

SEQ ID NO: 180023 - DNA, 498 bp, Zea mays
  Clone ID: MRT4577_95761C.1
tcgagttttttttttctttttttttttttttttttttttttttttttttttttttttttttttttttttttgttggccttttccttttttttttttttctttaattcccgtttttttttggggctccctttttattttttttttagggggacaacccgcccaacaattaataaataaaaaatcccgggtaaaaccgggcccgggaacaacggggaaaatgggcccccttccaaacaaaaaaacaggccagggatctgagcccaaccccccccgagttgaaaggggcccagaatttgtccttttttcaaaaaaaaaaaaaaaaaaaggggccgaaaaaatggccccctttttccaagggtaccacggggggaacgaccccggccaaaaaacctgggaggaggggctcaaaaagaccatgggggctttcaaatccaaaaccggggggggggaccccccctctttgccataccgggacgcgggtttaagaaaaaaagagcc

SEQ ID NO: 180024 - DNA, 1672 bp, Zea mays
  Clone ID: MRT4577_95762C.1
gattccggtactagctggtggcgctagctggtctcacactctcactagatctctctcacatgcatatgcatgcattagcttttccccaccagcatgcactagctgactagcatctgtgtaatcggtgaccgctcttgacttgttagctccccgctcccacggtagctaaagctagctaggtgggtggtagcaccaccatggcctcgcccaagcattctcatcgccatcatcgtgcggcggcgacgaagcatcgtcggccgctggcgctgcggcgtgcgatgctgcattcgtgcgtgtgcttcctggtgggtctcgtgaccggcctggccccttccgactggacggacgccgcctcgcgcgcggccgtgcacgcgaacggcgcggccacggcgcaggtgttccgcgcgctgcacgccatgaaccagacggcggcggcgggggcactgggccagctgctggcgctgcagcactaccagcagcagccagtggtggagaaggagaaggagaaggagaagaagcctctggatctggtggtggtggtgacgactacgacgacgtcgacggggctgtcggagcgcgagcggcggtcggcgggtctgacgcgcacggcgcacgcgctgcgtctggtgtcccctcccctggtgtggctggtggtggaggcggcccgggaggctggtcccacggcacggctgctgcggcgcacgggggtggtgtaccggcacctgacctacgcggagaacttcacatcggaggcctgggaggaggagcggcaccaccagaggaaccaggcgctagcgcacatcgagcggcaccgcctgcgcggcgtcgtcctcttcgcggggctcgccgacgtgtacgacggccgcctcctggagcagctcaggcggcacatcaggacaaggagtgtgggcgcgtgggcagtggcgacagtatgggagcaggagaagagggtggccgtggaagggcccgtcgtcgtctgcaacaccaccaccaccaccaccagcgcagcatccacagcatgtgcatggttctccgcctccgactccacattattggcggcagcggcagcagcagcgcccccagtgacggccgacgactccgtccacggctttgccttcgccagcgacctcctctgggacccttccaggtgggaccgcttccccacatccgagcccgaccagtcgcaggattcgatcaagttcgtgcaaaggttggtgatggcggagtacaacaaaacgagggccatcatccctgcagacgacgattactcctccaaccgttctcaaatcatggtgtggcgtgtcgacacaacgctgctctagctagccctcttgccacgctaagagcgatagataaagatgcatgcatgcttaaaataaacattccatgacttattacatagtaatgccatacacgtacgtatgtatatgtaaacttttgctgcattagaattatatatatagggaaaagaatggcaagcagcagtctgcatcagtcgttgtcgtcgaaatgctcaaggcaacgcatcgcatcgcatcatcctcttgcttgcctgcgtgcaatccttttcttgtccgccctgcattgcatgtccctttttctttttcttcttgtttgccttgtgcggctatctgtcttgcaaccccggcatgaagaaaaggaattcgatttc

SEQ ID NO: 180025 - DNA, 429 bp, Zea mays
  unsure (1)..(429): unsure at all n locations
  Clone ID: MRT4577_95763C.1
nagccggccgggccgggtacgagccctagtcacctatccgatgagccctctgccgagccttgcggactgtctgagttatccctcttagtctccctccggtcgacgcggattgtatccgagatggaatcaccgcccctctccgctgatacacttggtcatacctagaaaaagatggacatggttttggaggatattattacgatgtccaagaaatggagtcccggaggtaagaaacccccgcggcaacctataaatcagcgtccattccagaaaggcacactcaaatcgagggaatggcaaggtacacagctttatgaactctagatcaaccattagacccggaggtcttgcaccgagaaagtcacctcttggccgtaattcaggtccctgctactatgctggctgcgaagacggctgctgttatgccaa

SEQ ID NO: 180026 - DNA, 828 bp, Zea mays
  unsure (1)..(828): unsure at all n locations
  Clone ID: MRT4577_95764C.1
atactcctcaactcacgcgctctcctcctcgccccccacttgcctaactcaacctccacccctaccagccagatctcccttcccttgccgccggagccatggcgttcgacgccttcaccgacaagaccgccgtcttccgccgcctcaaggccaagcccgagaacaagatgtgcttcgactgcaacgccaagaaccccacctgggcctccgtcacctacggcatcttcctctgcctcgactgctccgccttccaccgcagcctcggcgtgcacatcacattcgtcaggtcaacgaacctggactcatggactccggatcagctaaagatgatggcttttggaggcaacaatcgtgcacatgctttctttaaacagcacgggtggacagaggggagtggcaaagtcgattcaaagtacacatccagggctgctgaattgtacaggcagatactgcaaaaggaagttgctaagagctccaccgtcaatgtcttgccatcatcccctgttgcagcgtctcagccaccgaatccgaccgacgacttccctgatttcaagcttgctgatgcaccagaagagactaccaacgggaagcatgaacctcttgtcgccaatccgccaaaagagcctgcccaggctccaaaagcccctacacaccccacttatgtcagttctgtaaagaagccccttggtgcaaagaaggttggcgccaagactgggggccttggtgtnaaaaagctaactacgaagtcaaatgaaagcctgtatgatcagaaacctgaagagccaaaacctgctttaccacaatgacgactactacttcagctgcaaa

SEQ ID NO: 180027 - DNA, 275 bp, Zea mays
  Clone ID: MRT4577_95765C.1
gtcagccctctcgtttttcatccgccttcgcctccaaccgcgtgcgctccacgcctcctccaggaaagcgagagttctgcataagaacaacaaatcaaaagcgtgatcagctcggtgccaacaaaacctcaacaaccagttcaagtctgatctcgacgtccacttccatctgctttgatccgtttgctgagcaaatgctgaggactctggtgctggtctggaacgaagatatggcagtgcgatcagcacgcacggcaaagattgctaagtcaggt

SEQ ID NO: 180028 - DNA, 322 bp, Zea mays
  Clone ID: MRT4577_95766C.1
gctcccacgcgtgcgcccacgcgtccgcacgagccagagaagggagaggagaggagaggctaaccaccgcggcagctgcgacctgcgaccgcgaggagtagcgcacgacgaccagcgcggaggaggtggagccggcggcggggagatttgctcgcccggctggggttgtggtgggaggagggcaggaggcaaacacaaccagcgatggcggcgttcgcgaggcctggggagagggcgaccagctagggcgacgagggcagcctcctgagccgcttcttcccacagaacgggccccgggcccgaccagctagggctggggatc

SEQ ID NO: 180029 - DNA, 177 bp, Zea mays
  Clone ID: MRT4577_95767C.1
attctctacccgggggtgatttacaaattcccccggcgacgtcaagccggaaaataaaaaacgggtctcccccaaccacatcaacctcctataatttcaacaggcaagctcgcacccgcatattttcatccctcacagaaatactcctaacgacaactaacccagcgcaccccccta

SEQ ID NO: 180030 - DNA, 453 bp, Zea mays
  Clone ID: MRT4577_95768C.1
aattcatcagatagagagagatagccgatcatgaacggcggaaagaatgaagtggacggagcggcgctgcccatactgctaggctctgcagctcatggcagctccgccgacggtcatggacgtccgctcgccgcgaggagacgtgccggatgactccctcgccacgacgcccaaggtgactatgctgccggccacgctgtgctacacgggggagacatgcaaatacactccctgcttcactcctgcttgctcctgcaggtttagtgatcgcctctgctacgtcatatttactcctgctgcttgagtcgaggacattccgctgagccacaactcttacatgcatgcggcggacgacgacaaccacgctgactctcgtgagcttctgttcaagagatgcatgtatcaaggcatccatggatgctatacgtatatgcggattaattatgcgagcca

SEQ ID NO: 180031 - DNA, 348 bp, Zea mays
  Clone ID: MRT4577_95769C.1
caccagcccagcagcagaagcgcccctcggccctcgctcccacaacaagctcaagccagccttctctctctctctgctccaatggcgcgcttctagctcgcagccgtggccatggccatgctcttcgccgcggcggcggctcatgcttcacagccatctcgtactcggctcgaaaggtgtctctcacgcctggtatttctcctccaatgcccgcgcgggtttacccgagcctgtcggcacgtttcatacttgccgtgttgccagcactcacccagattgcttgtaggccgcacctctaagaaccatgcctagctgatgtcgcctccgtcagtctgtcagcattcaagc

SEQ ID NO: 180032 - DNA, 486 bp, Zea mays
  Clone ID: MRT4577_9576C.1
ctcatgcgtccggccactcgaccgggggcggctgttccagtacaatcgtgggagcactcgcagtcacctgtcacagcgggccacggccccaccctaacggtctaacctcctcccgctacacgcacgcgcccacctacccataacgaccgtgcgcggggccctgctgcgcgggagccatcatcatcatcaccttggcggaccataaccacgactatcggaagctgatcagctcccggccccagcaccgcgagctgccacggcaatggacccggtcgtggccggaactagcggacgcggtggacccggatcgaccgcggtcaccgggggaggctatgagtgcgctcaggcagggactaacgggggcgagcggccggaccggcatcagcgcatcctgggggactgtgtgcgcgccaagggtcggaggcctagctaccacgacgccgctcgtcacctgcgcagggatcttgaggagaggggcatagacct

SEQ ID NO: 180033 - DNA, 132 bp, Zea mays
  Clone ID: MRT4577_95770C.1
aacagaatgcttacaagttatataaatctagcgcaggggtaggcatacacttacaagtgacataagcaggttgatggagacacaggatggggggaaacatagcagtggggagactgtgctaataaacaaaac

SEQ ID NO: 180034 - DNA, 463 bp, Zea mays
  Clone ID: MRT4577_95771C.1
tgtatgtgcttgagtctgcgtccgtaagccctcaagatcctaccgtcccccgatagggtagggcgaaagcgtcgaaactccctcttacttgaagtcagccgtaattgtaggagacggaaaaaacgaccccggcgacaaaaaactccaagaaggataacgaaccctcgaagggaaaacgcgagaatctagacaccgtctccgcgaagtctaccgaagagtgcgagtcaatgaagaagtaaacagagaaaccgaaaaattaaaaggagatatccgagctttcgcgctgactatcataggtagaaaggaaataaggttgtcatgttagcaccttagatgttttcctcagttaagaagatacgttagtgataagctaagaactccagtacacgcgtccgctaacaccttgccggcgcttgccatagtccgttgggatcctcgaagttcgagacacgaacacgccatc

SEQ ID NO: 180035 - DNA, 284 bp, Zea mays
  Clone ID: MRT4577_95772C.1
tcacacggggccaccgcctgagcttgcgctggccggcgcccccgcgctctgggctccgccggcgcgcgggtgggcccgggctgggcctggggggggcgctcactgtctcacgctggcgccgggccccatgtccgcggccgccctctccgccagggggccccgcgcctgtgctttgctcttcgcgctggcgcgcggtgccttggcgcggccgcggctgccggctctggggccggtggcggccgccttcccggcggtgcgtgtggtgggctgcggccgtgccccgc

SEQ ID NO: 180036 - DNA, 275 bp, Zea mays
  Clone ID: MRT4577_95773C.1
ggggataggaggattgaacaccacctttcaaagggtcccttgctttgaatacttgggacgggtttggtttgatgaatgaaaaagcccataattttcccactccccactttcttgtatggttgggggaatataataaggggatccattaccatttcaatcatcataagttcagtgggtgtaacaaccccaagaataaatttattcccccaaatttataaaaaaaacttccgcccccccaatgcttttaaaataagattggctcttcaaaccaaacg

SEQ ID NO: 180037 - DNA, 327 bp, Zea mays
  Clone ID: MRT4577_95774C.1
ccccataccaaagaattattttaaccactcaaattattctgggtaaacaaaccggacttctcaaattattttatctagattattttatccagattattttatccttcaaaaattatccaaattgttttatccatggggggtaacaaaccgggccttagtacctaaggggcttattattgagtgggcctcatttcaagcgacttcaaatgtcactggcactttgagtattccatcctagtcggccatgtccacctttctttttattggaaccttcggcggattaagaaccaagtgtttattcttgggccacaacttcacaacgtgacc

SEQ ID NO: 180038 - DNA, 1311 bp, Zea mays
  Clone ID: MRT4577_95775C.1
cattgggtacctcgaggccggccgggccccgctcctatccgtcctctaaaaaatccggaggcttcggccccccttctcgagcccttcgcccaattcctcaatcggaccaaaccctaggagccacatagatttcgattcgatcggaaatctggcatggcaatgtcagatctcacagccaccgtgatcccgaagccagacggggccgacgacgagtcggtggagatccgggaggtgtgggcggacaacctggaggaggagttcgcgctgatccgcgacatcgtcgacgagtacccgttcgtcgcgatggacacggagttcccgggcatcgtctgccgccccgtaggcgccttccgctcccccgccgactacaactacgccaccctcaaggccaacgtcgacatgctgcacctcatccagctcggcctcaccttctccgggccgcgcggcgagctgcccgcgctcggcgctggccgccgccgctgcgtctggcagttcaacttccgcgagttcgacgacgcgcgcgacatattcgcgtccgactccatcgagctgctccgccgcagcggcatcgacttccgccgcaacgccgagcgcggcgtcgacgcgcggcggttcgccgagctcctcatgtcctctggcgtcgtgctcaacgattccgtgtactgggtcaccttccacgcaggatacgacttcgggtacctactgaagattctcacctgcaacagcctcccagacacacaagccgggttttttaaactcatgaagatatacttcccgaccgtgtatgacatcaagcacctcatgaagttctgcaacagcttgcacggcgggctcaacaagctcgctgagctacttgatgtggagcgcgttggggagtctcatcaggctgggtccgatagcctggtcacgtcctgtgcgttctggaagcttaaggattcgttcttcgcgggctcaacagagaaatatgcaggtgtgctgtacgggctcaatgcagagaatggcgttagtgcacattgaggggtgctacctgtttgaattttagctttgtgaatcgattgatttaggacagaaagggtggcaagtgcgcaagaaggctcactgaaagatcaagtatgtaggttaagtctgtctcactcacttgggtgtatttgggatgtagtgttctttggctgctcagtattgaaatagctatttctccttcctctttcagctttgcttatgttgctctcaatttcacttttctccaagcaagatactaacactcagattaaacatagtaaaagatgacctctgagaatcaagtcatgacac

SEQ ID NO: 180039 - DNA, 285 bp, Zea mays
  Clone ID: MRT4577_95776C.1
tgcagattcaacgccaccagctagcaggagcaggggcagcatggtctctaccagcacgcctagtctcgccaccctcatggggcttctggcggcggcgtcaccgttgctgagcgcatcttaaaaggccgccccgaaggctccggcggctgcaaatgcggagccagggccggcggcttcatttttctacggcgcggtcactgaggacgctgcctctcccacagacgtgaacaaggcgctcaaggaccaccagttgagcgagtttaagcagcttatttactacatgcg

SEQ ID NO: 180040 - DNA, 855 bp, Zea mays
  Clone ID: MRT4577_95777C.1
ggcccccactaacttaaaacctctcgtcacttgtctccttcccccgattcgcctatgatgatttcctctgttctctgccctccggccgccggcgccgccgcccccgtcaccggagcgggcgcgccacctatcatagggtctcgctccagttccctccatcctcctccccccgccgcctcccgtatccacctcccccgcctaccgccgccaccttctccctgttcctccagtacacccaccagccccttccccagccacgcttcctccgcactccaacccttcgacgaggttctctcctccatgtccccgcgggaacagacctccctcctctcgcggcagcgctgctggcgccgcgccagggacctcttcaaccgcctgcgcgcgctccccggatacgcccccaaccccgtccatgacgccgtcctcctgcgccacctcgcccgcgcgcgccggtgggccgagctccaccgcgcctggatcgggatgcccttcccaccctccaacccggcctacgcagccctcgccgacgcactcgccaaggccgggttggcgcggggagccctcctcctgctccgccacatgcggacccggggtgtcgcgcctgatgaggtgtccatgaacaccttcgtccgcatcctcaaggacgagggccgccacgacgacgcgctcgctctcttccacagttggtgcgacggcaggttcgaggtcgatttccttgatcttgacagcatcacagttgatttggacggtcctatgcagttcttgcttgctgacatgtacgacgacaaaattgctgctcctgctgctggtgttgcaccagagcgtcctaggaagccaagcttgtggtgacgtata

SEQ ID NO: 180041 - DNA, 511 bp, Zea mays
  unsure (1)..(511): unsure at all n locations
  Clone ID: MRT4577_95778C.1
ccggccgggtcaacgctcattgtggncatagttagggtgattggggtcagggtggcccacttagtcgtcactgtggggggttacctaaattaaatttccctacgtttgatggtacctaccctaagctctggcaaaagtgttgcgaagattactttgagatgtatgctactgagacttttgtctgggttaaggtctccaccatgcactttgtgggtgctgcggctcgatggttacagtccattgaaccgcgtcttccgtccatgtcatggcgccaattttgtcaagctatccatgataggttcggtagggagcaacacgaacttgttattcgcaaactcttccacattaagcagacctccacagtccaagactatgttgatcgtttttcagagttagttgatttgttagtcacatatgaacacacaacatacccgttatactataccatgaaattcattgatgggttgagggatgacatcaaatctgtgattcttgaagcagtcgcaccccc

SEQ ID NO: 180042 - DNA, 582 bp, Zea mays
  Clone ID: MRT4577_95779C.1
gcggccgcttcgaaggccggccgaagtttgctaaatagaccacaaacgtacaggcgatataggtttctcatgcatgactgcgaaggacatggccagcctccgacgtcgtcctctctggatgctgatatgaccctctgcagcagtcatattccgactcctacctaccaatgacacgatacctttacgttccttcggcgattgccactaaccaattccgataaccgtatgattaaagaccacagaatttcacaaggttgcatctttgcaccgagtgcgacatctatcactactagtgcttgcagggcgatcaacacaagactaagtacgcgaggtctataatccatgatgaagggtgcttgaattgtaagagacgaaagataaaatctctaggcatactgaaagaggtcaaggtgcccaatatatgccaccaaaaaagagaacataagagactgcatcatagatcatgaatgacatcctgggaaggtacgtcatcataacaagaccctgacaagtcaaagaaccgagcccgctcactaacaagactacgtccgatctgatgtcgtgttaacgacgaacaacact

SEQ ID NO: 180043 - DNA, 295 bp, Zea mays
  Clone ID: MRT4577_9577C.1
gatattataaacgtcaccttgatattgatttctgcatctcactatcctctggggtatatgtttttttctaatgggggctggaccttccaatactttaatgggaccatcgggcttaataacctctatgcttactgttcgctcataggatgcctacattttcatactactcccattgcatgatatttgctgtcgcctattgtttcctgatacacatttttgatattccttaaattcttaatttgtccatttgccaccttctctgtcatctctgattatttgtaatcccatgttttac

SEQ ID NO: 180044 - DNA, 497 bp, Zea mays
  unsure (1)..(497): unsure at all n locations
  Clone ID: MRT4577_95780C.1
ccgcccttttttttttttttttttttttttttttttttttttttnnnnnnnnccaaaacaaaaaaaaaggactgggctttttttccataccttggcccaaaaagggttttaaccaggggttgaacctccaaagtttttgcccttcctttttttttggcaaaaccgactctaattgcctcccccggatccgggaaaaatggatggttttcccctggaaccgctcacctcgtttttcgggggccctgtaataaataaccgcaaaaaacatatgggcagtggcggcctcccgccatgggattttatttttaaccgagggccccccccctaacctagggttcaccacaaaaaacgggggggccggccctctggggctgttcaaagatcgtccccatgaggaagcccctggggtccgggacctcccccgtcaggcccagggttgcaagggtgtagggggcccccaggaaaatttgcctttctttgtccccaatcttgcccgg

SEQ ID NO: 180045 - DNA, 353 bp, Zea mays
  Clone ID: MRT4577_95781C.1
aataaataactaaataattatagagaaggcctaaatggcaaaagtcgggacccctgggtaacagggggggatatatctattaatatattatttcataaacaccctattggtaaaacgctaaccacaatcatgatcaaaacacagataatgattatcaacatttcataatggctacgttttaattcaaacggcactcgtacttccacttttgttccattttcgaagctcttgcaatactctgttttaccgccttccattttcttttccgtcttttgggattagaaccttctttcatggagttcaccttgtttaggtatatatttcctatttttaatacacttatatattttttt

SEQ ID NO: 180046 - DNA, 328 bp, Zea mays
  Clone ID: MRT4577_95782C.1
cggaatatccggggcgacccacacgcccgtttttacccaggggccctcagagggggtgcggggcgggctacaccatggttcagccgctgggccaccaggagccgcgccgggggctcaacgccgccatggagcgcaccatggtcgactacctctgcgtcctcacacacattaaggctcaatgctgctccaaccctgtcgccactgcggaggactaccggaggtggacgaggactaccaccgcgcgcggacatgctgacgggccccgtgggctaggcggactacgacccgtagcgcccgacctgctagatcaccaccaagcaggtccagc

SEQ ID NO: 180047 - DNA, 349 bp, Zea mays
  Clone ID: MRT4577_95783C.1
ctcgcattttccttgcaaccgattgcctatccccctcccaaccaaagaccgatggcgcccatgggcgagatgtatgcccgcggcgaagaagccggtggaggaggagcccgcggccgatatgactaccgtcgggaagaagcccatggcggagaagcgggtccccgctgtctagtccgtcggcttggatggcggcgtgggcaagcgtggcatgaagtagggcatgattagcgtggagacgtacatgatctacatcttcaaggtgctgatgctggtgcacccggacatcggattcttctgcaaggccatgttcatcatgaactccttcatcaacgacattttctagaagctg

SEQ ID NO: 180048 - DNA, 360 bp, Zea mays
  unsure (1)..(360): unsure at all n locations
  Clone ID: MRT4577_95784C.1
gcagcgcggcactcgctcgtctgcccattgccttggcgtgtcgacccaaattggtcccggccggggcatcaccctggcgtaacccaagctcgccttgtcggcgtgggcgccttcatgggcggccgggctgaaccctggctctgtgaggatagcagtcgctcctgctgaattttgcacatcatcaccgtcagcatcggcatcgtcatcaccatcaccacagctctgcacttccccaaactggaccatcgatgtctcggacgtncgaactatcaaggtgaaccaacgtgcctctctcggcgaccgccggggaacatgaaggagttcttctccttctacggcgagatcgagtacgtcgagatg

SEQ ID NO: 180049 - DNA, 237 bp, Zea mays
  unsure (1)..(237): unsure at all n locations
  Clone ID: MRT4577_95785C.1
ccgccagcgtgctttttattcgccctttccagcgggcggccgtcggggggggcgttttttttttcttggggcctgccattgtggctccttatttgtggctggccgcgttccctgtgctcaaccctttatttttgggttccctctcttcctccttctgtgatcgggcacctcctttcttctccctttggggtccgttgggggggtctctctnttcccgtcggccactttgccccgggg

SEQ ID NO: 180050 - DNA, 273 bp, Zea mays
  unsure (1)..(273): unsure at all n locations
  Clone ID: MRT4577_95786C.1
ctcttaaaanaacaaaacatatcatccggggccaattgatatatttttatcaaagatgcacccggatcacccaacattcaggttgacacacctacgtacataaacacaaatactgacccccaacatgcatacagagatagcaaactgaaaaactgtgtttctctgtctttcacacacaccacacaatacctatgtattgcaggaaacataagcctagcttattatttttcaacccccaccacaagctaaacaataaataattatattcaacgc

SEQ ID NO: 180051 - DNA, 168 bp, Zea mays
  Clone ID: MRT4577_95787C.1
aagcgcgccaggattatttttaaactcaactttaatgaccgtagccacaagacctacccaaggtggattcttgtgtaaattggtgacactacaatagcttttttataataaagccaaggccccattcaaaaacccaccaccatgcttacgagggggagggttttttcc

SEQ ID NO: 180052 - DNA, 257 bp, Zea mays
  unsure (1)..(257): unsure at all n locations
  Clone ID: MRT4577_95788C.1
aaaaaccggaccgaccgcacgcgtccacnnactcataaatccaatttttttataaacttctaactcccttataacatccctggcgtcttgtcctatttaaccgcaaacacgaaaccctaatctttatctctatctccttccacagcttgtcatcttagcacctacatattaacaatctctgtatcctcactatctacatttgtaacctccccgtcgacatccttcatatgtatgcgcactatcttttctacatatat

SEQ ID NO: 180053 - DNA, 344 bp, Zea mays
  Clone ID: MRT4577_95789C.1
ccccaaaaaagggtcaacccaaatggggtttccctggcccaaggaatggggtcccccggggttattttttaaagggggttttccccccaatggaaaagggggcctgacattggggggccaatctttgggggaaaagaaacagggcccaaaaacatcccacagttttttgggggaaaaaggggggaacaggtaccttgggcccccttaaacaaaaaactttttttggggcggggggaaacatttaacaggggggccccgggattttggcccggggtttcaagaaacccccgggggtttttataagttcccaatttttttttaagggggggcccaaaacctttttt

SEQ ID NO: 180054 - DNA, 495 bp, Zea mays
  Clone ID: MRT4577_9578C.1
atggacgataccaccgaagcggcagctatgaagaccttgatgactttctgtggctaccatcccttggagatggtgatgcaccccttgggactctttcccgctgagaagaaggacaaccccatgtggtgcaaccgtgccctacagagcgacgctatggcacatctttccaacctcgctcaaaccaccaagctcacccttgacagccaagaagacttcgtggttgacttgttctcagagctggtggagaaggacctacaagtggaaaggttgagccagcgcatcaccaccctggagcagcagcaggaacttgaggaaaccaatgaccacctggacatgcaccacctggagatggaggccaatgaggccggaagcgatggagaagaggctcccgaggagttaggaccagcccctggtgccaatgtgactgcctccgtgatgccccttcacccgtatccagtgtcgcttccactactcagggttgatgagtcattttga

SEQ ID NO: 180055 - DNA, 518 bp, Zea mays
  Clone ID: MRT4577_95790C.1
ccggccggggctcaccgtctgagacttaactatgagtgatgctgaccagggataggactctgtccttctcgacttctcctggaccttagagaagatctccccgcgccacctcgaggacgtgccggccctggacatcgctgaccaccgggatgggcgccgacgccctgcgctcctgcaggcgccggctcctgtgtctcaccccgaggccctggtggggctctgcgtcggcgcttgcacgcccaccgacagagctgcaccgctctctctccccaacggcggtctgcttgggggcagccatgctatctcatggggactgacacgcttttttaggtcaaaagaaaagcactttcctgcgatatctgatccaaaggtcgaacctagctttaaggagttggcggctgctccctgggatgaacctccagaatctctcgtagcggcagctaaaaaaggaggatctaaagcggcccgggataatgctggtcaagaggctttgaaaaatgtatttggtgcagctgaag

SEQ ID NO: 180056 - DNA, 378 bp, Zea mays
  Clone ID: MRT4577_95791C.1
caattccctgttcgggcggggcgtccatccttcttcatttcctctgcacccactccaccgcccctcctccctgggacaaacctctcccgcgaatcttccccttgcgagggcatattctcctacacgcctatcactacaccaccattccagctcttactgaacctgctctccaacacagcgcagctctcgctttcctatctccgatcattgggagagctcctaaaccttacatcgttctccaacccttactctctctactacaccacctcccatctgctccataacctagtctacttcctctacaactacgccctctttgtcgtcttcacactgtgcacctctcttctagcgcaccctttatctctcctcatactactt

SEQ ID NO: 180057 - DNA, 324 bp, Zea mays
  Clone ID: MRT4577_95792C.1
gcacccgcaccgagacgaacagagatatcgatcgatagctagatccatggctgacggcggcgacgacaccaccatcgagcaggtccacagaggcatctgacagcagcaacaagacgctggtcaagagcggggccctctacaagtacgggctggacacgttggtgctgtcgcacgagccatagagcatgcgtgagctgcggttggtgacccacaagcacgagtggggggacatgcactcgtccccggactaggcgtcactgctggcgatactaatcaagctgagcggctcgctggatacgctggatgtgggctggttcaccggct

SEQ ID NO: 180058 - DNA, 459 bp, Zea mays
  unsure (1)..(459): unsure at all n locations
  Clone ID: MRT4577_95793C.1
ggggggggggtttttttttttgtnttgtttttggcggtcccttgccccgcttgccgctttgttgattggccanaaacagggggctgctcgtttctccctcggcngggcccacttncccgatttttaactgccnagggcctnattnccgtggcgtttgtnggggttaccttcttcccccatnggnngcntgttttttgggtgtccggggctaagctctaacgggcntaccacacttccgcaccttgctcgtgggctggtgttccttttcgggcccgccttgagaagcacctcagtccttgtagtccttgacgtggaggctctcggtgtcggcggctgcctctcccttgttggtgccgtgggttgcctcatttttggccttgcncctggcgaggatggcattctctagccttctcccggttcttcccccttgcccgccctggccttgtgggtgctcgcctg

SEQ ID NO: 180059 - DNA, 773 bp, Zea mays
  Clone ID: MRT4577_95794C.1
agtccttcagatctcccctcccttcctgtccttctctattatagcaagcaaagcgccactcgcaatcgcaacccaccaccctcaggtcaggcctcgctcagatctctccgccctcgtcccccctcacaccccaaaccctcggcccgcctctctcgtcaacgccgcccgacgagagcgatgtcggcctcgccggccgccgccgcggcactcctcatcctcttcgccctcggggcggccggcggagtggcggccgacggctccgaccaccggtacaagatgtacgagcccgtcccgctctacgccaacaaggtcggccccttccacaatcccagtgagacatatcgttacttcgacctgcccttctgctctcctgagaaagtgaaggagaagagcgaggcccttggcgaggtcctcaatggggatcggctagttgatgcgccttacaagcttgatttccgttcggaagttgagtccaaggcggtttgctcaaagaagcttaccaaagaggatgtagtgaagttccggaatgcagtagcgaaggactactacttccagatgtactatgatgatctcccactgtggggcttcattggtaaagttgagaagggaggcaaggccgatccgagcgagtggaagtactacctgtacaggcacatcatcttcgatatcctgtacaacaacgacccgggtgattgaaatcaatgtgcacactgatcagagtgctttggttgacctgacggaggataaggagacaaatgtggatttcctgtact

SEQ ID NO: 180060 - DNA, 321 bp, Zea mays
  Clone ID: MRT4577_95795C.1
ggggacgaagcttctaacagtaattaatttatcactggtccgaccatgaacgaacgaacaagtggttaattacagggggggcagcaatgatcctgtacaaaaatgcgtcgtcgtcgcccggcccgagatggattttcgtttgccccttggggtacacgtgatgaagtgttggacctaacacacagtttcgacggatcgggtccgtgctcccgggatttttggtcctagctcggtggtacatgtagtcggccacataaaggagctcaaatagctgcatgttgaacagggcgggggggttggcattgttggcgcccccgtacg

SEQ ID NO: 180061 - DNA, 161 bp, Zea mays
  unsure (1)..(161): unsure at all n locations
  Clone ID: MRT4577_95796C.1
ggggagtgtatgatcgtgtanatgcctcgtcaactgctcgttatgagcttcgagcaatgtcagccttagccatgaattgctcgttccaatgcgagctttgatggctgttcatcgctttgactgctattctgctgtccataactgatgtaaagatttgcaaa

SEQ ID NO: 180062 - DNA, 112 bp, Zea mays
  Clone ID: MRT4577_95797C.1
ggggtaacgccaactctatcttacttagtagcggcagtgagaggccgatagcttaagctatctcttcaaatcgtaagaagcgattttggacatgtcgactaagaataggatg

SEQ ID NO: 180063 - DNA, 1486 bp, Zea mays
  unsure (1)..(1486): unsure at all n locations
  Clone ID: MRT4577_95798C.1
actcgtaaacaagcgccctcttggatccttgcaagcagaaccccgtcagtgtcacgatgttgacatgacaagtcctgctgatactggccacctcgttcatgaattccncccttcgcttttggtgtcctttagcatcttgactgctacctggcggccatcgtggaggctgcctctgtacacgggtccgaacccaccttggcctagcttctcggtgaaggatcttgtcattcttttcacatctgcgtaggtgtatctttttggatgcaggttcccgttcttctgtagaaaggactcgatccttggttcgtccttcgatttgaatggcagcccggccggtttagaggaattggaattcactcaataaagtaacttatttagtttggaatttgacatcccacctttttccatagctcagatataagtcaatctcaaattcatagggtggaggatgagaaatgattttatgcattagtagaatttgtttctactttgtaacttacataacactcttcgtctcactcctctatagtaaaaatgtagcacataaatatttccgacatcttgctaataatagtatacaaatatattttgcataaaaccgaattagcctgattgatatatgccaaaattgttattattagaatggaattcaattccaatgatccaaacggcgcgtgatgggaaagtgaattaatatagaaacagaccatatcaccatactgaaataatcttagttgttgaagcatattgagatggcacacggtgcttaaagttgaacctagctggttatgtgaacttaaaaaaagtataaacattgggtaacacaatatactagtatacaaaaatatgtgagcatacacacacttgagcttagctctttaacttatttttaaatctttttcttattaaataaaatattttatgacctagctcttcaaacactgttggagctacgacagctacccttggcaaaacttcgtgttctgttttctcccttcaatgcaaggcagagctctttaaaaaaagttctaatgtgatgtgccctgatgaggcaacggtggcaacgctgcaagatttcttactcttttgtttacagtttcacgtaaactgcatcgacccatggctgcgccaacagggtacatgcccaatctgcaagcaccaggtgagcgatgggtggcatgctacaggcaacggtgaagaggatgcttcttacatggtgtgagtagctgactaggagctgactaggagtaggccatagctaactactagtagctgctaactgaatccgtggaacatagttttcgaggtgacgggttggactgatctagggatgtgatctaatccctttctatcctaacaaaaccgcgtgtggaaacagttgtccagtacggttcttttacaggtaacgctcatttcaaacattctctggaatggaaggcataacaaggttgatgataatctacaaaaaaaaaaaaaaaaagcggcc

SEQ ID NO: 180064 - DNA, 585 bp, Zea mays
  Clone ID: MRT4577_95799C.1
caaatttgaagagtatgtatatgcgtatgctatatatatcactgaaatccattttcatccataacagttaagaactagacatgaattgcagcagtatgtatagcaccaaaatacatgtgacactggcagggaaacagatagtgcacagcatgattgctacatggattcggttcagaggaatatatgcagtgacacaggggggtttggtttcgtcccttaaacaagatacaactgaatggtcggcgttttcatcaggtctaaaagcatctctcaggaaaccactgaccctggtacagtatatatagattgtttaaccacatgtatatcctgctataagattgatgtgcagcagaacaggacgtattgggagattgcagaatttggatctttatacttgtgcgttgtatttaatctgttccctaattgtttgttttgtttgccgacatctctcccagtcccaacaatcatttttttacgcgatcagtttgaaacagtgcaaaaacatgctaattccttatttttccttgcaagatttgtcttttggtccttaccagattccctgggaggcgcttcgttctggctggg

SEQ ID NO: 180065 - DNA, 622 bp, Zea mays
  Clone ID: MRT4577_9579C.1
ggcagttttgcccgccgctagcaagcccgaacgagcctggtcgttctcctccccgtcctaataatcagggaaaggctcgccgcgaggctccgcccctatcgcgcgccgccagcgacagagtacgcttgcggtcccggtgcgggggcagggcaggggccggggcagggcaggggccggggcaggaacgccatccatctggggtgcccccggcatcgcagcttctctcgcctcctaggaaatcacggagcttccgaacaggttctgttcaggaaaacccccagattccctctgttgtttttcttaggacctggcaggaaaacacttatgattaacactatgctcttctgattcactggcacagtagtagtttgaataatactcactatctgttctcccagtggcttcatttcaccctgatgactgatagataggcgtattgatactcatatatacattcaaaagggatgggcatttcctgctatataggttatatggagtccctcttaataaattgtacaatctgaagtatagtgtttccaagaggattctacctcaaccttgagcgaactggggagttacagatgggattaccatcttaatggcattatcctatgttttgttt

SEQ ID NO: 180066 - DNA, 458 bp, Zea mays
  Clone ID: MRT4577_957C.1
gtctgtaaattgatttatcaggacaatcctcaatgtagtggttttggtgtagttcggatttagcactatttaattaagattcgggtccttacatcaacaatgcattcatgtggtctcacagtggcacttttattgaagtgttcgtagctttcaaagttcttatctctttttacatatatgatcacttacttttatagcactattcatagcattattcttcatacttatgtttatctctttgttttttatacttaattcttttatttcttgtctcattttttttttttattttttttcttcttttttttttatttatcttatagttttttatatgttttattttttttgttttttttatctttctattatttcttttttattatttttctgttttttattttttttaattcttatttttatatttttatattttttatttttctattttttattttttt

SEQ ID NO: 180067 - DNA, 1879 bp, Zea mays
  unsure (1)..(1879): unsure at all n locations
  Clone ID: MRT4577_95800C.1
aagaagaagaatggcgttgctcggcgagtacagcagtcaggagctgctccagggtcagctccagctctggcaccagttcctgggcttcttcaagtccctcgcgctcgcagtcgccatggacctccgcatcgccgacgccatccaccgcctcggtggcgccgccagccttccccagatactcgcggaggccgggatcaagatcgacacctcagcaaagaagaagaatggcgttgctcggcgagtacagcagtcaggagctcctccagggtcagctccagctctggcaccagtccctgggcttcttcaagtccctcgcgctcgcggtcgccatggacctccgcatcgccgacgccatccaccgcctcggtggcgccgccacccttccccagatactcgcggaggccgggatcaagatcgacccgcgcaacaacaagctccgcgacctgcgccgcgtcatgcgcgcgctcaccgtgtcgggcatcttcaccgtcgtccagcgaccagcgtcgtcgtcagatggaggcggcaggcgtggcgcagaagcggaaggtccggtctacaagctgacggcggcctcccgcctcctcgtcgtcggagagaaggagagctcgacggcgacgacgaggcagctgcctcctcctcctccttctctgaccgtttatgtgcagctcttactcgaaacctgccgaggatccgcgttcagcagggccgtgcgcgagtggttccagttccagcagccgccgcaggatgatgagcagcaccagcagccggccggccgcctgtcgtccccgttcgccctggcgtgcggcgggcagacgatctgggagcgagccgagcgcgacgcccacgcgttcccgttcgacgacgccatggcctcggacaccgccttcctcatgccgatcgtgctgagggagtgcggcgacgaggtgttccgtggcctgacctccctcgtcgacgtcgccggcggcctcggcggggctgccgccaccatcgcggcggccttcccggacctcagctgcaccgtcctggacctcccgcatgtcgtcgcaaaggcagctgccggcaccgccgacagcaacgtcgtccagtacgttgccggtgacatgtttcaaagcatcccaccggcggacgcggtgttgctcaagtggattcttcacgactggagcgacgacgagtgtgtcaggatactgaagaactgcaagcaagccatacccccacgagcggcgggagggaaggtgataatcatagacatggtggtggccggatcaggatcaggatcaggatccgcggacgatgagccgtcggagtcggacttgaggcacgtggagacgcagatcttgtttgacctcttgatgatgtgcgtcaatggagtggagcgagacgagcaggagtggaagaagatcttctccgaggctgggtttcaggactacaggattatgccgcttctgggcgttcgatccatcatcgagctctatcctaattaaaattagtgtactgaattgaaagctaagctcgccactcgcgacaagcttgttgtggttgtggctgggcgtgtggtggtgatcgaacgtgtgtttgccatgctcagggatccatgcatgctatatgtactccctccgtttctttttatttgtcgctggatagttcaattttgtactatttagcgacaaataaaacgaaacggagggagtaataaaataacatccactacatgattgattaacaaataaaaaaagggggggcggctaatttgggagctcgaggaccggaatattaatccgggacggttacctcaggggttcccagcttcccttatggggagcggtataaaacctgggggaaatcagggtaatactgnttcccgggggaaaattgtttt

SEQ ID NO: 180068 - DNA, 515 bp, Zea mays
  Clone ID: MRT4577_95801C.1
ttttttttttttttttttttttttttttttttttttttttttttttttttttttttttttttttttttttttttttttaaacaaaggacaccaccctaatttcttaaatttggattttaaaggggcccaaaaaaaataaaaattaaaaaaaccgcgggggggaaaacgggtattcgggggcaagaaaccccaaaaaagaaaaaaactggccaggaggatcccccaaaacccaagcattggattgctattttggggggcccgatttaatccaaaaattttaaacgggtccagggtgggaacccacgcgggcggaaaggttttggttaaattggattcaccgggggacaccctaacccggggaggagagccaaaaaggccttttgaaaaaaaaggcccggcggaagaaaccaagggccggactatttgggaaaacaactaaaaattttaaggggaaagggagcgatccgcaatttcaattataggaaaaggctcaaaaggggccctgaagggggcct

SEQ ID NO: 180069 - DNA, 526 bp, Zea mays
  unsure (1)..(526): unsure at all n locations
  Clone ID: MRT4577_95802C.1
ggattgggtatcccccaggncgggcgggaaatcccccgttttccactgcacctaaaatctccgtattgtccccacttcccaccccgaatagagcttctcctgttgtagccatggttacctacgcggccatgtccaacgacgacgatactgatcacatggagctcctacaggattctttaaaaaatacggtgaggcgcttggtctgattatcagacatgagctcaaccaattgaggattacgagactgggcacaagcactgtacccgccaacactttcaccactgtaaataagctgacaataatgaacctcatactctccttgagctgctaaaatgacaaactttccctgcatctatccccacaaagcctgcaacaatcctatcacttccgagaactacagactatgaacccactccatagacgacatagaactctacccccctggggaacacaaattctacactgacagttcccattacctctctgtcactaagagtgtaccaggaaagcccactcccctggtgga

SEQ ID NO: 180070 - DNA, 297 bp, Zea mays
  Clone ID: MRT4577_95803C.1
agatgtggagaactcggccttagctttttcattttctgatttgctagattgatagtgtgtgcaaacctgacgctgaattactgttgtccttaccgctttaaacgatgccagggatgatgccacaactcatgacccctaacatgatgggaccatttcaagatgccgagcctgatgtcaccaatggtcttgccgagcatgatgactcaaatgatgatgccacaatgtcactgcgacgccgagtcgcacattatgctggggcagcggttaccattcatgttcaacccattggccctgaga

SEQ ID NO: 180071 - DNA, 750 bp, Zea mays
  Clone ID: MRT4577_95804C.1
cctctcgataattgctcatttccaacaccaacaccctccccagaattgccttcaacaccatcatctccatcgcctgcgcatcacgacaggaaactgagcatagggttcataatcgcggttgctgtcgggggatttgcagtactgatgctaattgtggttgtgttgtgtgtgtgcctttcaaagaggaaggggaagaaagaggccggtgtcgactacaagggaactggtgtcaggagtgataagccgaagcaggaattcagtagcggtgtccagactgctgagaagaacaagttggttttcttggacggttgcacctacaactttgacttggaggatctactgagggcttctgcagaagtccttggcaaggggagttatgggactgcctacaaggctatactcgaggacggcactgttgtcgttgtcaagaggctaaaagatgtcgtggcagggaagagggagtttgagcagcagatggagctcgttgggaggttgggtaaacattcaaacctagtcccgcttcgtgcttactactattccaaggatgagaagcttgtcgtctacgattacattgccaccggcagcttttctggcatgttgcacggtatcagaggtgttgctgagaagacgccattagactggaataccagggttgaagatcatactaggaacagcatatggcatcgcgcacatcccttcagaaggcggcgcatagctcccccacgggaacatcaagtcgaccaacgtcct

SEQ ID NO: 180072 - DNA, 3297 bp, Zea mays
  Clone ID: MRT4577_95805C.1
gggtacctcgaggccggccgggccggctccagtcacagctatagattctagaagccaacaaaaacggacgggagcagagcgcagagggaggagaatcgtgctccgggaaaacaagagaatccacctcctctcccctctccagatctacgccggcggcgctggtgcgtccgtgctgctccgcggaggcggtgctgcgctgctagctggtcgtccgagagagcccgtcccccggaccgaccgatgggggcggcgccggtcctcgtcctgctgctgcgtcgccgctgccgcattgccgcggcgggcgagcgcggccactgacgccggcgacgtttctgctataaatggactttatgttgcacttggatcaccaaagctacctggatggtctgctagtggtggagatccctgtggtgagagctggcagggtgtcacatgtaccggctcaagtataacctcaataattttcaatgctgcaaatttgggtggacagctaggcagcctggggaacttcacttcaataactgaaataaatcttagcaacaacaatatcggtggaagcataccggaagatctacctgtcacactgcagaatatctttctctcagataaccaactaactggaagcattccaatgtcattatcagaactccatagtctaacagccatgtcactgaatgataaccatctagatggaaagctaccagatgcatttgattccctcacgggacttgtaaatctggatatttcttccaacaacttcagtggtccattaccaccttcattgggaagcttgacatcactgactacattgcacatgcaagataatcaactatctggtacccttaatgtcttgcaggatctccccctcaaagacttaaatgtagagaataatatgttttctggaccagttcctccgaagctgctgaacaagccaaacttcaaaaatgatgggaatccttttaataccagcatagctccctctacctcaccctcttcaacacctacaggctctagaccaacacaaacaccatcgtcttcttcatccccttcaggatctccgccaccatctagtgcagcatcaaactcttctagtggatctactgctcgaaatagcaactctccatcatccaagaagaacaagtcttcacccctcagaactgttggatatgttcttcttgctattgtactattcatagttctagtgctgttggtaatcttttgcctgtccaagtatcaagaaagacagtctagacgtgattattccacgtctcaattaggtagggtgcaccagagggttgaggagccaaaaagcaagcaagcttcggtgcagtctaaacatgaagccaaaaaaggtttatctgaggttcctgaaagaaagaagccccgagaaataaatttagctgtaccagttgccattgagaagcctcctgaaaagagacaagagcatgtaattaatttggagcgaacagaatcagagatctttgctgcaccaccacctccacctctgatccaactaccccaggagcagtgttccttgattctaccttcacgattgccatcaccacatcctgttgaaaaagtaagtgtaaatcccattgtacttccagaaaaaagagttagcaccccgccaaggactggtccctcgacatctgcaacatccttttcggtggcatcacttcagcaatatacaaatagttttcaagagcaaaatttgataagggagagtagattggggaaagtgtatctggcagaacttgctggaggcaaattactggaagttatgaagattgataatgctaatagtgtacatgccatttaggagcctcatttacttctggaaagtatatcagatattagacaccctaacattcttgaattagttggatattgtgcccaagctgattagaggttacttgtgtataaccacttcagtagaaaaacattacatgatgtactacatgaaggggaggatcttgataaaccattatcctggaatgctcgcctccacattgctcttcatgcagcaaaagccttagagtatctccatgacacctgtgaacctcctgtagtacaccagaattttgaaccagccaacgtgctcctcgacaatagatgctcagtacgtgttgctgaatgtgggctggcacaattgatggcgtctggttctgttacacagctatcaggccgtatgcgagctctactcaattatgaagcacctgaaatccatgaatctgagccttttacttgtcaaagcgacgtatatagtttgggtgtggtgatgctagaacttcttactggtcgtaagccatatgacagttctcgtccacgtgatgaacaacatcttgttcgatgggctgattctcagcttcatgacatggagtccctgtcaaagatggttgatccttctatccgaggagagtgttctgtgatactgttgtcacgttttgcagacatcatcagtcagtgtattcagccgggaccagaattcaggccagcaatgtctcaaatcgtccaagacctagctaggattgtaggtgctagtggtgcggtatcagagtgacagataaagggggaacagtaaacatctagcttgactgtatgcacttgtggagacgccagaacgtttgtttcctttatctaaaaaaaaggtaaaacatctagcttcagtcgtgtggccagtgaagattcatacatcctcagcgcagtgccaggggcactctcagtatttatattggacgatattgcggctagtgtacatgccattttggagccccatttgcttctggaaaggtgtagtggtactgtggtagtatggcacaaccagtgagatatggcttctcattgttgctagcagatattcctgagctcctctagacatgataatttcacctgcaggcagtatctcttgtaactaattccaattttttattactttattactacattatagctagttatgtcaaatatggtgcttttagcatgtcttgagacctatgtttctcctgggaaaagaactggcttgctgattctttgcagaggcaaagcaacctttttctgacctgtacatgaagattctcctccttgaagcgaaagcacctctgctaggtatgcgtggtgtgcttggttccttacttttcttcgtgtgatttcttcaagatgtagaataagttatgacagtgttcaactatgctgattggggattagatgaacttttgtattgatccgttcttaactgatgaaaagaacggccaaaagaaaaaaaaaagacccccaaaaaaaagaaagggcgcccgccga

SEQ ID NO: 180073 - DNA, 445 bp, Zea mays
  unsure (1)..(445): unsure at all n locations
  Clone ID: MRT4577_95806C.1
gcggaaaagaactggcttgctgattctttgcagaggcaaagcaacctttttctgacctgtacatgaagattctactccttgaagcgaaagcacctctgctaggtatgcgtggtgtgcttggttactgacttttattcgtgtggtttcttcaagatgtagaataagttatgacagtgttcaactatgctgattggggattagataaacttttgtattgatccgttcttaactgatagatggcaccctgtggttgatcgcttnnttcattccaggagcgcggcagcagttcttgatgttgccgtcattgcacccgaatatatcagtgtcgttctaggcgtccacgcctgcgtgggacagggccctcatgtacactacctatgttgagcttgctaacgacagcctcatgatgtggtggacaggcacaagctacggcctcggagttttc

SEQ ID NO: 180074 - DNA, 1766 bp, Zea mays
  Clone ID: MRT4577_95807C.1
cctgaaggcaagataacatcgccaaccatttcccccaacaagataggaagcagggcaaactctcgcagtttcgtgatatgctcttgctctagcaggggtgcttccgcttcaaggaggagaaccttcatgtggtcggcagaagacaccaggtcactatgatgatcatgtccatgtcaagttggaatgtcgttttgcctctgaaaataatctcaataacagtagacttctatgattaacaaaccatacggagttagcaaccggagaaacatgagtctcaagacatggtaaaaggcatcatatttaacatagctagccataatgtaataaagtaataaaaattagaattagttacaagaaataatgcctacaggtgaaattatcatgtctagaggagcacatgaatctgctcggcaacaatgagaagccatatctcactggttgtgccatactaccagtctacacctttccagaagtaaatgaggctccaaaatggcatgtacactagccgcaatctcgtccaatataaatgctgatagatagagtgcccctggcactgcgctatggatctagggatcttcgctggccacgccactggcaagctagatgttttactgttcctcctttatttgtcactctgatacctcactactagcacctacaatcctagctaggtcttggacgatttgagacattgctggcctgaattctggtcccggctgaatacaccgactgatgatgtctgcaaaacatgacaatagtatcactgaacactctcctcggatagatggatcaaccatctctgacagggacttcatgtcatgaagctgagaatcagcccatctaacaagatgttgttcagcacgtggacgagagctgtcatatggcttacgaccagtaagaagttctagcatcaccacaccgaaactatatacgtcgctgcgctgagtaaaaggctcagattcatggatttcaggtgctacataattgagtagagcccgcatacgacctgatagctgtgtaacagaaccagacgccatcaattctgctagcccacattcagcaacacgtactgaacatctattatcgagaagcacgttggctggatcaaaattctggtgtactagaggaggttcacaggtgtcatggagatactctaaggcttttgctgcatgaagagcaatctggaggcgagcattccaggataatggattatcaatatcctccccttcatgtagtacatcaagtaatgtttttctactgaagtggttatacacaagtaacctctgttcatactcagcacagtatccaactaattcaagaatgttagggtgtctaatatctgatatacaagcaaccaactctagaaagtcatctactggtattctcccattagcattatcaatcttcataacttccagtaatttgccttcaggaagttctgccagatacacttttcccaatctactctcccttatcaaattttgctcttgaaaactatttgtatattgctgaagtgatgccacggaaaaggatgttgcagatgtcgagggaccagtccttggcggagtgttaactctttttactggacgtacaatgggatttacagttactttttcagcaggaggtggtgatggcaatcgtggaggtggagatggaggtggcggtgttgagggcggaggtggaggtggaggaggcgctacagcaaagatctctgattctgttcgctccaaattaattacatgctcttttcaccggcaggctcgagg

SEQ ID NO: 180075 - DNA, 399 bp, Zea mays
  Clone ID: MRT4577_95808C.1
aggacatgtactatatcacctgaatgcgttcgaaccatctacacctgtgaaggagactgtcatactcattgaccgcatacgaaagaacacacgaaagtagcgcgaaggctctgtgctgaaaaaatgagccttcaaagatcaaaacgaaatctcttgttaacactctgcttagccttgaagattgcacgataagctgcttatggcacgcttgatgcctgctgttccactaagcactattttactttgacattcctaactcaagcactatcaacatgttgagaaggaggaacagtgtccatagaagtgctcaggtgatcaaatggatgctgagcagacggcaatgaaatacaatgagaacatatgaactgatggcatgtgcactccagaaggataatagag

SEQ ID NO: 180076 - DNA, 1359 bp, Zea mays
  unsure (1)..(1359): unsure at all n locations
  Clone ID: MRT4577_95809C.1
ctggccgggctccgctgcctttatctcacctcgccgccactcccagtcccagtcgtccctctctatctccatctctctatctctgcactgcactgctcacagtcacagctatagattctagaagccaacaaaaacggacgggagcagagcgcagagggaggagaatcgtgctccgggaaaacaagagaatccacctcctctcccctccccttctcttccctctccagatctacgccggcggcggctggcgcgtccgtgctgctccgcggaggcggtgctgcgctgctagctggtcgtccgagagagcccggcccccgaccgagcgatgggggcggcgccggtcctcgtcctgctgctgatcgccgctgccacattgccgcggctggcgcgcgcggtcaccgacgccggcgacgtttctgctataaatggactttatgttgcacttggatcaccaaagctgccaggatggtctgctagtgctggagatccctgtggtgagagctggcagggtgtcacatgtaccggctcaagtataacctcaatagttttcaatgctgcaaatctgggaggacagctaggcagcctggggaacttcacttcaataactgaaataaatcttagcaacaacaatatcggtggaaccataccagaagatctacctgtcacactgcagaatctgtttctctcagataaccaactaactggaagcattccaatgtcattatcagaactccatagtctaacagccatgtcactgaatgataaccatctagatgggaagctaccagatgcatttgattccctcacgggacttgtaaatctggatatttcttccaacaacttcagtggtccattaccaccttcattgggaagcttgacatcactgactacattgtaattctacaactgtttcttctatttttaccctcttaccttgtacttactcttccaggatgttctattgcacaggcacatgcaagataatcaactatctggtacccttaatgtcttgcaggatctccccctcaaagacttgtatgtctacactcccttctctgttgtcaattaacttgttcatttattacagttcatcacaatctacaaatcaagcagaacatctgcaattatttggtcagttacctgctggtttaacaaaaaaatactgcctctattatggttgttatggcggtggctagtgttgagggagcgcaagggggccgacctggggccttgcccatgaccgagcaagagggaaaagttnttcttcttaattcttgcttgattagattgatatatctattctccttatatagagagccttacttgaccattaagcaagtgatccctcttacttgaccc

SEQ ID NO: 180077 - DNA, 411 bp, Zea mays
  Clone ID: MRT4577_9580C.1
cttgtttctcccagttcggtgagcggttagtgttatgatgaagacgacgactacgacgacgatggcgtcccagcgattaacccgtgctgtaatatttgatagaagaagccgtagcccacagtggttttgctgtctctatcctctcctcccttcctccggctcaggattcttttgtagcttggtttgttctcacctgcttcgattcgctctccgatgaatgcagcttgaaatgttggttcagaaaaaaaaaaaaaaaaaaaaacaaacaaacgaaaagataaaaaaaaaaaagaacgattaagaaaaataaactaaattatgaaaaaaaagctaataaaaaaaaagggggggccgttttagaggatccaagctaacgtgcccgttcttgcaagaccataacttttttatggg

SEQ ID NO: 180078 - DNA, 202 bp, Zea mays
  Clone ID: MRT4577_95810C.1
cgccacgcgtcccacaagatcgtttgcctcaagattttttctgccctgcatcgtcttaacaggccgggatatttttggatgctcggggcctaaagtgctcgagagcatagctcctaatttccttagtcttacgacattatatcatttatgctttctaatcttcttacttgttaaaacacttttaatcaagaaacttatcatc

SEQ ID NO: 180079 - DNA, 325 bp, Zea mays
  Clone ID: MRT4577_95811C.1
ataaagatagcccaatggataactgctgaaacttttgatttctactcctgacgcccaggattaagtcctgggtggctagacattagatataagaatccaatcccgagataaagggggaaacagagagtatcacaactgtataaacaaaaagtttgagagtaagcattatataatctcctttttttggtaaggaatagattacccattttctctttaccacacggacccattaggatgtgttttctttattttgacacctaaaaaagtgcaaactaccaatcctatttttttgcatattcttttaaaatatatagggacttgtttt

SEQ ID NO: 180080 - DNA, 320 bp, Zea mays
  Clone ID: MRT4577_95812C.1
ctcaccatacatagcttcaacttttttgcatacgtcccttggcacccgcaacgggcgactaactatgtgtgttcagagcgagccacggaaaaaaaaaaaaacattgtacatatactccatcatcttcgtgtgattaacccgcccattaaaggccctgggtactaatgataaatccctcatacctctcgtacacctcgagagcatcagatgccgggcctacttgtctgccagttaaactgacgatcatcacaaactcttgggaatccctttctagttgggtactagaataccgagggcgataactgaaacaataactccct

SEQ ID NO: 180081 - DNA, 278 bp, Zea mays
  Clone ID: MRT4577_95813C.1
gcttgtggggtaaagggacggacctgaattacaaaagcaaacactttggctgttcagcaagggcaggtggcaggaaacacccgaacctttccccagggggcccggacacaaacaaagggttttgaaaaccaaaacctggttggactggcaaacaaattcatgcaggcaaaccaaaatttctccctctgctaaccggcataaattgccccctttgggggaaccccctagtaaccctttttcaggggcggcaattcctccggtgcctcgggaaaactccc

SEQ ID NO: 180082 - DNA, 590 bp, Zea mays
  Clone ID: MRT4577_95814C.1
ccggccgggacaaccttactccccaaggatagtacgtgtgggagctttcatggcttcatcggtggtcgccgcggcgagctcattgctgggcacccgcctggtggacccggtgccacagaacgggggcatcttggtccggctcgggttctgcttgtggcggcgaggactaagactgctccgaatagaggtggtgaagacatcgacctcgtctgaccggccgctgtgcttccccggggccgaggagctcgactacctggacggatcgttggtcgacgactacggggtcgacccgttcggtctcgggtagcccgtggagtacctgcagttttagttggactcgatggaccagaacctgaccaagaatgaggccggcggcatcaacggcacccgtttcgagtactccgaatcctaggccaccccgttgctagcgtactgcgaggtgttcggcctccagcggtgccgcgagtgcgagctcatccacggttcgctgggtcatgctcgccaccctcggcgccctctccgccgagtggctcaccggcgtcatctgctatgacgccttctatgtggagctggtggacgggtcctcctac

SEQ ID NO: 180083 - DNA, 511 bp, Zea mays
  Clone ID: MRT4577_95815C.1
gtgtgtgttttgtataaaaaattaagaaaggattctaaacatggctggcttggcgcgttgtgccactcggatcacatttgttaataaaagaacattatcaaaattgttcaattttcaatcaccttgtacccaacaaatagcaaatatatcgagcaaagcttggagagaattgaatggtattcaacggccgcctccatatgattataaaaacaatacttatgaattgtaccattcctggtacgacagaacatcaaaacgtttcgatgaaaattctaagatcatattagtggaaggcccaattgctgctggaaaaactgagtttgccaagaaattagcagaagatttagacatgtattatatcccgcaagcaagcatggacgatatttacataaatgattatgggtatgatttgcgtgatctagatgatcaattacctccaggagcacgaagtttcgatgaaaagaagtttgtaaatgatcctaataatcgtttgacagcagcctttcaactt

SEQ ID NO: 180084 - DNA, 493 bp, Zea mays
  unsure (1)..(493): unsure at all n locations
  Clone ID: MRT4577_95816C.1
ttgggtacctcgaggccggccgggcgcttgtggacctgctcaagttcaagtcgcaggagggtgtcagagtgtgcctgcttgtgtgggatgataagacttcacatgacaagttcttcatcaagacgggtggggttatggcaactcatgatgaagaaactcggaagtttttcaaacattcctcagtcatctgtgttctctctcctcgatatgctagcaataagctcagcattttcaaacagcaggttgttgggactttgtttacacaccatcaaaagtgtgtgctggttgatacacaagccaggggaaacaagcggaaaattacagctttcattgggggcctagatctttgtgacggccgctatgacacacctgaacacaggcttttcaaagatcttgacacagtattccaaaatgattaccataaccctacattttcggcaggtgcaaagggtcccaggcaaccatggcatgatttacannttgcaggattgat

SEQ ID NO: 180085 - DNA, 271 bp, Zea mays
  Clone ID: MRT4577_95817C.1
caagctcttgcaccccctttcctcttcatcctctcctccctcgcagcgcgcacgctctccgccctctcaattcccaaggaaacctatccaccattccggcggtcgatacatccatccgtctagtgagagcaaggaataatcaactaatcggccatcgaatcagtcgattggatgaggagagccggattccgatcagctcggctcgggtttgtggtccctttcgtcttcggctcttctccgcggcgtcgtcttttgtggttcttgcgttgcg

SEQ ID NO: 180086 - DNA, 486 bp, Zea mays
  Clone ID: MRT4577_95818C.1
ggggcccacccctttttttttttttatatccaggggaacagaaggggggcccaaaagccagcccacgggggggggggggggaacgggggaaaccccaccccccaaaaaccaaaatagttaatggcccccggagcccccccaaattttaggaaaaaacctaacccaaaagggtcacaaaaagaaagctttgaaacccccaaggggtgccccgaaggggcccacccgtttttttttttaaaaatttttccttaaaaagaaaaaaaacttaagtgggccttttttccccgggcaaggagcccaaaaaaagctgggtggaggctcccctaatttttcgaaaagggctccttggcaattttatttttcccacccttgggggggaaggatcccattttttgccccccaaaaggtaaacgaaaaacgggccaaaatagtaaattttctcccggaagaattctctttggaaaacaacctgccaaaaaacaattt

SEQ ID NO: 180087 - DNA, 166 bp, Zea mays
  Clone ID: MRT4577_95819C.1
ggatgactgccaggataccgacgggcgctaccaaaggaaagcatgtaaggggcaatgcaaggacgagagaaaaattataactagagagaagggacagacgacggaggggctagaagcatgcaagctccgggagggaacccagggggcctggccctggcggccgcgc

SEQ ID NO: 180088 - DNA, 350 bp, Zea mays
  unsure (1)..(350): unsure at all n locations
  Clone ID: MRT4577_9581C.1
agccggccggggccctcttctgccgacagcgggagagtacgcggcgcagcggctacaccaccgcctccaggctcccattcacgtccctgccatccttttttgactccggagtccctcccctccttgcctatctggcgaggaccccctacccccttccatccatctaggcttcctaccacttccccccccccgcccctctgggtccccctccccggnttcagcntgcaccacccacccccccccgccgcccgcccccgccccccactcccgccccgccccctcgctcccgccccccccccccccccccgcctgggcgccccgcacgcgcagcgccgcgcccctcacccccc

SEQ ID NO: 180089 - DNA, 183 bp, Zea mays
  Clone ID: MRT4577_95820C.1
gccacgcgtcctcagacgcgtgtccatccaagcgcgctcaatgacttccgcacgctgcagacgcactacaagctcgtcgtctgcctcatgccgttcctctgccgccgctgcggctaggcgttcgccgtcaatggcgactgtcgctcgctctatagtgagctgctgcaggctcgtgttactggt

SEQ ID NO: 180090 - DNA, 371 bp, Zea mays
  Clone ID: MRT4577_95821C.1
gtgcgcagcatctacaccgagggcaaggagctcggacgtggccagtacagcgtcaccagcctgtgcaggcacaaggccaccagcgagcgctacgcgtccaacaccatcgccaagcggaagctgcccaccaaggaagacgtagaggacgcgcggcgcgaggtgcacatcatgtaccacctggccgggcaggccaacatcatggagctcaaggtcgcctacgaggacaagcagatcgggcacctcggaatggagctctgtgccagcggagagctcttctaccgcatcatcgtcaagggcaagtgcactgagcgcgctcccgcgtacctgctccgcaccattgaggagatcgtgcacacctgccactacatggg

SEQ ID NO: 180091 - DNA, 830 bp, Zea mays
  unsure (1)..(830): unsure at all n locations
  Clone ID: MRT4577_95822C.1
ccggccggggtgtaaacaccagtatataagaggaacaaatgaaaccaaccggccggcaactcttggcagcgccattcttctgtgttcgcgtgtgttagaggattgtacgacgccgtagacacgattcctgtgttgccgatcaccgtcgagctgtgcattctggcagccgacgccaacacagttggcgcagcggcgcgtgaacccgctggtgcacctcgcactatacgacgcgacgcggtccagcccgaccatgcggttctacacggcgcagggcgttgagcggagctccggcatgcggccagggagttctttctccacgacggcgtggagatcgacttggagagccagaccgagcacctcaccaggatcatcaaatgtcagtggacaaaaagaccctgatcaagatgcgcgtggcttgtctcagggacatccggctcctcaattacctcgatccgaccaaaactgggctcctgacgcatctcctgaacgacggtgacccgatcagcacctcctacatgaactacgactggtctctgaatgcctgaccagaattcgtccgggatgccgccggatgcgtacagtggtgaaacttggggctagtgccaggaatcccacgatatccgttcagagctgaggtcgatcagctgctggttaatggccaggtggacagatgacatatatatatatatatagtttgtgatcagcatactgagcttattcagtagagagaaatctaaacatgtatatagaattctgaatgatgattttgtactcatgatatgccccacgcgcgtctcttgcgaaaaaaaaaaaaaaatttgctgcactcn

SEQ ID NO: 180092 - DNA, 227 bp, Zea mays
  Clone ID: MRT4577_95823C.1
gattgtagttcacagttgacagtaggttgaaatatagtgcttggtgaaatgtgtgagcgactgttcaagaagtgactttgttattatatataatcaaaacaatttatcatatagttacttataactactaattcctttctaaatatatcttttttatcatgtttttaatcttatttatttactatactattatatattataaattttttatttttactttttattta

SEQ ID NO: 180093 - DNA, 340 bp, Zea mays
  Clone ID: MRT4577_95824C.1
cgttgaaacaatccaccacaaatacattttttttactcaactaaatctcaccccaaatcttgacgaccgggaatgaaagcatggcttgctgatgtttttgcgcctcttcttttcatctacctggagcgggttcgttttttctatagcggtgtgcatccatcttaagcatcagacaaccacacacatttggtgacacaaattacactagtcaagatccttcaatgtttaaattgctcaatcacatgaacaacgggtcgtttatttaacataaactaaccaaaagggctggtctaggtagctttgcccagcgtagctttttgcaccaccaccggcatgatat

SEQ ID NO: 180094 - DNA, 358 bp, Zea mays
  Clone ID: MRT4577_95825C.1
ttttgatccagctctcaaccttcatccgagcaagttccacaccaacgtggtgccctaccctaggatccacttcatgctttggtgctacgctccacctatctctgctgataaggcctaccacgagcagctagtcgtgagcgaaatcaccaacagcgtcttcgagccatccttcatgattgccaagtgcgacccccgccatggcaagtacatggcatgctgactcatgtaccgtggtgatgtggttcccaaatgacgaaacgctgatgtggtcacaatcaagaccaagcgcaccatccagttcgtggactggtgcccgactggcttcaagtgcggaagtaactaccagtcttccagcgtc

SEQ ID NO: 180095 - DNA, 468 bp, Zea mays
  Clone ID: MRT4577_95826C.1
aaaaaaaaacccctttccccaaagatttttttttttttaaaaaaaaaaaaaaaaaaaaagggataatatttaaattaaagaagggataaacaaattaactactataaaggtaaaaaaaatataataaaagggggggccctttttaaaattccattgtttctccccccctctttcaaaactttaattttttttttttggaccctaaattaaaatcccctcccccttttttaacaatttcgtgccgggaaaaccccgggcctccccaattttatccccttttaacaattcccctttttctccttttgggaaaaatgaaaaaggccccccccaatcccctttttaaaaatttgccccccttggatgctcaatgggccccccccttgtcgggaacattaaacccggggggggggggttttaccgcacacaagtccccttcactttccaagcccctttacccttttttttttt

SEQ ID NO: 180096 - DNA, 715 bp, Zea mays
  Clone ID: MRT4577_95827C.1
gagctcgagcagaaacgacaccacccagacggccccctcagatcggaggtcgaatccgaaccccgtcggcgatggcgccgccgccgcgccgcctcctcccagtcctcctcgggttccttgccgctgcctctctagctaccctcgccgccgctgtctacgaagaccaagtcggcctcgctgactggcatcagaagtacataggcaaagttaagcaggcagtttaccacactcagaagagtgggaggaggcgtgtcgtggtcttgacagaggaaaatgtgatcgcctctcttgatcttcgttcaggagatatattttggcgacatgtcattgagaagaacaaccccatcgaccagcttagtctttcagcgggaaaatatgttgttactctttcttcgggaggtagtatattgagggcatggaatcttcctgatggacaaatgatctgggaaaccaatattcaaacttccacatcatcaaagtcgttgctgcatgttttgtcaaacagtaaagtggtaaaggataatttggttttagttttggctggacaatggatttatgctgtatcaagcattgatggagtcatttcttggggaaaggagttcacacttgacggcctagaaatcaagcaggtcgttcaatcacctgagaatgatattgtctatgttgttgggattgctggttcctcaaagcttgctgtttatcagttgaatgctaa

SEQ ID NO: 180097 - DNA, 428 bp, Zea mays
  Clone ID: MRT4577_95828C.1
ggggaggggcccggggaaaacccaccggggcatgccgggttgcttcaggaaaaccccggggtttacaggtagaggggactacaaacaggccacttcacaaatttggaagctagagcttaaagattgaaagcttacctttggaagcaaaggttggggaccaacaacaaacaacgacttaggcccccccccgggataaaaacaaaagccgaaaacgggccccgcaacccaagcccaaggggggttttcgcgggccacccctaacggggacgggggccagtcaaaaccggggaaatttttgccaaagccgccaccgccggaaaaccccacctcgggggtctccaggccctgggcggggtcccaaaaaaccccgtcgtcgccgctgcccacggggtaataaaaatcggcgggggggccccagaacaaccccc

SEQ ID NO: 180098 - DNA, 211 bp, Zea mays
  Clone ID: MRT4577_95829C.1
cgagcgcggaacccgacccatcaacgatcgcctgattggcgtggatcgatctgcccagatcgacgcggacatcacccctggggttctgggactccacaactctaatgcgtccgatgcacgtaccgtaggcgacaccgggcatgacgcacgcaggatgacacagttgaccaagatctgcgtggacagccttgacggaccaccagaaagacct

SEQ ID NO: 180099 - DNA, 3252 bp, Zea mays
  Clone ID: MRT4577_9582C.1
cctcgaggccggccgggcttcctcctcccccttcctccccccgcgctgcctgccgtaggtacgggaagggaaaaaagtcggcgccaaatctccgcatccattcgcacgccgcgattcttgtgcgcgatccgccgcgcgatgatgatcccgtggggcggcgtggggtgttgcctcagcgctgcggcgctgtatctcctcgggaggagcagcggaagggatgcggaggtgctgcggtcggtggcgagggctggcagcatgaaggatttagctgctatcttggacactgcaagtaaagtcctaccacttgtagttgccgtctctgggagagttggttcagacacaccacttatatgccaacaaagcggcatgagaggtgtgatcgttgaggaaacggcagaacaacacttcttgaagcacaacgatgctggatcctggattcaagattctgcagttatgctttctgttagcaaagaggttccatggtatctggctattaaagatgatgttggaactattagaattcagcgaccgcataaaggacccttctatgtatcaccaaaaagcatcgatcaacttattatgaatcttggacacgtccgcaggttataccgccttgcttcaatgggctttgcaacatttggtgccttccttcttgcaaagcgtgcaatacaacattttctagaaagaaagcgccggcatgaactgcaaaaaaggtgcctaactccttatgtcatttccttttagaacattcaaatccaattgaaatgtagtagcattatttaagtgtttgggtttttaaagaggtttatatttctgttttagccatggatagaatgtaagtgacttgtgctgttacgatttatttgtaagaactttgtaacctctgtatgcctatctattgacacatgtgcaacctgtagctaattttaaatttatagaggtcacatgaaatttgaaaagaccatactgcagggtgaacaaggcaatatgtaggacgtgaagtcgcatggggtactggatgccctgatcttcacattaaaagaaactacgtacttttcgggataagaatcattccccgctgtcaggaccatccgccattgatggtgctatatgatgcaaaaaactggcattgtcccatgacatgcactgcttctgaaaccaactttttcctggaacttggaagtgctggactgctataaacaaacgaccatgaactgcaatactgggacgaagaagcttcaatgagtttgctttttgaacggagcggtgagtgatgcaagttgcaagctcataattggcagctgagatactctaactccctagatagtgccactgggtgctcttgcctgtaatgtactccagctctgtacaggacgctcttgtgtaagtgcacttagattagcagcttgatttgtgaagacctcgagcatgcaatgaaatactaggcctcctctaaagattacaacaccacaccagaggacagctacgccacaccatgccacgctatatggatataataatgccagtgctaagagattctgtttgcgtttagtgttactgttaccactgactaatactaatgcatgtatttgcatactaaggctttagtgagcacagaagattctgatattattttatccatatagggttcttaatgcagcagcacaaaggcaagctagagaagctgaagggagcattggttcatcggacacagagcctaacagtaaaaaagaccaattagtgttggacatatgtgtcatatgccttgagcaagagtacaatgctgtttttgtgccgtaagtattgtatgttttccagagcataaatgttcttcgttgagaatgaagcagctggatttcctctatttttctatttcctttttttttcataattccaaatagactggtagcgttattatggttgccctgtttcctgtctactagtagttttttttcttaacagctcaacttgacaaaacttgaatactgctaaggccttttttggatgttgtagtcttaagaaactgcaattttagaacccattgatctgcaaaaccatggtttagaaaaaaagaggtctagagtggatttttacgaactccaaaaagactatagttttagtaataacatggtattcaaagccataatgtttgttgtatccgaagttctgaacactttgtcactctaaaaccaaagcatttcacaaaactacaatatttttctaaaaaggccagaccaagtgaccagagctccaacatgagggggatctagggaacggataaaccaaggtaatccttcctaccacaaatgcgagaggctgcttcgtatccgtgacttgaacttactgagtcgccaggtcacagttcgaagcagcctttccgcgtttacggaaggaaggcttgccccggtttatctcttcttcagacctcactcgtcactggttctgcccctagtattttttctagaagtctaaaaataatttgtatccaaacagggtctaaaagggttaaaaaactggataagcattgttttgcatcatacttcaccaagaagcccgaggaaatagtcgaactgcagatatgtgaaattcgttcataatttgtccttgctatcactgttgtcacccctgaaagtttctgtttggactttaaaagtgattaatccaatgttacacaggtgcggtcacatgtgttgctgtatggcatgctcttcacatttgacaaactgcccgctttgccggagaagaattgaccaagctgtcagaacattccgccattgacggtgataccacgtgcactgcttttgaaaccagttggctattggaagtgctggctcctgtcaaccaacgatatgaactgcaaaactgggtcgtagcagcttcttcatggagtttgcttttcgaacagaacagcgagtgatgcaagttgcaagctcatgattggcagttaagaaagataccctactgagatagtgccaatgggtgctcttgcatgtaatgtactactactacaactgtgtacaggacacttgtgtaaatgcacataggttagcagcttgcttcttgactaacacctaatgggcatttatgttgtgctaaccgaatgacaaaattagctcgtttagttgtgataatcgttttttctagtgagtggggaatgatacggatatctccgttcttttgtgctcacaggatcataagaaacagaaaagatttgtaacatgttctatattttactgctcattttgtaacctg

SEQ ID NO: 180100 - DNA, 710 bp, Zea mays
  unsure (1)..(710): unsure at all n locations
  Clone ID: MRT4577_95830C.1
ccaagtttcacaacagatacctacaagaagtacatcatagattagatgatatcaatcaaagggacacttgacgaacagagaccagaaagagtaaaaccttttatgacaggggctgcagaacaaatcaagcacatccttgctaatttcaaaaactaccagttctttattggtgaaaacatgaatccagatggcatggttgctctattggactaccgtgaggatggtgtgaccccatatatgattttctttaaggatggtttagaaatggaaaaatgttaacaaatgtggcaattattttggatctatcacctgtcatcataactggcttctgcttgtcatccacacaacaccaggacttaagacaaatgggactgatgtcatcttgagctcttcatttattttgactgtgatttatttggagtggaggcattgtttttaagataaacatgtcatgtaggttgtctaaaaataaaatgcatttaaactcatttgagagaatgccttttagtttaatgcatatttaaactaaattgatcctgtagtgttcctggagaagctagagcctgattgtaggctactactcatcaattaacttctacagtggagactacttctgggactggaatatataaaagaatcataggttctgatnttgagttgcaataaaggtgaagaccatgcttcatagcagtgccaacatctgaggtgtg

SEQ ID NO: 180101 - DNA, 507 bp, Zea mays
  Clone ID: MRT4577_95831C.1
aattcggcacgaggtttctccttgttttgggtcaccatcgactgcgcatgcagacggcgctgatgcaggcgtgccggttcggccactgggaggtggttcagacgctgctgctgttcagatgcaacgtgagtagctagctagcgccatcccttgttttcccagcgcagtgcaagtgcaaccgaccgacgggcgatggtggttatctgtttcgattcaaggtgtccaaggcggacagcctgagcggcaggacggcgctgcacgtggcggcggcgggcggccacgtcaggtgcgcgcgcctgctgctcgcgggcgccggcagcggcaggagcaagctcgtgaaccgggcggccagcggcggcggcggcggcgtgacggcgctgcacctggcggcgctgcacgggcacgccgactgcgtgcacctgctggtggacgagcgcgccgacgtcgccgcgcgcacgctgccctgcgccgcgccgtccatggcgtgcggcggcgccgggagcgcgc

SEQ ID NO: 180102 - DNA, 410 bp, Zea mays
  Clone ID: MRT4577_95832C.1
aggacaacaaaatatattattcatatgcttaaaggacaaaatcctgagaataacacatatcacacaaaaatgaggactggggtagctccaacaagccagattcatgacatgcaacacgctagatcttaatggtaaacctaagacgatgatatatcaccttacaactgaaccatgtgaattaagcatcacacgttaacaaagactatccaccaacacactgatgaaaaattacatgtctacccacaagctttcaaacaacaccatcatgaacaattataccatcagtcttatacttaaactgaataccgaccattcaaccaatctaattaacaatttgtggagtaaagaacttgttcatgggcagagaacttaaacttggggacagggaaatcatcactggtatgttcagg

SEQ ID NO: 180103 - DNA, 835 bp, Zea mays
  unsure (1)..(835): unsure at all n locations
  Clone ID: MRT4577_95833C.1
gcgtcgtcggagaggttgaggccacatcgtcttctcctcatcttcttctccatcttccatccatcagataggccatggcttccaccgtccccttctccccggccaaggtccagatgctccaggcgaccaactgccacgggcacgcgccgttcggcagctctttcgccgtcccaagaaccgggccaaagcagcgttccctggccgtcagggtcagcagcgagcaggaggcggccgccgccgtcagggcgccgtcggggaggagcatcgaggagtgcgaggccgacgccgtcgccggaaaattccccgcccccgctgcgtttgtcagaccaaaggccccagacggcacgcctgagatcaggcctcttgacatgccaaagcgccctcgtcgcaaccgcaggtcgccagctcttagggctgcattccgggagacaaccatctcgcctgcaaatttggtgctcccattgttcatccacgaaggggaagaggatgctccaattggcgctatgcccgggtgctttaggcttggatggcaacatgggcttcttgatgaggtgtataaggcacgtgatgttggtgttaacagctttgtgctctttccaaaggttccagatgcattgaagtctccgacaggaattgaagcatacaatgacaatggtttggttccacgtacaattcgcctgctcaaggataagttccctgatatcattgtctacacggatgttgctttggacccttattcatctgatggacatgatggcatcgtgagggaagatggagtaattttgaacgatganactgtatatcagttgtgcaaacaggcagtttcacaggcacg

SEQ ID NO: 180104 - DNA, 652 bp, Zea mays
  Clone ID: MRT4577_95834C.1
atatgcattccctagacccctgctgcattctgaaggaccgcgagtccgtttccgtgctccgctaccgctcaatgaccatcaagacatgcgcggatttcgcgatggtccgcctatcggcatcgatctcggtacgtaggtactcttgcctccgcgtgtgagagcacgaccgcgtcgagatcgttgcctgccaccagggtaaccgcgccgcgccctcggacgtcgtcttctccgactgcgagcgcctcatcgctagatagtgcctttaaacaagtcgccatgcaccgcatgacaccggctttgatgccacgcgtcgcatcattacggacggtcagtgatgcgttgtgttcagagtgatatcgaggtgtggtccttcactgtgatttctggggctggtgagaagtcaatgatttgctgcccagcaaagggtgacgacatacatgtcgcagctgaagagatctcctctatggatattatcacaatgccgagacattgctgaagcttaccttggaagcacgatcaagaatgctgggatctcagtccctgcctacttcaatgactcacggaggcaggccacaaaggatgctggggtgattgctggccttaatgggctgcgtatcatcaacgagtcaacacctgcagctatcgcctatgg

SEQ ID NO: 180105 - DNA, 385 bp, Zea mays
  Clone ID: MRT4577_95835C.1
cggacgcgtgggttttttttttttaattaaaaaaagtattttatttgtttaatattattgaaattaacaaaatcaactgtcaatttttaagtgtttaaacttaaattcaaaactaaacaaatataaatgttaaactaactttaaatgaagcgaatcaaataaagaaagtgaaattaaataagaatgtaaataaaaaatgatttaacataaaatgaagatcatgtaaaaataaagcaatcaaaagcaaaatgttgaaggaatcaagaactaaatgctatagatgtccaaacaaaagtgatgctttgaaactgaatgaagcgtgtaaacgatgataaaatcgatcacagacatttttaaaatgtgttttctattcattttgaattgg

SEQ ID NO: 180106 - DNA, 622 bp, Zea mays
  Clone ID: MRT4577_95836C.1
ccggccggtccacagcgtccactcattcatcgccatccattgctatgcacagacctgagaatgacgatcctcggcgcgcccgccgcctggttctctcccccactccagataaacctcgcgagtgtgacgcagctccatcgacccatgcggaacaatgtggtgagaacacagaacatctaccaccatgagctgatcacgccccacctctaggggaatgtgaccgctgccaagtaccgcgacatactgtactgcgaccatgacgaagggtcgacatgcccttctcctgccgcaatgtcgggcgtgctcctcctgttgcgctcgggcaccatccacatccttccaccaacatcaccagagcttactctgcgaccatctacggcggcgatctgatggcgtgctcaccctgcgcatggtcacccaccataaccaacacagcgtcaaaacgacctcatgagcgatgacctccaatgattactaccatacctatacgccaacaaggttcacctggccatgcgatatctcactgcacaaccgacagatcatgacatggtacgtgtcttatccatcaattatcaatatatatatagatgtgtgtgctggcattgatgcaaccacgtactta

SEQ ID NO: 180107 - DNA, 290 bp, Zea mays
  Clone ID: MRT4577_95837C.1
agatcgaacaatattttggttattgatatatttcaaatatggggctcaggtttgagttttgcaccacctctcaatcctttttaagtctggccctgccttcatcacactcaatccgtgttcgcatcctatgccatgtcatgcgcccagggcctcctgacctatccgccgggtgggttgtcgattttgaccatcttacccatggctccggaacactgcttgacaggggccctggggcctgcccagttcttgttgactgtgtcgcgcgcggtgtctcccttgctgctgccccc

SEQ ID NO: 180108 - DNA, 311 bp, Zea mays
  Clone ID: MRT4577_95839C.1
ccagaccataccaatggccctgcgcctatcattttcagcggcccacgaactggcctaggggccgcggccaatttacagtacgacgcgccacccactcccatgggcgacaggcgaacttcataataagagactgctgctggcaagggcctctgatacaaggggagtcgcacatgtgaggtacagtgggatcgatacaagcacgcgtgtgtctgggatgtgaggccttcaccggacaagtctctaatgtcaacaaagacacctactgacccaacgtctaggtcgccggtgacaacggatcgtactccacatgt

SEQ ID NO: 180109 - DNA, 442 bp, Zea mays
  Clone ID: MRT4577_9583C.1
catacttcaaacaagttgtgcttccttccgaaggtgtacaaaatttggtgtccagtgagaggagtgaattgatgcgaattgcagctaacgacaaaagagaggagctgaaaatattttctcaagagattgttaggttcgggaaccgctgtaaagatccccagtggcataacctggatcgctactttgtgaagttagaatcagaaagtgcgccccagaagcagttgaaagaaacggcaatagcagagatgcaaaagttaatgagtcttgttcaacgtacaactgtgagcactctgttgttctctaaagatatcttctaagccacaaatgcccgtcatttcgtttttttttttggctttcttttttcaagatttgtatcatgagctgcatgcattagacagatttgagcaagagtactgctctaagataaacggaaagggtcaca

SEQ ID NO: 180110 - DNA, 173 bp, Zea mays
  Clone ID: MRT4577_95840C.1
tccatcctgaaatcaaggtttttttttacagcgacgtcgggaactccgagcgcaagttttggccgaaggacaggatgaagccgatcatcttttcgataggcgcgtcttgaccgcgggtagaacatgacaggcctggtggagatgtacggcatgaacgcgcgcctgagggagct

SEQ ID NO: 180111 - DNA, 150 bp, Zea mays
  Clone ID: MRT4577_95841C.1
gggcggaacttcaggggagacccaagcgcccgcggacgcgagggcagcagcctcaccgacgagcctcctccataggcatccacccaggccgagagcacaacagtgtaccagtctctccccagcgtagcgcgcgcgcgaggtcaggaggcc

SEQ ID NO: 180112 - DNA, 784 bp, Zea mays
  unsure (1)..(784): unsure at all n locations
  Clone ID: MRT4577_95842C.1
tgggacctcgaggcggcgggacgcgcctttacgcacgctcgggctcgatcggcatcgattcccccaatcccgcacccgcacccgcacaccaactcgcaatccctagcactagcagcgccgcggcggcaggcaggcagggggggttgccggaggccgctcgtagcacggaaggtctccggatcgatccatggagcgcgcgaggagggcttcgcacgccggctcttgttctcgggtgtttctgcttggcccttctcatcactactacactccaaaatgtgctttaaccagggcttctgtttactgtaccccaattggggatttgccagtagaccaggaagtcatcgaggaactcagtgctactggaaagtttgaatttatggaccttaatgtggatgaagctgaacatagcatggaaatgcatttgccctaccttgctaaagtatttcaaggacataatgtgaaagtcgtccctatccttgtcggtgcacttagctcccaaaacgaagccttgtatggacagctgctctccaaatatgtggatgacccaaaaaacttcttttccgtgtcgtcggacttctgccattgnggatccaggtttagctacacatactacgaaaagaagcacggtgccatccataaatctatcgaggccttggaccgtatgggcatggagatcatagagactggcgatcccgtagcgttcaaagataccctgcagagtacgagaacacatatgncgacgcaccccatcagcgtcttccttcacatggtgaaacattgctcg

SEQ ID NO: 180113 - DNA, 1475 bp, Zea mays
  unsure (1)..(1475): unsure at all n locations
  Clone ID: MRT4577_95843C.1
gggtacctcgaggccggccaggagcttgcggtcatgccgttgccggtagctgctcgccacaactggcgcgcctcactcaccgcgccagttacgccacgctcgggctcgatcggcatcgattcccccaatcccgcacccgcacccgcacaccaactcgcaatccctagcactagcagcgccgcggcggcaggcaggcagggggggtgggggggggtgccggaggccgctcgtagcacggaaggtctccggatcgatccatggagcgcgcgaggagggcttcgcacgccggctcttggtacaccaacgatgccaggaagctggaagaggaactcaatggttggctgggggcagccggtctaaccaagtctcctgatgttagggcagtaattgcaccccacgctggttattcatactcgggccgatgtgcagcttatgcttttggcaacatcgatccaactaacatttctcgggtgtttctgcttggcccttctcatcactactacactccaaaatgtgctttaaccagggcttctgtctactgtaccccaattggggatttgccagtagaccaggaagtcatcgaggaactcagtgctactggaaagtttgaatttatggaccttaatgtggatgaagctgaacatagcatggaaatgcatttgccctaccttgctaaagtatttcaaggacataatgtgaaagtcgtccctatccttgttggtgcacttagctcccaaaacgaagccttgtatgggcagctgctctccaaatatgtggatgacccaaaaaacttcttttccgtgtcgtcagacttctgccattggggatccaggtttagctacacatactacgaaaagaagcacggtgccatccataaatctatcgaggccttggaccgtatgggcatggagatcatagagactggcgatcccgtagcgttcaaagaatacctgcaggagtacgagaacaccatatgcggacgccaccccatcagcgtcttccttcacatgttgaaacattgctcgacaaaaattaagataggctttgtccgctacgagcagtccagccagtgcaagaacatgagggatagcagcgtgagctatgcatccgcagcagcgaaggttgctggtgcatccggggaagaagataaacaagactgagcgagctacagctctgtttgatatactatatataagccgccaaaccttggtgcggaatgtgtgactggtttcccataagaaaaagaacatgtgatttggtaaaacattttcttcttcagtaaaaataaataaatatgcagactgctggggatctgtactaattaattaagagattttcctaaaaaaaaaaaaaaaaaaaaaaaaaaaaatttctcccacgcgtccgnnnnnnnnnnnnnnnnnnaaaaanngggggagaagnnnaaaaaaaaaaaaaaaaaaaaaacccttgggtgggtccccctggttaagggg

SEQ ID NO: 180114 - DNA, 3069 bp, Zea mays
  Clone ID: MRT4577_95844C.1
gctggttattcatactcgggccgatgtgcagcttatgcttttggcaacatcgatccaactaacatttctcgggtgtttctgcttggcccttctcatcactactacactccaaaatgtgctttaaccagggcttctgtctactgtaccccaatcggggatttgccagtagaccaggaaggtgagtgtttactcaatttggatggttgaatgtttttagcctagttctgtattatgtactctactgtcaagggttttgggattcaaggtagctggacctcggctacagagttcgtagtctcagacaataatggtgtgggaatttccccccggacaccctatggtgaagggggtgagattaggaagaagggagattggggaaatgaatctgttattgcttaatccttaaatgttcccatacatcatgtgtaagtttgaatctgtatatttgtttttgttggaatataatataagtgaattgtccatatcttcttatcagtttaagctttttggattgaactggttgatgcatgcaacttaatatgttactagccagttgaccgtgctttgctacgttggtatatagcatataaataggtattgaaatatttattcaaatataattattatttatttctaaacattaagatacgttggtctggtggttaggcccaaatttctggagcagggggtgcgggttcgagtgctcgttctacactattttttgctcggtgtgatagctgcgcgtgtggggtcggttgctgggcagatgcagtagctggttgcacgggtgttggggggtccccacagggcagtagttgagagagcgttgcgagggcaatgggcgtggggcccacagggcacggcgccgaggcggggtgcgtggggctatgttttctggtcgctcgaccagctagtcgaactgggggaccgaccagcgactaatctcgattagtcgtcgactaggtccgactaatcgagctctggtcgacctggtcgtttactggtcgtcctgttcatccaggagaccaggacctatgtatatactatataatatatactattatactatatagtaaataattatataactatatagtatatatgagcttcatatactatattatgaaggatatggtaaacatgacatgaattcagcaatactgaaaagtgaaaacagcagagaaacacttctagttattaatactacaagtcccagataccagtaccacacaacacacattaatactacaagtccaaaaaaaatctaggtcctaaacctagtcgcccagaaccggctaatcgagcgactaatcggccctaatcgtcgactagtcggacgaccagggcgaccaggtactctagtcgagttggctgcctaatcgagctctgctaaccgactagcctgactaatcgcgactaatcgcgattagtcggacgacttgaaaacacaggcgtggggcgggagaaccagtcgggacgtgtgggcgggcccagagtgtcagcgcggagggtgaagccgtggtagcaccagatgcccacattagggttttaaaagagtagtatagatcaaagccagatgtctcgagttcgaatcttggttagtgcaaataaataaaattattgttgctcggttctattccacatctgagagccaagagagctggaatataatatcagtgaattgtccacctctttctatcaacttaagcttttgggttgaactggttggtacatgcaaacttaatagttttgtaccggtacgtattgatatctggttctaatacggatgcaatatgttcagtattagagggatgcaaaactacattgtctgcataatctgggatgcaccactgtaagtacagatactagtcaggttaatttgcattctgagacatttctagatctttatctgtggccagtaggtgtcgcctgagcttgtgacaacccggaatatcttgtttagtccgctctgttgattgagcttggcatgatgagttttccttcaattgaggccgttcctcccctttctgaatattgtagtgttccctccatccttaattacatgttgttttggcttttctatatacctagtttttgctatcgacctagatatacgatatgtctagatatttagtaaaaactatgtatctagaaaagctaaaatgatgtacaatttggaacagagggagtacattattattatagttattttccagatactgaggaacccaagctgcatgaaaggttgaatttaatatatttccatcttgctctactgatttccaccattccagtcattgaggaactcagtgctactggaaagtttgaatttatggaccttaatgtggatgaagctgaacatagcatggaaatgcatttgccctaccttgctaaagtatttcaaggacataatgtgaaagtcgtccctatccttgttggtgcacttagctcccaaaacgaagccttgtatgggcagctgctctccaaatatgtggatgacccaaaaaacttcttttccgtgtcgtcagacttctgccattggggatccaggtttagctacacatactacgaaaagaagcacggtgccatccataaatctatcgaggccttggaccgtatgggcatggagatcatagagactggcgatcccgtagcgttcaaagaatacctgcaggagtacgagaacaccatatgcggacgccaccccatcagcgtcttccttcacatgttgaaacattgctcgacaaaaattaagataggctttgtccgctacgagcagtccagccagtgcaagaacatgagggatagcagcgtgagctatgcatccgcagcagcgaaggttgctggtgcatccggggaagaagataaacaagactgagcgagctacagctctgtttgatatactatatataagccgccaaaccttggtgcggattgtgtgactggtttcccataagaaaaagaacatgtgatttggtaaaacattttcttcttcttcagtaaaataaataaatatgcagactgctggggatctgtactaaaaaaaaaaagaaaaaaaaaaaaaaaaaa

SEQ ID NO: 180115 - DNA, 830 bp, Zea mays
  unsure (1)..(830): unsure at all n locations
  Clone ID: MRT4577_95845C.1
cttcgacccgtcacgacactcattgactctcccttctttgtttctatctttgtataccatgtttcgagcggcaccgcgactaattgcgcgtccagcgctgcggactgcgtcattgcggtccgtcgcacccaccaagcgttatatcagtacagctccgccatcacaaaagtccagaagtttcaagagcttggttgcgcgggtgggcattgctggcgccataatatattactacaacacaacggatgttttcgcagaagagccgaggcagcttgtccaggcactcccagaaaccgaagtagaatccgagcacctacccaccatcgaatcgatcgctgaagaacgcaagcgaagacaggcggtgcaagcgcaattggagattcagaagcaaaaagaggccgaaagtgcacagcagaatggtgaacagggagggattgaaggactagaagaagaggcggatcagcaaggcgcgttcaatccagagactggagaaatcaattgggattgcccatgcttgggaggtatggcccatggcccttgcggtgagcagttncaatcggctttcagttgctttgtctactcgaaagaggaacccaagggcatggactgcatcgacaaattcaaggacatgcagaactgcttccgtgaataccccgagatttacggctccgagcttgactctgatgacgctgatgacgacatgaccgcggctccagaaccagtggagacatcgagccangccttccaccgatttcgctcctcaggccgactctgcacctaagctttcgacactgaagactcggaatttggttcagacaaatcgaccggcgagc

SEQ ID NO: 180116 - DNA, 215 bp, Zea mays
  Clone ID: MRT4577_95846C.1
tttcggtatcaggactagtagctgccgaaggccgctttctaccgctcccagaccccatcttatctaccctgcaaccctagcatcctaaccctcgaccacgtcgcagctaacgacctcctatactactccgtcttttcgccctttcaacttccttctccacttttctatcctacttctttattccgactcacctttacgtacatgccccaaccggg

SEQ ID NO: 180117 - DNA, 276 bp, Zea mays
  Clone ID: MRT4577_95847C.1
gcatcgacactgatacgatgtaccaaaacggcaacatcaaaaagaattacgaaatgaaccctgaagatgaagactaaaaaaagtggagctaacatcgatctggactcacaaatgaaaggaaaatgagttgatcggaagacatgcaccagacaaaccataattgctgcctgaaaatgcgttagtagaaaccgataagctaaagcctggcgaaggaactagagataacaaatactgctacttgatactagatacattggcttcaaaatatgactcacg

SEQ ID NO: 180118 - DNA, 235 bp, Zea mays
  Clone ID: MRT4577_95848C.1
cccttctttgtccccttgggggggacccaccatgggggcatcctttcgcctgttggggcaaagcaagattcttccccttgaaccccttcttgtaaatagcctaattggaaaggccgatggttttgccgaagttttccttgaccccaagtccaaaaccgtaagaggactgcaggaaaaaaaccatttcgttggattaactgagaatggggccaacaatcccccggtttttaaaaag

SEQ ID NO: 180119 - DNA, 501 bp, Zea mays
  unsure (1)..(501): unsure at all n locations
  Clone ID: MRT4577_95849C.1
gcgagggngaggcnagngcaaancccgggcaaagaggagcngcgacagtttttcccccncagngncagngangggaagaagnangggcaaaacaggggagaagagcgggcgggncaagnnganaganacacaaaaacaaaaaagagcaccnacacggggnnnngagcggggnagaannaaggagaggganancccaanggagggccnngaacncgagaacaagaacgacaagaacanggcannggcaggggaaccnaaaggacancgcnnngcnancanccagggngagggcccnaagccggaggggagcnncnacgccaggcgaacgnccaagaacacaagccgggganccaagcgcacaacccncaaggccaagcaagcnaagacgcgggacgggncnccggcngggcgcnncanagnnncnggccggacngaagggacncaacgggcagcggggaaccaacaacgcggacgaaccagagacaagggcaacaggagagc

SEQ ID NO: 180120 - DNA, 662 bp, Zea mays
  unsure (1)..(662): unsure at all n locations
  Clone ID: MRT4577_9584C.1
agcagtggtaacaacgcagagtactttttttttttttttttttttttttttgttaacctatgtgcatttacacaagtgtcctgtacacagttgtagtagtagtacattacatgcaagagcacccattggcactatctcagtagggtatctttcttaactgccaatcatgagcttgcaacttgcatcactcgctgttctgttcgaaaagcaaactccatgaagaagctgctacgacccagttttgcagttcatatcgttggttgacaggagccagcacttccaatagccaactggtttcaaaagcagtgcacgtggtatcaccgtcaatggcggaatgttctgacagcttggtcaattcttctccggcaaagcgggcagtttgtcaaatgtgaagagcatgccatacagcaacacatgtgaccgcacctgtgtaacattggattaatcacttttaaagtccaaacagaaactttcaggggtgacaacagtgatagcaaggacaaattatgaacgaatttcacatatctgcagttcgactatttcctcgggcttcttggtgaagtatgatgcaaaacaatgcttatccagttttttaacccttttagaccggcncaaaaacagcattgtactcttgctcaaggcatatgacacatatgtccaac

SEQ ID NO: 180121 - DNA, 296 bp, Zea mays
  Clone ID: MRT4577_95850C.1
aaggccaccgggaagggtttttttatgggaaaaggaaaaaggaaacccggttctctcgccaaaggggaggaaggggaggccccttttttttttatggcccaaaagggccccccctaccccccacccccttggggaaacccgttgatcccacccgggggcataaaaaaaatcaaatggcaacttgggaagccccccgggttaacagtcccggaagcccttccccggggctcccaacaggcttttcgctcgaaaaaggccccacggtttaacagtcccccccgggccgaattccggcg

SEQ ID NO: 180122 - DNA, 1173 bp, Zea mays
  Clone ID: MRT4577_95851C.1
agaacgccgctacggtcaccactcggcacgacggttgcactgaccatcgtctcactctcatctcatcaccgctttccgtttcgctcgtccgatcctcatcaccagctcgggagggaggtcgggagagagcacggacgatgtggcacgccgcggcggcccccaacaaccttcacccggccgtcgccacaacatcgtcccctgcccttcgccgtgcgaggtggcccatcactcgaccctcgtcgtcggtgaaggtccagtcctccatcaggaacggcaatggctccgctgacaacctggaccacctgcagagggcgtccaagggcaggcagcagcggcagggggcgagtgctccaggcccgagggctagaagggtcgtccgcaccacaccattcgggctgtggtgggacagcttcccggaagcgaggacgctggaccagatggtgcggaccatcatggacgccgacgacgctgacaccgacacccgcttcggcggcgtcgtgcctgcggcggcggcggcggcccccaccgccgtgccgcgcgccgaccacgggcggacgccgtgggaggtcagggagcgcgcgggggagtacctggtccggttcgacatgccagggatggcgcgggacgacgtgcgggtcagcgtgcaggaccggacgctcgtcgtggccgcagagaagaagcaacagcctgctgctgacggcggcggcgacgaggagggagataatgagggggaggcgtggccgccggcgagcttcgggcggtacaggacgcgggtggagctgccggagaacgtggacgtggagaggatcgccgcagaagtgaaggacggagtgctgtacctcaccatccccaagctgtcggcgggggccaaggtcgtcaacatccaggtgcagtgatgctgtgggtcagattcatcaggacgatgagcacctgctgccgtgcttttcgcagcttctagaatctggatgcttgggacgagagcgatatcgatctagctaccactcttcttttcactcttctttttctgtttcgttcctcgattttgtttgctatgtcacacatggtaaatcttggtagttggtgccagaagataaggtgtaatctttgacctgtttggaacaaattccagaatcgaacgcaagaggatttaaatattattctgctgcaagcaac

SEQ ID NO: 180123 - DNA, 335 bp, Zea mays
  Clone ID: MRT4577_95852C.1
gcatgcacgcgtacgtaagctcggaattcggctcgatgcctttatcgggccgagatctatacacgggggggcgctcgagggcggggggcgcgagcctcgcccactagtcaggacggctgatgtcccaccaggcgagcctcgagtccttcctcctcttcaagaggctgttactgctcgtcgccggggcaagaacgacctacatttttttacgctccagcctgccaatcgtgcctgctcgtgggcaacccaaccatccacggagaggtacgcactggtaacggccatattgttgggaaacccatccaagctgagatttaggctacttcatggacacg

SEQ ID NO: 180124 - DNA, 190 bp, Zea mays
  Clone ID: MRT4577_95853C.1
acatgcccacgctcggactatatgtgcagcgagccctccccgtgcggtagtcgagttactctgcgaccccgacaccgaaggtcggcaaggagccggactcgtaccgggggagccgctcgctcagcttcggctggggggggatgcaggaggaggtcctgagcgtgaagctcatgtacgcgaacaacccgcg

SEQ ID NO: 180125 - DNA, 598 bp, Zea mays
  Clone ID: MRT4577_95854C.1
tagtcaacagaacacacatatctttatgtttatacgctataattaagcataaatagcaaacagttgcaatacacggtcactttgctagtgtgtgtccatgtatatatatgtgtgttgcatattaagagcatgtccttccaataactagaggaagcctcgatccaataataccttttggttctgccgcaccacctcaattaggggtggactcaggccaggccggctagcccacagttagagacgtaacccaaaagtgtttttagcccacactataaaccctgcccaactgtccacgacgccgatatttgcgatcaacactagctcggccagtacaggtactgttgtctccgccgccacgatggcaagcatgaggcaacttttgagggtgcaggtggaggccataatggggggcttcacgtcatgttgcgccaggactgtctaccttgccagcctcaccggccccctcgctacagtgaaggtccacaatagcagcgagcgcctccacctcgtgttccaccaggagctcgacgcactcctatgcgtctgccacccccacatcggccacctccttgccttctatcactagaaatacaaaggc

SEQ ID NO: 180126 - DNA, 432 bp, Zea mays
  Clone ID: MRT4577_95855C.1
ctcccccccctctggaaaaaaaaaaattgtttcatttatatgttttggcgaaaaaaaaattttgggggcccacaaaaaaaattttaaagcaaatttcccaagctcaacctcaatccctggttttccttctttaaaccaaaaatgacccaaaaaataaatttagctggtgcccccccccaacattccctgggaccgaacccccaaaacttggcccccaacctttatttttcccaaaaacccggctataaacacctccccctttacctcccccccggggtctcttcccctgttcgtttcccccccccgcccggcccatttcttccggaaagccttccccccccccccctccataaatattttccctttccccaaaaagatcggttttttttccccctccccccaataaagagacctttccttaaaaaaccctgg

SEQ ID NO: 180127 - DNA, 162 bp, Zea mays
  Clone ID: MRT4577_95856C.1
atgttcagatggagcttcagctccgtttgcgcttcacctgctatttgcctcagctcgagcaggggagattcggtttagggccgccgacctgaacacgagcgatagacgcgcgtgagacatgctcctaggggaggacatccgtaaggtctcgcgccaggacat

SEQ ID NO: 180128 - DNA, 373 bp, Zea mays
  Clone ID: MRT4577_95857C.1
agagaaaaattgggaaccatttattgctggccacgctccgttggacaaaagtgttacatgccaacgttcctactttaccgaccaaaccgagcccggcggaccagcggttcttactgaccctacgcagcacgtctacgggtctacgaaccaaccctttgccacaactactactgtccgtacacgcgaaggatgccaaacttgtgccgccaattcgtgacacctggacaggagcttccccccacctcttttaaaacgccgtatccatactttgtgccgcccttgccctagagggcgcaccacaaaattctttttggaccctggtttgcgaccgaggttccctgcgtacgtcacaaagaaagggcttgcattttct

SEQ ID NO: 180129 - DNA, 1201 bp, Zea mays
  Clone ID: MRT4577_95858C.1
gctgctctgagcctgacagtaagaggtattcgctgtggagtcctgcgggcacgatgatctgctaacttttactgagtctggttctgctgacattgagtctgaggtttatggagaggatagcgaacaaaaagagagcaacactgttgttgtggagatcgtggtgcagggcgtaggtagggcagatgtgctgatggcaaatgggcatcttggtgccgacacccaagcttgttcttctgaagctactactgagcctgagaatcatgctaatggcagcaaactgactgatgttgcagaatcagtggagggggatgccggcagtggagaacaggatacaatggattcgtcgcaaaccaatgggcatatttatgttgccttgagtgctgattcttgtatagttccttctgagtccaaggcccattcctttgagacagatgggcaacgaactgatcagctacaagaggaagctccaaaacttgaagctgaagtattggagggagtgctaaaaccaactgaaaggaactgtgcaggtagtgttgagaaactcataggagaggaagttggcacagatgggcatgcaagcataggaggtacagctgatgcttatggggagcaagaagccaagcctatgcaggtagaaggtgaagtcacttgcggtattctcgaatttgaaaaagtggataaggatggtgaagagggtttgtgtgatgactacacggttggtgttgtttcttctaatgaggaaacagagcttcctatgaaggaaaaagtagatgaagctgtccccagtgttaatgttggtgggccagagaaagtacctgacaatacaagccaagataccaagacagttgattttattgatgaaatcacagcagagtcaaactttaaagctgaaaatatggttgaagtgaaaagtgcagctcgtgaagttgacaaaacagaggtaaaagatcttgcttttgctgatgaggctaatgtagctcctttacaccttcaacgtgactgtgaatctgttatggaaactatagagcatgagaaggtagaattaccaggtggttgtcaagctcatgaaattgtgtattcttcagaactagaaccgaagaaagagtttgagatgggggttgatggtgctgttccattgcaggagctgcagcttctgttgcctctgttttccaccatgagccaatgtccattgatttgtctg

SEQ ID NO: 180130 - DNA, 535 bp, Zea mays
  Clone ID: MRT4577_95859C.1
aatcggagcacgagtagtcgatacaccacctattggttgctgccatagctcagggccacgaagaacactggagcaggctgaatgcgcccaaacgttggtgcgcgaaagctgggcagctgtcttggtcacagtgaatcttatgcacctatcaataacatggagggtgtttctctgatgctcatattaaggaaaaagttcaagtatgctgtaaaataccgcgaggtgattgttattctgatccaattccgtgttactcttggtatgggaaacgatatgtactgtcaagatctaccctgttactgtatatatgccatttccatccataagattggggcaactacaagctgctttgtgacaccatgtacaggatccaactttacccactcatgcatgaggatgccaagttcaagctttgcgaggtgaagatcgatcagactggccagaagggcataacctacctaaacacctaacactggcgtaccatacgttaccccgacccgatcatataggcctttgacaccatggagatctatct

SEQ ID NO: 180131 - DNA, 174 bp, Zea mays
  Clone ID: MRT4577_9585C.1
gaccgttgccaagggacattgcaagaccttctaagagaacaagcaggactcacgagagggtagtgaggggactgatcgacgacaatgatagtcttcaaatgacccatgtcaatcgcagggactcatctcctatatcaaggactgaattcttcatatgctgtctagtatccaagt

SEQ ID NO: 180132 - DNA, 494 bp, Zea mays
  Clone ID: MRT4577_95860C.1
gcgaatcttgcgcgctattcagaaacacgacgcaagcgtaacgcgctagcgtcaacctaacgtcaatggctgccaagatattatgcctccttgcgcttcttgcgctctttgcgagcgcatcagatgcgtccattattccacaatgctcacttgctcctagtggcattgtgccgcagctgctcccaccaggtacttcattggccttacgacacccagctgtgcaagcctctaggctccaactagcagagtgcagcgacgcgtcttacaacacaccaattgcccaattgctacatcagtccttggcgcatctaacaattcaatccatcgcctcgcagcagccacagcagttcctaccagcgctgagccacctagccatggtgaaccctggcgcctacttgcaacagcggcgtgcttgcatgcaacccacttgactctagcaaacgtagcttgccgaccagcaccaacaacaactgctacaggtgctgccagagctt

SEQ ID NO: 180133 - DNA, 1180 bp, Zea mays
  unsure (1)..(1180): unsure at all n locations
  Clone ID: MRT4577_95861C.1
acccacgcgtttcgaaatttagaatgggtttagttacttaaattcaaaaaagtgaatcaaagaatttcggtatctagttattagtaaaaaaaaatatttattaaaatacaaaaaaagattgaataattttactttctaatcatttttgtatttctttttgttaaaataaaagagctctcttgtttcgtaattgattgattgaattccaaagaaaacctatatttataggaaattctcgaatattgcttatttcatataaaaggaaatcctaatgactagaattctctaagttttagaatgtcttgtttaagagactaagtatttttttttattggaattcaattatggaatagccttctgaacttaattaactattttttttgattttttttttttttttgtctccccctcttatatgagggcttatcccccacaacatatatttatcgggggagtatatttgatatagaaattgatttaaatagaaaatcttaaaaaactcttgtcttatccacattagacaaaatgaactaaagaagaatttagaatttaagtatctttcagtatctttcagtatctaagtataaatactaagaaaaaacagaaagaaggattgatttgtggcaatagatgtctttcacatacaactagaaaaaagtaattccctttttgaatggcagttccaaaaaaacgtacttcgatgtcaaaaaagcgtattcgtaaaaatctttggaaaaaaaagacttatttttccatagtacaatcttattctttagcaaaatcaagatcattttctaggggcaacgagcatccaaaaccaaaaggtttttctgggcaacaagcaaacaaaaaaaaaaaaaaaaaaaaaactgatctgcacaatccagtaccgtgttgtcaaggaaaatgcagatgatgctttctatgagttgcagaatccccagcagcaaatccaggcctacgtctttgatgttgttcgggccatagtgccgagaatgaatctggacgatctctttgagcagaagaacgatgtggccaaagctgtattggaggagcttgaaaaggtgatggcagattatggttacagcattgagcacattctcatggttgatatcatccctgacgctgctgttcgtagggcantgaacgacataaatgcagcccaaaggcttcaactggc

SEQ ID NO: 180134 - DNA, 243 bp, Zea mays
  Clone ID: MRT4577_95862C.1
tcgtgttgtaatgaagggtgggcggagtgcccagcggacggatagctacggcccaacagcctcctccagtcccagattccgtaatgagagacgcaggcaggtggtggactgcatgatgaggaacggagcccaggttcgttgcttcctgcatcagaacgacacaatacagggactaggtgtccctaggaccacccttctttgcagcctcagctgcagccttctctgcctctatcgacagcaacg

SEQ ID NO: 180135 - DNA, 290 bp, Zea mays
  Clone ID: MRT4577_95863C.1
acacattatagaattgttggattaaatgctgttcattaataatcatttttttttttttttattatttcatcattttttcaaaaaccccaaactttacctttggattcctttacactcacgcacacgcggacgcaaacactttgcaaaaacttacaaaacatgaataacgcgagccaatgaaaaaaaaaaagtctgaaaaacggaccactaaaaactatccggcaatttcgttttgaaaagcaaggacaacggttcctagttttcttctgcacaaaaacagccggtagcca

SEQ ID NO: 180136 - DNA, 318 bp, Zea mays
  Clone ID: MRT4577_95864C.1
ccataaataaccaccgagggccaaaaccgcaaccacgagggatcataaacgacgagggcgcgcacgcaaggcaaactccagcaacaaacacacaaaacaaaaagctatacacaggcgcgagagccagatagcccaaaccagtaccatcccggcaatctacaaacaccacgtcgactgccacaacaacagccccgaacagcgcgaaagcaccaaccaccggaggcggcagcgggggcacaacaggcgacccaacaacgtcatcagcaccaccacccaacgaagtgacacgaccatcccccagcccaacagcaccaaacc

SEQ ID NO: 180137 - DNA, 812 bp, Zea mays
  unsure (1)..(812): unsure at all n locations
  Clone ID: MRT4577_95865C.1
cattgggtacctcgaggccggccggagcgattgcatatcccttttctcagtttcaccacaatcgtaaacatgggcttcaccgacttcgtttccgacgcaggtcttaccctcctcaacaactgggtcaagacccgcagctacatcgttggctacaccccgtcgcaggccgacgtcaaggtcttccaacagatcaagcaaatccctgctcccgagaagttcccctacgcctggaggtggtacaaccacatcctcaccttcgagggcgagttcgagactctccctggtgacccaaccaaggaggctactgcctacggccccgagtccagcgaactcaccctcaaccctgccaaggcacccgagaaggaggctgaggctgaggacgatgatgacgtcgacctgttcggctccgatgacgaggtcgatgaggaggctgagcgcatcaaggctgagcgtcttgccgagtacaacaagaagaaggctggcaaggtaaagcctgctgctaagtctattgtcacccttgacgtcaagccctgggacgatgagacaaacatggacgagctcaaggctaacgttctctctattgagaaggacggtcntcgtatggggtgcctccaagctggtcgctgttggtttcggtatcaagaagctccagatcaacttgggtcgttgaggacgacaaggtctccctcgacgagctgcagcagcagatcgaggagttcgaggaccacgttcagtccactgacattgttggcatgcagaaagtgtagacgaaattctaagcgtatgatgnttacgatggaaagggtgggcat

SEQ ID NO: 180138 - DNA, 560 bp, Zea mays
  Clone ID: MRT4577_95866C.1
ttttgttggacgcaaatgacatcaacatgctaacatatgagcagttagactacattaatgatatgttttgttagaaacttgtcgcatggttacaacatacatacatgtgtgttcacctcgtcttaaaacaaaccaaaaaaaggaaaacattgtctgcaaaattccagttcatttatcctgctagtattcatatactaccaagagagggtagcatcaatgctaaatggaagttgatatacataatggtttaagaattttgaaacaggatcatcaaattgagcaatgtatatcacaggcatcccccacttttctagctagcgccaaggcaccaattagcaagcaaacatttttcagtttggacgcaaaggacattaagctgactttatggagtggttagccaacatcaatgaaatagcatggttaaagcatacaagcttgttcatttcacctaaaaactaaaataagaaaaaaaaacattggccgaagtgggttagtttggttttaagggctcccaaatttttccaaagcacaattgtatatagaagcatggaaaacggatg

SEQ ID NO: 180139 - DNA, 510 bp, Zea mays
  unsure (1)..(510): unsure at all n locations
  Clone ID: MRT4577_95867C.1
ctgagctgaggcacaccgagccattactcttctccgcacatgnatgcggcgcgccgcgatggcacagagtcctgcgcgccagctaagcaggccctggcggactgagagcgccgagttcacactacgccttcatgactttgatgaccacgcccacaatgctgatatggacgttaaggatacggattttacgaagctcccgttggatgtggaccacgcaaagtagtgcgatatgggggtgctctactggccggatgttcctccagaccttgtgtcctttgtacacgtaacctaactactgtttcatctccatcggccttactgtgtttaatccataatctattcattaatactgtattacttctactactttatgctgcgttgtaagtaggtattacagacagacctatcatgcccgttttgatggacatagtgcaaccataatggactcataaaatcatgatttgccttcttggttcaactgctaactacggcaaagtcaggcttgtcttt

SEQ ID NO: 180140 - DNA, 291 bp, Zea mays
  Clone ID: MRT4577_95868C.1
ggaacacacgaacgagagctcaacatacggcacaaggtccatatctggaggacattatccctctaagctttgcagaagaacaattgacatgacctacaatgctgagatacccaataaaccgaatgtgatgccactaaccatgttcagagaacaaaaactaagacatgagctaacggaagatcattttgttggttggttggacagcatggaatggagttggagaaagacagctggacaaaatccagaatatgatcaatacccatgtacataccagttattttacagagggaa

SEQ ID NO: 180141 - DNA, 671 bp, Zea mays
  Clone ID: MRT4577_95869C.1
accccgaggttgccggccttttgaacctgtattaatattacttttaattgacatctgatgagcattgacaaaagcatatggtttcttggttttctgcatatagtacccattctttgatgttagtgaccacttcatattctgtgctagtatcttttcactaacttacaacaatcatcacaggctattgtcgttagtagattttgtatgaccatcctgtttcattggaagtatgctttgtcaattcatagcgttaggaaatgtgcactatgatctgttcctcgattgtttgccgaatattatgtcgcacttattaattcttatgcaggggaatgccacatacacaaggcttaagaggatttgttgcggatggcattgcattaaaggtcattggtgcacagaaagtttctgtaacccaccctcacagtataggtcttctatcaaatggaagtttgttggctagtaacaacgacctaagccaaatatggcctttgagctactcaacctgtgccccattacttcaagtgggtattgtaggatcagtcgtaattgttgtgcatcaaacaagtgtatctggaggccatgtgaagactttcttaaggtcacatgacactatagagttattgtcagacaagtgtaaattgcacatagcaaatcggttgatctcagaattt

SEQ ID NO: 180142 - DNA, 1818 bp, Zea mays
  Clone ID: MRT4577_9586C.1
gtagttgcccggccgggtcctcgttcttcgtctcccccactccccacgctacctgagaggctgagactaggaaggggaaggaaaataatagtttggcgcgcaaatatccgcctccattcgtacgccgctattctcgtgtgcgcgatgatgatcccgtggggcggcgtggggtgctgtctcagcgccgctgcgctgtatctcctcgggaggagcagcggaagtgatgcggaggtgctgaggtcggtggcaagggctggcagcatgaaggatttagctgctatcttggacactgcaagtaaggtcctaccacttgtagttgccatctctgggagagttggttcagacacaccacttatatgccaacaaagcggcatgagaggtgtaattgttgaagaaacggcagagcaacacttcctgaagcacaatgatgccggatcctggattcaagattcggcagtgatgctttctgttagcaaagaggttccatggtatctggatgatggaactggacgtgtttatgtggtcggtgctcgttctgcagctggtttgattttaactgttgccagtgaggtttttgaggaatcagggaggacacttgtacgtggaactctagattatttacaagggttgaagatgctgggagtaagcgaactgaagggttcttccaactggaacctcattgacagttttggtgacgcgtgggttctattatccattggccattaaagatgatgttggaactattcgaattcagcgaccgcacaaaggacccttttatgcatcatcaaagagcattgatcaacttattgtgaatcttgggaaatgggccaagttataccgaattgcttccatgggttttgcaacatttggtgtcttccttcttgcaaagcgtgcactacagcattttctagaaagaagacggcggcatgaactgcaaaaaagggttcttaatgcagcagcacaaaggcaagctagagaagctgaagggagcaaaggtacatcagacgcagagcctaacagtaaaaaagatcaattagtgttggacatatgtgtcatatgccttgagcaagagtacaatgctgtttttgtgccgtgtggtcacatgtgttgctgtatggcatgctcttcacatttgacgaactgcccactttgccggagaagaattgaccaagctgtcagaaccttccgccattgatggtgatatatgatgcaaaaaactggcatggtaccaccacatgtactgcttctgaaaccaatttgttcttggaacttggaagtgctggctgctatcaaccaacgacatgaactgcaatactgggacgaagcagcttcaatgagtttgctttttgaacagaacagtgagtgatgcaagttgcaagctcataattggcagttgagatactctcactccctagatagtgccaatgggtgctcttgcctgtaatgtactacaactctgtacaggacgctcttgtgtaagtgcacatagattagcagcttgcttattgacaacatcgatgccggtaatatgtactgttgcccatcgggcatttgtgcaaaggaataacaaaatcagctcgtttagttgtgataatcaatttttctggtgggtgagaatgagacgcgtctcttagggttttttttttcgtgtccagtttatttgtcaggatcataggaaatagatgatttgaaatatgttgtatgttttaagactgtccgtagcataattctgttatttgggattcaaataatccctccgttctagtatataaagtgtaaccatatctggtttaaagaccaaaaaaaaaaaaaaaaaaa

SEQ ID NO: 180143 - DNA, 388 bp, Zea mays
  Clone ID: MRT4577_95870C.1
cttttcctagggtttcgacgcttccagccgccgccgcgtccgcctcgctcaagggcagcagacgacgcaggacatcgctctcttgatctcagccattggcggagggggagcagaaacaggacacgccgaagctctataaccgctggaccttcaatgatgtccaggtgaacgacatcacagtgaacgacaccctcgatgtgaacgcgacgaagcacgccatgcacctgacgcacaccgcgacgcgctactccaagaagcggctccgtaaggcgcacagcccgatcgttgagcgccttacaaactgcataatgatgcacgggcaccacagcggcaaggcggccatggctgagcgtattatcaagacatgcgctggatatcattgacgagc

SEQ ID NO: 180144 - DNA, 410 bp, Zea mays
  Clone ID: MRT4577_95871C.1
gtgtaaattattttctatttcgtggcaatctagggcataagtcactagtgctttatgtgcccgttacatctcataatatgcttttgagagaaataagcggcctaatgggacatacgactaaaacctaagatacaccgtgccaggggcggacccaacggggggatcggcaggggaacatggcctgtgtaaagggcttaacagagaccagagtatatatatatatacatatacatgacacgggagatcttgttcgaccagatgacctcgagaatgaatcgatgggacggaggccaaataatcttttcccagagggctaggagcatgcgggggagtaccatatgctgccatattggctaaacccacctcgggtgcaatcccgtgcctgactctgatggagcgatgcatccgga

SEQ ID NO: 180145 - DNA, 385 bp, Zea mays
  Clone ID: MRT4577_95872C.1
gggtaccctcggctgccgggaaaatgcgctagctctggttctctctcctggtcccgaggtgaggaaaccctagcgacggaccatggcgtagatcccgggcaccgcgcgggtgagcttcctttccacctccgggggcgtagtccgctggcgctgctgcaagcgctatccacgaggtgccgagcgccgtagcgttggcagctgcctcaccgcagagccaaacagtaagggggtgctgtgagacctgaaccaagaccaacatggagatggtgttcggcgagatcacgaccaaggcgaccgtggactattagatgatcgtgcgcgacaactgccgcgagatcgtgttcaccttcgacgatgtgggcactctacgccgacctgctgtaag

SEQ ID NO: 180146 - DNA, 1405 bp, Zea mays
  Clone ID: MRT4577_95873C.1
gcacgaggcagcaaacagagattagagaggcagcaaagaaagataacagaagagacagacggaaagaacaccggaggcggagagccacaggaggaggagctcgagggacgacgaccagctgaattaggactggagggggcagacgacgtcgtcgtagcggcagcagcaggagaagggaagactcaaacgagggatctccgagagaggagtgtggtaggcaggaagaaagaataaggcgagccgagagccgagagccgagagccgagagcatggaggcggcgatggatctgatgcggcggatgccgccacggagcgcggagacggcgctcaacgcgctgctctccctcctccccgaccactccctcgacctcctctcccaggtcgacctcccgctccaggtttgcatggataaggagagcctgaaggaatacattctatgcgaatataaccgtgatgctgactcctaccgatctccttggtcaaacaaatatgacccccctttggaagatgggacagttccttctcaagggatgaggaatcttgaggttgaggcaaacgaagttttctcagtgtatcgtgaccagtactatgaaggtggcatctcatctgtttacatttgggaggatgaagataatgggtttatcgcatgcttcttaattaagaaagatggacaaggaaaaagagggtacatgcagattggttcatgggatgctattcatgttgttcaggttggtcctgaagaagaaggagcggcacattactgcttgaacagcactgtgatgctctcattgacaacagacaacaagcagtctggaaccttcaacctgtctggatccattagacggcagatgagtatgactcttgctgtagctgatggacaccttgttaatatggggaaaatgatagaagaaatggaggggaagctgagaaattcactggaccaagtttattttgggaagaccagagaaatggtttgcactcttcggccaccaccagaagttcttaatatgagactacctgacagctgagccagtgcatagaagtgtcaacttaacaaagaaaaacgtattcttctccactctaggcgtggtctgttcttgcttcgtagttaatagtctgtgcatctgtatcgacatctgttgaggtatctatgataggagcttattatcttctgatcttttgtgattagctgtaatccgcgaagtgtttgacaggagccagtgtttgcagtggaactcagttaccaacagatgaatctccacaaaacgttgtgttggcgttctgtatcttctgaagaatctgatggtgttgtggctggacttgctatctgtcaaagtactaatgcggtgtttgttttgaggagtcgcctcatatcggataagattgtgcatcctgagtccatttt

SEQ ID NO: 180147 - DNA, 333 bp, Zea mays
  Clone ID: MRT4577_95874C.1
cgcgaagaattgcttggaccacaccacgccgcccattcttgcgggcgcgcaccgacgtcctaccgggatggactaagcagggcaccagcagggaaagataaaagggaggaggaggcgcagtgcgtggtgggaatataggcgaggagatacaggcaggcaactagatatctcaagataggcagacgagagatagacagctcgatctatataaccatgggggagagggtcccgaggaccaaaccgggcaattaagcactgtgacgagggctgcttatccctgaacggaggcatgtcagaggccaaaatcggccactaccaaaaatactggcagca

SEQ ID NO: 180148 - DNA, 331 bp, Zea mays
  Clone ID: MRT4577_95875C.1
ttacttctcggttattttatacgtttttgggttattcatcattttaattctttttcacagggaaactttaagccaatttattatattgatgaaaccccaccaccaattttgatttttcacaccaagtcactttttacccaccccccacatgttgcccaacattaacaattttttttcctctttccgtaataactccatttgaataagaaaatactcactatatgttcacctcctcaattccaacaaaaacccccccaaatttcctttacaaaacaaaaaccactatcccccgctccttcttttataccccacatatacccaattagatctt

SEQ ID NO: 180149 - DNA, 231 bp, Zea mays
  unsure (1)..(231): unsure at all n locations
  Clone ID: MRT4577_95876C.1
cgggcacacgggacatgtgtatngtgagctgtcgccggcggcggaggacgtgagagctggccgtacctgttgggggcctcgaacgccagggccgcggggcgtggccgcgccgtgacgcgggttatcctgcatagctctggccgagttcgncggcaccttcaactaatcaccaacacacnatggggggggggggcnctacnnaacctataaacaacctaaaacctaccacaa

SEQ ID NO: 180150 - DNA, 258 bp, Zea mays
  Clone ID: MRT4577_95877C.1
agcttgtacaaatatatatcatgcgggcaacacccttaggcgagggcgtgatccataactctcctagctagcttaacttaagtaacatatctacacgtattcacttatcataatacatacaactcgcaatacgacctttttatatcatcaaaaccaacctaaccatcaatagtttcctttccttcctatccaaccaaaacaccaaccaattttgcaccttttcaatatacatcatattcattttcaaattattccttc

SEQ ID NO: 180151 - DNA, 391 bp, Zea mays
  unsure (1)..(391): unsure at all n locations
  Clone ID: MRT4577_95878C.1
acccaaaccgcaccccaacaagcaaaagaagctaggggagtaccaaagtcacgcccacattgcgcactaacggctaagaaggccttaccggaataaccaccacccaccctaagtcaccctggtctccctccaactcctaaaaagaaacgaaccttgcaacggcaatatgaaaaaagaaaaaaaaaggaagcgcggaaaaaacgataagaagacaccggaatactaacccgaaagagacgacagaagtgggagcctaccccggctacggcaccaagaaacggaactttaaaacggttttccatactctggtaaagtgcaaaggcatctacaccacaaactccgtcagaatagtctgccccccactagaagtcngcgacccagcccccgacgt

SEQ ID NO: 180152 - DNA, 460 bp, Zea mays
  unsure (1)..(460): unsure at all n locations
  Clone ID: MRT4577_95879C.1
gataacattataattaacataatataaataagtatcattaagtatatcataaataatcattgtcaaataactcatatataagtgtactctaaatccaaactaaaattactagttaaaaactaggtcatcaactatttaagctttaagctaacgttgagcctaactaagtatatatgaattccacttgagcggccaccaaattttgagttccattccgtctttttcttctctggaactttgctgaaaacacggtgtgctcacaattggtgagacaatcattttttgccacatttgagcaaaacttgcatttgggtcaagcagatttgatggaccaagaatagtatctagagaagcattcaatactctcccatcctattgaaaataaccaggaaattagtcatcttattcagacaaaaaganacatgtattcccaaataatatggggtaacctaatgatgat

SEQ ID NO: 180153 - DNA, 237 bp, Zea mays
  Clone ID: MRT4577_9587C.1
ggcacaatacttcttctcttttcatttgaattgttcattcacatcatagctcacactgacactgacaccacatggcgatgcctgacacattattactcactcatcgtccgctaaatgactcaactagcatagctagccagcggtctatactacaacacatacctttcttcaatgggcggacaccagctcggcagcagtcgtaggggcatggaatcacgctgctgcagtccgcacctc

SEQ ID NO: 180154 - DNA, 263 bp, Zea mays
  Clone ID: MRT4577_95880C.1
agaaaatactcctaataatgacactggaaaagctaccaatttggttatccatcttggtgcacggggtaaaactaggagggggtctcctaagtcagaactctccaattctcaaagagagcaagattttgtttcaatacatggagggaaaatagatgtcacatgccagctgaaaagtttaagaaacgaggtatatgagagaagtgtattgaagttagttagagatactggggttcaacaatataaatttcctttttgactatctt

SEQ ID NO: 180155 - DNA, 1178 bp, Zea mays
  Clone ID: MRT4577_95882C.1
gatataaggtcatgatgggcgcctcgagtctctacggcacgcttcagagcagcatcggctgctgcttttcaccgccgctgcagtgtcacggtgcgccgtgcacgcactcccaatggcacccggcggcggcggcggcatcagagccccttcgccagacctcccagtcccagcccggcaaaagttcgcaaactcgacgagaagaccacgggcttattccgctgccagtgcgctaccgagactcccacggcctcagtcgatcagacgcggagccgtggtggtagtggtagcatgcgcccgcggaagcgagcagcaatcctctccggccgtcgcggcaaaggtgcggcccgagcccggcacgctcagcgtcgagttccggacgcgggacggctgccggctcggcatcgccaggtacccggacttcgcgtacaacgcgcagggcggccgcggcgtgggcgccgggcgcgggtcgaagagcggggaggatgatggcattggcacggtactcgtcgacttcgacgtggcgaccctgtacatcccgcccatgtccggcgcgacgaccaggttcctcggcctgccgctaccgccgtacctttagatcgatatcttgcccgaggcactgggcggaaccatcgatcgagccactggtcaggttgatctcaagtttagatcgaggttctgcttctcggttgggagcgtctacaaagcgccgccactgttcgtcgagacaacactgacctccgaggagtcgaggggagccataagatccggcaccggagaaagaatggacgaagaaggcagatgcaggctggttggggtggccgtcgtcgacccaattgatgacctcttcatgaacacatttctcagcctgcccaccgagtgcattgcttacttgagcgccaccatttccatagccgctgcgagatgaacgtctttattgctggcttacattgaaaatataatgcgcgcgccgatttctttttcttgtaaagattagccaaggctcggccatatcgcttcagttcatattggaaacctgaagtacactactatcgatcatcgcttggccattgatgttgttggggtgtaccatgtctcataagctaaggagccctcgtgtgtaaaagaggccaaaataatatgttcagggacatatgtataaacatctagtggtttaattc

SEQ ID NO: 180156 - DNA, 633 bp, Zea mays
  Clone ID: MRT4577_95883C.1
actgccaccaccacatcctttctctctctctctctctcggtcaaacaacgctagctcatcaatcagatatagtgcattgatggcgctccagctcccgccgtggtttactccgcaggtggtagtgcaggaggtggagctgctcgacggcatccaccccggcgggtcgacctgggcacggatcagggactccttgttgcaaacacaccagccgcagcagccgcagccgctgccaggcttcgtggctgtgctgcggacgatgctctctttgctgcgccagagaggccaccttgccgggggagccagtggcccgcagcactacacgcggcagcaggctccagccctcctccagcccaatcccattcacatccccgactttctctggggctattatctcggctacgagctgggcaacaatagaggctttcatcgtggcgtcgacctgggcgaggtgatagccgacgtactccatggctgatgcatggctgatgacgactctggccctgatgaggaaatggatgaggatgcatgatgctatgcatatatagcttcgaaggccacgctctccacgccggagccagattagttgctcttttatttgaggggtttgttgtgctgtgcccccagcaagacctt

SEQ ID NO: 180157 - DNA, 278 bp, Zea mays
  Clone ID: MRT4577_95884C.1
atctcaccccctaccctaccatcagctccatcaatcagaggctgctggtcttggaggccttccaggtgtctcacccctgccggcagccagctacacccactgagctgagggcctagctcccaaatcctgccccgttggcacagggccacaggagcagaagctgggtgggctcaagaggcctggaaacgagcgtcttaattgaggagatgggagactcgaactctagccctggatctgccttcctgctgaaacttgttccacctcagtctcctcatctg

SEQ ID NO: 180158 - DNA, 149 bp, Zea mays
  Clone ID: MRT4577_95885C.1
cacgcatccgaaacactgcaacagcgctgtgcaggcgtttcagctcgtgccttctctccaggctcaatgcaaacatcatgtggatgatagtgcacgtcgctactcccattcccatttaggacgcggaggccatatcgacagatgaggtc

SEQ ID NO: 180159 - DNA, 406 bp, Zea mays
  Clone ID: MRT4577_95886C.1
gaagggcaagccgtgcccccgtccgctaccgtagcataattatttagcgggttgattggctaacacagaggaggtcggcccataccaccagaaattggaaggaaaaaccaactgcaaaccttgtcattgctagagaacagtttgtctggcccactccctgctgaactgaacaatagcaccaaagatgtaacaactgtatccacacggaaattacttaccaaactacatcccttgcagaatattgcacaactggtggaactcgagtcattggacttatccagtaatacatctagtggatctactgcagattgtccggataagaggctcaaactaacatcattagtagtgtgcatcatttgggttgattcatatattagctattaaaccaccctgggtatgataaaac

SEQ ID NO: 180160 - DNA, 590 bp, Zea mays
  Clone ID: MRT4577_95887C.1
ccggccgggaagctctacatgtctcccacggcggtcccgctgcgtctcagcgcatagccgtcgccacagagatagggatctatctataccttagctttaatgatgatcacacgtacattggtaaccggaggtggtggcctgagctgccatgatgaggacgtcacgatagtacattttaccggagggggatgctacaagcactgttactgatgttcactgtggacttaagccaggtcttcatggctcgcatgagcacaaggttgcagacgccactgaagagtgagtgcatggtgctcatcactaaactgctgatggcaaagaacgatgctcatggtggggatgaagaccgacacgccgaagaacatgtgagtgacatgatcatagaagatgagatgattgaaggcattgttagtgactacaacatacctatcgttggacaggattagatcattgcctgaaatgatcggtcactatgctgatgagttttacatctgctacagggcgcataagctctagcaagaccactatagatgctacccaatgcttgggctgtattcctatggaatgagatggctctaggatctttacta

SEQ ID NO: 180161 - DNA, 289 bp, Zea mays
  unsure (1)..(289): unsure at all n locations
  Clone ID: MRT4577_95888C.1
gtaattggcgtggangatgccgatacgtagctcgaattcgctcgagtgctatagacataagacaagacatactggaaagatatggcgaatgtgaacatgagaagttacagttgagaaaaggctccgcaagtgtagatgagcataaggcgcgcaaagaaggatataatgagctaaaccagtggttgacaactacgcagagcaaaatattgccatgtgataaatatgtgaaagtctttcataaacttttaactgcatatagacatatgacatgacatactggaaagaaacc

SEQ ID NO: 180162 - DNA, 212 bp, Zea mays
  Clone ID: MRT4577_95889C.1
cggacgcgtgggcggacgcgtgggtgctaggcgtgctctccaggggccctggctgccgccctgcctctctcacttggccacctcttctgttcactttaagttgccaggagacagtaagacatgcagttactattaaatagacttaatgactttttggtttgttttgcactaaagttcctgtgatttaacaataaataaaatctgttaaccag

SEQ ID NO: 180163 - DNA, 1723 bp, Zea mays
  unsure (1)..(1723): unsure at all n locations
  Clone ID: MRT4577_9588C.1
cattgggtacctcgaggccggccgggaacctaaaaaactgccggtctttgctttgcccttcctccgcccccttcctccccccgcgctgcctgccgtaggtacgggaagggaaaaaagtcggcgccaaatctccgcatccattcgcacgccgcgattcttgtgcgcgatccgccgcgcgatgatgatcccgtggggcggcgtggggtgttgcctcagcgctgcggcgctgtatctcctcgggaggagcagcggaagggatgcggaggtgctgcggtcggtggcgagggctggcagcatgaaggatttagctgctatcttggacactgcaagtaaagtcctaccacttgtagttgccgtctctgggagagttggttcagacacaccacttatatgccaacaaagcggcatgagaggtgtgatcgttgaggaaacggcagaacaacacttcttgaagcacaacgatgctggatcctggattcaagattctgcagttatgctttctgttagcaaagaggttccatggtatctggatgatggaactggacgtgtatatatggttggtgctcgttctgcagctggtttaattttaactgttgccagtgaggtttttgaggagtcagggaggacacttgtacgtggaactctagattatttacaagggttgaagatgctgggagtaaaacgaactgaaagggttcttccaactggaatctcattgacagttgttggtgaggctattaaagatgatgttggaactattagaattcagcgaccgcataaaggacccttctatgtatcaccaaaaagcatcgatcaacttattatgaatcttggaaaatgggccaagttataccgccttgcttcaatgggctttgcaacatttggtgccttccttcttgcaaagcgtgcaatacaacattttctagaaagaaagcgccggcatgaactgcaaaaaagggttcttaatgcagcagcacaaaggcaagctagagaagctgaagggagcattggttcatcggacacagagcctaacagtaaaaaagaccaattagtgttggacatatgtgtcatatgccttgagcaagagtacaatgctgtttttgtgccgtgcggtcacatgtgttgctgtatggcatgctcttcacatttgacaaactgcccgctttgccggagaagaattgaccaagctgtcagaacattccgccattgacggtgataccacgtgcactgcttttgaaaccagttggctattggaagtgctggctcctgtcaaccaacgatatgaactgcaaaactgggtcgtagcagcttcttcatggagtttgcttttcgaacagaacagcgagtgatgcaagttgcaagctcatgattggcagttaagaaagataccctactgagatagtgccaatgggtgctcttgcatgtaatgtactactactacaactgtgtacaggacacttgtgtaaatgcacataggttagcagcttgcttcttgactaacacctaatgggcatttatgttgtgctaaccgaatgacaaaattagctcgtttagttgtgataatcgttttttctagtgagtggggaatgatacggatatctccgttcttttgtgctcacaggatcataagaaacagaaaagatttgtaacatgttctatattttactgctcattttgtaacctgaatgtgaggacaacatgttggcgccttnaaaaaaaaaaa

SEQ ID NO: 180164 - DNA, 932 bp, Zea mays
  Clone ID: MRT4577_95890C.1
gcctgcgggaccggtcccgaattataatcccgggtccagccagcttctagtcggggggcgcccttttttttttttttttttttttttttttttctttttttttttttaactaaaaacaaactcgcactcccaatacagagcttgagctctctgtattgcatataattagaccacataattccaaactctaattcagagacatccaaacaatagagtttgaattacatctaattttaataccatagctgatttagtattgaacccaattcaattcatacctttcaatatcgacatccaaatagagcattacagattttacgggattgacatcgtgagatcttattagcgccacatgggcaaatgaacatgcaggagtgaagagctaataacggccacttatttcttctctgggatcttcttcaataactcatccagaacctcgaacagatcagcaaccagtccgtaatctgcaacctgaaatatgggggcatcagcatctttattaacagccacaatgaccttcgagtctctcattcctgccaagtgttgtattgctccggatactccaaaagccatataaagatccggcgcaacaattttccccgtctgaccaacctgaaggtcatttggaacataacctgcatcaacagcagcccgagtcgcacccactgctgcgccaagtttctcagcaagctgctccaacaatttaaaattttcagcactttttaaacctctgcctccggtgactactacgggtgcatttgcaagatcaggccgctccgtgtcttgtgatgtcagattcacccatgtagatttccctgggtgataggtgcaacctttgtttcagacatagcctcagtagctggggaaaatgaagttgatctaatactcatcatgcaaggaccctctcccagtatatttcacagaacaaa

SEQ ID NO: 180165 - DNA, 210 bp, Zea mays
  Clone ID: MRT4577_95891C.1
ctttgtgctccgtctctctattcgttcaccgtctgacatcgagttagccgtctcgatactgattctgctccgctgtagaagacgtagttgctaggtgtgaatggactcataggagttctatttgacgtaatggatcgtgtctcatacgatgagtcggcctttacggatcgacaggccggatacacgtcctgggacattaagctatggtgg

SEQ ID NO: 180166 - DNA, 1633 bp, Zea mays
  Clone ID: MRT4577_95892C.1
cccggtcgacccagcgtccgccgggccggcgcttcacaaggccgccgaccatgccgcgtgcagccatccactggtgtctgaggtgctcgtggccgattcggaagccttggcgcatcctctggctgaaccctgggccgagctactccgccgcccggattcagagcgagaggaggcggagagggcggacatggcggcgatgttggtgggcgcgctgcggaggggaagtggatgccgcggcggcttgcgccttatcgctcattcgcttcgcagattcgtgagcacgctcgtcgtagcggagcacgaaggcgggttcgtcaagccgtcgtcgctgagcgcattggccgccgcggaggccattgccaaggacaacaaagtttctgtcctgctgggtggttccgggccggcgcttcacaaggccgccgaccatgccgcgtgcagccatccactggtgtctgaggtgctcgtggccgattcggaagccttggcgcatcctctggctgaaccctgggccgagctactccgttccgttcagcagaaaggaggctactctcatgtcatagcttcatccacatcattcgggaagaatttgcttccacgtgctgcggctctccttgatgtgtcccctgttactgatgtcaccgctgtaaaggagccacacgtctttgtgaggccaatttatgctggaaatgcactttgtactgtgaaatatactggagaggggccttgcatgatgagtattagatcaacttcattttccccagctactgaggctatgtctgaaacaaaggttgcacctatcacccaggttgatctctctttcctcagtgaagggaaatctacatgggtgaatctgacatcacaagacacggagcggcctgatcttgcaaatgcacccgtagtagtcaccggaggcagaggtttaaaaagtgctgaaaattttaaattgttggagcagcttgctgagaaacttggcgcagcagtgggtgcgactcgggctgctgttgatgcaggttatgttccaaatgaccttcaggttggtcagacggggaaaatcgttgcgccggatctttatatggcttttggagtatccggagcaatacaacacttggcgggaatgagagactcgaaggtcattgtggctgttaataaagatgctgatgcccccatatttcaggttgcagattacggactggttgctgatctgttcgaggttctggatgagttattgaagaagatcccagagaagaaataagtggccgttaatagttcttcactcctgcatgttcatttgcccatgtggcgctaataagatctcacgatgtcaatcccgtaaaatctgtaatgctctatttggatgtcgatattgaaaggtatgaattgaattgggttcaatactaaatcagctatggtattaaaattagatgtaattcaaactctattatttaaaaatctctaaagaagaaataagaagtaaatactagttctacactcctgcatgttcatttgcccatgtggcgctaataagatctcacgatgtcaatcccgaaaaatgtatatggctttacagaaaaaaaaaaaaaaaagggccacagaacaacggctctgggataagagtgagctgcaatctgaaatt

SEQ ID NO: 180167 - DNA, 360 bp, Zea mays
  Clone ID: MRT4577_95893C.1
cacactcgtacggagacaaagaacgtgggattgaggaacaacaaaccatgaacgatggcgacgaatatacttgttctgctgatgctcgttgctagcgctgcatgcagtgcatagcgcaacatttggctgtcaaagatcacaggttcatatagcgtctctgatttatacataccttccattatatatggcgtcgaacagtgaaacacaagcatgttaaaacctatagtgcaaccaacaagaaatagcagcgtagcaacataccttgatcacgccttgtttgaacaatcggcagccctatctttggccaggcattgggacaaaccatgcacgaacgaaacctgcagcaactccctatagctg

SEQ ID NO: 180168 - DNA, 1184 bp, Zea mays
  Clone ID: MRT4577_95894C.1
gggtaccctcggggttggggttcccgcacaggtcggagccacggaggggcgaggggtcttgctgctacaacagctgggcctgggaggacgaatctatcttggcaacaggtgagggaagccgtcctgtttgcgcatggaggcggtctcaatgtcgccgtcaaccgtctcctcccacacccacgacgaccacgacgccgcttccgtcaccgaggccatgtccttgcaggaaggcctcctcttctccgacaccctcaaggacctgaggaatctgcggtcacagctgtactcagcggcagaatattttgaagtattttaccggaacaactcgcacaaatctactgtgatgacgagtttgaaagattacacagttgaggcccttgttagcacagtggaccatctgggttttgtgtcatacaaggtggataaccttgtcagcgagaaagctgtcgaggttaaggagactgaattcctagtgtcttcagttgaacagagggtacgaatttgccagcagacaactgaccaggaggcaagatcccagcaagctcttcttatcaaggcgccaaagtatcataggcgttacatattaccaggcctggatctactggaatcttccatccacccggtttcagaacctccacggtatagtaggcagtatacaggccgcaagatgcacaagtcccagtcttccatttctactccagttcgtcggcaggctacgatgaggcgtgaaccatctcctacacctaacgatcggtcgcggtcgttatcgccttctcgtaaagcacgagctaaatctccatctcctcgaatcgtgaacacaaatactgcaagagaaacaagggcaggctccccgataccaagttccagcccgatggcacggtccgcctctacggttgcaagaagaccgccttcgaactcgaggcatttgagactagcttcgatgcagttgcacagcgactgggagcagcaggagagaagctcaagcaaaggcaggaggggtttcctcaggtcgctgctcacgaggcgccggtggaggaacgacgagtcgtccttgtacagttacttggatgagtactgattgctggaatgttggaactgaaaaaagtctggtgttaactgaatcttctatagatggatgcgatgctctctgctttgccaaaaaaaaaaaaaaagggcggccgccg

SEQ ID NO: 180169 - DNA, 251 bp, Zea mays
  Clone ID: MRT4577_95895C.1
ggagtcccaccatgaagaaggaatttttaaatggaattttcccaaaacccataaaaggggggccaaaggggcccaaattaagaggaccaaaaactttaaaaaaaaaaattaaaaaagggaacgtgtgggaaaaccaactttttttttttctccccaattcatggggagggcatagaggggttcctgaaaattttggcctcaccggtttacgaggtgacccgccaaatgatctatgataaaagggggggaaa

SEQ ID NO: 180170 - DNA, 570 bp, Zea mays
  Clone ID: MRT4577_95896C.1
ttttttttttttttttttttatttttttgggggtttttaagttttttatcgtttttctatttttttcaacacttttatcacccttattcttacaaatccctttgttctgccaacaaaaaaagttctcaaaacccaccccccggaggaacccccccgcctggggggaaaacaaaaacccccgagaattcaaaccccgaaccaaaaaaaaccgcgttaccccccccacccccccccaaaaaaaggctttttcccccccccccggacccctccttataaaaaaaaaattaatttgcccaaaaaacaaatttggtttattcacccacccccccggaccccgggccttaccaggccatacaaaacccccccccatttttcccccctttgtggggggtaaccttacacccccctaaccgccccccacagggcccccagaaccgaaaaaaatggttaaccccaccgcccccgccgggttgggggttcacccaccgggttaaaagagtttcattttaaagaggtgtgatataaaaaagaaaaaaaaaattcgctccccccccccccccccaactacct

SEQ ID NO: 180171 - DNA, 813 bp, Zea mays
  unsure (1)..(813): unsure at all n locations
  Clone ID: MRT4577_95897C.1
ccacccaaattccctctcccaaaacaaacggcataaaccacggcctcgacccgctccgtctccgctccccccacttccagtccacttcccctccgacccacccctcaagcgaaggcaccggatggcggcgtcctcccccacccccggcggcggcctcggggccatcctcgccgccggcgacagggactacctcatccgcaactccggcgagcaggtgaagatcagcagcattgagggagacactgtagctatctatttctcggcctcatggtgcccgccatgccagcggtttacgccaaagcttattgaagcatacaaagaacttacctcacatggcaagagctttgaggtgatctttgtttcaggcgaccaagatgaggaagcattcaatgcctattttgcaaagatgccgtggttggcagttcctttctccgactctgaaggccgtaaaagccttgatgagcggtttgaggtcaacggtattccacaccttgttttccttgatgcaaaaactggcgaagttcttactgatgaaggagttgagtttgtgagtgaatatggaatagaagcttatccttttacaactgagaggatcaatgaattgaaggaacaagaaaaggctgctaaggataaccaaactattcatagtgtgcttgctacaccaaatcgtaactatgtaatttcaaaacacggnnggagaaggtacccatcgttgatcttgaggggaagtatgttggtatatgctttgtagtgaacggctatcctccagttgaggaatttaccccagtgcttgccaagatatatgcgaaactc

SEQ ID NO: 180172 - DNA, 391 bp, Zea mays
  Clone ID: MRT4577_95898C.1
attcccgggccgacccacacgtcagcacatccatcggttaggagttaatggtgttagcttaggagctcagcaccacaggtcttaacaacttcgttcgtatctaagtcatatactcctattcgaagaggatataacatgaaaatggtgtgatcattaaatatgaatgacacatattcattagcttaagcaaactcctttttttaatgaatgacttgatataaattaaatatctttttttttgatatttttgcagtcgtttcatttacccctaatccatatcgactacatcctgtcggtgttaaaattctaagatcatgagttgtaaggagggacatatgtcacgacatgcagaaactaatccaaatgttggatttaaagctggtgtcaacga

SEQ ID NO: 180173 - DNA, 269 bp, Zea mays
  Clone ID: MRT4577_95899C.1
ggatatggaaggtatgatattattggcatgcgtcctactgtaaccatgttatagtccaaacccaaggaggtgcataaggcaaggcttgcttgttacttaggttggggcatagagaacagaaggatgaatggcaacctcgccttgtagaagtcttccagaagcacaatgttctgcctcctaatgccattgtctcagctggttctgtgagttctgcatgcactgctggtggtggacagttgtacatgtggggaaagatgaagaatacaggc

SEQ ID NO: 180174 - DNA, 914 bp, Zea mays
  Clone ID: MRT4577_9589C.1
tgcacaaaggacccttttatgcatcatcaaagagcattgatcaacttattgtgaatcttgggaaatgggccaagtaggaaattttgttagaacatatttttggttgttacttcttagttagggcatcttatgctagtagcatgtttgtggcaggttataccgaattgcttccatgggttttgcaacatttggtgtcttccttcttgcaaagcgtgcactacagcattttctagaaaaaagacggcggcatgaactgcaaaaaagggttcttaatgcagcagcacaaaggcaagctagagaagctgaagggagcaaaggtacatcagacgcagagcctaacagtaaaaaagatcaattagtgttggacatatgtgtcatatgccttgagcaagagtacaatgctgtttttgtgccgtgtggtcacatgtgttgctgtatggcatgctcttcacatttgacgaactgcccactttgccggagaagaattgaccaagctgtcagaaccttccgccattgatggtgatatatgatgcaaaaaactggcatggtaccaccacatgtactgcttctgaaaccaatttgttcttggaacttggaagtgctggctgctatcaaccaacgacatgaactgcaatactgggacgaagcagcttcaatgagtttgctttttgaacagaacagtgagtgatgcaagttgcaagctcataattggcagttgagatactctcactccctagatagtgccaatgggtgctcttgcctgtaatgtactacaactctgtacaggacgctcttgtgtaagtgcacatagattagcagcttgcttattgacaacatcgatgccggtaatatgtactgttgcccatcgggcatttgtgcaaaggaataacaaaatcagctcgtttagttgtgat

SEQ ID NO: 180175 - DNA, 438 bp, Zea mays
  Clone ID: MRT4577_958C.1
atgacaagggcaacttatataccttcccaagaatcaccgaatagataaggcccaaaaagaaacatgggggggtcagcccttttttttataccggtacaaaactttataaggctctaagggaagctatccaatctaccggaaaaagcaaaaaatggccagagcccatagggcatttaaaaagcggaacccctgctttggtgaatttccaacccttggtctgctcccatgaaacacaaatccctctccaaatttgggggggggctgttttcttttaacaaaagcccccttggcaaaaaaaggatgtcagggctgcattgtatgtcaggggggattcccacctgaacgatttcatgcagcgctggaaaaaaataccttgcaaccgggaaaaaaaaaacaaatccgggggccaactaaaacacaccttggaatttttccttt

SEQ ID NO: 180176 - DNA, 449 bp, Zea mays
  Clone ID: MRT4577_95900C.1
aaaaagggccttttttattttggggaagccacaaacattatccaaaaaacttttttttggaaggataacccaaaagcaatctaaaagggggcccccccaatggggggttggggggaaaaccctgtggggtttgcaaaaacaagtgggttgaagggcaacaattgttgcagttgaaaaagggggccaccgttaggcccaccgggcaggtaaaacggcaacaactgttgttgggtcaaaaaggcaacagggctcacaaaaactaactggctaaaagggggaagctgttgctgttgaaaaaaaacagcaaagttcaatgctcccaattggttaaaaggaaaaaattgctggggggaggcaacacctacctgactgaaggggagttgttgttgcaaaaaaccagcaaagttcaatgccccccgttggttgaatggaaaaaactgctgttgctg

SEQ ID NO: 180177 - DNA, 255 bp, Zea mays
  unsure (1)..(255): unsure at all n locations
  Clone ID: MRT4577_95901C.1
ttttnggggaggttggcgcncgagagaacgagacnaccaccaggagcgccccacaacggacagagaagcccacccatagagnagctagacacagccagcgcggccaacgggagcggaaaacaagcaacaccccgaccctaggaagaccgaacactttttttttcagggggttttatgcccgcatgacagatcggtttcaaatcctacctaccccacagttgctccagcacctgtgaaaagcgaataaattccccc

SEQ ID NO: 180178 - DNA, 353 bp, Zea mays
  Clone ID: MRT4577_95902C.1
gccacgcgtccggcaatgtttagcgcaaatttcttgctgcccacagatgctggtcgttgcgttgctataccatgtatatgcccgtttatagtcgcactggatgatggtgcacaaacagttcaggtggagctggtaccctgtcccgacatttgcaccttacaaagtctaaggcttgttctacacattgatccttgctatgtgtggtcacgctcagacgacagcaactgctttagtggctctgcagagtctgacaccggatgcacagagcgtattgagactgcttgatgagtattcagattcataatgcaaggacgagagcttgccagtcaacatgtttgtatacgaaatggtcg

SEQ ID NO: 180179 - DNA, 1761 bp, Zea mays
  Clone ID: MRT4577_95903C.1
tggacgggcaggtagccaggagctgagggcaccagcgagggggacttgcgccagatcaggttaggctatctccagcagcagcatctgaggagctggcaccagaggtggggacacttcgactgtgaggagcaggcaggggtcagcaccatgtaagagaaaggggctggcaatggagaccaacatgcaaagcacagatgatgccaatgagaggctgcaatggcgaaagaaaggaagcatcagaaaggatatgccgaggattaatttggaagagatggcttgactcacaacatgttggaaatgatacattgtcattggaggcgccaggaaatctgcaaagttagatgccgaggcgttccaactgttgatatgaagaatctctgttatcatcttgaggagaagtcaggtggaaaagtcattcaccgagtaggcggcgttgtttttctatatagaggaagacattatgatcctaagacccgtcctcgctatccactaatgctctggaaacctgcaactcctgtatatccaaaactcatcaaagaagctccagatgggtttacaaaagaagaagcggatgaaatgagaagaaaagggcgtgatctgctgccaatctgtaaattagccaaaaatggaatatacatcactcttgtcaaggatgtgcgagatgcttttgaaggaagtgacctggtgaagattgactgtgagggtttgaatccaagtgactacaaaaagattggagcgaaactaagggatcttgttccctgtgttcttttatcatttgatgatgagcagatattgatgcacagaggcaaagaatggaaatccagatactcgaagcctcttactctcattccaaaagttccaaagaataatctggcaatgacatctgtcatgaatagttcagatgaagttagtgatgccaacactcaagttgcgataagagaagtattgagacccaaaatgttcaaattatggaagagtgcggtggactcgtctctggcattgctgctggatgacgccgaagcaaataatctcacacccgattcgctcctgactctggttgaggagttcagcgtgacatctcaggcggtggagcactcatttcctgctctgcttgtgaccaatggtgatgcgagcaccgactctctaagtgcagagtacatgaatgacgagcctgaaacaagcgttgctggaaacgaagagggccagctggagcagtcacctgatctccgtgacgatgaacattttgatctcgacatgtttgagcgtctggagtcatctgtgccattgggatcgctgcctattgacagcatgatagagcggctgaacagtgagtgaagtacagcgagcagttcgttctgtccactgggataactactgatggtcagattgcaatctcggatcgtgtagatgcattctctacgttcctccggaccctcagtctggtgataatctcaagatccgagaatttccggcgatttggtagcaaacgtgatgtaaagaaactaactgtagtatgcaagtgcgccatgcatttggcaaacgcaccaacggataacacgtctcgtttgccatcgtcaatgagtgcgcttgcatgtatatgaatatctgcatttatactgtgtttaccaaaaaaaaaagtattgtgccatgctccaaaaagatgcggagctagcagtgtcagaagtctataaactctatagtaatttatacttctgcattttctgaatatttttgaaaataaagaatcggtctatggttcag

SEQ ID NO: 180180 - DNA, 737 bp, Zea mays
  Clone ID: MRT4577_95904C.1
ccagaaaaaccgggtagacccaccggccgggccgcgtgtccgacaccacacggctcactggctcaggtcggccacaccagaaaagcatgcgaactgaaatggcgccatgttcgcctctcctcctggccgtggcgctcctatgcgccgccgccgccgccgccgcggcaggcggattcggtggccccacggcgcggtacgatcgcgtattcagctttggcgactcgctcactgacaccgggaacgcgctgcacctcgcagcaaccgccggcgggcccgcgagccggccaccgtacggcgagaccttcttccgtcgcgccaccggccgcgcgtccgacggccgcctcgtcatcgacttcatcgtcgaggcgctggccgtgccgcagccgacgccgtacctcgctggcgcgacggcgacgggggcggatttccgccgcggcgtgaacttcgcgttcggcggggccacagcgctcgacctgcacttcttcgtgagcaggggactggggtcgttcgtgccggtttcgcttaggaaccagaccgtctggttccacaatgttctacgacttcttggctcagctcgcgagcagaggaagaccatggccacctccctcttcctcgtcggagagatcggagtcaacgactacttcatcggcctcaacgagaaccgcaccgtgggcgaggtgcggaccttcgtgccccacgtcgtcggtgccatccgttcggtcatcactgacgtgatc

SEQ ID NO: 180181 - DNA, 427 bp, Zea mays
  Clone ID: MRT4577_95905C.1
ccgcgcgggactcgcccccggcctcctcccgcctcccaaatctcgctcgtggccagcggactcgcaacgactgatcatctgatacctgtgggcaattactggtatgcattctgtcatctcaggaagggaaatgaggaggccacataccaaataacttaccgcaggcggaagcgtgatgagcatgcatagcgacagcttagcgcttgcaacaaggcaaacaacccagcttcagttgagccgagacaggggatagattgagagaggcgcgcagatggcgacgccgtcgtcgccgctttgatccagcttcgcctccctgcggaccgactccatcggccacccccgtggcatcgactcctccacgcccaggaaggcattccatgtgagggcatcagctcgggttgacaagttctcaaagagtgacatcatc

SEQ ID NO: 180182 - DNA, 170 bp, Zea mays
  Clone ID: MRT4577_95906C.1
ggcatcataggtgctagggcctctctcccgctaccggtcaagggcagaagataaagcatctgagcgctgactgtggatctcatccgtatagcagtatatacgtctgactagttggatgcaccgagtttagctaattcccttcgaaccggtcggagacctttgctctccga

SEQ ID NO: 180183 - DNA, 590 bp, Zea mays
  unsure (1)..(590): unsure at all n locations
  Clone ID: MRT4577_95907C.1
gcaccctgnaccttatctacgcgcgcagctatcctctactgaagctccatcgtgtcgcatctccagctccctgcgcatggccgccgaactcagccctgccctcaacaccggccatcacctgctccctccaatggtgcgtgcgccctccctgctccatctccctcggcgccgcgctcctctgctccagccagccgagcagctcggccgagctccttccctgctcgcctggtcgcgccctgcttccatggccactgcgcacttgcccctgctcgcttcttctcgcgcgcgcaggcatcttgctcgctcagcttccttcctctctcttcccatgaccgagctctctctctcgtggtgccctggcctcaccgggatcctggccgcgcgcccttcctgctgccacgcccggcctactcccctgcgcgcgcctgcttcctggccgcggtttctccctcccccgagctcgttaccatggccggcgtacgacttcgcgttcgccgaagctccctggcccgactctgcccagttcgcgccctgctcgcctctgtgtcacgcgccgtagcttccccctcccatctccctctcatctcctc

SEQ ID NO: 180184 - DNA, 310 bp, Zea mays
  unsure (1)..(310): unsure at all n locations
  Clone ID: MRT4577_95908C.1
cgtggtgatgccggtgggggagttggctgcgcggctcaggcagcgccatggcggagaattaagnatgagggaacgaagaacatactgcctaaaccgacaccagttatttaaagttaaacgatgagatctacaacatagatttaccagggagaaacttaactacgaatttgttccagaccatactatagtttagctatagacagcaccagaggtaacttatatacaaactactagctggaaatctcgacagtttgcactgatgcgccccaaagcttgcaaaaaagactgggggagatggctgcccaactgc

SEQ ID NO: 180185 - DNA, 122 bp, Zea mays
  Clone ID: MRT4577_95909C.1
gtaatgttggctgctgttttttttatgcgagataatgttatgaaactggatagtccctgtaaacatggcttaaaacatgacagaattattttcttttaggagaatgctaccccttttatttt

SEQ ID NO: 180186 - DNA, 1013 bp, Zea mays
  Clone ID: MRT4577_9590C.1
tggggacgccttcttcggcgcgctcgggggcctccctgccgcaaggcaagaagcgattttgaacggctccgctagctaaagcagggcaaggcggccggaaggcaggaaatccgtacgcacgccgaggtcgaggtcgaggtctcagcagggaggatggaaacggagcagcagggcgtggttgcggccggtgaagccgacgctggccaaggggacgccgtcggcgtcgttccggctccgcaacgggagcctaaacgcggtgcgcctccgccgcgtgttcgacctgttcgaccgcaacggggacggcgagatcacggtggacgagctggcgcaggcgctggacgcgctgggcctcgacgccgaccgcgccgggctgtccgccaccgttggcacctacgtgcccgacggcgccgcgggcctccgctttgaggacttcgaccggctgcaccgcgcgctcggggacgccttcttcggagcactggggggccaggacgacgcggccacggcttcatctctgcccgccgagcgctgcgaggtgctcaagaagctcggcctccccgaggccagcagcatggccaacgtccgggagatgatctgcaacgtcgaccgcgacagcgacggccgcgtcgacttcaacgagttcaagtgcatgatgcaggggatcaccgtctggggcgcctgactgacctcatcgtcgtacgggatcggacgagtgtgtgtgtggcaaggcatgttgccgcaggacccgtatttccttgtccctgcatttcttcgagacagtcctgcgtctgcgtctctaattgaattctttagtatcgtccttcacatcactggtctagtggtgatgagaatgccctgtcctgtgtgtgtgtgtcacataaccatggtatgtaatgtcatactggaaattaggtatatgatgatgacagctgataagaaaatgtatcaaaaaaaaaaaaaaaaaaaaagtgggctattttaatccctgcccatcaatgtcttgggtcggcttagat

SEQ ID NO: 180187 - DNA, 508 bp, Zea mays
  unsure (1)..(508): unsure at all n locations
  Clone ID: MRT4577_95910C.1
ccgtccgnngttgcccagnactncnnggagggaggttngnngtgcctcntnngtgtctnnctgtgnntgtgtgggnanngatgngacncnnccaagntnntcccnncccacnnccccnnnaccgcttaannnacaaananncggangcnnccacncacnnncgcgaccgacccacncnnaccacctcngnnaccgcgcccagcagcnnagcagcnnagcagnnctggatcccttaaggacctttaccagcnnagcagcangnncagcagccccggcgcccagcacccctgcaaatnnccaaatccnnaccagtcgnntagcaggaccggnnaggcggcggaggggaagggagcccagcagcanngctgcaggtgnnngtggcgcanngcccggggagggaggaaggcangcaaggccgcttcnngcgcccannagcggagctttccaacaaaggaccccgacacaccaagnngtcgacggcaggggccccggcggatccccggatgcc

SEQ ID NO: 180188 - DNA, 248 bp, Zea mays
  Clone ID: MRT4577_95911C.1
gcgccctgctttaatatttaggaaggatatattttgacagcagatagatgaaccaagcagttatgactcaagacactagaatggaatgggaaggcgttcactcatcacgcgacggggagattgggcgcggaaatggggctgtcaacaaaggccttgatatcctgaaacatcttgggagcctaggtgagctccgggaagccgaagaacccgaggaacatgcctgggtattcggacaccaacacctggtt

SEQ ID NO: 180189 - DNA, 321 bp, Zea mays
  Clone ID: MRT4577_95912C.1
cctactcgtgagtggacgctttggcggattcctatgctcttactaccagaacgtgccggacgaggccgccaagaaggagatcaagttcatctttacagcctacaagcacaccctaaagctcaataagacggcaggcgccgagcgcaacaaggggaagggtcgtgggcgccggacgaggattgcaaagcactacacttcaaccacatgacgactacagcttgaaagcacacatcaaagaagaggagcgtacatctattctcgattagaagaggctaacaatctggacgatgatgtagctactgagttaccataatgtaaaga

SEQ ID NO: 180190 - DNA, 628 bp, Zea mays
  unsure (1)..(628): unsure at all n locations
  Clone ID: MRT4577_95913C.1
cccacgcgtccgcccacgcgtccgcccacgcgtccgcccaagcgtccgcccacgcgtccgcacttcacatctcacccgcgacgctattcatcatccctacgcttttccagatggtgatcctcgttgtttacgaccggttcattgtcccgttcctaagacggataaccgggtacgtgggcggtgtcacgcacctccagcgcatcggcatcggattcctttcaaccgtagtggccaccggcgttgcagcaatagtggaggccagtaggaaaaaggtggcacgagacagtggccttgtggatgctacagctggaattccaatatctgttttctggctgaccatacagttcttcctgctaggcattgtggatgtcacctcctttgtagggcttcttgagttcttctacagtgaggcgtccacggggatgaagtctattggaagctccatcttctactgcatccttggggtgtcagcttggttggggagcctgttgattcaagtggcaaaccgagttacaagacaccgcgatggcacaggaggctggcttgatgggaccaacttgaacaagnggaaacttgaacgattctattggttgctagcagttcttgagctggtgtcgctattagtcta

SEQ ID NO: 180191 - DNA, 453 bp, Zea mays
  Clone ID: MRT4577_95914C.1
taggggccttttttttttttttttttcgcatagcaaaggagtgtgtattcgaactgatcatcagcagagaaacaacttattcccatataaatttccaggtatgtgatacggcgtatgatcaacaaacaaccaatcaactgaatctcaatactcatggaagacagtaacttcaaggtcaccgagggcttctctatgtaaaatgaatttgcataacaaattttttttccatcagaggtgccatttaaatatccggggatcacaaccaccccactgggaccaccaggagaaagagaaactggccatgacccccaacctctgcacaatacagcccgctcacaaaggacttcctccaccatctttgatttcatcaactgtccctctgccaaccactcaccataattagaaacctgggggggcacccccaccctttaacgtaaactttgaaagggtccc

SEQ ID NO: 180192 - DNA, 369 bp, Zea mays
  Clone ID: MRT4577_95915C.1
ggtgggtgtttttttgcttttatggggggtggggacaaaattcctgaaactattttatttccattgggcggcttaacaccaattgctccgggggaaaaagctctattgatagcccggggggccataattgggggtggccaacctttaatgaaacaaaaccagggtttatgccccttttcaggggtcttggcaacgaaaaaacaaattttttttaaaggccctcttgaaccccttggaggccgaaaggacatcctattctttaacggggggaagggctttttttttttttatgggggggcaagctacctgttatgcttaagtttgcccttggggggggctttgattacggcatttttgtgattttgaaga

SEQ ID NO: 180193 - DNA, 522 bp, Zea mays
  Clone ID: MRT4577_95916C.1
caacactagagatccgaaactcagtcgatctcactcaatcctcttcctcaaatcttcgattagattctcgttcttcctcaatctttcattatattctcggtgaccagaacactactaaccgaacctgaccatggcagtgattcgccgcagaaatgtgttcgatcccttctccctcgacctctgggagccctttgatggattgcccttcggatgcggtaacagctgaagtctcttcgcctcgtgaccgcaccaccagctcgaagagcggatgcttcgctgccgtgcgtatcgactgtgaggatactcaagaggcgcacgcgttgcaaggtcgaggtaccgttgactgaacaaggatgaggtcaaggtggaggtggaggacagcaacgtctcttcacatcctgggcgagtcgtacaaggagcaggaggagaagacggacacctggcaccgcgtggataggacaatgggaaggatactgctgacgttccgactgaccgagaacggcaagatgcagaagattgcgg

SEQ ID NO: 180194 - DNA, 571 bp, Zea mays
  unsure (1)..(571): unsure at all n locations
  Clone ID: MRT4577_95917C.1
ccgggaaaaacaaaaaaacaaaaataaaccaaaattaaggggaaaaaaaaaaaaaagaaggacccaaaaaggaaacaaaaaaaaacaacaaaggaaagaacaagaaaggagcaaaaaagaaggcggccaacacaggcacacagcagaggccaggccgaaaagggaagaggaacagaaaccaaacaaaaaaccagccgaaaacaaaaaccgggggggggggggggcccaacgagcgagccaacagaaaacaagcgcgaagcgaaaaacggaaaagccgagaaggcgaaaaaaacggcgcgaacagacaaaaaacgaaaagaccaacaacggcgagagaggcaggnngaaaaaacggggggccaagccgaaaaaaagaacacaaaaacgccggggaagaagcggcggccgaaacgagcgccanaagcccacccaaaggaagaaacacacggagccacagaancaggggagacgacaggaaaaaacacgagaaaaaaaggcgaacacaaggccacaaaccaaaaaagggccccgccggaaaaaaagagcaaaaaaaaggccccccagggcgagc

SEQ ID NO: 180195 - DNA, 175 bp, Zea mays
  Clone ID: MRT4577_95918C.1
acgctcagctgaagcgcgacaagcatgcgtataggtcatgcctgagcagcggataatattgacacgcctcttattctctggagcttgcttactgtgtaagtcttcagatattcttctagattgtgtgcctagaacgcattgcccccattattagtactgacttgtgagcatatgt

SEQ ID NO: 180196 - DNA, 911 bp, Zea mays
  Clone ID: MRT4577_95919C.1
gcgccgccccgcgctcgcggtcgcccctcggctgaatgggtcaaaaaacacaaggccttgagccttccgttgtgctccgcgaggaaagcgaggaggcggccggctcggtgctgagtgctgagttgttgaccaacgggaagtccagtacccaagcggagccaccaaggaaaggaggaatggaagccaccggcgcagcctcgcagccctcggcgccgcagacaactcacccggcggtggcgccgctggccttcctactggggaagtggcgcggggaaggcgagggcagcttccccaccatatcctccttccggtacggcgaggagctcctcttctcgcatcatccctccaagccagtgatctcgtacacgcagaagacgtggaagacggcgtctggcgagccgatgcacgccgagagcgggtactggcggccccgccctgacggctccgtcgacgtggtcatcgctcagagcactggcctcgccgaggtccagaagggttcatttgatgctgaaaagaaaacagtgacactccaaagcgaactcgtagggaatgcatcaaaggtgaagcagatcacgagaacttttcaggtggcagatggggagctctcgtacgtcgttcagatggcaacgatcacaactagcctacagccacatctcaaggcccttcttaggaggatttgaagttgaccggcaaaatctcctacaacgacgtcgctgcggctaaccacaaccgagggacacctgtaatacagagcatacttctggtgattactacgtagttattagtgaatgaacttacaggttaaataaagctcattttcaaaaacagaggttccgctgataggaactaccgtatatgtaaacggcttaccattcagcccatgctccacaaatcgagattattattttttc

SEQ ID NO: 180197 - DNA, 330 bp, Zea mays
  Clone ID: MRT4577_9591C.1
caaaaccaaatgaatcgctctagccgcattgactggatataataaatgtgaggcggtccgtctcgacaggcaaaggaacaaaaacaggctagccttttagacccctcagataagtgactgaatgaacttttatggatgcaccaggagaccagaatactgtgcaatttgcgaggattgaaaacattcatgccgacgctccaagatgtgtagatgtattggccgaacttaacaccaccattgcctctttactataagtggcgcgtaaacaggccccatatggagaacaaaccagaaaatattgtctcaaatgtagtctccaactgaaaaaca

SEQ ID NO: 180198 - DNA, 708 bp, Zea mays
  Clone ID: MRT4577_95920C.1
ttgggtccctcgaggccggccgggtcatccgaattcccagggaggcaggtcggcgaggagggcaggaagaccgaagaccgagccgtgcgggggctcgggacgggaacgggacaggaccccaaaatcacagatccttcctgaccgcccgcccgtgcgccgtctgacggcgtctgtcttgtccggccgcggcccacctccgtcctctcctcctccagggggatcggatactccacaggatgtcatgatggtgctgtgggtcttcggctactgctccctcatctggaaccccggcttctacttcgacgactaaatcctcggtttcgtcaagggatacgagcgcacctttaatctcgcttgcattgaccacagatcgtacaccgagaccatcctgcgaggacctgcacgcttgaaacctactaccaggtcatatgctgagtaattgcatattgtgacaaggtcgctgcaaagaaacatgtaaaagcaatacagtacttggagagaagactagtgtgagtacgaccagcaaatatacgttgatttctactaggaatgagatcccttgaaaccagctgtgacactggacttagtgttcgcttccactccagatgcaattgctgacaagcactatcttggtcctgctcctctgcacggtatggcaatgcaaattgctacagtcaatggccctactgactataatacggattacct

SEQ ID NO: 180199 - DNA, 306 bp, Zea mays
  Clone ID: MRT4577_95921C.1
cccacgcgttcggccacgctttcgacgagctacgcagagctaatggacacggcgcgctagggcggactcaaagtcaccagccgtcatgtccgttccagcaacggcggcgttacttctggtactcacgtcaccttccgaatgcacgtgcctgcccacggaagatatcgttagggactagtatctctgatcaccggccagtcaggccgccgcagctacaagcacgtgtcgctcgactgctacgtcatgtccgatgctgaggtacacatgcatgtgtagtgcttcatcgtctacatgcgcacgttcacg

SEQ ID NO: 180200 - DNA, 180 bp, Zea mays
  Clone ID: MRT4577_95922C.1
cactactccgccaaccgggacatggcggagttcaagagtacgtcgacgacgtggccttctttctgcttcatcaatcaaaaaaatgcgggtgtacgaccgtgcggaggtttccttcctaatttcttggccgttgaccgcgtgcgtgtgtgtgcctccctctcttgtccttgtgcaggtttt

SEQ ID NO: 180201 - DNA, 282 bp, Zea mays
  Clone ID: MRT4577_95923C.1
ggaaacaaaaaaacagtttttctgtgtggaaaacacataaacacattgggggctagacattgacggctgggggcgtgttatcggcccatataacagccaggaacttgtggctaaataacggaattgatttcaaacagacacatactctatacctgacggggttattaaattgtgggtaagtgaaacgaccacgctcctttaggcctgctcattctgggaggccggctccagaataagtcgctgcacctgctgcacttgcttatacgtcttgtgccaattttt

SEQ ID NO: 180202 - DNA, 232 bp, Zea mays
  Clone ID: MRT4577_95924C.1
tgtctatttcccatatcctttcccctacctgggcagcttttcccgtctccgggggctcgtctcccctcctaacctcgccagccatgggcaagaccaagaacggaatcaacggtttcggaaggatccgcagcctcgtggactgggtcgccctgcaaagcgaggatgacaagctcgtccccgtaaacgacccctcattaccacggatacatgacccacatgttcaagaaccaca

SEQ ID NO: 180203 - DNA, 541 bp, Zea mays
  Clone ID: MRT4577_95925C.1
acagcaaaccacccccagtaagaccttttaaagcaggctacaaaaacccggcttggtggaatgggttttcatcacacaaatttaacaatcagtttttgtaatggccatcgccccacctacacatttgggggcttccatggactgtttgttaacatggcatttgggcagtttttttttcataaccttttaattgcttttttgctcctggaactgctaaaagtcgaaagcccccctgcaaatactgacattttaaaggggggaaaccagggctggatccaccacgggaggggaaaaaaaaaacttgtgtctttttttggaagggcaaagtcctacaagtcatccccaaacataacaaattcagcatccccttttttgaaatccaggggcaggggcatgtccctgttggactcaaaccttttaggctttaacaccacactttggaaatctgtcagggatttgatttgaccatccaaaaaacaattgttttttggcactttgggagcttcccaattgggttagcgagctccttttcctttttaac

SEQ ID NO: 180204 - DNA, 159 bp, Zea mays
  unsure (1)..(159): unsure at all n locations
  Clone ID: MRT4577_95926C.1
cgcgcgcttttctcgctctcgctcgtgggnagggctgggcgagcgccaacaacctacgccaggcgcccaggncttnggcagtaccttcgccggcgacgaactagnacccacaggaaaatggaaagnagagaaagnggngatgagaaggaaaagataaat

SEQ ID NO: 180205 - DNA, 396 bp, Zea mays
  Clone ID: MRT4577_95927C.1
agcagaagaagagggtcgaaaagcaagactaaagcagattactgaatttaaagaaagctgcacaggttggtgctttgtccagatatatacagcttgctgcaaaggccttgcccatcacaagaactaaagctgaccttccacaaaaatctagcaaagccgatcttggagagcgttagtagcatcgcttcctcaagtacaaccagccgcacaaatattgacgagaaccttccttgtgagaaaccttctaagcacccttgcaaaactacaaaggtacttccaatttctcaagggaaaggaattggccatcttgaaaaacatccagatgacgaaatccttgactgtctacttgccaaaaactctgattaacccattgatgttagcaaggcaaataccatg

SEQ ID NO: 180206 - DNA, 535 bp, Zea mays
  Clone ID: MRT4577_95928C.1
ttttttttttttttttttttttttttttttttttttttttttttttttttttttttttttttttttttttttttttttttttccacccaaaggaaaaaaaagagggggggggacccccaaaaaaaaaaccggaaaaaaacccccggggggggaaagcacaacagggggaaaaaaaaaaaaaaccaaaaccccaacggagggcagggggggaaggaaaagggaaaaaacaaaaaaaggaaaaaccaaggcaaagggcaaggccagggaccaaaacccaaaaaaagcccagggctgggcaaaaacgggtggaaaaagcaattccccccgacccaaagggcccaaaaacacccccaaaccaaaggaaggggggccccacaacgggaacccttaaacggaaaaaaaggcctccggaacgggcccaggaccaaggaaagggaaaagaaaccccccccaaccggaaagggagccaggcattaaaaaagcaccgtttaaaaaaaagaaaaaaggcttaccgcggggcttaaaggcccacggg

SEQ ID NO: 180207 - DNA, 606 bp, Zea mays
  Clone ID: MRT4577_95929C.1
gatgcgagacgtggcaccaccgcatggctagtcccatttttcctgctgctggcctgctcagccgtttcatggtggccgattggcagatgagcatggaccagcaccacgcgctggggcaagggcagtggcacggccacagggtgaccagcaccacccttgcagatgcagtagcgggccgacaactttacgcggcagacaccatgctgcggctggagctggacgagaaccccaaggcgagcatgtgtgcggcttggtctggaaactgctccattgtgagatacaaggacctcccctcctaactgactgcgcaggagaccggggcccaggcacactatcagaggggcgcgtggctcgtgacccagaccatgtccacacccgtgctggtgaccacagcagagcagcaccctggcggacattcagtgccacttaaaggacgtctctgctcttgcaaggagaaagagatgtctgagatgcgtgtgcgtgatacgcaagaatgaccgggcaagcagcctctctgggtccatgacgatgatgtcggaacgatgacatctccagctatcacactatagagtgacaaaaccgttatggatgctggtgctgtcatgc

SEQ ID NO: 180208 - DNA, 415 bp, Zea mays
  Clone ID: MRT4577_9592C.1
cccacgcgtccgcccacgcgtccgcccacgcgtccgtagattttttatgctttatactgtaataataaatttctcatactgatatgtgcaacttctcagtaataaaagattagagatctataaaaaaaaaaaaaaaaaaaaaaaaaaaaaaaaaaaaaaaaaaaaaaaaaaaaaaaggggggggggaacaaaaaaaaaaaaaaaaaaaaaaaaaaaagtgggaaggcgtcaactaaagatcaaagctaagggcggcgttttacatcaggtgaaactggcaaaaaactagaaatcaaaaagcaaaaaattggccgagcttaaacaactaaaaccaggtgaaacccagctattagccttgaaagaccgtccgaacgcaacagctttgctgcctgaaggataaatgggaaccgccccc

SEQ ID NO: 180209 - DNA, 1783 bp, Zea mays
  Clone ID: MRT4577_95930C.1
aattcggcacggccggccgggaactgcatctccatgcccttccttccttccttccccacacaccatctctctttcacatgaggatttctttcccttctttctttcccacaaatattcccaaagaatcttctgtgttgcttctctcctcggattcctcttcccctcctcgcctcccactccaattattcctctccttactgacttgcttcgcttctctgttatctctgtcctctcctcgtgtttgttcttcctaccagcggagcgccagctacgcgctgtgcctcgtgcctagacgaacggcataggcaccggacggtggcgtcatgtgcgtggaggagccggaggacgccgaacggtttggttttggagacccaggggtcgaggagcccgctaagtttcccttggctcagatggagagagtttgtgaaaatacaacttctgctgatttcaggcagaagttaagcaattttgtcccagtaatccgatcgggggattggtctgatattggaggtcgccaatacatggaagacacccacgtgtgcattccggaccttgctaagaactttggtttcccatcattagataatgaagttgtttcattctatggggtctttgatggtcacggtggaaaagatgctgcccatttcgtttgtgataatttaccaaggatgattgtggaagattcagatttccctcttcagcttgaaaaagttgtgagaaggtcctttatgcagattgattgccagtttgctgagacatgctctctccatagagcatcgtcctccggtacaactgcacttacagcaatggtttttggaaggtctcttctggtcgctaatgccggtgactgtagggcggttctttcccggtgtggcaccgcagtcgaaatgtccatggaccacaggccttgcagtctcagcgaaaaactgcgcgtagaatcgcttggtggctacgtggacgatggctatctgaacggtctgctaggagtcaccagagcacttggtgactggcatctcgagggcatgaaaggagctggtgagacaggtggtcccctgagtgctgacccagagctcaagatgaccacgctgacgaaggacgacgagttcttgataattggcagcgacgggatctgggacgtcttctcgaaccagaactcggtggacttcgcccggaagcgcctccaggagcacaacgatgtgaagttgtgctgcagggaaatcgtcgaggaggcgatcaggcggggggctactgataacttgactgcagtgctggtctcgttccacctggaggcccctcctcggatcagagtggaccgtcctggtagggtggagaggagcatatctgctgaagggctcaatagcctcaggatactcctgggaaggcagtagctgcgttcttgtcgcgattttaggtgctgtgccgcattgccgagttgtaattgtatgtagtcatctcggctcctcattgtcgttagttgttacccgttgctgcgactgcgacacgtgttacgattcttgttggtgattgaaccaacaaacctgatattattcttgttggtgattgaaccaacaaacctgatactattcttgttggtgactgaaccaacagatttgagctctgtcctgtgagagattttaagcagatgaaagtatatctggcaaagaagctgtgagttcccagctcactgtgtaatgtttgccttccgttatgtaacaaaacaaaacaattcattgactgaaaggtgtcaggacccggccaaaaaaaaaaaaaaaaaaaaaaaaaa

SEQ ID NO: 180210 - DNA, 315 bp, Zea mays
  unsure (1)..(315): unsure at all n locations
  Clone ID: MRT4577_95931C.1
cggacgcgtggggccttgagtcgagtccccgtcgaccccggcccgagagataagtcgtacgttggggcccgccgactgctgcacgacatggcacatctctcatctctcccgctccgagttcgcgcgcgtgatgccgccgtttggatttgtgcggtgacacataattcactgtaaattactcaaactactagcaatagctagctagtgcagtacagtatacttatgattccatttgatgcgtacggnctacaacgtgtaagtactagtatttagcgttgccaataattagcgacagggcacgctccggcagcgaat

SEQ ID NO: 180211 - DNA, 117 bp, Zea mays
  Clone ID: MRT4577_95932C.1
agctctacgttcgagccagcagtcgctcgcaactttttctctgtgaaccaccaccctcaggccccagaccgtggacgcgtcggcttagcattctagcataccacagtatactacaca

SEQ ID NO: 180212 - DNA, 461 bp, Zea mays
  Clone ID: MRT4577_95933C.1
ctttcaatctctcttgattccaatccattcttcttcaagtgccgggttctcgggtcggaggttctaagtctagctagggataatggctactgtcactactcatgcctcggcctcgattttccgaccttgtacttcaaagccaagattcctcaccggttcttccggtaggttgaaccgcgacttgtcgtttacatcgatcggttcatcggccaaaacgtcgtcgttcaaggttgaagctaagaaaggagaatggttgcccggtttggcatcgcctgattatctcaccggcagtcttgccggtgacaatgggtttgacccgttgggtctagcagaggatccagagaacttgaaatggttcgtccaggcagagctggtcaacggacgatgggctatgctcggtgtcgctgggatgcttttgccggaagttttcaccaagatcggaatcataaatgttcctgagt

SEQ ID NO: 180213 - DNA, 137 bp, Zea mays
  Clone ID: MRT4577_95934C.1
aaattaaatgggcatcgcaaaccaaaagaaaatctgtcgaaacaaacaggaccaaaaatagctcctaacacttactgaataaattccagcattcgaaaaccaggcgaactggccttataaaaaatcattacaccccc

SEQ ID NO: 180214 - DNA, 276 bp, Zea mays
  Clone ID: MRT4577_95935C.1
gttctagatcgcgagctgccgcccttttaaaattttttttttttttttttttttttttttttttttttttttttttattttcttttttttttttttttttttttttttttttttttttttttttttttttttaaaaattcccggggaaagtctttttcccctgttcctttggcccctaaacctccccggggtaaatttcccccggaacccttagtctgacttttgcccaaatccaaatttgccaaaccgaaaaggggcccttccaaaacccatttt

SEQ ID NO: 180215 - DNA, 536 bp, Zea mays
  Clone ID: MRT4577_95936C.1
agtcttccaacacatgcttcatatcattaatacctaaaatctatacctcaccacatattgcaactacttcgcgactagatatatgactaactgttacacgaaatgagatgcctctataagcattttatgtgccattataatataaaaagaaaacaaaggaagggagatccttccaaagacgcttcagaggatcagcaaccggtacgactactgatctcgaagtcgtcacacaatgtgcctatgctaaggacaagaaaaatcattgtggctatataactatccaatttgattaactgaaatactaaattggctcaccacgatcgaatcgatttgataaccgcgagggagacaacggttctcaatttagacatccaatcgagctcctggcaattgttgcacagacttctctcatagtttcatccaactctaggatcactctccgaaagacgaagtcgacgatgagccccatggagtaaacgatgatgttgctgcacccaccacatggagacgaatgacggcaacgccataacggcacg

SEQ ID NO: 180216 - DNA, 577 bp, Zea mays
  unsure (1)..(577): unsure at all n locations
  Clone ID: MRT4577_95937C.1
gcgcctggctncattgccggggggggggggtgggggaccgccgttcggtcttgttgtggtcggctctcgggtgggtgtgctggtgctgcgttgtcagccctgtttttggtactggcgagaaaaaacaaaattttgngttgtttggnngnnnccgnncaggctgtttgggggggtggtcctcacgacttccgctggcatcatggaccacgggggggggggggggacgtaccttgggggcgaggttctaggtttgttctgttgtagatgctgcgaatctttgtgttggcctgcctgcctgtcttactctttcaggctagggtgcctgtgcttttgctttggtgtgtttttgtgagtctggagaggcttgttttacttgtttgttgggtgctgggttggtctgttgctgttttttcggtgactgcattgatcgtgtggcccgttggggttggggcgggcggtcttgtgggatccgggtttcgtgcgcgtgcntgcgtcgtcgtgggtgttttgttgtgtttggtgggtttgttgtctggccctcggtttgcctctttttgggctgggtgggggcttgggt

SEQ ID NO: 180217 - DNA, 1274 bp, Zea mays
  Clone ID: MRT4577_95938C.1
cctcgaggccggccgggaagcaagtgcgcccgccccgggccgcactgacaccgcgtgtgcgaagaggcgtccgccataaagcgaacgtcgaccgcgccggtgtctccggtcttcgttctctcggggggaggagatagtctcggctctctgctgtgcggcgctggcggaagaggggttttgatcgcttccttcgtctctctgtcgtgaagtggacgacggaccgagtacctacaccaacttaaacttggatatcaatggagggcggtgtgactgtagcggacaaggcagaattcaaggagtgcctgcggctgtcctggacacagccttacatccttcaacttgtcctgtctgctggcattggcggtcttcttttcggatatgatacaggtgtcatatcgggagccctcctgtacattagagatgactttgctgcggtggaaaagagcactgtattaagggagacaatagtcagtatggctgttgctggagctatatttggagctgcatttggtggctggatgaatgacaagtttggaaggaggccttccatcatacttgccgatgccctgttctttggaggtgccgtaatcatggcgttttccccaacacctagagttatcattgttgggagggtatttgttggtcttggtgttggaatggcttccatgacagctcctctgtacatctctgaagcctcccctgctaggatcagaggtgctctagtgagcacaaatgggcttctcatcactggtggccagttcttggcctacctcatcaatctagccttcactaaggtgccagggacctggcggtggatgcttggcattgcaggggttcctgccctggtccagttcgtactggtgctgatgctgccagaatcaccaagatggctctacaggaagggcaggaaagaggaagcagcagcaatcttgcacaagatttaccctgcgaatgaggtcgaggaagagattgactcaatgcgccggtctgtcgaagaagaggtgctccttgagggctccatcggtgagagtggcttcatgggcaagctgaggaaggcgatgggcagcaaggtcgttcgccgcgggctaacggccggcgtcatcgtccaggtcgcgcagcagttcgtgggcatcaataccgtcatgtactacagcccgacgatcgtgccagttggccggctatgcgtccaacaacacagccatggcactgtccctcatcacctcgggcctgaacgccatcggctcgatcgtcagcatgttcttcgtcccggccgg

SEQ ID NO: 180218 - DNA, 104 bp, Zea mays
  Clone ID: MRT4577_95939C.1
tacccggccgctgaacctgcagcccttcgctcaccttcaggactcaggagtatgatactgatctaggtacacatcgcgataatgcactacggtccgtcgtcggc

SEQ ID NO: 180219 - DNA, 755 bp, Zea mays
  Clone ID: MRT4577_9593C.1
aaccgccgaaacaaaagaagctattttgacaccacacacacacacacagaggagagaagataagagaacgaggggcagggcagccagcgccgctagctgaagcaaggcagggcaagagaatccgtacgtcgaggacttcgacaagctccaccgcgcgctcggggacgccttcttcggcgcactgggaggccaggacgacgccaccgccgcggcggacggcgccggcgccggcgccggcgccgaggaggacgagcaggagatgcgggaggcgttcaaggtcttcgacgtcgatggcgacggcttcatctccgccgctgagctgcaggaggtgctcaagaagctcggcctccccgaggccagcagcatggccaacgtccgggagatgatctgcaacgtcgaccgcgacagcgacggccgcgtcgacttcaacgagttcaagtgcatgatgcaggggatcaccgtctggggcgcctgactgacctcatcgtcgtaccgcgtacgttctgacttctgagtgtgtggcaactggcatgatggtccccgcatttcgtcgagacagtcctgcgtctgcgtctctaattgaattctttagtatcgtccttcacatcactggtctagtggtgatgagaatgccctgtcctgtgtgtgtgtgtcacataaccatggtatgtaatgtcatactggaaattaggtatatgatgatgacagctgataagaaaatgtatcaaactgggctattgtaatcattgtcaacc

SEQ ID NO: 180220 - DNA, 646 bp, Zea mays
  Clone ID: MRT4577_95940C.1
taggatagcaggcaagccgcgagcgtgtctgcagatgctagccaagcgagcgtgcgactacagaacaacaagcaacgacaacgacaagcaaggatcatgtctgggctcacactggggctcgttgctcggcctcgttgagctaaagatcctccaacgtagaggcaccgacaccaaggctcagctgtcgtccttccagctgttcaaaagcagcaccagcttcatgtcaccctgttgttgtgtaatgttgctgtcatggagccttttcagacacttgctatatttcttgacataatgtttcatcctattcttgttgtattatcgtcagttacatttgttcttgccattggagagggatcatgtctgggttcacattggggctcatgtcgctcagcctcgtcgagctggagatcctccaatgtagcagcaaaagcatctcaggagaccattgatagtataaagagatcgatggaagaaaataacctccttcatcagctaataagcttcaatcgaggccaagtgcctccatcttaagtctacttgaccactataggacctacaatcttatgactgctatagtagctagttacagtagctctagatttgaagttatacgactgtttccaattatgcttaatgtttaatactt

SEQ ID NO: 180221 - DNA, 110 bp, Zea mays
  Clone ID: MRT4577_95941C.1
tagcaatctgactgtactgttcgtatcattgactcaaccactggttgttttgatgccggtatcgccaaggatgtccatacccgtgatcattctctccgtgctgtcacact

SEQ ID NO: 180222 - DNA, 145 bp, Zea mays
  Clone ID: MRT4577_95942C.1
ctactatagaaagctgtacgcctgcacggtaccgttcccgaatttccctgttaccccacacacttctattttctccatctatacatcactatatcgcacggttattcagacaggaccgtgggtgcttctcaactaccccttttat

SEQ ID NO: 180223 - DNA, 1474 bp, Zea mays
  unsure (1)..(1474): unsure at all n locations
  Clone ID: MRT4577_95943C.1
taaatttgctctgaaatcttgtggggtaaatggtatacccaggttcattagtaaaaatgtgtggagttgaccagtagcaaaccaccctttttaaacaggttgagcaaagcttgtttatttttgcagccagtattaattgtgtcccctttgaactgatgcaagtattgaggccctttgttcccnnnnnnnnnaaaaaaaaaaaaaaaaaaaaaaaaaaaaaaaaaaaaaaaaaaaaaaaaaaaaaaaaaaaaaagnntcaggtccgtctccaactcactagtactcagccgccgcaatcaggggggcaggtagctcgagcgcgcgctccacctgcgccgacgcgatgcgggccaagtggaagaagaagaggatgcggaggctcaagaggaagcgccggaaaatgaggcagagatctaagtaggcgcatcttgtgaccgaggatggcgagcttctcctgcaccatggctgtgacgcgttgggatgattgtctccctttgtagacgtgctttgctgtagacgtaggcgatgtaaaccgtcctttttgattaattctagtatgttctgagactgggtttatattgtaatttgaggataattatatgatgctctaagtttattgaaaaaaacaaaaaaaaaaaaaaaaaaaaaaaaccctagctcccgccgccaccccacgcctgcagccatgccgcccaagctcgacccgtcgcaggtggtggaggtgttcgtccgtgtgaccggcggcgaggtaggcgcggcgtcttcgttggcccccaagatcggtccgctcggtctttctcccaagaagatcggagaggacattgccaaggagacggccaaggactggaagggcctccgcgtcaccgttaagctcactgtccagaaccgacaggccaaggtctccgtcgttccctctgccgcggcgctcgtcatcaaggcgctcaaggagcccgagagggacccgcagaaggtcaagaacatcaagcacagcggcaacatcagtctcgacgacgtcatcgagattgccaggaccatgaggcccaggtccatggccaaggaaatgtccggctgcgtcaaggagattctcggcacctgcgtcagcgtcggctgcaccgtcgacggcaaggaccccaaggacctccagcaggagattgacgacggcgaggtggagatcccgtccgcttaagaagagggtatcatgagcaaatttctgttgttcggttgtaatattgatgaaccatttcgctttgtcgtttggagctgctgtagccgatacagttaatggatgtactttgttcgcgatcacgtttcctccatttaagcgatgctccggtgattctttttttttcatgaattgctagaatgggaccagcatagctaataagtgtggttccttgtgttagttgctgttcaatcttcaaaatcgaaggatttagtgtttatcagtgtactgaatgaattatgcttcaactct

SEQ ID NO: 180224 - DNA, 1046 bp, Zea mays
  Clone ID: MRT4577_95944C.1
ttgggtacctcgaggccggccgggtgaccctcttgtgtttgcccccatcgccccttgaaccctagctccctaactgccgccgccactcccacgctcgcagccatgccgcccaagctcgacccgtcgcaggtggtggaggtgttcgtccgtgtgaccggcggcgaggtcggcgcagcgtcttcgctggcccccaagatcggcccgctcggtctttcccccaagaagatcggagaggacatcgccaaggagacggccaaggactggaagggcctccgcgtcaccgtcaagctcaccgtccagaaccggcaggccaaggtctccgtcgtcccctccgccgcggcgctcgtcatcaaggcgctcaaggagccagagagggaccgcaagaaggtcaagaacatcaagcacagcggcaacatcagcctcgacgacgtcatcgagatcgccaggaccatgaggcacaggtccatggccaaggaattggccggcaccgtcaaggagatcctcggtacctgcgtcagcgtcgggtgcaccgtcgacggcaaggaccccaaggacctgcagcaggagattgacgacggcgaggtggagatcccgtccgcttaagaagtcccttttgtaaccttgcaggattggtgtccaggactgtgttatctttgctgctgaagccattctctgcctagattttctcatatttatttgaggtgggggtggacgtggacgtggaactatggaagttatcacagcggagttttgcttagaaactttgtcatgctttaagtctgagacaatttctgtcaaattttatgaacattcctaggtacaatcgaagttaccagtgcctgagttttgttggaatttttcatgcgatgtttaaaatttgactatattgcatggccaattggttatttgtctggttagtgattacatcgttgaggcgcatagtacttgaaatatgtttctgctacccgttgctatggtttttctggtggatgcgtgctcttatatatatataaaacaaagtgttttttcaaaaaaaaaaaaaaaaa

SEQ ID NO: 180225 - DNA, 710 bp, Zea mays
  Clone ID: MRT4577_95945C.1
ggtaccggccccctccctcgagtttttttttttttttttttttttttttttttttttttttttttttttttttttttgtttttttgtttttttttttaataaaaaaaaaatggccaaaaaacccccggcccccctttttaaaaaaaatggacctggggccctggaaaaaatgggttaaagtttaaccaaaaaaaaccccggcgaaaaaacccaaaggggtaaacttttccctttggggggaaaaccccccccccaaagggttcccccccccttttggggggggcctttttcggggtttttgcaacccggaccggggggggacccccccccaaaaaattcaacctttttcccttggtatggaacccgccaaaaaaaaaatcccccccggttttttaattggggaaagcaggggtttctaaattctggcaaaggggtttttcaggggggggccaaaaaaggggggtggggccctttattttttaaggggggaaatttgaaacccccccctgggaaggctaaaaaaaagcccatttgttaaaaaaacccccccggggggaaagggacccaccctgaaaccgggggggaaaaaaccccccccttttaaggggtgtttcaggggggggccaaaaaaaaagggtggggccctttagtttttaaggggggaaatttaaaaccttcccctgggaaggccaaaaaaaaccccatttgct

SEQ ID NO: 180226 - DNA, 509 bp, Zea mays
  unsure (1)..(509): unsure at all n locations
  Clone ID: MRT4577_95946C.1
gtaattccttgatggttattaataaaacatgtttcagaactattcttggggtcggacacagngaaagggggcgaacgccaacctaggctcggcccagtgccaaccaacacggatgttcatagaattgaagaaatgtcaaaaaagttatatcccttaaaccattacaaagacacaaattttccttaacccctcgtgggggagcgcaatcaagcagggcgactcccagtttccgagcaaagggctccgcagctttcaccatttcggcaagctctgtatcactccaggcatcgcagtaaccttcacttagggcctccagttcgattccgccttcgatatgggacgtaacaacgacgaaggcctgacagatcccccggcagaagtattcaattttgagctcccagatccgacctgcgaggctctcgaggcaggagatcaaggacatgtagtttctatgtgccgatatgtgccttttttccttctccaactcctccaagcgatgtgcagatatt

SEQ ID NO: 180227 - DNA, 694 bp, Zea mays
  unsure (1)..(694): unsure at all n locations
  Clone ID: MRT4577_95947C.1
gcggccgnctcgaggcncggcccggtttcgggatctacgctgaggaaagcatctcacgaagagaggctcagcgttcaagatgcagatcttcgtcaagaccctcacgggcaagaccatcactctcgaggtcgagagctccgataccattgacaatgtcaagtccaagatccaggacaaggagggcattcccccggaccagcagcgtctgatcttcgccggaaagcagctcgaggatggccgcactctttcggactacaacatccagaaggagtccaccctccacttggtcctccgccttcgaggtggtatggccaataagcgcaagaagaaggtgtacaccacccccaagaagatcaagcacaagcgcaagaagaccaagctagctgtcctcaagtactacaaggtcgacggtgatggcaagattgagcgtcttcgccgcgagtgcccccagcccgagtgcggtgctggtgtcttcatggccgccatgcacaaccgccagtactgcggaaagtgccacctgacctacgtcttcgacgaggccaaataagcgcatcgccaccggagcacgcgacacgatcgataacgagttacggcatcaaggcatatatgggaggagctgaataggtttcaccacgatgtcggacatctagaatcaatcaaacttgtcatggacttcacataataaaaaaataaa

SEQ ID NO: 180228 - DNA, 485 bp, Zea mays
  Clone ID: MRT4577_95948C.1
gtggttggcgatcagagtgcacttatgacgggttgtgcccttcataaagactagaagtcgacaatgtcagctcgtgaggcgacagcaacgtgttcgaccccttctcgatggatctctggagaccccttacgacaccatgttgggctccatctttccgggggcgaccttcaccaactccgagactgccgcctttgccagtgcccgggtggactggaaggagatcccgggcgcacgttttacaacgccgaccttcggcgaaatccaggaaggaagcacgtcattgtcgaggtcgaggacagtaccattctggtcatcagcggtcatcgcaacagggacaaggaggacaaggcactacaagtggtaccgcgtccagcgcaggcaagggcaactcgtcatgcgcttgcgcctgacggagaacaccaaggtggatcacgtcaaggctggcctctacaacggcgtgctcacggtcaccgtgcccattgcgg

SEQ ID NO: 180229 - DNA, 209 bp, Zea mays
  Clone ID: MRT4577_95949C.1
tcggtgtgcccttcggcgagaaataaactcctatgctgggaggctgtcattgacatgtatgggcaatgcgttatattcattacagtgactggcattaacgtagattagcgaatcacggtaaatacattcattcttgccagtatcgatggctgtcactatatttcgttcttacaaaacaacatgcatctctagagatcttgttctttaaa

SEQ ID NO: 180230 - DNA, 1183 bp, Zea mays
  Clone ID: MRT4577_9594C.1
ccggccgggctgcccggctccggtcgtcgtcgtccctcccgaaacaaaagaagctattttgacaccacacacacacacacagaggagagaagataagagaacgaggggcagggcagccagcgccgctagctgaagcaaggcagggcaagagaatccgtacgtcgaggtgcaggtcgtaggtaggatggacgcggaccagcagggcgtggttgcggcggcggtgaagccggcgctggccaaggggacgccgtcggcgtcgttccggctccgcaacgggagcctgaacgcggtgcgcctccgccgcgtgttcgacctgttcgaccgcaacggggacggcgagatcaccgtggacgagctggcgcaggcgctggatgcgctgggcctggacgccgaccgcgccgggctgtccgccaccgtcggcgcctacgtgcccgacggcgccgcgggcctccgcttcgaggacttcgacaagctccaccgcgcgctcggggacgccttcttcggcgcactgggaggccaggacgacgccaccgccgcggcggacggcgccggcgccggcgccggcgccgaggaggacgagcaggagatgcgggaggcgttcaaggtcttcgacgtcgatggcgacggcttcatctccgccgctgagctgcaggaggtgctcaagaagctcggcctccccgaggccagcagcatggccaacgtccgggagatgatctgcaacgtcgaccgcgacagcgacggccgcgtcgacttcaacgagttcaagtgcatgatgcaggggatcaccgtctggggcgcctgactgacctcatcgtcgtaccgcgtacgttctgacttctgagtgtgtggcaactggcatgatggtccccgcatttcgtcgagacagtcctgcgtctgcgtctctaattgaattctttagtatcgtccttcacatcactggtctagtggtgatgagaatgccctgtcctgtgtgtgtgtgtcacataaccatggtatgtaatgtcatactggaaattaggtatatgatgatgacagctgataagaaaatgtatcaaactgggctattgtaatcattgtcaaccaatgtcttgggtcgggttagttatccacgatgtgattgaactaacattatgtttggcaaagctgttttagcgattatatagtaaaagtaaatttatttgac

SEQ ID NO: 180231 - DNA, 470 bp, Zea mays
  Clone ID: MRT4577_95950C.1
ggccgcgggtttttttttttttttttttttagtaagcgaatatactttattgcttaaatttatcaacatccaatccacaccaaagttactaaatcacaatatcaaggctgccaaaaactccttcccagttcaacttgatctatctatatcccatttcgtagacaagacgttcaaagtcggacacgcaaagcttagcagcatccctcgtcgcaggcgcagagaccacagcagatctcgcagccagcttcttcaccacctcgcatggacatgtcgggctggggctcagcagtaggctgctgtgtgacgatgtctccgttatcagaggtcataggggcttgctgggtgggttccatgggagcaggcatcttgaatgattgggaagatcgaacgattgtcgagttgaagagaaggtgatgagagtagtttgctttgaagtagagttgagtagtgtattgtagtgccccggccgg

SEQ ID NO: 180232 - DNA, 337 bp, Zea mays
  Clone ID: MRT4577_95951C.1
aaaacctataaaacacagaccatgattccatgaccattacaccacatacagagggtcacatcatgggggatgatcctttaatactagtaacacgaagaatggggaacacaggcatttaattacatggaaaggcatccagtttaaccttctccacaaataaggcactcgcctgatgtgtcccgagaattacacaccggaccatgagggcctaccacatatcattttcgagagcagcactagcgatggatgattatatggaaacacctgaatgctgacacacatgttaagcagtgatcaatgcctcacaagatacacccccgatggctacagcctaaag

SEQ ID NO: 180233 - DNA, 812 bp, Zea mays
  unsure (1)..(812): unsure at all n locations
  Clone ID: MRT4577_95952C.1
nnncgaggccggccggggaaaaaaaaaaaaaaagacgacgttcaattgacgaaatgccgacgttgtgtgcctgctgaacacttgaggcggtaattaaaccaagagaagaactatcggcgtcatgtcttcgccagtggccaaggccgctcgccgcgtcacaactgagcttcgaggcgttgtcgtctctgctggtcttatggaaaagactgttaaagtcagagtaggcggccagaagtggaacaagaccgtcaacaagtggttcgccgaccccaaacactatctagtccacgatccgaactcgtccctacgaacaggcgatgtcgtttccatcgcccctggatggccaacttctcagcacaagcgtcacgtcatcaaggaaataattgcaccttacggtgttcctgttagcgagcgtccacctgtgcccacattggaggaaaggatagcggattacgaggccaagaaggctgccaaagatgagcggagggcagacaggcgacaagaagaggagaacaaaagacgagaagaaaagcggctggtaaacgaaaagaaggatgccaaacgtcaggcttgggaggaggcccaacaaaaacacaaattggacacctcgacgagcgacgtggactgaagtccctaaatgttaacgtcacaacgcatgaccacaactatctnctgatggtgaaatcgaaacggataatggctggacggttcctacacgaggcacgatagagacatgccnggncgnggaaatgggcaggctctgtacgatacatcgaggagagccgcacagcggaaacagggcttttcacaaa

SEQ ID NO: 180234 - DNA, 584 bp, Zea mays
  Clone ID: MRT4577_95953C.1
ggccgcttttttttttttttttttatcaatggaacccgcattctctaccttgcattgaatatgacaatttaacaaatgtgtcctccacaggccactgttcccatcgtgtaattaatttgtccgatcagcccgcagacaatttttttttttttatgtagaatcgaatggaacaaaaactgttagcgttgcagtttgcagaaatggaatatatagcgatttgtgatttataattgatgagagcaatggtattcgtgtttgcagccttcagtcggatctcggatctcccacgcctccaccgatggagacaccatagattaccacttacaccattcaattcatgaaatgttatcgggacaagtttccggtgacacagaggccggactgccggagtggcggtctggcggagtcgacctacgtggtcgcgcgcttggacggccccgcacggcctttgcccccgccgccgccgctgccatgatcaccgggaagcaaactggcgctgccgcgaacaccgaataggatggaattggtctccgagccgcaggcaaaaaaaccaatacctttttttttttttttttcccggccga

SEQ ID NO: 180235 - DNA, 282 bp, Zea mays
  Clone ID: MRT4577_95954C.1
tggttgcatcgggggacacccgggcagacgcgggggcttttacagcggggccgggggggcaccaaaagacaggcgccccgccacagccgtgcgccgcccagccggcgcactactcgagctcctgctgggccgacaatcccttttctcatccctacgcacagggcaggggcacacaggaagatagatcgagggcccctgagcgcgatgtcacagaaatgctccgcgaaaggaccgtgaggactcacaggggaccaagctcggcggcacggagggactactacg

SEQ ID NO: 180236 - DNA, 270 bp, Zea mays
  Clone ID: MRT4577_95955C.1
tccacatcattgttaaactaatgttgttctatattaacattattatggatatttgggggtcataggccacacacaggtgtgctgcgcgggaagccccatgctccaatcaaagggatttttagtagtgcctctaagcaagcaccgatgagtcagtcccacgtattttcttttttgtcagtattgtttgggaaggagacatgccgggatgtgtcatcgtgccaaataccacatttcctgttggcacagtttcacagaagtaaacataagcat

SEQ ID NO: 180237 - DNA, 302 bp, Zea mays
  Clone ID: MRT4577_95956C.1
ctcacgcatttgataatgcttagtcgtacgcatcgatcgcaacgtttgatcaacactttgggtccctggttgatctacaagtggccccatcttccactatgttaaataatgaacataatgagagtgcatcttcacatgatcttgatgatcaatgctcctgcatccatggcgatcctgaagagttagatggagctgttctactcctcatgagcttgtcccactttacatgtacactgacaatcatctttgctcttctttcagtgctgtgatactaccagttctacctgtcaggaaatgccact

SEQ ID NO: 180238 - DNA, 216 bp, Zea mays
  unsure (1)..(216): unsure at all n locations
  Clone ID: MRT4577_95957C.1
tccgctacggcgagaccgaccgctcgacccttctgccggcgatgcgctcctgccttaactggccgggccgtgcctcggcgccgttacttgaagaaattagaggctcaaagcaagcctcgcttggatacattacatgggataacaaaaactggtggccacccatccgatcccacccggagcactcggnagcggcnccgcgcaatggccacncacgca

SEQ ID NO: 180239 - DNA, 283 bp, Zea mays
  Clone ID: MRT4577_95958C.1
tctcaaagctgctcgctcataggcttcccattgaatcctgatttccctattttcaacagtatttgcagtgtgatattatcatttgtacgtcttaccgtcttagtaggtgcggagtgctgtgaaggtgattaggtgaatatgggtccccacatagaagtttcatggcccatagatccccaacaggttgagggtttagggataaattcattattcaatagatgaaataagtagttcgtatgagtcatgaggactgacgtatctaatgtactaatacagtacaatt

SEQ ID NO: 180240 - DNA, 432 bp, Zea mays
  Clone ID: MRT4577_95959C.1
atcgtattatggggtgggttcattagtttttggtagggattctattttttatttgtttgataacggaagaaaaaaaacctgagaggcttgaaaagggtgacccacccgtacggagagaccttacaacaaaccatgacctttagggcgaaccaaacaaaaatgctcggggggggggccaaaaactagggggtggtaaaaaataccttggggcgggcttttttagaaagacttttatccctgccaggaattgtgaaaaggcgggggcccctcggggggcttcgaagggacaaaaggtgggccccccttttttctagggggggaggaaacgaggccccctccccctggctatacggccacaatgtgtccaaaagaaaaaagggggccataaataaaaatttgggggcaattgatgtccccccccctcttccccac

SEQ ID NO: 180241 - DNA, 755 bp, Zea mays
  unsure (1)..(755): unsure at all n locations
  Clone ID: MRT4577_9595C.1
caggcgctggatgcgctgggcttgaccccgaccgcgcccggcttccgccaccgtcgggcgcctacgtgnccgacggccgccggggcctcgcttcgaggacttcgacaagctcccccgcgcgctcggggacgcctttttcggcgcactgggaggccaggacgacgccaccgccncggcggacggcgccggcgccggcgccgaggaggacgagcaggagatgcgggaggcgttcaaggtcttcgacgtcgatggcgacggcttcatctccgccgctgagctgcaggaggtgctcaagaagctcggcctccccgaggccagcagcatggccaacgtccgggagatgatctgcaacgtcgaccgcgacagcgacggccgcgtcgacttcaacgagttcaagtgcatgatgcaggggatcaccgtctggggcgcctgactgacctcatcgtcgtactgtgtggcaactggcatggtggtcccgcatttcgtcgagacagtcctgcgtctgcgtctctaattgaagaattctttagtatcgtccttcacatcactggtctagtggtgatgagaatgccctgtcctgtgtgtgtgtcacataaccatggtatgtaatgtcatactgtaaattaggtatatgatgatgatgacagctgataagaaaatgtatcaaactgggctattctaatcattgtcaatcaatgtcttgggtcggcttagttatcaaacaactaaactcccctcactttttcttcctacat

SEQ ID NO: 180242 - DNA, 290 bp, Zea mays
  unsure (1)..(290): unsure at all n locations
  Clone ID: MRT4577_95960C.1
aattagctagccaatggttgctgatttttaactagctaatttttagctacctaatatttagctacctaatatacaatggagcactttcaggaagtatttaggggatcgtcgcagcagcgtgagctggaactacaagtaacaactcttaaacaacagctccaagaagctgagatccattataagcaagacatgattcttctcccaagttttcattttgcgctctatgctaattcacatgtttgacactgctgatttttgtttatgttacttgaaagtttanagatctcttg

SEQ ID NO: 180243 - DNA, 315 bp, Zea mays
  Clone ID: MRT4577_95961C.1
gctctcgtcctcgctgtgcggggggagcgtatgggcaccttcaaggagcataggactcatggcggttggagacgcaagaaaggttctgctgcacgcggcgctggacaaagggcaagtgcggatgatgccggccgcaaaccgtttctttcttgctgcgtcaaggccaaggcgcgggggggtggagccgacgtcagctgccatgatactgaggtttcagggtggtggacggagcccagcacgcggttgtggctaaacaagcaaagaggagtgcttcaataacccgatgtgggctgggagaggctcattcatctgaaa

SEQ ID NO: 180244 - DNA, 423 bp, Zea mays
  Clone ID: MRT4577_95962C.1
aaggatacaggcgcaatttgtaacggacattcaaggaacgctgttcagcgacacaacaaacttactgctgattgcctcaaatacacagatttccatagctggtgacccaaagctgctgcattttgacgacaagcattttgagtatgaccaatgcccaacatgttgactggacttaatcagtgaataggctgctaagggtgctctatagctggaggatcatcaggcggctcctattgacctacacctgtatgcggaggctgtcgagatgaactatcttgcgcctgtgctggtggagctagcatacgtctgggaggagcaaattgtgttcggttacgcatgctctgccgaggaatggaccccccgtaaagtagtggagttgtctcgcccaggacacgccgtgcacggttataaccccgggccccc

SEQ ID NO: 180245 - DNA, 169 bp, Zea mays
  Clone ID: MRT4577_95963C.1
gtgaccgggatccccatccgtcccagcccccaagaacccagagctccaaacctaggtcggagccgcggtgcaagcagttacgtggtggattgtacgtttggctctggaggtcccaagttaccaacgcttgctggagttgaaatctggagtacttccaaaggatacaccg

SEQ ID NO: 180246 - DNA, 114 bp, Zea mays
  unsure (1)..(114): unsure at all n locations
  Clone ID: MRT4577_95964C.1
cntgtcctncacattgatgaggcccttacganctgctanccttcaaccggtncggacgagattctagncttatccagaagactcccgctggnncaacccagtggatggcagtat

SEQ ID NO: 180247 - DNA, 400 bp, Zea mays
  Clone ID: MRT4577_95965C.1
aaaaagattgttctttatttttttaaaaagaaggtatacaaaaggacgggtgcggaacgcccgagaccgacaggcgggagccggccggggaggccggaccggggaagggggggggggcaactgccgggataaagagtggtcatagaggggggcggaataaaggtgggagccgttcacgggggaaaagaagactgggggaaaaagtacaaagagcaaaggcggggggagcaaaagggggggaggccggaggggcaaaggggggggggcactaagagggagggagttgggaataatggcggggcgccaactggaaaaaattgagcaacaaaagcggaaaggcacggggcataaatgggggagaggaggtttggggatagggcgccagggcggggaacccctg

SEQ ID NO: 180248 - DNA, 307 bp, Zea mays
  Clone ID: MRT4577_95966C.1
ctaggttcttattattgatttgttttgcttttttatgtgatttattttttacgataaaagaagttttctatcaaaaaggataaaagagaagccgatgcctgattcaatgatcctgagaaagcaggcgggggggtcactcattgtgacggatgatcttcatataattcgtcaaagcatatgtgcttgccgcccacccacatatggctgcattggaaatgtatggcggcgccccctgtcgttgctagagcctaccccaagttggcattcgaccacaggttaataacggctcgaaagcttggcagtgaaa

SEQ ID NO: 180249 - DNA, 631 bp, Zea mays
  unsure (1)..(631): unsure at all n locations
  Clone ID: MRT4577_95967C.1
cgacagaagcgtggcaaaaatggttgggagcttggtgtcctgggctcttctgatctcgcatgggggaaggcagagagtagggatcgatgcgaaagcggccggacttggtgggtccttctacgtccccgaccctggggtcctcagtcaatgggaaggcagacagtacaaaggntgtgcaggagggctggccttcggcgtgggtcggacctgggaagaagacaatcctcccaccccagggtcaacattcctgtgtcgtatacatcaacttcacaggcccttgcgaggtctacgtgaccatccaggtggagggtaatctggtggacaccacgcacctaagccagtacaaaggagcatggggagtggatcgagatactacgcgtggatatcctggccatcaccggcggcggaaaccctgagggaaagatgccaggcgtgtggagtaagaactcctgcagcaagaagtaggactgtaatatacttcccaattcgctggggatggacttcggcaaacacgggaagatgaccgaagtctgcgctgctcaactcccagctcttccacctgaacatggacgcgttgcaacaacatgcggagtcaagacgtgaccgtgacgtcgcccggggacagccccac

SEQ ID NO: 180250 - DNA, 362 bp, Zea mays
  Clone ID: MRT4577_95968C.1
ggggtatcttgaaatatccgatgttaactgtgaagcactcccagaagctctctcgcgttgttggaacttgcaggcccttcatgtattagcatgctcaaaacttgcagttgtacctgaaagtatcggcaagcttaagaagcttagaactctggaactgaatggtgtttctagtatcaagagtttaccagagtctattggtgattgtgataatcttcgaagattatacctagaaggttgtcgtggaatcgaagatataccaaattccttgggaaaattggaaaatttaaggatacttagtattgttgcatgctttagtttaaaaaaactttcgccatcagcatcatttgggaagcttttgaact

SEQ ID NO: 180251 - DNA, 809 bp, Zea mays
  unsure (1)..(809): unsure at all n locations
  Clone ID: MRT4577_95969C.1
attcccggtcgaccccgcgtccgcggcgcgtgggcggacgcgtggggttctagatcgagcggccggatctgcctcgtccgctcggtcgtctactgggccgcgcagctgctcggcgccgtcgccgccgcgctcgtgctcaggctcgccaccggagggatgcatctgccggagtacgcgctggcggtgggcgtgagcggatggaacgcggcggtgctggaggcggccatggcgttcgggctcatgtacgcctactttgcgacggtgatggacaaagcgcggagggtccgcgccggcgccggagcgctggcggcgccgctccgactggggctcctggcgggggccaacgtgctggcctgcggcgcgctggagggcgccgtgatgaatccggcgcgcgcgttcgggcccgccgtcgtgggctcccgtcgctggagacaccaatgggtgtactgggtggggcccatggtcggcgccggcctctccggcgtcgtcttcgagcnnnnnnnnnnnnnnnnnnnnnnnnnnnnnngggagagcccggcgccgagctggtgcgtagaggactacatgcatgcgggagcgcaggacgtcgtcgtcgtccccgctcctcgggaatcttctgaattaaaaaccagctgggacgtgtgttcaattgttgtgtgtcgtggtcgatcatgagtagaattaatgtttcatgcatgcactcttaccgtcttctacttatgtccttgtttgcttcaataatctggcttgtgcgctgggtgtagttcgatcgccattatgctattactctcttctccccccctccttcc

SEQ ID NO: 180252 - DNA, 577 bp, Zea mays
  unsure (1)..(577): unsure at all n locations
  Clone ID: MRT4577_9596C.1
aattcggcacgaggtgcacattcacgcgcccatccaaaactgatactccgacccaccaaaagcagcgaccattaatttcctcttcctttttattaactccttggattaaaccaatcagcaaattcttgcccgtggaaattagaattccccagcagaaataggtgcatcgtcgcgttcttttaatctagtaaaattcttccattttttcagtaatcctttcccttcccctgcatcgatcggagtatcggaccaagaacagagggtagaatcaggtagaaagaaacaagaactgacttagccagtggtaattccggcctccatttggtggatttatccaatacgatggcaagagtgtccggtgaatcgtgacttaattcctgacgaaatttctcgtggntttccgtggacaanagctgtgacctttgcgatgcagtacaaccaccgtagccgcttgccgccngcgccgccgttcggccgtggtggggtatcctcgcggccacaagcagccgtactacgctcctcctcctctccgccgtttccgccggcgccgccgccgccgccgctagagcgcaagtac

SEQ ID NO: 180253 - DNA, 526 bp, Zea mays
  unsure (1)..(526): unsure at all n locations
  Clone ID: MRT4577_95970C.1
ngaaaaaaaaaaaaaaaaaaaaaaaaaaaaaaaaaaaaaaaaaaaaaaaaaaaaaaaaaaaaaaaaaaaaaaaaaaaaaaaaaaaaaaaaaaaaaaaaggggggccgttgggggggctcctatttggttccagctttcctgccccgtccttgcttttttttagtgtttcttaagtgcaatttattggccgtcgtttgaccacgttttaactgggaaaaccttgggaaacccctgttttttccccttttaatccattcccttttcacccccttttgtcatgcgggagaggcccgaacggggcccccttccaaacactttcccaacttttgtgcccattgggtggccccttgtaccggccctttaacggcgctttatgtgggggtttcgcgcgggttacccgctacatttcccttccccttgccgccccctttttgccctttctttccttttttttccgtccctttcgccgcctttccccgggattttctaaacagggggttccttttggggtcccttttgggtgctt

SEQ ID NO: 180254 - DNA, 1738 bp, Zea mays
  Clone ID: MRT4577_95971C.1
tacggagccccccacatccgaaacccacaacaaaagcatcgccaaggtacgtagaacgtagccatggtgtcgtccggaactggaagcattgccaagaggtggcgcgagctccagggcgagaagtcgtggaagggcctcctggagccgctggacatggacctccgcaagtccatcatctcctacggcgagctcgtggcggccaccggcgacggcttcaacaacgagccgcactcgccgcacgttggcctctgcaagtacggccacgacgacctgctgaccaagtcgggagtggccgccgccagccactacaaggtgaccaagttcgtgtacgcgtgggaggattcgaagctcacctggatagggtacgtcgcggtggccacggacggcgagggcgtggcagctctagggaggcgcgacatcgtcgtggcgtggcgcgggtcgatgacaggcgcggaatggtggaaggacgtcgaggttctgccgacgtgtccctggccgacgctgggcctggaggaccactccgtcgggcacgggcacccgtgcgcccgcgtgcacagtggcttcctgtccttgtacacggagccacccaagccgcccaaagacaccaactccgacatggcgttctttgtcaacggcagcgccagagaccaggttctggcggaggtgaggaggctgatggagctccacagggatgaagacaccagcatcaccgtcgtcggccacagcctcggatcggcgctggccatcctgaacgccatcgacctcgtcggcaacggcgtgaactcctccggcctcctcggcgggcggcctccgtgcccggtgacggccatcgtgttcgcgtgcccacacgtcgggaacgacagtttcagagatgccttcacctcgttcaagtacctcaaggtcctccacgtcaagaaccagcaagattgggtgccgtttctcatgggctggctacatgacctgggcgtcacactgcacatcgacacggccctgtcgcactacctcaagaagcccaaccttgtcacggcccacagccttgagagctacatgcacgccgtcgccggcgaggtgggaagcgacggcaagttcaggctgctggtggaccgcgacgtggcgctggtgaacaagagcgccgacgcgctcaaggacgagtaccatgtgccggcgagctggtgggtgccgcacaacaagaacatggtcaagaacgatcaaggcaagtgggagctcaaggattttgagcaattctgacctgaacgtctatataataataataataataataataataataataataataataataataataataataataataataataataataataataataataataataataataataataataataataatctctctattttaaattataagtcgttttgatttttcaaaatatatcgtttttattatacacatagacgtactatataataaaaactatgtatttagaaaaatcaaaatatcttgtaattaattagaaagaccgacgagagtatatatatgtttgtgttgtttcctcttcaataatgccacgcgaggcaccacaaacgatggagtgtatgtatgccatattgtaccatgtttgcattttcgaatataaataaacagctagatatatattttatataattcctcaacttgtttttcctcgatcctttatttgggtcattttctttatccggcattattccatattttttagacacctttgatg

SEQ ID NO: 180255 - DNA, 1267 bp, Zea mays
  Clone ID: MRT4577_95972C.1
gctgcccctctcacacacacatcgttgtccaaacaagagcggcgcggctcacggcggcctagctcgccggcctaacgaggccagatattccttaacctagctagctaacagctgactagatagatcgatccatcagctggcagccatgaatatgatcagggcagtacggcgccggttcaccgtcggccacctggctacggccaaggaccccgccacgctgcgccacgcggccgccgagctcctcgccaccgccatcttcgtcttcgccgccgagggcgccacgctctctctcgggaggatgcaccaccatgacaagggcggcggcggcctggcggcggtggcgctcgcgcacgccctcgcgctcgcggccgccgtggggtgcgccgccaacatctccggcggccacgtcaacccggccgtcaccttcggcgcgctgatcgccggccggatctgcctcgtccgctccctcgtctactgggccgcgcagctgctcggcgccgtcgccgccgcgctcgtgctcaggctcgccaccggagggatgcatctgccggagtacgcgctggcggggggcgtgagcggatggaacgcggcggtgctggaggcggccatggcgttcgggctcatgtacgcctactttgcgacggtgatggacaaagcgcggagggtccgcgccggcgccggagcgctggcggcgccgctcgccgtggggctcctggcgggggccaacgtgctggcctgcggcgcgctggagggcgccgtgatgaatccggcgcgcgcgttcgggcccgccgtcgtgggctcccgtcgctggagacaccaatgggtgtactgggtggggcccatggtcggcgccggcctctccggcgtcgtctacgagcacctcgtcgccggcccggccgccgaggaggaggaggagcccgcgccgagctgcggcgaccgccgtcgtgcgtagaggactacatgcatgcaggagcagcaggacgtcgtcgtcgtccccgctcctcggaatcttctgaataaaaaaaaacagcttgcatgcgtgctcaattgttgtgtgtcgtggtcgatcatgagtagaattaatgtttcatgcatgcactcttaccgtcttctacttatgtccttgtttgcttcaataatctggctgttgcgctgggtgtagatcgatcgacattatgctattactctcttctctactaatccttaagagctcaaagaaaaaaaaaaaaaaaaaaaaaaaaaagcttgtacctgcccgggcggccgc

SEQ ID NO: 180256 - DNA, 222 bp, Zea mays
  Clone ID: MRT4577_95973C.1
cttccatttggacccacttgccacatttaaagggccatagggggcccacaatgggcgcccaaatattttggtttcctatgccccctgggctttctgccaaggttgtgacccgaacccattttccacaaaggttacaaacttctataggtttccttttttccccataccctttaacaaaggggggtttaaaggggggaaaacccatttgttaaaccttcccgg

SEQ ID NO: 180257 - DNA, 886 bp, Zea mays
  Clone ID: MRT4577_95974C.1
ctcgaggccggcattgttcgttggcagcgagagttggagcgacgggcaagccaatccagcatgggcggcggcggcggcgtgcatcggcgagcggcggcgctgctcttcgtggtggtgctagccgcggtggatcaggccggcaaaagcgtctgcgaggcgcagctccggcgcgggtactacgccggcgtgtgccccgacgtggagtccatcgtccgcggcgtggtggccaggaaggtccagcagacggcagccacagtcggcgccaccgtgcgcctcttcttccacgactgcttcgtcgagggctgcgacgcgtcggtgatggtggcgtcgacggcgaacaacacggcggagaaggaccacgtcatcaaccagtccctggccggcgatggcttcgacacggtgatcagagccagggcggccgtggacgccgtgccggggtgccgcggcaaggtgtcctgcgccgacgtgctcgccatggccaccagggacgccatcgcgctggtgaacgaatgcgcgcaggccggcgggccgtcgtacgctgtggagcttggtcggctggacgggctgaggtcgacggccagcagcgtcaacgggaggctgccggcgcccttcttcaacctggaccagctgagccagatgttcgccgccaacgggctgtcgcaggccgacatgatcgccctctcagccgggcacacgggtggggctggcacactgcggcacgttctcgggacgtctgcgggggccgtcggcgccggaccggacgctggactcggggtacgcggcgcagctggcgcgtggtgcccgaccgtggtggacccgcaggtggccggggccatggaccacgtgacgtccggcgtcttggacaaccagttcttccgcaacctgc

SEQ ID NO: 180258 - DNA, 470 bp, Zea mays
  unsure (1)..(470): unsure at all n locations
  Clone ID: MRT4577_95975C.1
aagctcttttcttaaaaaattttatatttttttttttttctcttttttttaatttttttttctttttaattttctttttttttcttccccccccccccccccccccccnnacccaaacccctcccccnnaaaacccccccccgggggggggggaaaggggcccggggccgcncnaacaaaggcttggaccccgggccgggtttatccccgccccgcgaagcggaccccggccgcgaccccgctngggcgagtcccagcccaccgggcggccgnccccaggggacccgagcccggnaccccccttggcgggggcagggccatagccgnnccccgggggaaanggtncccccccaccncnccccccccctcccacccgggagcccaaacgnaaagcccggggcgcccaccgggggagcaacccaccccnctcgctngcgcccacggccccgcccccaggcggaaaacccgcc

SEQ ID NO: 180259 - DNA, 489 bp, Zea mays
  Clone ID: MRT4577_95976C.1
ttttatgtcatacttagcgaatgccaatatataggggggggagaaacagttggcgtccatagagcgatcccaaatgtaaatacatagaaacttgttaaaaagataatatggaacttgtacaaaaaaaacagctggattcagcacaactttgtcattcagactcagttccaaattctggttagaacaccacccagcgagttaacgtgacatcacaccagaaatttccagtgcctgatgaaattatactacataaactgaatttagataacaataaacagcaatctggaaaagactaaccacagctaaccaaagcaactcgacattttctccacaacccaagataaaaggtcaaagcaccccaaaattacttagatatgcaagtctatgcaaaacctattattaacgtgcgtgtctgtaggatgctacatcccaaacattataatgaagttggtcttaatcctgaacaatcagtgacccagacagaatgag

SEQ ID NO: 180260 - DNA, 185 bp, Zea mays
  Clone ID: MRT4577_95977C.1
acccacgcgtccgatcgtcgactgctgctgcgttctgttccgtttcggaaaatgtccttggaaaccttccggttgaaaaccccccggttaaattacggcaacggcaagatcaattcggattaccgctacgacacaaccgaactcttccccccggagaatggcggcggcgcggtgtgtgtggtgcc

SEQ ID NO: 180261 - DNA, 335 bp, Zea mays
  Clone ID: MRT4577_95978C.1
aaaaaaaaaaaaaagaaaaaaaaaaaaataaaaaaaaaaaaaaaaaaaaaaaaaaaatcaaaaaaggcggattctcgaaaggttacaacgttttcctactctataaggtaacactcagggctcttccaatgggtgacttagcttcattttcttagccttgtttttacaacgtccatgcttgggaaagctctggcgttatccggcttaatcctcattgatcgtattcgcctcttgtaacactagcgtcataaccaggaggatgagcccgatggcccttcccatatagttgtccatcgtgactgtgcactggaactctccctgtgcctcctcttttg

SEQ ID NO: 180262 - DNA, 1383 bp, Zea mays
  unsure (1)..(1383): unsure at all n locations
  Clone ID: MRT4577_95979C.1
gccccggccgggccccgcacctcctctcgtctcgcgtccaccgcccgcgcctagccctctcctcgcgtgcctctcgcctccggcgccccaggccgtgcttgcctgccgcgcccaccgccggtccgcgctcgcgcctacacggagcatcaggagttcaggcgcggcgaacagggggaagaagcagccaacctcgctcgctactcgctagcctagtcggcggtcgccatggggatcggctacgtagtgggcgttctcggcggcgccatcctcgcccacgccgcctacgccaccatccagtaccgggcggtgctcaagatcacggaggaggagttctcgcggccgcccatggatgtgatgatggagttgctcctagggttggctttgtgcatgtgggcaggtcttgctgttccagcgaaatttctctcagtgctcccacattctgaggagaataggatcgtctcgttcccggctaacctggatttcatgatcttcaaccaccggggaagagcgctgccgtcagactcagacctgaagctcaagacatagacatgccgttccagaatccagatcttgttccttatttcccttgtaacctggaggaggttccaattttgtgcccgtttgtttaggggggaaagaacttttcctgaattcagatcacaagtagcttatctatgctgtaactcgataatttgtggcgtcttaatttctactatctgtatggaggtgattcaagcttttgttgtattccgagcagatcaatcctgtgattaatcagtagcttttgttacccttgctgcacgttccagttaacgaaaactaagagcctgtgtccgggatccaaggctggatgtttcgtatcacaaaggagctgaccaagttctcagttcattgttggacttcaaacctgccgaatggggcttgccggcatttaaagagtagacattccatacaagattacaagagtctagtgaagaagaatgtgagatactccctaagatgcaaattaaagagtacaattctataagatgctgctcaaggaaaattccataaaatgttggtcaaacatacaattgaacattcttgtcgcctcttaactatgtctcaccaaattactctgaattagttcggttacgattccgatataataatatccatgtctttgttttcactacaaaaaaaaaaaaaaaaaaaaaaaaaaaaaaaaaaaaaaaaaaaaaaaaaaaaaaaaaaaaaaaaaaaaaaaaaaaaaaaaaaaaaaaaaaaaaaaaaaaaaaaaaaaaaaaaacccccaaaaaaaaaaaaaanggggggggccctttttaaaaaaaccaaatttttcgccgggggggtggaaaaaaaaatttttttttttggggcccc

SEQ ID NO: 180263 - DNA, 433 bp, Zea mays
  Clone ID: MRT4577_9597C.1
gggtcgggtccacgtccgtacacacctccatgagcaccaccacgaccacgatctcgcacacggtcccgcccacgtcgtcgaccacgtcgtccaccgggaacttgaccgggtacctgtggaatacgccgtgccacatccggagccccatctcgacgaccacctcgacgacccccacgtgcacctacaccggcacctacagggacagcgacagggagtgggtcaaggggcggatcccgatccggacgctgatccagtcggtcgtcccgtcctacatgacctgctacacgaccagcctgacgcggaccatgtccgcgatcaactgcgtcaggtaccgcttccggtcctcagacccctggacagtctcccgcaacgtctagccccacgacgacagccgcctcttcagcgcgggcatcaccgtcggcacgaccatccg

SEQ ID NO: 180264 - DNA, 164 bp, Zea mays
  Clone ID: MRT4577_95980C.1
agaaagctttgacgtaatcaattcagatcagagcctctcgctgcatatatatttacaaataccaagaagcttaaggagcaatttgttatgactatgtcagctggcggtttggttgttaatgacactactccacatcttgcagttcatacttgaccatttggggg

SEQ ID NO: 180265 - DNA, 388 bp, Zea mays
  Clone ID: MRT4577_95981C.1
acccatacaacaacacatactctaactctagatttgcgttctcaaccacttattttttttattacgagagggtcaatactaaactgtgactagactcacacaagataaccatctttacattttacagcaaacgaccaccagtaagaccttatcaagcatgctacaaaaaccgaccttgctgcaatggattttcatcacacaaatctaacaataagtctctgtaatgtacatccacctacctacacatattgcgccatacacgcactgtttgttaccatatcatctggacagtcattctttcatcacataataattgctcttctacgactgtcacaactatcagtccaaagaccatcttcaaatactgacatttcaaaattttgataca

SEQ ID NO: 180266 - DNA, 886 bp, Zea mays
  Clone ID: MRT4577_95982C.1
ctcgaggccggccgggccgggctctagtcttccgtcgtctcccttctttccccttcgctcgcttctcttctttgccgtccagtcgtcgtcgtctcctcgtgggctcgcggccgtggcgcattaaggattcgaacccactcgtcaaagagaatccatccgcaaaatcgaaagcaacagcagctgattattaaagccccgctttttcaaaagccgcaagggctatacccctagttgtaaattggcggaaaggaaattcgcctcctcttctccaattgcagctgcagttgcgtgctcgagaggggtgaagaacctagaagccctgccagcgcgcggcgccggcgccttgtttactctgcgacggcacgctgattgcattggtactgttcttctcctgatcaccacacatgacaagggtcatccatgactccggagatgacatgcagaaggaggcacttgatttggtctcatctgacgttaatttccccaagggccatttcccagactataggattggaccaaacaaccaaatcattgatccagaggagacacatgaggctgtacctctcaaggagattgttgcaaaggaaacagcgcagctgctagagcagcacaagcgtctttctgtgcgtgatctcaaggagaaatttgagaagggtctatctggcgcttccaagctttctgaagaaggccaagcggcgagaagccgcttcattagacaggcaggttcttcttaagaagctcagagatgttttagacacactgaaaggccgtgtggctggtcgaaacagagacgatgctgaggaagctatctcactggtggaggcactagctgtccagttgacacaacgagaaggggagtaaatttatgagaaggctgaagtaaaaa

SEQ ID NO: 180267 - DNA, 321 bp, Zea mays
  Clone ID: MRT4577_95983C.1
acgtggtatgcccgtaggagaagagcaagtggcggcgcctgtcgcgacgcgactaccggaccccgctggtcttccacgacggccagctcgcgtttctgccgacgccactcaacacggtggccatgttcacgtggcttcctctgggcgccgcgctagagatagtgcggctgtccgtagcgctagcgctgtcgtgcaaggtctgcacggagctgctggtgggcactggacagtcagggcgcctccgaggctcactcccgacgcctgggaacagcggcgggtccggacagctgtacgcgtgcaaccaccgtacgctgatcgacc

SEQ ID NO: 180268 - DNA, 836 bp, Zea mays
  unsure (1)..(836): unsure at all n locations
  Clone ID: MRT4577_95984C.1
tgggtacctcgaggccgtccgctctcttctccctcgcgctcggcagtcggcagtcggcacagcgacggcggcggcgctcgggctctcagcgacggcgtcagcggcttcccctctcgcttcgcgccctcgcctccggtcctccgcacaccggtcggtgaccctgtgtgcgtgcctctctctctctccttcccccctctagtggatcgtcaacggcttccggccccgcaggcttcgccgcgcgcggcctgagggcagcgggagccagcagccgctgctccaccaaggcgatcgcgccgctttgagagcgctcatgccccaaagcgaagcgttacccatccttttagcgcttcagcaggctcaagagtgcgcttagtgctgccttttggaattctcgttcctggccaatttgtcatcagatcaccatacatgacaagggtcatccatgactccggagatggcatgcagaaggaggcacttgatttggtctcatctgatgttaactttcccaagggctgtttcccagactataggattggaccaaacaaccaaatcattgatccagaggaaacgcatgaggccgtacctctcaaggaggttgttgcaaaggaaacagcgcagctggtagagcagcacaggcgcctttctgtgcgtgatctcaaggagaagtttgagaagggtctatctagcgcttccaagctttctgaagaggctaagcgtcgagaagctgcttcattagacaggcaggttcttttgaagaagctcagagatgttttagacacactgnaaaggtcgtgtggctggtcgaataaagacgatgctgaggaagctatctcact

SEQ ID NO: 180269 - DNA, 201 bp, Zea mays
  unsure (1)..(201): unsure at all n locations
  Clone ID: MRT4577_95985C.1
gaattcgggtgaggcactgcacaaagaatgctgtatgtattccccgtttgagattctattccgacatggcctggtttggcggcgttgtactctggatgtgacgagatctgcacgggcattcggagcggagtttgcccatcccatagtttagactcttcatgatggttgnggatctgttgcagctgaatgaattaagacagg

SEQ ID NO: 180270 - DNA, 591 bp, Zea mays
  Clone ID: MRT4577_95986C.1
aacggcccttccccgggcttgaaacaaccttcggccacccggggggaaaaccaaatcagccgggcaaaaaaattttccggggacccctcgggaaacattttttggaaaaaatgggaccgggggcccaccccaaaaaagggggccccccaaaaaaaaggggctttgcccccccccgggttttccaccttcctggggggaactactaaaaggccggccccgggggggggaccccaaagggccaaaaaatgggatcatggaccttgggggggggccaaccccgggggaaaaatccccccacattgtccctcatgggagggggcccccagggggggaaaaaaaagctgggggggggggggttcccaaaaaaaaacaaaaaactttcgggaaaaagcctgggttccttttggaagggggggggccccaacaaaaaacccccatccggaactaccccataaaaaaaaagttggccatcccccccttaaaaaaagtctcccccctgggccacaatttttttgaaaaacacatccccggggctgaacccaaaaaccgaaatcccggggggaccccgaaaaacacaatgcccaaaatttt

SEQ ID NO: 180271 - DNA, 441 bp, Zea mays
  Clone ID: MRT4577_95987C.1
cgagcgactacttacttaacagatgcccatccaatggacgaaggtgggccggttggcgctactgctttcgcatgacctggccagctgcacttatatgcggtgcttccctgagcgcgctcgcggatgcgaatccaccgacgtttcccgaggcccagggccgcgtgtgcctgttgtgcgctgacacgagatgcaagcagctgccattccacggttgaaacttcgagcaaggagcaagccaagacttgcagctgcataggcagaccgacagactgaacaaactcgcctgagcctatctgtcaaactatgacccaatatcgagaaggcatttcttaccacgcactaaagagagtagcgagaacttgaactcaacactagagaacactatggcttgcactgaagctgccacgaacacaggcaagtcatggagggcacaagatgaca

SEQ ID NO: 180272 - DNA, 259 bp, Zea mays
  Clone ID: MRT4577_95988C.1
ccaaactggaaacccagggtttttccttttttggactttctcccgttggcggggaatctccacaactgggagcctttcgcccttacaaggatgaccacaaaaaaagcacaaaagtaaggggggggggggcaccacacccaagactcaaatcacggcacattcccccacacaggtcacacctggggctaaaaacacaccccagggggttcacaacggaggcgtcccgatccttggggactaaaaggggatccaattccta

SEQ ID NO: 180273 - DNA, 167 bp, Zea mays
  Clone ID: MRT4577_95989C.1
tagcccgatcagatcgatggggggggtgccagagcttacagcgtgtcttctcgcgctcctacaactcctctttgcgctgtcggaggggtgcgcgttcgccaccggcgtaattacaggtgcgccgaaagttcccgcgccacggaggacggggtgtggttgaatatatt

SEQ ID NO: 180274 - DNA, 1344 bp, Zea mays
  Clone ID: MRT4577_9598C.1
aattcggcacgcaccaaacccgtgccattctcgccgagctcgacaaacgcttttccgccatcgattccaagtgggagctccgcgtcggtgccctggagtcccaagcgaaagagttcgcccgccaccacgaggacatctcctccacgatccgggcggatgtcgaggcgcacctctcagcggccgatgcggataccctggaccggatccgctactgggaggcatccacaggtgctcgcgttaccgccctggagtccgccatccacctgctcgatacttggcgtcctcgaatggggtcttcagtggatgctttccacacctccatggatacagttcacgctgaactgtccaaaatggagatccaatggtccaatggagcgcgcgttgacggcttctccaggcccagcctccttgacgcgcgcgaatcggcaccggcgcgctcacctgcgcccgtcagcttcgccgatggctcatgttttgggccccgcctttcctctactaaccgggactgtggatttgggccctatgtggtcgatctccacttcccggtcaagggagcgctcccaaatgcaagatttggttcatcagcacttggttcgagcccaactcaggatgcagcgtcaggctgacaaaaagcaggtctgagcgctcgtttgccatcggtgattgggtgtacatgaaactccagccctatgtgcagtcatctgtctcgctgcgagctcatcataagctgagttttaagtattttggcccatacaaagtcacagctcgggttggtaaggttgcatatcgtttggacctgccggtctcaagtaagatccacccggtggtccacgtatcacaactgaaactggcagcaggttacaaaggccctgctccagcaactctgcctctggatttacctgaattcagtgttcctgttcaaatccttcagacgcgaggacttaccaaaggcaaccgtctcgtacagcaaggccttgtgcagtggtccggcttaccttccgacctggccacctgggaagatcttgaagctttccgtcaatgttttcctggtgctcctgcttggggtcaagcaggatttcaagggagtgagaatgttacaagccaggcgtcagtacctgatcacccacaggagcagccccagcgtcgcaagcctggaacgcgtgagcgtcgtgctaatgtgcgcgtcacagcaccggagtgggtgtagctgtgtgcatggtgttcctgcctgtctggtggaccagttgtgtctggtggtggaattccttatgtattgtgaagtctgaactagaaaggacatgaaacaaacaaagagaaaatatctattccggccagttcctatcg

SEQ ID NO: 180275 - DNA, 307 bp, Zea mays
  Clone ID: MRT4577_95990C.1
tttctttgcaagcaggccgaatgtgctagagctagacagaagtcagtctccttcccctctttagagctcaccggctccttccgtcgccatggacgtcctaatatgctgctggctgctgcttctcctggcctccgccgcgtccgccggcagcgagcggtgcgtgcggcaggggaaggcggcctactctccctcgctctccccggcccctcacggtagcagcggaccgtgcgggtacagcgccatgggcggcgagatcaatgggggcttactcgccgacggcgggcccaggcagcaccgcgggggcctc

SEQ ID NO: 180276 - DNA, 288 bp, Zea mays
  Clone ID: MRT4577_95991C.1
agcaaaacagaagcccaccgcgccggcaagccgaagcgagcgcggagctaaagatgccgcggaccacgggggaacagagctccgggtgcccgcctctccctgccctcaccaccgacatcctcagccatggcaaaggcttgacggcccacacgaggccagctggcgccgtacaagccggaaagactacgagcgcgcacagacctgcccatgccatggttgctgtctacaacgacaagaacgccgccgacccgcgcttggctgacgacacgctgaacagcgtgaatgagc

SEQ ID NO: 180277 - DNA, 536 bp, Zea mays
  unsure (1)..(536): unsure at all n locations
  Clone ID: MRT4577_95992C.1
gtggttttttttttttttttttttttttttttttttttttttttttttttttttttttttggggcaaacctccttgccctggttttttatagttttacttattactggtttacaaaagtctgtcagcatgacaaaaatgttattccaactgggccggagggggggttgtttgggtacccanaccaaccatgaaacagtccccggaaccgggaaatgcagttcctcataagatgcagcaaatcggtttcaaaccccaaacattaggcttaacttggtggcgagggggaccggttttatgggaactcccagcgcgacacccaaaataccgtgcgagataaaaaaagtggcccttaactggggctttttcaaaggaaaatggggcgacagcgggcggtttgctccaccagatgacagggggcaactttttttcaggagtccatttccaggggtgaacatttttgggcgcagagctgcttcaggggaaaatatgtaacccccccaccctttcccccacgctttcccggacccctgggtcg

SEQ ID NO: 180278 - DNA, 1670 bp, Zea mays
  Clone ID: MRT4577_95993C.1
cattgggtacctcgaggccggccgggaacaaagcctgggcctggccgcctggacctgaaaaagtcgttcgggattcaaacccttcgatcccaaatctgccctgcacgcctcgccgccggccacacccccggcggtcgtcgccctacccgcccttctccttacctctaaccccgccggagcccaacacctccccaccatgccgcgaaacttccgcaagcggggcatcgagcaggacactgacgaccgctccgacgacgaggacactcgccgcatcgccctcgaggagatcaagtacatgcagaagctccgggagaggaagctgggtatccccgccgacctcgccgccgcatccactaacgggtcctccgcccgtggtctattgggcaccggggcagcggtcgccggtgaggccgagaaggaggacctcgtcctccaggacaccttcgctcaggagaccgccgtcactatcgaggaccccaacatgttgaggtacgtggagaccgagctggcgaagaagaggggtaagatggttgatgtgggacacaaggaagagatggaccatgtggacgagctctataccgtgccagaccacctcaaggtaaagaagaagaactcagaggagagctcgacacaatggacaactggcattgctgaagttcagctgcctattgagtacaaattaagaaacatcgaagaaaccgaggcggctaaaaagttgctgcaagagaaaaggcttgcaagaaaaccaaaaccagatgcaaacattccatcaagttatagtgctgattatttccaccgtggcaaagaatatgatgaaaaactgcgaagagagaatcctgggttgtacaaagataatgattctcggccaagtggaaatccaggaggcaaagcaacagatactaaaaatccagatggtgttggtgcaggacggagagaagctgcgagtgatgaactcatgcttcagcgtttccgcaaacgagaaaaattccgcgcccttcgaagataagccagagctgacaggttgctagattgtgccagttgcctttgaagctcaaaaatatagttgtggctgcataaagtcccaacatatcatgtccttttagtgagaaacttactgtaaaatgcatccttggttattgagtctgcttctgcagctgctaagggcaaggagcagattaaccttattacagaggcgatttggggcaatatatttgagctgagggatatctgaattttgtgtcagctctgaggctcatatattaagaggggccgcagtggttcaggacataggagctcataactttccagatgctcagatcgtgccatgttcatctgcaatggaagaaaggaaggtgtgttctccgtacaaatataaatgaactgcttcgacatcttgagcaaactccaaggggtagtgcgaatgtctgatctcattttctttggagtgaatggcaaagcctgcaaattcatctttctagtctagaatgtattgtttctctgaattatttgcagtttgctgcagtagcatcagttatctagatttctagggacgagcaatctgtgagttgtttttgttgcactattgctgcttgctttgcctttactagttcaagtatcaattctttataagagttttgagttacatatcgactttgaggttttggccgacc

SEQ ID NO: 180279 - DNA, 182 bp, Zea mays
  unsure (1)..(182): unsure at all n locations
  Clone ID: MRT4577_95994C.1
ggacacagcggaggctaaagtcagtacantttgacccaaagggtggcatgtccgctttaacaacccgatatatctcagacacgtttcctgggctgtgtaaggtggctgtcagcggtattcctatggacaagttcttcaacttggtggtgctggatctggaaggtttgggagaattttaagga

SEQ ID NO: 180280 - DNA, 545 bp, Zea mays
  Clone ID: MRT4577_95995C.1
accaaggtttctagcactacaacaggaagaagctctcgatcataccgacaccgacgaagaagagaccacgtagtgcgagcatggagtggtgatggagggcaccagcaaggctgagtctagacgcctacatgaccaatgcccagtaagccggcatgctggtgacaatctacttcactggcgcctggtgcgtgctatgccgggccatactgccactgatcgtcgaacacgccaagaagtttaatcaggtcgtcttcctgaacggggacatggacgaagtgaacgtaggatcgcgtcctacgagggcgaggtgatgacgagcttccacttggtcaagaatggcaagacgggcgcaaccatcgtgggtgtcaggaaggaagagctgctggccctgattgagaagcatgacgagcctgcgcctgagagtgagtttgactaaatgagatcagatcaagagtcgtcgccaatgatggccatgacgcatgggtgtaaatgacgccgctatcagtcgtggctctggcgctagtggacgatacgcgaactacgag

SEQ ID NO: 180281 - DNA, 497 bp, Zea mays
  Clone ID: MRT4577_95996C.1
acgcgttctattttacaggtcgccagaggtcatatatgggtattcatctgctacggtgaccgacgtccaatcggagggatgggtagacaccatactgacaataggccagacatatcttactgcaacgttgctatatcatgtgcttcaccactggattaaaataacggcatgccaaccacccacagcacagttaaggaaggtctcatacactgtaatggcaagaaaacaagatagcacgactctatgcaaatgagtgaggcacctgactgtcctcaggggactgcacagaccatgccgaaactaggacactcaagctggccactgcaatgggtcacaattggccaagtgggactggaaacacgctctggcatgtcagatcaaaagaatcggatgctcacaacaaggacggacagacagagcaggataatatggagggtttgtaaccaccgtatttgactggagcactggaatgggcactcactccttgagaagacaca

SEQ ID NO: 180282 - DNA, 579 bp, Zea mays
  Clone ID: MRT4577_95997C.1
cgaaagtaaacagaggtgaagacaaagtggctgtacccgttccaggttcaaggaaatgcgcgagcgcaattccagcctgccgtcgaggttttgtaccgtacaagaagtgcacagctcggagcaaggtgctggcgctgcagcctgtggcacctggcgaggaggcagatagagagctcacaaggctgtgcctgtagaattctgggcccttgccacccacctctactctgtggataatttttgctgctactcgaacacatatgactagtacagtacagcagtgcagtactgatgttttgcaggaagaccattctggttctctgctgctacttatgagaggcggattggaactgaagcagccttccacaaatggaggtgactgtgggttccggtctgccattgtatagttcgggactagtgtttccattttcatctcgagtgttgtaattttcccctagctgtgcaggttcagaggtcaatggttgtcatgtgctgtagcaagtaatgtaatagttgtagtagaagaccaccttgtatgagctatatataattatatatgtaaattatgaatgttgttttgtg

SEQ ID NO: 180283 - DNA, 193 bp, Zea mays
  Clone ID: MRT4577_95998C.1
ggtggttatattttcaataaatggggaaggcaaaccgccggacaatctgtggtaacaaactggaccaaaaaaagggtcggtacgtgcccccacaagataccagcactgtaaaaccagccggacaaaccctcaaaagaaacaagaatacacactaggacaccattcgaaaagaagaacaccttctcaaaatatt

SEQ ID NO: 180284 - DNA, 1361 bp, Zea mays
  Clone ID: MRT4577_95999C.1
ctcacacaaccaagctcgatcgatctcactctcagctggtcgctcactcttgcagctccaccgcttaatcactcagtcttagggtcttagctctaggctctagctagccgcgccactccttcgtgtagccatcagccttctcatcgccaccaatggccactgccgaggtccagaccccgaccgtcgtggcggccgaggaagcgcccgtggtggagaccccgccgccggccgtcgtgcccgaggagtctgcccccgccgaggggcgaggctgaggctgaggctgaggctgctgctcctgctgctcccgaggagcttccggcggccgagcagcaggcagccgccgagccggaggccgctgctcctgctggtgacgaggagcccgccgcggccgaaccggccgccgaggcggaggctgctgctcctgctggtcccgaggagactcccgcggccgagcaggaggcagccgccgaggaggaggctgctcctcctgctggtgccgaggagcccgccgcggccgagcctgtcgccgaggcagaggctgctgctctcgaggagctcgccgcggacgagccggaggctcctgctcctgctggtccccaggagccggccgccgaggcggaggctgctgctcctgaggagcccgagaaggccagcgagtgaggccgtgcgcacgcagcggcggcggccagggcccaggggatcggcgtgcgcgcgtggcggggtagtcgctcgcgcgcgtacatggcagtatgacacgggattttgctgttcagtacgctacggttactggcgtctctctctgtgtgtgtgtgtcgtacgtagcccggtacgtagctagcagtgactgtcgcgtggacttgtccggtgcggtctgcgagtgacgtgggctaaataaagtgtgcgtcgggtggtaatggtggtggggcccggtgtcagtggcgcggtgccccatgcctgccgcggctgcagcttgttgtgtcttgtgttggttggttcctgttctttctgtctatctattctcacgcatggcagtttgggtatggtattggtatgggtcttctttggttacgttcgctgcattctgtttgtgtcattgtgtgatgatatgatcttctttatataataatacacccagtcgttcatcagcaaaaaaaaaccgaaaccagcaggcgtaccagcaatacataaaagagagaaaaaaaaaaaaaaaaaacaaaaaaaaaaaaaaaaaaaaaaaaaaaaaaaaaaaaaaaaaaaaaaggggggggccgcttttaggaggatccaactttactaccccgggcctgcaaggtaaaattttttttttagggcccccaaaattaaattgacggcccggggtt

SEQ ID NO: 180285 - DNA, 281 bp, Zea mays
  Clone ID: MRT4577_9599C.1
tctctgactctttggtttactcattcttcgaactcttgcaacattcttacctcacagggacttagttctcattcatttgaaggcagaccatgcatatcaaacaggaagacaccaggcctaacacgcatgcatcctactacatacaacaacacttacccgattgactatactacaccgatcaactgtctcttccttgccaggcctgtatacttatatgcatctgactaaatcaaatcttccatgcttctacgctgacgcttgcgactccccaaacttctacg

SEQ ID NO: 180286 - DNA, 273 bp, Zea mays
  Clone ID: MRT4577_959C.1
ctgggattagggccttaagggctctgagaggagtctaccatgcactcttatgggaagggagaccctaaaaaactttctcctctttgtactcctttttctcccgtttccccaagagaaccagattggcagggagaagcattgtggggcaattgttcctccttgacaatgtagcaataaatagatgctgccaagggcataaactggggaggttagctcagagcagagtagtctctagagaaaggaagaatcctcaacggcaccctggggtgctag

SEQ ID NO: 180287 - DNA, 616 bp, Zea mays
  unsure (1)..(616): unsure at all n locations
  Clone ID: MRT4577_95C.1
ttttttttttttttttcgagataatgtcgcagatatataactatcattattacatagcagaagtcttaaaaaataaatgantaataataaagcgaactaaacgtccatccttggcgccataaagctgactggaagacaccaccaagatcaactcgtactcctcattgtacgactcctcctggaccaccttcaaagtgctcctgctcagcaacttctacctgctgaacaccggaatactcggccactggctcttcaagattagtagcgtgaatagactcggcctcgacggcggatgcggccacggcggagcaacttctccgacaaagaattcgcgatcccctagcctataatccctcatgttgagtttgcggactcctacggcaagctgagacgaagcgctcagagctatatggatggcacaacgacagtggatgcgtggttttgtcgacggtggggttggcggcaatggcgagcccacaccgaatctctctctcccgcacggcggcatggtagtggtaggtctctgccgaaaaagggggaagtggctgaccggacaccgcgcgcacttatagcctaggtgggttggttacgggacagaaaggagggaagcccgagc

SEQ ID NO: 180288 - DNA, 2974 bp, Zea mays
  Clone ID: MRT4577_96000C.1
cgcagcagtttattgccccttctttattcaccattcacaaatgtacatacagccagttgtgttcgagcatcctggtccagaatgctcttgctaacagttctggaaggtgaaagaaaacaaataactgaaatttaaccatagtccacagatgacacaatatcacaaatattgccgtgaccgcgagtcatctacgaaaaacttgcgctcatcaacagaaaagaattggacctgactacacataaatacagggaaaaggccatgaagccaatctgttcaatttattcaacacttgccaaactattggaacactgatcaacgatcagtgattcagtgggaggcatctctgctatagtactggtccaaggtcttcgccgggatacggtggagaagttcgcgagggaagatccgaagcaatgtccatgcaagatctagtgactggaagatgttccgtgtgtcgtatgctccttgtgtcacaaacttcctctcaaacttgtcaaggaactctaagtaaagcagatcctcagacgagagtgcctcctctccaacgactgccttcatggcctgaacatcctttccaattgcgtagttggcataaagctgattagacacatccgaatggtctctacgtgtcatgccctcaccaatagcactcttcatcaatcgagatagagatggcaggacattgataggtggataaatctgtctgttatggagctgcctatcaatgtatatctgtccctcagtaatgtatccagtaaggtccggagttgggtgtgtgatatcatcattaggcattgtcagaataggaatttgggtaatggaccctgttcttccttcaatacgcccagcacgctcatatattgttgccagatcagtatacatatatccaggataaccacgcctacctggcacctcttctcgggctgcagaaacctcacgaagtgcgtctgcataagagctcatatctgtcaagatgacaagtacatgcttcccacattcatatgccaaatattctgctgttgttagagcaatccgaggggtgataatacgttcaatggtgggatcattagccagattcagaaaaagggtgacccgttccatggaaccgttctcttcaaaatcacgtttgaagaattgagctgtttccatgttcactcccatagcagcaaacacaatagcaaagttgtcatcttcaccaccctctgcatgctttcctttctccaatgtcttcacaaggccagcctgacgacagatctgagcagcaatttcattgtgagggagtccagcagcagaaaatagggggattttttgcccacgagcaatggagttcatcacatcaatggtggatatcccagtttggatcatctcctctggataggttctctcactgggattaatagaacttccagagatatccaagtaggcttcaggtaatatcggggggccattgtcaataggttttccagaaccattaaaaatgcgcccaagcatatcgagtgagacaggagttttcaaaacctcgcctgtaaactgcacggttgtgtatttgttgtctattccagaagttccttcaaaaacctgcacaacagctttttctccatcaacttcaaggacttgaccacggcgagtggtgccatctccaagtcggatgtttacaatttcttggtactttgggccctttactttatccaagataaccagaggcccggccacaccagatacagtcctgtactccatgccgatctctagggttccctcctccaagtcgacgccttccttcaccagacccatgctgaacaacctggatctggatcgcggcgcggagaggcgctggggagttggggaaaggaacgtgcgagacggcgaggtggcagatcccacccttcactcagtcttagtctcttattagctctaggctctagctagccgcgccactccttcgtgtagccatcagccttctcatcgccaccaatggccactgccgaggtccagaccccgaccgtcgtggcggccgaggaagcgcccgtggtggagaccccgccgccggccgtcgtgcccgaggagtctgcccccgccgaggccgaggccgaggccgaggctgctgctcctgctgatcccgaggagcttcccgcggccgagcagcaggcagccgccgaggcggaggccgcggctcctgctggtgccgaggagcccgtcgcggccgaaccggccgccgaggcggaggctgctgctcctgctggtcccgaggagactcctgcggtcgagcaggaggcagccgccgaggaggaggctgctgctgctcctcctgctggtgccgaggagcccgccgcggccgagcctgtcgccgaggcagaggctgctgctcccgaggagctcgccgcggacgagccggaggctcctgctcctgctcctgctggtccccaggagccggccgccgaggcggaggctgctgctcctgaggagcccgagaaggccagcgagtgaggccgtgcgcacgcagcggcggcggccagggcccaggccccaggggatcggcgtgcgcgcgtggcggggtagtctctcgcgcgcgtacatggcagtatgacacgggattttgctgttcagtacgctacggttactggcgtctctctgtgtgtgtgtgtgtgtgtgtcgtacgtagcccggtacgtagctagcagtgactgtcgcgtggacgtgtccggtgcgggctgcgagtgacgtgggctaaataaagtgtgcgtcgggtggtaatggtggtggggcccggtgtcagtgcgcgcggtgccccatgcctgccgcggctgcagcttgttgtgtcttgtgttggttgagttcctgttctttctgtctatctattctcacgcatggcagtttgggtatggtatgggtcgtcttctttggttacgttctgtttgtgtcattgtgtgatgatatgatcttctttatataataatagagccagtcgttcatcagc

SEQ ID NO: 180289 - DNA, 136 bp, Zea mays
  Clone ID: MRT4577_96001C.1
cgtgggtcaaactagaattctggatgtcccctcactgcagatcaaatgtcaagcttccagttaaggagctacatgaggtcctcagctgactgaggaaccctgtacatccccttgcacagcgctattctaaatcgct

SEQ ID NO: 180290 - DNA, 471 bp, Zea mays
  Clone ID: MRT4577_96003C.1
acgggcccccggggccatttggaaaaccaactggattgggaattaaggaaaaaaatgggggcccttaaagggaaagttggcttgaagctcctttaagttaacaagaagggaaaaagctgtaaaagcagctttggaggggcaggcttggtggttttaatatttccaagggaaccaggattgttcgttgaagaagttgggggtggccgggccatgatttctggggaaactaaaattttaccggaacttgggccgaaacaacgttaaggggaatttctgcgatgatcaatatgacggagggacggctctagcttgaggtttacagggccggcttcgccttctgtggggcattatcaagagaatggctagtgtgttaatgctgccaaaattgttaatcactggttgaaacccatcttatactgttcagatagatgcccctgtatatctgttgttcgattagacataaggccgaac

SEQ ID NO: 180291 - DNA, 367 bp, Zea mays
  Clone ID: MRT4577_96004C.1
gccacgcgttcacccactcgttcatttactttttcctacatcaatacagaaatatgaggtggctctgctgatgctgacatgtgggtaccttggaattatcctactctgattgaagatgggcatcttctcatactgcctattatgcaaattactgactgatacttccctttattctgggaaacaagctatagctgatgatgcttctgatcctttggtctacctctgccctgaccttcatgcatatgctaccgagatcgattaacacatcataacaatactccctgataacaaggctgatctggtgccgctgaatatcaagcagagatcgactgattattctaaggcccatgacattctctatttgttc

SEQ ID NO: 180292 - DNA, 657 bp, Zea mays
  Clone ID: MRT4577_96006C.1
cccccagcgtccgcaataacactcttcttaggagccactttagctcttgctcagagagatattaaaagaagcttagcctattctacaatgtctcaattgggttatatgatgttagctctaggtataggttcttatcaagctgctttattccatttgatcactcatgcttattcgaaagctttattgttcttaggatccggatccgttattcattcaatggaacctcttgttggatattcaccagataaaagtcagaatatggttcttatgggtggtttaagaaaatacgttccaattacaagaactacttttttatgtggtacactttctctttgtggtattccacctcttgcttgcttctggtccaaagatgaaatccttagtaatagttggttgtattcacccttttttggaataatagcctcttttactgcaggattaactgcattttatatgtttcggatatatttacttacttttgatgggtatttgcgtgttcattttcaaaattacagtagtactaaagaaggttcgttgtattcaatatccttatggggaaaaatttatccaaaggagtcaatagggattttgttttatcaacaatgaagagtggagtttcttttttttcacaaatataccaaaaattcctgctaatac

SEQ ID NO: 180293 - DNA, 402 bp, Zea mays
  Clone ID: MRT4577_96007C.1
atctccacctctcctccacatatcgcggtcacggctcgagctcaagaaccttctgccctccccggcatctgcgctccggaaccccgcatttccctacatcgctttccgatttctcgcactctcctcatgtcagacacatattctgcctttcctgcccgagcgcagacggcgccataatacagattccattaagacaagagcttatccacactggtattactctcatcatctttcgtgtcgagcatcccacctcacactctattccatgtcactatccaccactgcatctgatccgtcttactgtacgaatgcaatgcccacatcaaatccctcgactgccacgaaccgtgcgattactccgactgctcgcacatggatgtgaacgaacattactgcacctcc

SEQ ID NO: 180294 - DNA, 681 bp, Zea mays
  Clone ID: MRT4577_96008C.1
gggttgcggacctcgaggcgggccgggagatctagggttctctcgtgctctgttctcatcttctgctcgctggtgtcccctctctctcacccatggcttcggcggcggcggcaactcaggtggggacttacttcctgcggaactactacaacctgctgcaacaaacccccgatgtcgtccaccagttctacagcgaagccagcaccatggtccgcgtcgacgacctcaccggcaacaatactgcaacaaggagctgtcgttcagccattgccaagccgagagcagaagcagaagagaaactgagaagaacccagcttagatcagactgaagaactagatgcggtggacgccttcaagacctgctgacatgagggctgctagtcagagctgctgtttttggcctgttctttgacatgagggtacccaaaaactctagttgctcgtgggtgtcaactttttattatatgttgttatgtttgtgcaaaatcaactgaaatgtgaagtcaagtggtgatgctgtgaactgagtttagtgttgtccacttagtttgtatgatcactggaatactagttgtattcatctacggaatatggaattgtgtgctcattcctctgttctagtatcttttgcaattttcaataaaattattctctgctaaaaaaaaaaaaaaaaaagcggcc

SEQ ID NO: 180295 - DNA, 970 bp, Zea mays
  Clone ID: MRT4577_96009C.1
atcttctgctcgctggtgtcccctctctctcacccatggcttcggcggcggcggcaactcaggtggggacttacttcctgcggaactactacaacctgctgcaacaaacccccgatgtcgtccaccagttctacagcgaagccagcaccatggtccgcgtcgacgacctcaccggcaacaatactgcaacaaggagctgtcgttcagccattgccaagccgagagcaggtgatggcgctggcaccttgctcgaattgatggtgatgcacgacctgccttgtattcagtttattatgatatgctatttagctattgactagctatttatataagaatttaaatggtgtacttatttattttaatgtgccgttaaaatataagtcgttacactaattagaaactagaacccttttatactcatagtttctcggtgacaccattgaccaaaaaatcctagatccgcccctgtggcccatcacttagctcatagaaccttactcgctgctatgtggcacacttacatgcatatgtaagtaaatattaccttgtactactacctgcacttttgcactcaacaacttctattgcatttaatctgagcaaactttgctgtgattgtttatccacgaaacagaagcagaagagaaactgagaagaacccagcttagatcagactgaagaactagatgcggtggacgccttcaagacctgctgacatgagggctgctagtcagagctgctgtttttggcctgttctttgacatgagggtacccaaaaactctagttgctcgtgggtgtcaactttttattatatgttgttatgtttgtgcaaaatcaactgaaatgtgaagtcaagtggtgatgctgtgaactgagtttagtgttgtccacttagtttgtatgatcactggaatactagttgtattcatctacggaatatggaattgtgtgctcattcctctgttctaa

SEQ ID NO: 180296 - DNA, 413 bp, Zea mays
  Clone ID: MRT4577_9600C.1
atgcccggattcgcgccctgctcgcccagatccgaccgcgactttgatttcccaaccgacgcaggagcggtgggtctgaccggccgcgacccgtcttctcatgggcgcttgctggtgtgtcgcttcggcgtgtctctgctcgtagattttgcctatccatttcagcgatgcttccgttgcgccgtgctaagcccacaaagcgtgcgaatgggcaggtctgccagatttgtggtgactctataggtgtttcagccactggcgatgtctttgttgcctgcaatgagtgtgccttccatgtctgccgcccatgctatgagtatgagcgcgaggggaaccaatgctgcccccagtgcaagactagatacaagagacaaaaatgttggtttcctggcaacttctttgagtgtgtgtaa

SEQ ID NO: 180297 - DNA, 379 bp, Zea mays
  Clone ID: MRT4577_96010C.1
gtcttaaaaccatagcgttcatttactacagagcgcactaaaacacgcgcgcctccatgagggtgttgctcgtatagcgcgatctactggctattgattggagcgccacctacacccatacaagcggggaatgcgggtggcagccaacgtcaacggtttatctacagacgccggtgcatccagctgctgcgatatacaagagacctgcaccgcatgtcctatcgaacagtcacgcagcgccgaatggtcgaacgtgacagcgccctgtacatggggcattcaagcgctgagtgtgcggcggcaacacgcaactagactactaaacctgccagggctctagctcatgctcagttacatctatgcccttgccaacaggcga

SEQ ID NO: 180298 - DNA, 269 bp, Zea mays
  unsure (1)..(269): unsure at all n locations
  Clone ID: MRT4577_96011C.1
tagcttcactggagcctgctgggaacgtgtcgtgtgactcctgatgctttcgggatcacatgaccatcgtgctccgcaacaggntctcttctgaaaattgtgcctgtccacagcttctgggtagggacacagcttccccttcgcatgaattgagttggccgagcgcctccccccttttctccatttgagaggagagtgcttagggcttgaagcccttaccccactgctgctgactgggcgaggcctggagccctttatttgcaggtcag

SEQ ID NO: 180299 - DNA, 759 bp, Zea mays
  Clone ID: MRT4577_96012C.1
ccggcctggaggttcatacctaaccccctcaaacccacagcccgcccaagatgagtcaccgaaagtttgaggctccccgtcacggctccctggcttatctgcccaggaagcgcgctgctcgtcaccgtggaaaggtcaagtccttccccaaggatgaccccaagaagcccgtccacctgactgccgctatgggttacaaggccggtatgaccaccatcgtccgtgacctcgaccgacctggcgccaaggccaacaagaaggaaattgttgaggctgtgacgatcgttgatacccctcctatgatcgttgttggtctggttggctacatcgagaccccccgaggcctgcgatccctcaccaccgtttgggccgagcatctgagcgacgagatcaagcgccgattctacaagaactggtacaagtccaagaagaaggctttcaccaagtacgccaagaagcactccgagaacaacggtgcttccatcacccgcgagcttgagcgtatcaagaagtactgcaccgtcgtccgtgtcctcgcccacacccagatccgaaagacccctctcaagcagaagaaggcccaccttatggagatccaggtcaacggtggcagcatcgccgacaaggtctctttcggtcaggagctcttcgagaagcccgtcgatgtttccagcatcttcgagcaggacgagatgattgacgtcgtcgccgtcaccaagggtcacggtttcaacggtgtcacttgcccgttggggtacc

SEQ ID NO: 180300 - DNA, 521 bp, Zea mays
  Clone ID: MRT4577_96013C.1
attgggtacctcgactccggccggcgacccagttcaacccacacaacaccgccaaaatgaccaagcgcactaagaaggtcggcatcaccggaaagtacggtacccgttacggtgcctcgctccgtaagcaggtcaagaagatggaagtcacacagcacgcccgctacgtgtgccagttctgcggcaagaacgctgtcaagcgccaggccgttggcatctggaactgcaagtcctgccgcaagaccaccgccggtggtgcttacaccgtcgccacccctgccgctgccgccacaaggtcgaccatccgccgtctccgcgagattgctgaggtttaagcgaaacattgggtactggtatggaggagttctacgagcgtgtttctctgcataagcagccatcatacgaatgaaatggcttgcgggagctttcagatacctgtcctgtcacgatcatggagtcaacaggatttcacaaaaagaaatggcacgatcatgaacaaaaaaaaaaaaaaaaaagcggcc

SEQ ID NO: 180301 - DNA, 427 bp, Zea mays
  Clone ID: MRT4577_96014C.1
cccaaaagcataaaaataagctcccggctgaaaaaagggggggttacacgtcctcatttccggctcaagcctcgaaataacaaatggataaacaaataaatagggtccgaaaaaagggggggaaaacacccaacacaccccgcagagaaagagggcagctttagctcctccacgggtccaccgacatatcaaatgtcccaagggcgggcccgggctaaaacgcgacggggggtgccacgggggcaacaatggccacaaggctggcggcggcggcggaggcttaaacgggggggctcttttccgtgacgggcgcggcagccggagtcaaaacccccgcggctccggggggggccatcgcgttgtaaccagcttccgcgccgacgggggttggggccggcacgcccgggggaggcgcgggcaccggggc

SEQ ID NO: 180302 - DNA, 297 bp, Zea mays
  Clone ID: MRT4577_96015C.1
ggcggggcttgaaggatatcggcttttattgctgtccattttgagcatggatcttcagctccttgggtcaagtggtttcaatgatattcttctttttatttgccttttctttttagttccaactcctgacaatgtcacactagagaagcaaaaataaatataacattgtcttgatttttatgattattccttgagacctgaatgcctaaattgttgaattttactatcaatccaacctatttgagggtttaggacactattataccttacattttcgtaagaaaagagttataatca

SEQ ID NO: 180303 - DNA, 594 bp, Zea mays
  Clone ID: MRT4577_96016C.1
ttttttttttttttttattagtctttcgatcatgttttgttgtaatgtatctatcggtacaaaatacgtatccctatccaagcttatgccgattttatcttcttcaggagctcttcaaactcctccttgaaagactgttcccaatcagcccgtgtcttctttggcgcccaacccagctcctttccaacctctgccttcgtccgggaattacttgcaaatcccaattcacacaatctgctcgtcacccccaacccaattcttcgctgcttcctcaaggcttatacttttcgtctctgtactcgaaaactgcccaagctccacacctgctttggcaattccctccgcgacttccttccaggcaaacgatccggtggcgctgaagatgatgcccttctcaccggtaggaatagcttttctgccttcgacccaatccaggagaacaagttcgtacagctggacaagatcctggatatgcacataatcccatacaccggcaccatcaacgacatactctggcttaccccccgccaatgctgccttgatttgtagtgggtattgaatggttaggcgattgaacttccctgacccaacacc

SEQ ID NO: 180304 - DNA, 1198 bp, Zea mays
  Clone ID: MRT4577_96017C.1
cgctcctcctccctccgtcaggctgtcactgtccccctcaccgccgccgtcctcgtcaccacacctcacccgttgctcccactccttccagaaccacctcctcgccaccgtggctgcctgccctgcccgctataagactcttcactcccgctgcgacgcagtcctcacaagcaccagaccaattaactagcttcttctagctctagctaggctcgtctgctgcaagaaggtaacagcgcaggcatggaggggaaggaggaggacgtccgcctgggcgccaacaagttctcggagcgccagcccatcggcacggcggcgcagggcacggacgacaaggactacaaggagcccccgccggcgccgctcttcgagcccggggagctcaagtcctggtccttctaccgcgccggcatcgccgagttcgtcgccaccttcctcttcctctacatctccatcctcaccgtcatgggcatctccggcggtgaccttcgggctgttcctggcgaggaagttgtccctcaccagggcggtgttttacatcatcatgcagtgcctgggcgccatctgcggcgcgggcgtcgtcaaggggttccagcaggggctgtacatgggcaacggcggcggcgccaacgtcgtggcgcccggctacaccaagggcgacggcctaggcgccgagatcgtcggcaccttcatcctcgtctacaccgtcttctccgccaccgacgccaagaggaacgccagggactcccatgtgccgatcctcgcccctcttccaatcgggtttgccgtgttcctcgtccacctggccaccatccctatcaccggcaccggcatcaaccccgcgcggagccttggcgccgccgtaatttacaaccagcaccatgcgtgggctgaccactggatcttctgggtcggccccttcatcggcgctgcgctggctgccatctaccaccaggtgatcatcagggcgatcccgttcaagagtaggtcttaaaggagccgatgctgctgcttcgagatgctgccggtcttgaaaggatggattcgtggctgtttcaaatgatcccctactatgttacgtggagttccattcctctttcaaagttcggagctgcttttatccgaacccagacttgtaattcatctgtaccaattgtgtaatatgccgcgcctctgttatgtgcaattcaaaattatg

SEQ ID NO: 180305 - DNA, 1005 bp, Zea mays
  Clone ID: MRT4577_96018C.1
cgctgcttcaagaaaccaccgagagcccaaccgcacaggcaggagagagagcagggagccagggacagtagcgtggggccggggagcaaagatggaggggaaggaggaggacgtgcgcctgggcgccaacaagttctcggagcggcagcccatcggcacggcggcgcagggcgccggggccggggacgacgacaaggactacaaggagcccccgccggcgccgctgttcgagcccggggagctcaagtcctggtccttctaccgcgcgggcatcgccgagttcgtcgccaccttcctcttcctctacatcaccgtcctcaccgtcatgggcgtctccaagtccacctccaagtgcgccaccgtcggcatccagggcatcgcctggtccttcggagggatgatcttcgcgctcgtctactgcaccgccggcatctccgatccttgccccactgccaattgggttcgcggtgttcctggtccaccttgccaccatccccatcaccggcaccggcatcaacccggctaggagccttggcgccgccatcatctacaaccgggatcatgcgtggagcgaccattggatcttctgggtcggccccttcatcggcgccgccctggctgccatctaccaccaggtgatcatcagggccatcccgttcaagagcaggtcttaagctgccgcgggtgtgctgagacatgtggggaatgtattgtctgcccacgcctagtttctctgctgaatcttccatctctcttcccttcaagactgctcactgctgcactgctctgttatctgaacccagaacttcgtgtactcctgtaccgagctgtgtgtatgtttttttttcttccatcgtgtttgttgcaagggttcccgtctccttttatgcgttgggatcgtggcaagaaagggcagatatcatgtggaaacgtgggtttataactatcagctggatttttcatccaagtggaatcgattcagaattttcttttgttcttgttttc

SEQ ID NO: 180306 - DNA, 515 bp, Zea mays
  Clone ID: MRT4577_9601C.1
aaagaaacaacttttcgttttctaagtaggcctaagcctcattagttctctttataaaacaggtagcaaggaggataatcaaattccaaggaacgatgattcatcaattgtttattcacacaactcctatcacctaatgcagcagataagtgataaaagtttttagaacaaaaggaggtggcaaatgcaccggggcttgcctaggatgacactaagttagtgttgttagatgatactcgcttgatccacaagattaatccaccaataccatattatggttcgctctgatccatgtccttcagctcgcatagtcatctagcgtacctattgtaaatgcataatgcatatgagcatggacatgaatagcatgagacatatattctatactaaagagggtaaacacttaaagcagggcattaaaactcttaggggaacattagatacatttcactctacctcaagcatgacttttaatcaaatggccctacactaaatattaagcaacattaactaaa

SEQ ID NO: 180307 - DNA, 272 bp, Zea mays
  Clone ID: MRT4577_96020C.1
cccacgcgtccgctagcgtaatggttaaggcttccgagtagcacctccaggtcctgggttcgatccccctcgggggcgagtttctggtttggttaaaaaaatatcctctctgtgcctcgcccgctcccggtttagcgcgccacctccggctggaccgttgcagagttggcggtgacggcccgttagtgatagggggaccaggttcggggattttctctcttcttaatatattaccgggagggcggtctttccctccacgatcgagttttttt

SEQ ID NO: 180308 - DNA, 485 bp, Zea mays
  Clone ID: MRT4577_96021C.1
tcgagagctagaactagtcctagctttttctaggctcttttgctgcaagagggtaacagtaacagcgggcatgggggggaaggaggaggacgtccgcctgggcgccaacaagttctacgagcgccagcccatcagcacgggggtgcagggcacggacgacaaggactacaaggagcccccgccggcgccgctcttcgagcccggagagctcaagtcctgctccttttaccgcgcccgcatcaccaagttcgtcgccaccttcctcttcctctacatctccatcctcaccgccatgggcgtctccaagtccacctccaagagcgccaccgtcggcatccagggcatcacctggtccttcggcggcatgatcttagccctccgctactgcaccggcggaatgtacggcggacacatcaacccggcggtgaccttcgggctgttcctggcgaggaagctgtccctaaccaaggcggcgttttacatga

SEQ ID NO: 180309 - DNA, 107 bp, Zea mays
  unsure (1)..(107): unsure at all n locations
  Clone ID: MRT4577_96022C.1
tgtgccacagaaaatcaattggtcgtagtgcgaaggcaacaggtgaagtatcaacgggtggctgcaatctgnctccgcactcattccacgcacactttgccgctata

SEQ ID NO: 180310 - DNA, 679 bp, Zea mays
  Clone ID: MRT4577_96023C.1
aaagtacttcccccctcattactctccgtctatttcctatctatcatgcgtgttctgcaataaggtgacaatacacagatgttggagaacacagcgcacgcaccaagcgcactggggcgcaccacacacatcctccgctacgccgtacaggctccatccaccacgcatgctgcacagagaacggacaacatcgtactcaccatgagccaccaggcgggccgctcttccaggccgcaccagctcaagtcctggtccttctaccgcgccggcatcgccgatgtcgtcgccaccttcctcttcctctacatctccatcctcaccgtcatgtgcgtatccgagtccacctccacatgacccaccgtcggaatccagggcatcgcctggtccttcggcggtatgatcttcgccctcgtctactgcagcgccggtatctcccgccgttacatcaacccggcggcgaccttcgggctgttcctggcgaggaagttgtccctcaccagagcgttgttttacatcatcatgcattgcctgggcgccatctgcggcgcggacgtcgtcaagggcttccagcaggggctgcacatgggcaacgtccgcggcgacaacgttgtggagcccgtctacacccaaggcgacgccctcggcgcccagatcgtcggcaccttcatcctcgtctaca

SEQ ID NO: 180311 - DNA, 289 bp, Zea mays
  Clone ID: MRT4577_96024C.1
gatagttgatggtgcaaaaacaccaatttttcttggtggacacaataaaattctgatttgggtggaaatgggattggtccatggaattgtggggttggtacaattcctggaaactaaaggggggcttcttattttaagtccattcacttcgcaagccggggcttcttcaaaactttggttttttttggagctttaaggctttttggcgctttcgtaggcgcattaaggagcttaatagccttatagatgttcttaggcacaggttctgtgtgaggcggagctttcattt

SEQ ID NO: 180312 - DNA, 1419 bp, Zea mays
  Clone ID: MRT4577_96025C.1
agcagcaatgcatgcaggctgcagcaaggcaacaagccacaaccatcccgctcctcctccctccgtcaggctgtcactgtccccctcaccgccgccgtcctcgtcaccacacctcacccgttgctcccactccttccagaaccacctcctcgccaccgtggctgcctgccctgcccgctataagactcttcactcccgctgcgacgcagtcctcacaagcaccagaccaattaactagcttcttctagctctagctaggctcgtctgctgcaagaaggtaacagctagcaggcatggaggggaaggaggaggacgtccgcctgggcgccaacaagttctcggagcgccagcccatcggcacggcggcgcagggcacggacgacaaggactacaaggagcccccgccggcgccgctcttcgagcccggggagctcaagtcctggtccttctaccgcgccggcatcgccgagttcgtcgccaccttcctcttcctctacatctccatcctcaccgtcatgggcgtctccaagtccacctccaagtgcgccaccgtcggcatccagggcatcgcctggtccttcggcggcatgatcttcgccctcgtctactgcaccgccggcatctccggcgggcacatcaacccggcggtgaccttcgggctgttcctggcgaggaagttgtccctcaccagggcggtgttttacatcatcatgcagtgcctgggcgccatctgcggcgcgggcgtcgtcaaggggttccagcaggggctgtacatgggcaacggcggcggcgccaacgtcgtcgcgcccggctacaccaagggcgacggcctcggcgccgagatcgtcggcaccttcatcctcgtctacaccgtcttctccgccaccgacgccaagaggaacgccagggactcccatgtgccgatcctcgcccctcttccaatcgggtttgccgtgttcctcgtccacctggccaccatccctatcaccggcaccggcatcaaccccgcgcggagccttggcgccgccgtaatttacaaccagcaccatgcctgggctgaccactggatcttctgggtcggccccttcatcggcgctgcgctggctgccatctaccaccaggtgatcatcagggcgatcccgttcaagagtaggtcttaaaggagccgatgctgctgcttcgagatgctgccggtcttgaaaggatggattcgtggctgtttcaaatgatcccctactatgttacgtgcagttccattccattcctctttcaaagttcggagctgcttttatccgaacccagacttgtaattcatctgtaccaattgtgtaatatgccgcgcctctgttatgtgcaattcaaaattatgagacagcgagtcaagctttaagagcgaaaaaaaaaaaaaaaaaagcggcc

SEQ ID NO: 180313 - DNA, 583 bp, Zea mays
  unsure (1)..(583): unsure at all n locations
  Clone ID: MRT4577_96026C.1
cctcgaggccggccgggacaagcacttgaccaattaactacgattcttcgtagctctagctaggatcgtttgctgcagaatagaacagtagcagcatggatggggaaggaggaggacgtccgcctgggtgccaagaagatctcggagcgccagcccatcggcacggaaggagcacggcacgaacgacaaggactacaaggagcccccgacggcgccgctcttctagaccggggagctcaaggcctggtccttctaccgcgccggcatcgccgagttcgtcgccaccttcctcttcctctacatctccatcctcaccgtcatgggcgtgtaccaaggacacctccaagagcgccaccgtcaggatccagggcatcgactggtccttcggcgtcatgatcttcgccctcctctactgcaccgccggcatctccggcgggcacatcaacccggcagggacgttcgagctgttcctggagaggaagttgtccctcaccagggagatgttttacatcatcatgcagtgcctgggcgccatctgcggcgacgccgtagtgaagangttccagcatgggctgaacatggg

SEQ ID NO: 180314 - DNA, 869 bp, Zea mays
  Clone ID: MRT4577_96027C.1
cggacgcgtggggcctggtccttcggagggatgatcttcgcgctcgtctactgcaccgccggcatctccggagggcacatcaacccagctgtgactttcgggctgttcttggccaggaagctgtccctgactagggccatcttctacattatcatgcaatgcctgggtgccatctgtggagctggagtggtgaagggcttccagcaggggctttacatgggcaacggtggtggtgccaatgttgtcgcccccggctacaccaagggtgatggccttggcgctgagatcgttggcaccttcatcctggtctacaccgtcttctcggccactgatgccaagaggaatgccagggactcccatgttcctatccttgccccactgccaattgggttcgcggtgttcctggtccaccttgccaccatccccattactggcactggcatcaacccagctaggagccttggcgctgccatcatctacaacagggatcatgcctggagcgaccattggatcttctgggtcggccccttcattggtgctgccctggctgccatctaccaccaggtgatcatcagggccatcccgttcaagagcaggtcttaagctggtcttaagctgccgcggccgtgccgagacatgccagtccgaagaacgagcgtcttcctgtgatgtctttgtctgccctgcccacgcctaggtccaaagtcgattcctcgtctctcttcaagattgctcactgctgcactgttctgtaatctgaacccaggactttgtgtattcctgtaccgagctcagctgtgtatgtttttcttccatcgtggagaatttaagttattaccgtttgttgcaaaaaaaaccacacccagggc

SEQ ID NO: 180315 - DNA, 546 bp, Zea mays
  Clone ID: MRT4577_96028C.1
cattgggaccctcgaggccggccggggacacgcaccagaccaattaactaggcttcttctagctctagcgtaggatcgtttgctgcaagaaggtaacacgctagcaggcatggaggggaaggaggaggacggccgcctgggcgccaacaagttctcggagcgccagcccatcggcacggcggcgcagggcacggacgacaaggactacaaggagcccccgccggcgccgctcttcgagcccggggagctcaagtcctggtccttctaccgcgccggcatcgacgagttcgtcggcaccttcctcttcctctacatctccatcctcaccgccatgggcgtctccaagaccacctccaagagcgccaccgtcggcatccagggcatcggctggcccttcggagatatgatcttcgccctcgatatactgcaccgccggcatctccggaggggacatcaacccggaggagatctatcggctgctcctggtgaggaagctgtccctcaccacggaggtgttatacatcatcaggcacggacagggcgcca

SEQ ID NO: 180316 - DNA, 453 bp, Zea mays
  Clone ID: MRT4577_96029C.1
atggagccctctctcctacatgtaggaaccagctctgagaattgtcagagcctgctcctcctcacccgtacacgctcggtgagatgtaaggactttgatgttgatgcttgtgatgaacatcttactgctattactagattgaatgatgaggtggcaagtcttaatgatcaacttaagacttgcaaaagagattttgataaattaaaatttgcaagggatgcctacactgttggtagacacccctccattaaggatggacttggttttcgaaaggaaaccaagaacttaacaatccaaaaggctcctgctctcaacaaggagaaagggaaggcccctatggctagtaattctcaaaagtgtcatgcctacatttatgatagaaaattttctaggcgatctcaaatttctaggaatgctcattatagtagaagttatgatcatgatgcttattga

SEQ ID NO: 180317 - DNA, 375 bp, Zea mays
  Clone ID: MRT4577_9602C.1
attcggctcgaggggtgggcttttctttcccctccggttcgggttcgggctcgcggggggctccttttaatcggtttagcggttcaccagatcgagatggctgcgtcggatgctgagtaccactccttcgtcctcgggcttgcctgggccacggacgaccactccattcacaacgccttaaggacctacggcaaggtcctcgagtccaagatcatcctggaccggtagacgcacaggtcccgtggcttcggctccgtcaccttctccacggaggaggcgatgctgaacgccatcgagggcatgaacggccaggagctggacagcccgaacatcaccaacaacgaggcccagtcccagggcggccgtgtaggcagc

SEQ ID NO: 180318 - DNA, 324 bp, Zea mays
  Clone ID: MRT4577_96030C.1
aactatgcaagacccatcccatcctactctatcaaacacgaatgttttatcgctccttgccctgtttaatcagggatgccactgtacatggttaaataatagggtagtttctcaaggcatacggagttatgtataggaactgttgtaccctataacttacaacggtgaggagcttcttgtcttgcgcatgtcgtcatgagatgcagctgcggcgaacgagggtgcatgtgttggtacacgcgaagagcgagcataggagtgcgatgacacggtatgacaggatgatgaaaccagatgtgccgatgctggtattgtaccatctgc

SEQ ID NO: 180319 - DNA, 665 bp, Zea mays
  Clone ID: MRT4577_96031C.1
ccggcaaaaaaaaaaaaaaaaaaaaaaaaaaaaaaaaaaaaaaaaaaaaaaaaaaaaaaaaaaaaaaaaaaaaaaaaaaaaaaaaaaaaaaaaaaaaaaaaaaaaaaaaaaaaaaaaaaattcagggccccctttaaatcttttgggggttggctgggccctcgtttttttcccgggggggaggggggtttcccccccttttttgttggggaaaaccttttggcccgaaactttttgggaaaaggtttgtttttttcccctggggtaaatttcccccggacctaggattgggtatttttataaaaaaaaaagtttggggggggtgaaacccaaagggccccaatgggcctgattttgctaaattcggttttacccctgttgtaaattaaggaaactgttgcccttgcctttcacggttagttggaaccttttgtcgaaaaaaaaaaaaaggggaaatttccctttttgggtttccaaaaaaaaaaaaaaaaaaaaaaaaaaaaaaaaaaaaaaaaaaaaaaaaaaaaaaaaaaaaaaaacttttttttttttttttaaaaaaaaaaaaaaaaaaaatttttgggttttttgtttaaaaaaaagggggggccccttttttttagaaaaaaaaaaaaaaaaaggcggccccccggcccccatttttt

SEQ ID NO: 180320 - DNA, 914 bp, Zea mays
  Clone ID: MRT4577_96032C.1
aattcggcacgaggcggtttgcgagctcatcgattgctcactcatcactctatgctcacgagctccagccttcagagcgctataattccggcccgatcctttgttggaaaccttctccgagctttccacggttcatgggagcgcgagtggtgggtgcagcaagctccggccttttctggtgggtctgagctgagctgagctttgagggatccatcgagctggtctggatcgctagtttcgctggttggtcgtggagttgatttgatttctgggagcgatgtcgcgccggctgtcgctgccggcggggtcgcaagtcacggtgacggtgtcgccgacgaggggcaaggctgagagccccggggacggggtgatcaagagaagcggcggcgggatcgggctcaccagccctgcgccgaggcactcgctcggtggggcggggtcctccaccatccccactgtgcagctatcgcccgtgcgccggagcggtggcagccggtacgcgtcgctggacggcggtgcaggcgcggatgacagcgccgagttcgtgcactacaccgtgcacatcccgcccacacccgagcggacggtggcggcgtccgctgactccgtcgatgcgccagcgccgacggcgtacgacgaggacggcggcgtggcgggtgtgcgggcgcagaggagctacatctccgggaccatcttcacgggcggactcaaccaggccacgcgcggccacgttctcaacacctccgccaacagcgccgcggtcgcggcctccgccaacatgtcgtgcaagatgcgcggctgcgacatgccggcgttcctgtcctctggcgccggcggcgggccgtgcgattgcggcttcatgatctgccgcgagtgctacgcggactgcgtcgcggccgccgactagtaagctc

SEQ ID NO: 180321 - DNA, 525 bp, Zea mays
  Clone ID: MRT4577_96033C.1
tatcgtccgcccagcgtccgcaaggtgtctcatcttcatgtacagtttcagagttcggagcttggcagtacagagagtgcggatcctggtgtactagcacctgaatctgaatgaagttaaaaccaagtttctgtgacgtaaaaaaaaaaaaaaaaaaaaaaaaaaaaaaaaaaaaaaaaaaggggttaagaaagggggaaaaaaaaaaaaaaaaaaaaaaaaaaaaaaaaaaaaaaaaaaaaaaaaaaaaaaaaaaaaaaaaaaagggggggcctttttaagggatcaaagtttagttacgggtgattggaaggtattattttttttttagggtaactaaaattaaattaattgggggtgttttaaaaaggtgggaattggaaaaaccttgggttaaccaaattaaattgctttgaaaaaaatttttttttggggattggggtaaaaagaaaaagggccctaatgatttggccttttcaaacagttgggaattttgataggaaaatgggacgctctttttaaggg

SEQ ID NO: 180322 - DNA, 169 bp, Zea mays
  Clone ID: MRT4577_96034C.1
aagcttgccgggcgtgaataggaagaaactacctagggtacgaactaggcatatgcctgaacataactagttgctgtgggaaataataatccgacttcaatgcacctaattatacgaaccgaaaacactactggtgctgacagtaggcactaatgattgataccacatg

SEQ ID NO: 180323 - DNA, 262 bp, Zea mays
  Clone ID: MRT4577_96035C.1
gttggcatgccacagccaaatctgatctggagcacaacagactcgtttgattgctacacagggcgcacttaacataagcacaggagaatcagacatgaaatgccctttgaaggagaggcggatccattcaggctggcctgagacatagcaatctcacactagccacgttagaaccgagccgcaagactcaaggccacctattccaccccctgtctaggcccttcacccccaacgagcttatgtctaatccgcaggccgaccg

SEQ ID NO: 180324 - DNA, 188 bp, Zea mays
  Clone ID: MRT4577_96036C.1
actcggttcggaattcccggctcgacccacgcatccgatcgtcctccactccaaggagatctgcatgtctgtcatcctcatccgacacaacgtgagtttccttcgatacctccgcaaccttatgaacaccaacccgttccactcgcccatccactttcactccccctccaatatccttcatcacacca

SEQ ID NO: 180325 - DNA, 277 bp, Zea mays
  Clone ID: MRT4577_96037C.1
tcgcccactcgtgctccgactcgtgggccaggtttggctctgcaggaatgcatggttaagggggggcgggcgcgttcatgtgcctcatgagcaaccttatggtcctaatcttcgcgtcggactggacgaggagcagtctctgccggcacatccgccaccccggcgtgtgcagcgtctgcaccagcgtactcggccggctcggcaacaagggcgcggtgtccgtacggatcttgctacacggcacgagcttctgcttcgtctgctgccacctgtgcct

SEQ ID NO: 180326 - DNA, 1041 bp, Zea mays
  unsure (1)..(1041): unsure at all n locations
  Clone ID: MRT4577_96038C.1
cgaccaggttgtgggggccgnacgtgccgtcggtgtcgaccaccaggtgcagagcgccgcgggcgacgncggcgccggtgcccggctggatgagcgccatgccgcgggcccagtcccgccacccgccgtggacccaggcgcccgccctgtcggcccacgccccgtcggccgacgcgtacgtgtgcaccgcgcgcaccgagtccatgtcgtcgagccggaactggagcaggtggaagtggaaccggtgcggcggcgacgcctcctcctcctcctccgcggcggcgtcgaagagcaggtacgtgagcgccgtccgctgcgaggcgctggggacccagccggagcccggcacccacgcccaccgcgccgtggccgggttgcacacgaggtagcacgccggcgggtggaggtcggggggctcgtgcccccgggcgcgggccaggagcacgaggccgtcgcgggcgtccaggatcacgtcgcgcagcccctcggcgtcgggaggcggcaggaaggacagggaggcgtcggggtgcggctccgccatcccggagacgttgacgaaccgccgggtggtctccttccgctccgggaccgtggcgttggggcgcgtgagccgcgagctctcggtgccgccgtcgccgtccacccggcagaggaaccccgccagggtctgcgcgaaccgctggcggtggagcgggtccgtgacgaggccgcaccaggccttggagacgcacttgaagcggtggagggagttggcggggaggaggccgaacatctcgacgagcgcgtcgtcggggatgcagggggcgggcgccgccgccgccgcgcgcagcttggggcccgggccagccatgccctccgcccgcctgacgagacacggattggagggggcaggggatcagcttaactactcgccgcccgccggtgtccggagagggtgtggatcgccggcggctcggcgctggtcagtgatttgagtcggctgtagcgagaacgagaagcaagcagaggggaaaggaccccggccggcctcgaggtacccaa

SEQ ID NO: 180327 - DNA, 518 bp, Zea mays
  unsure (1)..(518): unsure at all n locations
  Clone ID: MRT4577_96039C.1
ctcgagatttctcggccgtgtacgtgaagccgcctgcgctttggccctgcctcgagatttctcggccgtgtacgtgaagccgcctgcgctttggccctgcactccccgtcgcaatttaggccctancaggatagggttggatgagtctcggggtctggcgcggtactccggtgggtcgcgccgccgcgggctcgcgtgcgccgccgcgctctcccgtcggagtagggaagggcgctctgcaccgttggatcggtcccctatggcggaaattagaatctgcgtacccgttcgccacattgggtagatgccgttagatcgtgatcgtacgggcgatggtcgttcgacgtcactttaaactcggggccatcngatatngatcgggcggctctgaacgcataccagttcagtaactggggggttcatctggacccttggtttctaatccggcgtctaaaatccatccataccccttcgcggcgtcagtttttcataaaacccctgcgttttatggaaattaa

SEQ ID NO: 180328 - DNA, 366 bp, Zea mays
  Clone ID: MRT4577_9603C.1
attcgcgggtcgacccacgcgtacgcggacgcgtgggaaaactcagtggctgcccgatacacaaaaggtgcatcagggaatgtgacaacagaagatgatggggtgcatccccaacggattgagccttaagacggccttcatgctacgtcatgtctcttccacagggtcaattcatcttcaggtaactggcactgcattcagagtctaatgcatggaaaaccctgagcattatcaacgttaacccctttacactctaaccccttttcaccatcagctgttgcagataattgcgctacacttatcgcatttcaaaaaatttgctgacgctaatctggtagatagaccctccctgtacctggtcattaa

SEQ ID NO: 180329 - DNA, 419 bp, Zea mays
  Clone ID: MRT4577_96040C.1
ggatgggggccccccaggcgcgcccgcggccttccctttctcttgctgccctcatcacaagcctgcggcgcagaaacacagagaggcagctcgcgcatggacttgctgaccctcttgccatcgagggagtggccgaccggccataatctagctatagccagactctccatgcctcgccagaggaccctcacctcctatgctgccggaggtcgtctgctgctcgcggagctcccggtcctgatatgcctgacctggcctgtgggctagtgcggaacccccggccacggatgacggggagttacctggggacaccggcaaactcccgtccaagcactacgccgagcccattactagctgggcgagatgagcgagcgagagagacacctcgcctactatctagacgtctctcaaacaggagc

SEQ ID NO: 180330 - DNA, 1321 bp, Zea mays
  unsure (1)..(1321): unsure at all n locations
  Clone ID: MRT4577_96041C.1
tcatgggccagatgggcaattttttcgccgggagagtgggcgggaggattctcggcgtgcgctgcgtcatcaggtacgagaaggatgtcttcttcgcgcaaaccccagatatgctcacggtcgcgccgctgctgggttcgacttcgaccaaaggtagtagcagcaccacgctgtgggtcgtcgccgtcgccgtccccgtgtccgtgctcctggcctgcttcctggcgtgcgtcctgtggatcagaaagcggaggaggagagtgaccaatgtgtcaggcacggtgagcgtgcccacaatgtccatggagatggagcaggtgctcaagctgtggcgggtcgaggagagcgactccgagttctccctcttcgacttcgaccagatcgccgacgccaccgacaacttctccgacgaccacaagctaggccagggcggctttgggcccgtgtacaagggtgagctgcccggcggcctggaggtcgcgatcaagcggctgtcgtccgtgtcggtgcagggcctgatggagttcaagacggagatccagctgatcgccaagctgcagcacaccaacctggtgcgcctgctgggctgctgcgtgcaggccgacgagaagatgctggtgtacgagtacatgcccaacaagagcctcgacttcttcatcttcgacggcggcgacagagggagggcgctgacctggggccgccgggttccgcgtcgtcgaaattcggcacgagggcctgctctacctgcacaagcactcgcgcctgcgggtcgtccaccgcgacctcaaggccagcaacatcctcctggaccgcgacatgaaccccaagatctccgacttcggcatggccaggatcttctgctccaacgtcaccgaggccaacaccacgagggtcgtcggcacgcatggctacatcgctccggaatacgcgtccgagggtctcttctccgtcaaatccgacgtcttcagcttcggcgtcctgctcctggagatcgtgagcgggaagaggaccgccgggttctaccagtacggcaagttcttcaatctcacaggatatgtaagtacatacgcttatatattaccataccacctgcgacgacgcatatacacgaacgaacgaacgagacttgcagagccgggcgattacactgacgacgaccgagcacctacctgaatgaacaacgaactcctgcattcattcacgcaggcgtaccagctgtggcaggacgggaaatggcacgagctggtggacccggcgctgggcgacgacctccccgtgggcgatgtgatgaaantgcgtgcangtggcgctgctgtgcgtg

SEQ ID NO: 180331 - DNA, 236 bp, Zea mays
  Clone ID: MRT4577_96042C.1
acacatcccaaaagtgagtcgtgttacgtgcagccaagttcagtttccttctatactctcaccccggtttgactgactggccgtcatttcaccagattatgcaggggagtcccatgtcgggttccctcgtacgcgccttgccacataagccccttgcaccagctggcgtaagagagggaaggtatgcgtggatagcacctcccagacagatggtcaccatgataaggtacctggga

SEQ ID NO: 180332 - DNA, 282 bp, Zea mays
  Clone ID: MRT4577_96043C.1
ctcggaaatgctctgctcggaatccttccgtccgtcgccgacgcgtccttttcttatccgtcgcaaaccgttgatggggaaataattttttgctcaggcaagcacgtaggtactaggttcaggcgatcggcgtcgctgtgaatgtcacatgtcagtggctatcgatctccttccactactgatcactgatgagacgatgagcccgtcgaaagcgcgctccttttctcctcaaggattatctattatattctctcatcgatcatgcgctctctctcgcatcgc

SEQ ID NO: 180333 - DNA, 508 bp, Zea mays
  Clone ID: MRT4577_96044C.1
gggggggggaaaaaatgtaggttaactaaaacaaaacaagaccgggcagggaaacactgcacaaaaacaaaacataaaatacattggggcccagcccaaattaagcccaacaaaaaaacccaaaaaaaaacgacacccatgagaacacctttcccttgccaaaccaacccgggagaaaagaagggccgcgtttggggcgaaacaaaacacccaacccggcccgggcggcgcaacggccggggaccaaaacaaaaccttcccaaaaaaacaacccaaaaaaaaacaaggggggccagcccaaccgcccccccacccgggccccgacgcggggcccgaccaatgaatacccggacccgaaccggaaccaaaccaacctaaactaaagccaatcaaaacatagggtgaacaaaggcatagccgagccctgggcgaaaagaaaatgcgatcccaattccactccacacaacaacccaaacccaaaaataaaaagcccagcctggcgaaccaa

SEQ ID NO: 180334 - DNA, 1324 bp, Zea mays
  Clone ID: MRT4577_96045C.1
ttcaaaaaataaaaaaaaaaaaaaaaaaaatccttccttctcaagagtccagagtccagacctccacacaacgcgaaccaagccgactaactaaccgagcaagcaacctaaccacacgagcggagcgtgcgaaacccaaagcgcgaaaaccctcctcgctcaaggatccctcccgcggcgcgcggaagcaaacccccccgaccggccgccgtcgggggccgcggcagggacagcggaagcagcatcactccggagcggcggggctcagccagccctcgaccggagcgggggggttccgtaatactctccgaatctgcggaatccgtggcgggatttcgcggggccttctagtttcgggcgagacaatggtggggttcgcggggaagaggaaggagttggagcaggtgatggacggcctctctgacttctccctctccggccccgctgccaagagccgcagattggacgccgagctcccaccaattatggaagaagaaccacctgctccttcaatgccattccagatgctgggagagaaaatcaataacggcgttgacatacccagtatggaattcatgatggaagatctaacaacacatcatgtgcctagtgaggacatggcacttgttttatacaaaccagtagataattccgcaccatttggtcgtggcatctcaagttcttcattcatagtgagttcagacttgatacgtggtctaaagaaccacgctttcaatcaagcgaactatcatgtggtggaggatgaatctcctgaacgtaggaacagcttggctttagttccttggacaccaccacaagtgtctataagatctgactgggttgccgctgagccagagcgcacacgtatttttgaagtacctatggacgctgatgagaccgaagtaacttctatggatgtcgaggaaacgccagaagcagtttcgggcggattcaatggcgagaaccttggccagtggctacattgtgtgaccccgccgtcgttaccaaatccatccgcccatgttatgtggtcaaggtgacaactgggagtctccctgcgtgctgactactgaatcataccaaggatgaagaaatcctctaataatcctcccctagctgtgtggtagctgtctgtttagttgaaaacaaaaaaactggttatgcttagcatgatgtttcctggtgtagtgctgatcgtccccagtaatatcagtgtgagtaaactccatgttagaacctggttagattggcattcaattaattgaggtgacctgttggatttaaaacatcttaaattcgatgccggttcttttttttattcaaa

SEQ ID NO: 180335 - DNA, 1071 bp, Zea mays
  Clone ID: MRT4577_96046C.1
atgcccctaccaatccccaccgtcgtctgggcggacatcggattcgacttcattgaagcactgccccgtgtcaatgggaagtcggtgatcctcttcgtcgtcgaccgcttcagcaagtaccgccacttcatcgccctcgcccacccgtacaccgtcgagtccgtggcgcaggccttcttcaccgacattgtgcgcctccatggcatgccacagtccatggtgttcgaccgcgacccggtgttcacttcggcgttctggcgtgagctcatgcgactcatgggcacaaagcgacacatgtcatccgccttccacccacagtcggacggccagacggaggcggccaaccgcgtcatcattatgtacctctgctgcttcacgggggaccgtcctcgacaatggcttcgctggctactatgggccgaatatgtgtacaacacaacataccagtccttgctccgggagatgtcgttccggtggtgtacggcacatgcggtgcaaaaacgccactacgacaagcaacacaggccaaggacctacgtggtcggtgactgggcgctccttcgtctatgccagcgcgccccgtcctcgctgccacaacagacaacaggcaagctgaagccccgcttcttggggccataccgcgtcattgagctcatcaaagacgttgtcgttcgcctggagcttcccccacaggcccgcattcatgatgtattccacgtgggcaccttgaagaagtatgtggggacaccgtcatcaaccccaccacccctgcccgacatccatcatggggtgatcgttccagagccggctcaggtcgaccacgttcgcttggcgcgtggtgttcaacaggtgctggtccattggcggggcgaaccgacgacttcggcaacctgggaggacctcgacgggttttgtgccacgtacctagattttcagctcgatgacgagctggacctcgagggggggagatgtcatgtggggccgcacctatgcgcgccaacagcgagcccgcgacgccaggagatctgcggcgcgggcgtccacggtgggcgcggacagcagctcgcctaa

SEQ ID NO: 180336 - DNA, 499 bp, Zea mays
  unsure (1)..(499): unsure at all n locations
  Clone ID: MRT4577_96047C.1
gggggggggtttttttnttttttttttttttttttttttttttttttttttttttttttttttttttttttgtttttttttttttttttttttttttcccaaaagggcaacatatttttttaaacaaacaaaaaaacatacccctaatttttaaagcggggcgggggccttattaaaccacaaccatccccatcgtttattacaatgctataacaaaaaagggtccctcaaaaaaaaacaggggccccccccccccctgataacaaaaatagggggggcaaaaaaataaataccggggggaaaaattctcatccatgggcgcaatcaacaacttccgacccttaaaaaacatttggcacccattattgtcttacccaaaatctacagaagttcaccggccctaattttttaggttgcgaaccccacgggaaaggccgccaaaaagtttttaaaacttccccaccaaagctttttccccttttgaagaaccctcaaactt

SEQ ID NO: 180337 - DNA, 310 bp, Zea mays
  Clone ID: MRT4577_96048C.1
ctcatgtgtgcgcggacgggtgggggtagatctgtctttgactttggatgctgccctcggggaggccaagatcgatggatctaacccactgaagaatgatagtctagacaatctacctgagagagcatactgggtcctctaaccttccaggtgtagatggagcagcacacttatacctattggcagcctacgcaatcgatgacctcctgagttgcttcacatttgtcagggctgcccaggcccaacaaggtctagagtatctaccagaacggatgactgccagacgaacatcaaagaccaaatgtctctg

SEQ ID NO: 180338 - DNA, 217 bp, Zea mays
  Clone ID: MRT4577_96049C.1
ttcacggctttattatcacatcaactggccatggcgttagtatcgcttcccacctggggaggtactactcgatgctcgggaccttcaaggcctacttgaatatcgtgtgctacactaccatatgcttcgacgtgaagcccatcacggtctggtccatcatgggcccgctcaagcttccatggggaggagttgggattgacatcggcatctagggcac

SEQ ID NO: 180339 - DNA, 136 bp, Zea mays
  Clone ID: MRT4577_9604C.1
taccctcccagttctcccggatagtttgacgcgcagcaccgtcttttttacgctcttttctccatcagatacccgctccaaggggcagagaggacattgagattgctcgtcgctcggcagactacacgagacatca

SEQ ID NO: 180340 - DNA, 289 bp, Zea mays
  Clone ID: MRT4577_96050C.1
gtggcagccatcaggtgagccaagatgggtgcatacaaatacatccaggagctgtggaggaagaagcagtccgacgtgatgcgcttccttctaagggtccgctgctggcagtaccgccagctctctgcgctgcacagggctccccgccccacccggcctgataaggcgcgaaggctgggatacaaggctaagcaaggttatgtcatttacaggatccgtgtccgccgcggtggtcgcaagcgcccagttcctaagggtgcaacctacggcatgcctgtccaccacggtg

SEQ ID NO: 180341 - DNA, 259 bp, Zea mays
  Clone ID: MRT4577_96051C.1
cgtccggttccggtgaacctgaatttatggctggaactcgctttgcaaaagaaaacggctaaagaaactgctgcttgtcacacctcatctgataccataacaacacctggatgtgcacccttgatgtaccctcttcactaggcgtgtatatttcggggagatacctaaaggttgattagaaaacttgaaaagataggctataacctttgcttagtatttggaaaaacaccttatgccctgtgtttgctattatattttc

SEQ ID NO: 180342 - DNA, 627 bp, Zea mays
  Clone ID: MRT4577_96052C.1
gtcacttgcacatgcttaataggttagattacaacatctggtgcagtcctctccatatctgatatttttctgttgcatcgatagccctcatggttattaaaaaagggaaatttggatccacaccattaaaagatcaccactttggatccataccattactatctcacttacatgtgggtccacatgagtcaatgacatgtggggtccatggtatatatctaaagtttggatcttttaatggtatagatccaattgttccttaaaaaaatgtacttgtttaccatgtatcttgctcaatatatgattggtgactcaccttgcttgacaagttggtatgattaagcgttttttggatcatgagggtgagatgataaacaacctttggtccacataattggattagtgaggtggaagcttcggatatagcggtgggctttacggttgccctaatagtgaacaggtccagcacatttactaccatatttttccctccttaatctaatcactaaggaggatcgaaattttttcatgcatagctttggttccctctcaactgattattcacttcaactgttttttaaattcgttaagatggaatgaaattgcttatttaaccacctatgctga

SEQ ID NO: 180343 - DNA, 371 bp, Zea mays
  Clone ID: MRT4577_96053C.1
gagacaattttgttgctttgtgctttactgttgcaacagcgaagttgtatgatatatatactgtcttactggcctgggagaatcaaagcttttggctgtttattgatgttgtccaggaacctgtgtactgtactgctgtggaaaattgcttatagcagtaggtgcgatggttttctcttgccattgtctggtgtttcaaggtgcccaatatgaatgtgctcttcagttatttcatatatgggtgatatgctggattgctggttcatatgaatttattcacctgtgaatgtgaaagagctcaataaagatgcccctttttcctttatttattaggccacgccggaaagataagcagctgagagcatgcatgc

SEQ ID NO: 180344 - DNA, 367 bp, Zea mays
  Clone ID: MRT4577_96054C.1
gaaacgaacccgtcccctgccacctccttcaagaagaagaagaggtactccaagaagcgcaaggccatcgaagtcactgtagatgcctcctttcatggcgccgccgcccccgtcgtcggctacttcccgacgggctacgacccccttgcggccgcagagcccccacgtgcgcggttgttctgccacgagaagcaccataaccgcgtcgagctagtggtcggcgcccctggtggaggccccgacttcgtcggccggagctacgccggcgaggccgctgcgccgcagctctgcggctacgccctcggcgtcctcgacaaggccactggcacccttaagattgtccccatctcctccaacaagattttga

SEQ ID NO: 180345 - DNA, 233 bp, Zea mays
  Clone ID: MRT4577_96055C.1
tcgcagacgcgtgggcggactcgtgagcggattcgtttacgaacctggactgactataggtaggggaggtactaggagcatgtgagtccggtatttatttgggcctttaaacgtaagcccttgactcatgcatgcatacaaattgatctatacttatcgttatctgatggaaggagtgccattttgtcgagttaatagatagtatcatttacccatttgaattctcctttgaa

SEQ ID NO: 180346 - DNA, 1047 bp, Zea mays
  unsure (1)..(1047): unsure at all n locations
  Clone ID: MRT4577_96056C.1
caaattccaacctatgtgaagcagtttagctcccttaatcctaccaagtaagttctctcgaaaaaaagagacacttccaattttaatgcatatgtaaacctacaaaagatgttcatgtaggaccatcaactccaaaaaattattagtaatgtctttactacaagaatcaccctccatgtccatgcataaactatcaacaaccacacctcaaaggcaagttccttcaaatttatacccgtacaatctaacacttacttaataccaacttaaatattatataaaaaatataacaaatttattatgtacaacaggtttctagagcattagcctaccatgcatgtcaagaaacacaccagagtatttcaattttacttcgccctcttttttaacataatatacatatcactgttttttagcataccacctcatgcttaacgcatttcttatatatatacacatgttaactttccacgtaactcaaactgacacagctcaagataaagttggactccatattaattgttacttacatattatcatcttcttttcccccaaaaaattcttactagaatactaagaccatttttacacagcaatcacataaagttggatccaacatcaacaatgattttacaaactctcttgaatcacctccaaaggttcttattatacatctccaattgaattatctaaaattaaaacatagaattcaattatgttcgttgtttacaggttgaaacaacaacttttgaagactggccatgaatatctagatagtactacaccatctacataatttgtaatcaatataatttgcatattattcatcggacacctttataaccatagcacaacatgacagtagctcacaggctctttaacaacaactgatgttcaccttttctgcacaggtaattgttttgcatgtctatgacgagcatcgtcacttttggaccacgaatnttttttgtgtactgaaaccttttcagttctttatatgtttaagctatctctggctcttgaattaccctagaatctggttaacct

SEQ ID NO: 180347 - DNA, 313 bp, Zea mays
  Clone ID: MRT4577_96057C.1
cgccaagcgtgccttcgtgcactggtacgtttgtgagggtatggaggaaggtgagttctcggaggcttgtgaggacctggcgccgctcgagaaggactacaaggaggtttttgctgatttctgatacaagctcatgatgccgaccaatccgctcgactacataaatcttttcttcaacaccattatcagcctttgtagggtcactgaactgtgctcttagatggagatggtcatttttttagctttcttccgtgactttattgccgtctttatggtgtttcatttttattgtctgtgtattattatgagattt

SEQ ID NO: 180348 - DNA, 138 bp, Zea mays
  Clone ID: MRT4577_96058C.1
actagcggcaggagccaaccacacgtacagacacccacccagccgaaatgattgacgtcagaaccgaagggggagaatactgataggagcgcggaaacacccacgctgagggacacagagcccataacacaagcacgt

SEQ ID NO: 180349 - DNA, 567 bp, Zea mays
  Clone ID: MRT4577_96059C.1
acggacagattacacagggcggacttgacagatggatactttgtctgtttaatgattggttatgccttcggattgacaggcacatacataggcttgtacctgatgaacacgaggccatgccaagctttgactctatccttgacaccgttcgaacaacattaggagcttactcagtcactgcattggagacgagagagcttcggatgctctgtctacctctggaacgacaatgtgtcttccgactgctaggcacacgtatattgcttatatgatgacccttgatgcacgctaatacatgccttcacttgtgttaatctaaacatgcatactgtggtctggggtggaatatcgccaggcgtcaatatggtccatgctcaggatatgtatctgttgatataggacacaacgcacaccacacattctattgctggctggatatgaactaaccctctcggtgcctttacacggtacatgattaccccctaggtgatgcaaagttaaagctttttatagacagatctgcgtcattttacttaccgtatcaaagcaacgtttatggtgccaaaa

SEQ ID NO: 180350 - DNA, 385 bp, Zea mays
  Clone ID: MRT4577_9605C.1
gcacgagggaaggtgagcttcagaatcccatactatactcagtgggggcagaacgttctcatctgtggttcagatcggttgcttggttcatggaatgtgaaaaagggtctattattgaagccttctcaccaaggggaagagcttatatggtctggaagcattccagttcctcctggatatcaaagtgagtacagttactatgtggtggatgatagaagaaatatcctgcgatgggaggttggaaagaaaaggaaactgttgcttcctgatggatttcaggatgggcaatcactagaacttcatgatctctggcagactggttctgacaatatcccttttagaagtgcatttaaggatgtcatctttcggacaagttggagtttgg

SEQ ID NO: 180351 - DNA, 136 bp, Zea mays
  Clone ID: MRT4577_96060C.1
acggttatcttttgtttaataaaccacttatattttatggggatcccctgcagaactggggaggctccgtttcacaggaacggatcccataacctttctctccgacgaaggcaaatgttttatgtaatttgcctga

SEQ ID NO: 180352 - DNA, 257 bp, Zea mays
  unsure (1)..(257): unsure at all n locations
  Clone ID: MRT4577_96061C.1
ggccgccgcgggcaatcgcacgtgctggctagactaaaggggngaagntaagcnagtgcctgtcaaaccaaccttgcttgcgacttgcgagaccacaccaaccccccagccatggtagcgcgacacaggcgggggggcctgggttccgccgtcgcgagcttcctcttcctctggcccatggtgaagagacacgggctcccgcaccatcagccaccgagccgccacctgggccacgaagctcgtctcctacttcaact

SEQ ID NO: 180353 - DNA, 229 bp, Zea mays
  Clone ID: MRT4577_96062C.1
ccggccgggttgccaacacaagagccggcgcggcccaactcccccagcgcagccgagagcccgacacgacggccgaccaccaccacggcggcagggccaggcactccaacaccgacgagcgccacgacgccggcaggcacggcggcagcgggagggcgaacccacgcaccgaccagcaccacgaccacgcggaccaccgcacgaggaggcccgcgcacggcgccgacaa

SEQ ID NO: 180354 - DNA, 557 bp, Zea mays
  Clone ID: MRT4577_96063C.1
gggtacctcgaagccggccgggctcttcgctgttgagacagcgcgcgtgcgcctgaacgatgctacccgcaacctcgccgcgcgcgcccgccgccacaacctcgccggagtcgtgcgcgccctgcctccaccccgcgcggcgcagacatagcgccatcgatgctctcgtcagtatttgccaacctcgcattcaaggttgagcgcatggtccgactatgctacgactgtttacatatggacttcatgaatgtgcacttcgttcctaacctgactattggggatacggtgatccaaagcttgaggaaacactaccacagcatatttgcactgccatcttatggtcacaaagccttcctattacacacaaccactcggaaaggctggcgcttctggaatcacattccatataaaagttgttagagacaactggcaagatctcatcccaagcattaattcaaagggtatgtgtactgaagtatcattgaatgacagctactccagtgcaggaagtttttcctctgcagctatcagaacatccgttagaattgcctcttgtg

SEQ ID NO: 180355 - DNA, 894 bp, Zea mays
  Clone ID: MRT4577_96064C.1
cattgggaccctcgaggccggccgggccgggacacgatacatgcagctagctcaagggaaaggcaagagactccttgctagccatggccttctactatgcaatagcattgcttggcatgcttgctgtcttctcctcgggggggaatgcactcgatgacaatatgctgaaaaccacggtatacatacaacagcttccctatcaaaaccagagaggtgtagcagaaggtacggcagtaattagctggtacataaaggatgggccaggtgcttctgcgaatacaatcgggcatgcggagggcctggtaatcttgacagatatagccaggtcttcgtggctaatcactacggacttggtgttcgacggtggaagcctcgcagggtcctcacttcaagtgatggggcagcatgagtcttcaggccagtggagcattatgggcggcactggacaatttaccatggcacgaggtgttatagagtacaaaacaatccaagaggacagtagcagcaggacctttgaagtatgcatatatgcatactacactcccatgaacggatggaaagccggtctggctttaggtgacactggcagtaaaccttgaggactacgatcgagatttagacgaccatccatgtgtgcgcgcgccaatgcaaggagtgacgtacggcagccagatctacaatctttttttatgcttcatccaataataaatgaaccccactcccttatattatgaattagaaaaacacaatcatttgttgtattattccagacaacgaatttatttgcagtttattcagttattttctaaaacatgcatggtccccttgtctcacagtggtcatcaataagacgtgtcttcggtggaaaaaaaaaaaaaaaaagccccttagggc

SEQ ID NO: 180356 - DNA, 279 bp, Zea mays
  Clone ID: MRT4577_96065C.1
cgacagctccgaacgccggtcgctacaagtccagtacactcgggtggcgtgcaactggaacggcttggacatcgccttcagggtggatgccggctcaaacgccaactacctggccatgggcatcgagtacgagtccggggacggggacctgcgtgccgtgtgagctgaagcatagcggggcgaaggtgccgcctgaacggtcctggtgcgggggagactgcgaagagaaacccaggagccatcgacatccgaaacaactccctggccgtcttccgcccc

SEQ ID NO: 180357 - DNA, 451 bp, Zea mays
  Clone ID: MRT4577_96066C.1
gggaaacaaaacagccccgggggggaagctttcttttcaaaaaactaaacaacctgaaagggggataaaacgagccaatcccatggcctaaccgaccggcccaaagaactccaaaaatggccaacaggagaaacccggggaagggggaaagcccccttacagaaagggggggcacttactacggccgggtttacaagccaaaacaacatggccggcgtttatggggggccttgaaacaaagggcaaaaaagggccctgatccaggggctttgggccgaaacagggcaaacaaaacagggggttattcccgggactggccagggaccaagggggtgggtttgaattaaaattcattaccctaccccgtacttaaaaagaaagggctgtagcgcatagggggggggaatctaggagccctcccataaccattgggggggaataacggggcccc

SEQ ID NO: 180358 - DNA, 476 bp, Zea mays
  Clone ID: MRT4577_96067C.1
aaaaaaaaaaaaaaaaaaaaaaaaaaaaaaaaaaaaaaaaaaaaataaaacctaaaaaaaaaaaaaaaaaaaaaaaaaaaaaaaaaaaaattttaaaaaaaaaaaaaaaaaaaaaaaaaaaagggtttgtccttggcccgtggggccccccggggcgggcccacccaaattttttttttttgaagggccccccccccaaggggtttttgaaaaaccttggggggactcttttggcccttgggttgaaccataatgggaacctgttgttgcaaattattttgggaaagggggtccaagggcctttggggctttttttttgggaactttttgcttggaaaaccctttggggactttttgctcggcttattaaggggggactttttgttgggggtatttttttggggcttcttcccggggttggttggagggggaagggccaccatttgttgcacggttggggccgccccccccttaag

SEQ ID NO: 180359 - DNA, 438 bp, Zea mays
  Clone ID: MRT4577_96068C.1
aagcaggaaacggggaaatcaggtctcaaagcattaacaagaaacccaaaacaaaacaggggaaacacgaaacaagcaggggccccaggggggtcaaagacccacaccaaaaccggtaaaaaaaaccgggggggaaacaggaaaaactaaaaccccccctcaaaacacccccattttattcaaaaccaaaggaacggcccccgggggaggccacaaaaacgggggggggggggcccaacagaccaaatcagagagatctaggggaggtgtcccaaaaaaaggaccttgaccaccttgggagggggagcccttgcgggggcccaccttctcaagggccttgacaacgtccatgcccttaaaaacctggccaaaaacaaagtgcttgccctaaaaccaagggggcccaacggggcaaaaaaaaaaccgggaccccttggg

SEQ ID NO: 180360 - DNA, 264 bp, Zea mays
  Clone ID: MRT4577_96069C.1
tcttcctctatatttccctcatgatagctcgagcccacactagttctatcagttaaagccagggaggggaggcatcgggggcgcatctccctcaacctattctcatactttaaataggtattactgcgcagctgatccggttagccgtttcacggaatcagttaactccaatagggccattttttgtaaacttaactggcgattctggtttaacccgtatcctgtttactgttccaaacttcgccctatcctatatcccacata

SEQ ID NO: 180361 - DNA, 502 bp, Zea mays
  Clone ID: MRT4577_9606C.1
gcgaacaaaagctattgctttagcagcgctgcaacgatcatttatgaaggagaaacaccacatatgagacagaatctgtggacctcttggtgccgctgattggctcgttaaacatcagcactgcgtgcatgatgggcatcactgggatgttggcacccattctgcaggaaactgtgttacgaggatttttaaagggatcactgactatgaggtaaatatgcatgaattatgtgccttgaaatcctataaaaaactataaaaggagggaatttaagatggactgatctaactttaagctacaaataagctgttatcaatacaggtttactacttcataatgctgtgcttataactgctgcagtgaacagactatgctcactttacaccatgagaatgcactgagtttatcgggcttggtaattgatacatgtgtaataggcataacaaccacaaataatgtaccaatatactaaatctaagtaatttaacataggacagacta

SEQ ID NO: 180362 - DNA, 160 bp, Zea mays
  Clone ID: MRT4577_96070C.1
ttggggaaagctggccgcctgcaggcccggtccggattttgggcgaccagcgtcgggaccgtggggcatggaaacctccagctgctagagactccatggctcggcctgcggagcggcacagaacactaagcacctgtagccgtcgggctgcccaggcgac

SEQ ID NO: 180363 - DNA, 584 bp, Zea mays
  Clone ID: MRT4577_96071C.1
agcccactttggcccaggatcccgacaagggccgcccgtctgtcgcgcgccgcctcccctcttcccctcttccaccccatgccgccggccgccgccgtctcgtaacccaaacggacccatggccgccgccatcgctgcctcgcttatccgccgcaccacctcatcgccgtaccgccgacttctcctccccaccttctcgcacctccaccgccctgccccccaatctccatccccatggcccccatcccaacatcgcttcctctcgtctgacgcaaccgacgaccctgatcggaagctgcctccgctggacccgaagcaactgtggcgcgagctctccaccgccgagcctgcgacgggctcgtcgcgcctccccaaggccacgtgggacgacgtggtggccctcacccgccgcttcgccaaggatcccgccattgccgaccaggccctcgcgctctacatcccttcctcagagtttcccacgtatgctcggcacttccgccacttcatccctgcgcgcctctcccaagaatccgccgagcagctcctttctctcccgggcgaggacgcgcacgccctcctcctcc

SEQ ID NO: 180364 - DNA, 343 bp, Zea mays
  Clone ID: MRT4577_96072C.1
ctcacgaatgaaaaatgttgcttacatagaagctacaactaaaccaatttcttatagatactcaaagaaccaacgtggtatcgtaaaaccttaattctaaattacctgtaatctggatcagcatcgccagcactagcatttgaaatacagaaaaggcatgacagcaatagaaacagggctgtccagtagtggactgccatctgagcagaaagttgaagtgaaatcactgcgtgataataacaatgcaagcctcaaaaaacaaagaaagaaatcgcttaaaggagctgcaaatggaaactatgaatcagagactaaaaaaaaaaaacttcaaatgtgaaagatc

SEQ ID NO: 180365 - DNA, 238 bp, Zea mays
  Clone ID: MRT4577_96074C.1
cgcaaccgacatcctttgtttgtgctgttccttttctgggggggggacccaccacaacaccggcggggttttttaaaaacaccccatgcctctccgatttacggaacacaattctttttgcacctccttcttggggggggggcctctagcacgcctggcgcatgggctcattaaaagtgcttcgttgtgctccccccccggtagttcgaagcggggggggggggggtttctttttttt

SEQ ID NO: 180366 - DNA, 168 bp, Zea mays
  Clone ID: MRT4577_96075C.1
cctcgagcagatcatagggtgaccctgaagaatggccactcattgtacatcctcgagcagatcatagggtgaccctgaagaatggccactcattgtacattcgccgcgccaaatccaagccaaacaggcagatggaaccttgtttgtgtccaagcaaagatccatggg

SEQ ID NO: 180367 - DNA, 180 bp, Zea mays
  Clone ID: MRT4577_96076C.1
acgggaacaggttcaaatgtgcattcacgtactaccaaacatgtacattcccaatacttggggaggggtgcaaagactgactggcaagtgacaataaaaataatctggttctctctcaaaaaacaaataatactgtataaaatattaataaaaaaataaaaaaaaaaatgtaaaaaataa

SEQ ID NO: 180368 - DNA, 267 bp, Zea mays
  Clone ID: MRT4577_96077C.1
agaacatcgagacaccgccgagcgagctagccgttgagaagcaggtccagtaccaggagataagggaaggaagcccagctctctctagcctggagccgagaagcagtctgaccaaggaccatctagccatgaaggatgccatcccacgcgtaaacggctgacatacctgcgcgcctacgagtacttggacaagatcaccggtgaactcggccgtgggatactggacgtcggtgcgtaccagggcatgagatgtgcggagacatatca

SEQ ID NO: 180369 - DNA, 262 bp, Zea mays
  Clone ID: MRT4577_96078C.1
ggacctacctgctatcgatcgccctctcgccgacgacactcgatgacgacgacgcgaacggcagcaactgccggtctatcgggctgggcttctcatatacccagatccagcaccagcaccgtgccatctacatacccatcgtcgactacaaccgtcacgaagacgaccaggagaccgttgaaggttcccgctcaaaacctcggggcgagcccactagccaggcgcccgatgacatcttcatgtcggcgctcttcaaggacgc

SEQ ID NO: 180370 - DNA, 730 bp, Zea mays
  unsure (1)..(730): unsure at all n locations
  Clone ID: MRT4577_96079C.1
ccctcgaggctcttccgggcaacaccctaattatatcgattagcatttaacactgttgaaataaaatcttgcaactgttgatgttgtattgctagggatttagttttagtttttactgcataataggtttttttatgtccctggagtccttaaaccatactggcaaacatacttgtttgtcgcaacagttaattgaggtcgttgtgtgcttacctgaaatcaggtcatgcttttcaattcttttgggaatcgaactatgtactgttcctagatgtgtgctgctctaacctatatgggtacaatagatttagagatttatcattgatcacgtcatgcattccaatttgttttgtgattggattcctcaccatgcctaaacactctgttctaactcatacgggtgcgtgggagaatggcatatcatgaaaacggttcgtatcccaatttcctttgaaatcagactccgcatcgtgcttagacacactactctaaattgtatgggcatgaagagaggttggtccattggatcctgtcgaacggttgtaagcgtttgacactctttttgtttttatgtcactaaataggttgtcttcttcgttctgttttggcttagtgtttatttaggctagattggacaataaactgctcttgatttccattttgtggnttaatcaggtagcccttgataagagtgcatggaatacagntatccatgtgtctgaaccttgac

SEQ ID NO: 180371 - DNA, 404 bp, Zea mays
  Clone ID: MRT4577_9607C.1
ggacggggggaaaaaaacccttttgcccgttggggggggaaacttacaaaaaaagcgtccaaaaccaaatttaactggcccggggaaacaaaaccccccgggcaggggggacccaaaaaataaaatcccccaaaacgatggggaaaggacaatcataaaggccctattggattttaattttttaaaaaaaactttggtttttttgaaaccccccgcccatccaaattttccaaaaagctttccgttttccggccccatatgtttttttcccccaataccccgtttcaggaagggaggaaaacctggcaaaaacatatgatgatgtttggccccaggtaaggaccaatcaacatacttaatatccccccccatttgggggggccgggggaaaccgtttagggggg

SEQ ID NO: 180372 - DNA, 1816 bp, Zea mays
  unsure (1)..(1816): unsure at all n locations
  Clone ID: MRT4577_96080C.1
gggtacctcgaggccggccggngagagatctcaacctcgactttgggctgggcagactgcataccgcagagcgcagagagcacgccacccacctcgtcccctcaatttcgcctgttcgcccccaacgcctcggtgatgggggcgtcccgcgacgtgcacctgctgagctccgcctttctcttcgtcttcctcgcctaccatgcggcgcagaacctccaaagcactgtcaacacggacgagaacctgggctccatctcgctgggcgtgctctacacgtccttcacggcgttctcggcggcgggctccgcggtggtgcggtggatgggatccaggcgcgcgctcgtggccggcacctccggctacctcctctttatcgcagcgaacctcctaccgtcctggtacacaatggtcccagcttcactctaccttggttttactgcatcgatcatttgggttgggcagggtacataccttacatcagctgccctcagtcacgcaagagaaaataatttgcccgagggtccaactttagggagcttcaatggggagttttggggaatgtttgctagcacacaggtgattggaaatttgatctcgcttgctctgctgagaaatggaaaggatggtggaagtatcacagggaaaaatcttctgtttgctgtgtttcttggttgtatgattgtgggcattgtattaatgtgtttactttcgaaaagagatgagaaaaaagataatacttcaacgcattcctcatttggagctatgttgaagtacatcattgcgccacttaaggacaaaagaatgcttctcaccattcctcttatagcatattcaggtttacaacaggcatttgtatgggcggtattcacaaagagtattgtaacacccgttcttggcatcagcggcgtcggtggagccatggcaatttatggtgcagcagatgtagtttgttctttggttgctggacgattgacctccggacttcgctcagcagcatttatagtgtcggttggagctattcttcaggccatagtcctgttctggctgcttcttttttacagtccaatggatggactgcttggcgcagcgataccattattcataggtgccttgtggggtgttggtgacggtgtcttgaatacacagttaagtgcattacttgggcttctgttcgaagatgtcaaggaggctgcctttgcacagctgaaggtgtggcagtcgggcgccatcgcagtcatcttcttcctgagcccaagcatcacgctgcaagccatgcttctcctgatggccgcggctctcgtcatctcctttggctcattcctgttccttacccttgttgttgagaagtcatcgcccgtcagagcctgaagtgcgaaaccatttcccgatgtccagaccggcgccagcgtgacttggtcagtgttaccagtggcctgggcagcgccatcgttgtatcccaatttcaccggaaacgcagcatccgtcgagtgcgatttgtggcacagtggtaccatttcaggcagccagtatctgaaccgaagctgtagcagctagcagttcgtgcaacggggaaaccgtcaatttgggcacgcttcttgctttgccagtagtggtcctttctccttttgcaatgtctgcactgcagcaatgttgttggaaaaaaaggatgttgtaagaaatgttgtttcatttgtaccacgtcctatcagagtggtcttttttttttttgaaagatctatcgctctgcttttaagaaagcacagaaggtacacaaacagcatttaggttcatacaagacaaggaaaaaccaacagtc

SEQ ID NO: 180373 - DNA, 2064 bp, Zea mays
  unsure (1)..(2064): unsure at all n locations
  Clone ID: MRT4577_96081C.1
ctcggccgggaaataaaattacaatcacgaagaagaaaattagacacgaacctcgactttgggctgggcagacggcataccgcagagcgcagagagcacgccacccacctcgtcccctcaatttcgcctgttcgccccaacgcctctccatggcgggcgccgacgcagggctcgcgtcggccgccggcgacgtcgaggaggccgcgcccctggtcgccggccccggctcccgccgcgcgcccgcctcggtgatgggggcgtcccgcgacgtgcacctgctgagctccgcctttctcttcgtcttcctcgcctaccatgcggcgcagaacctccaaagcactgtcaacacggacgagaacctgggctccatctcgctgggcgtgctctacacgtccttcacggcgttctcggcggcgggctccgcggtggtgcggtggatgggatccaggcgcgcgctcgtggccggcacctccggctacctcctctttatcgcagcgaacctcctaccgtcctggtacacaatggtcccagcttcactctaccttggttttactgcatcgatcatttgggttgggcagggtacataccttacatcagctgccctcagtcacgcaagagaaaataatttgcccgagggtccaactttagggagcttaatggggagttttggggaatgtttgctagcacacaggtgattggaaatttgatctcgcttgctctgctgagaaatggaaaggatggnnggaagtatcacagggaaaaatcttctgtttgctgtgtttcttggttgtatgattgtgggcattgtattaatgtgtttactttcgaaagagatgagaaaaaagataatactccaacgcattcctcatttggagctatgttgaagtacatcattgcgccacttaaggacaaaagaatgcttctcaccattcctcttatagcatattcaggtttacaacaggcatttgtatgggcggtattcacaaagagtattgtaacacccgttcttggcatcagcggcgttggtggagccatggcaatttatggtgcagcagatgtagtttgttctttggttgctggacgattgacctccggacttcgctcagcagcatttatagtgtcggttggagctattcttcaggccatagtcctgttctggctgcttcttttttacagtccaatggatggactgcttggcgcagcgataccattattcataggtgccttgtggggtgttggtgacggtgtcttgaatacacagttaagtgcattacttgggcttctgttcgaagatgtcaaggaggctgcctttgcacagctgaaggtgtggcagtcgggcgccatcgcagtcatcttcttcctgagcccaagcatcacgctgcaagccatgcttctcctgatggccgcggctctcgtcatctcctttggctcattcctgttccttacccttgttgttgagaagtcatcgcccgtcagagcctgaagtgcgaaaccatttcccgatgtccagaccggcgccagcgtgacttggtcagtgttaccagtggcctgggcagcgccatcgttgtatcccaatttcaccggaaacgcagcatccgtcgagtacgcggggtggcacagtggtaccatttcaggcagccagtacctgaaccgaagctgtagcagctagcagttcgtgcaacggggaaaccgtcaatttgggcacgcttcttgctttgccagtagtggtccttcctccttttgcaatgtctgcactgcagcaatgttgttggaaaaaaaagatgttgtaagaaatgttgtttcatttgtaccacgtcctatcagagtggtcttttttttttgaaaaaaaaaaaaaaaaaaaaaaaaaaaaaaaaaaaaaaaaaaaaaaaaaaggaaaaaaaaaaaaaaaaaaaaaaaaaaaaaaaaaaaaaaaaaaaaaaaaaggggaaaaaaaaaaaaaaaaaaaaaangtcccctcccgggcgggccgttaggggcaaattttgaaaattccaataaaattggggggccgttggaccttgctttaaaaggccccatttcccc

SEQ ID NO: 180374 - DNA, 2129 bp, Zea mays
  Clone ID: MRT4577_96082C.1
tacaatgttgagtgttggtctcactccaaatatagtaacctacaattctcttatatatggtctctgcaagtctggggagttatccagggctgtcagtctttttaagaagttgtggacaaagggtatatcccctaatgctatcacatataatacattaattgataagcattgcaaggatggttacataaccgaggcctttaaactaaagcaaaggatgatagaggaaggtattcatcctactgtgttcacctattctatactgattaatggtctctgtactcaaggctatatggaagaagcaatcaagcttcttgatcaaatgattgagaataatgtggatccaaattatgtcacatattggacactgattcaaggttatgttagatgtggtaacatgatagagatttcaaagatttatgataagatgcatatccatggacttctgcccaccaatgtttctggggatgtaaaacaatcatgtcctgctatacacaacccgaatagagaaacatgtcagatgaagatgcacagccagtgctagctgctatcacattctttgcatgtctacttcttttgaaagatggcagtgacttatgtttgtatgaggagcaaatcatgggacccatttctatcttgggatgatatccaatataattgtctaattgtcttctgcgaaggggcctggtcatatcatgagaaatgtttccaacctccctcacatgtcagccaagtggtatcttctaactacaggctggattggctttctaagtgcagagacttgttgctggtgactttgccccttttatctggacttaggaatggcaatactcagcttctgctgggaatttgctgggtatatcggctacaaactgtcaagccatcttaagtcttatcaagtgatagcatgcatatcggtcttctcgctgcagctgttcatgccgtttaaacaattagtcggcttacaattttctacagcccaaggcaagcccttcagattttgtcataccgcttgcaaagtctgttaagactgtatactataccagtgtatctgtggggatgtgtttcaagatgctttttgagacaggagagtctagcgtgaggagataagttcaaatctgtttgcaacatcacctcgttattgaagtgggagaaacgaaagacgactagtctttttcgtggtctcgatccacattctattccagcagaagaactgtcggcatctttgaggtacacgctacattccatcaatattgcagtccgtatcctatccacgattgttcttcatggatcaggctttaagtatggttcatgctcaaatatatggcagcagagttcctactgaagtatatgacagtcccagaggtggtgaagaaaccccattgacagaaagtggttcgagttactttggagctgactctggattctgtcaagaaacagtcttttggttccaagagaagcaatagttttagtttctctggtgcatcttctcactccatggagaggcatcgatatttgcagagaggaatgttgtcgtcatcaaaggcccttcgaactgcttttgaatcgaacattgcttcaaggtcagaaaagcaagcgcagccgctaaacagattgatttgaagtgaagttcagccgtatcatcagacatcatgcacacaaccatcatggtaaattcctgttcagcacgcacagtaggtctccgtgtgctctgtacggcctagtgctgctgcgctagctggttgggtgcgtccgtgcgtggacgcgctgtagcaaccagggcacccctgtccatggtcgcgatcgcggcctccgctggcctggcccttggcgtgtgcggggcgtagagacggaggagaatgttgtactatgtgcgggcgcggcgagcgaagccggctggaccagaccagaccacaccagggccagagccagggccacgtggcattggctcggcgtagagaacgtcctcccaatatctatgaatttactacaatatacgtctcattatttttagattcatatatgtatccatcacgggggcctccggcctcgttatagcaagtatgggctgactgtaatataatatccaactccgattcaaaactgtaatgtttattacaaaatttgacttt

SEQ ID NO: 180375 - DNA, 300 bp, Zea mays
  unsure (1)..(300): unsure at all n locations
  Clone ID: MRT4577_96083C.1
cacaggacananccaggcnncaanaaggaggagggcnnaaaaagggagaaggcagacaacacnacgaancaagcaacaggcngcaanncnncagcggcagaaccnnggaaaggggngncanancncaagcnccnggggacancaaagaaaggggcnacagcnncncananncaaagaaaggggcnacacnggnaagggngagaacagaaaggcngganccacanncccngggacacnaannccannaccaaggcgcnnccnnccancagccagggccacgggccagncaagcccaanaac

SEQ ID NO: 180376 - DNA, 356 bp, Zea mays
  Clone ID: MRT4577_96084C.1
aaaggaacgaataaagggccaatctttgggggggccctttttttatccaaatttttcaaaacccaaaaaggggcaatgggaaaaaaaaaggggggggaatggaatccccccgaattaaccgggggaaaaaaaaaaattgcttccttttttggaaaaagcattataaaagggatcccccgtaaaccccaaggggggggggggaaaacccaagttggggaaaaaaacccacgagggcactcccttttttaacggggaaaccaaaaggggggtgatttccggccccccaagccctttttgggggaggcccacaaagggatcgttttgtccttttcaaccccgaaaaaaaagatgggagg

SEQ ID NO: 180377 - DNA, 1008 bp, Zea mays
  Clone ID: MRT4577_96085C.1
cgctcggaattcggttcgagggttcatgctcaaatatatggtagcagagttcctactgaagtatatgacagtcccatagcattctatatccttgttttatacctaggaaaaatgtttgcacaggtggtgaagaaaccccattgacagaaagtggttcgagttactttggagctgactctttggattctgttaagaaacagtcttttggttccaagagaagcaatagttttagtttctctggtgcatcttctcactccatggagaggcatcgatatttgcagagaggaatgttgtcgtcatcaaaggcccttcgaactgcttttgaatcgaacattgcttcaaggtcagaaaagcaagcgcagccgctaaacagattgatttggaagtgaagttcagccgtatcatcagacatcatgcacgcaaccatcatggtaaattcctgttcagcacgcacagtaggtctcggtgtgctctgtacggcatagtgttgccgcgctagctggttgggtgcgtccgtgcgtggacgcgctgtagcaaccagggcgcccgtccatggtcgcgatcgcggcctccgctggcctgtggccctggcgtgtgcggggcgtggagacggacgcgtgcacgaaacccgtcgaatcggcgtgccccgaacggccgaaccggagacggaggagagagcacactggcacggcctgccatgcctcctgttcatgttgtacgatgcgcgggcgcggcgagcgaagccggctggaccagaccacaccacaccagggccagagccaggggtgcccctcacgtggcattggctcggcgtaaaaaacgtcctcccaatatctatgaatttactacaacatacgtctcattatttgtagatagtagatacatatatgtatccatcacgggggcctcgttatagcaagtatgggctgactgtaataatataatatgcaactccgattcaaaactgtaatgtttattacaaaatttgccttgaaaaaaaaacaaaaa

SEQ ID NO: 180378 - DNA, 346 bp, Zea mays
  Clone ID: MRT4577_96086C.1
cctcctatctatagaaacttttctactaaacccttctatcactctacacaaaacccatcatcacataaacccaacaaatataactccatttttccaaaacctcctctcacacatacaaacaagaatctactccatgtcgcaaaacattaagacaaagatataccaaatagtaaccaaaattgatcacctctatcagatcatcaacgatctccaaatcaatattgtcactctgactcctcccaaaatactcatacatccaaatcctttctaccatttcttactattccataactcacaaaaatttcataaaacacacaaataccacacattccacaaatcccacaaa

SEQ ID NO: 180379 - DNA, 496 bp, Zea mays
  Clone ID: MRT4577_96087C.1
ttttttttttttttttttttttttttttttttttttttttttttttttttttttttttttttttttttttttttttttttttttttttttttttttttttttttttatccaaccggggggctttcaccccccaaaccaaattatggtaccaaaacatttgttcccccccccaaaacccacccacaatgcccaaagaggtgcccctaattccccaaaaaaaaaaagcccccacaaccccacaccggctgctaaacgggggaacccctctaaaccctctatggaaaaattaaaatcccaggatttaacaaaaaccccggcaaaacccaccccccgggaacaaaagcggcaaaaaaaccccacttctcccccttttttgggggccggaacaaggcttaaaaaaaaatttccccccaaaccccgcccgggaaaaaggttttttaaacaacccccccctaaaaggaacccccattgggggcgcccccgaaatccccgttct

SEQ ID NO: 180380 - DNA, 249 bp, Zea mays
  unsure (1)..(249): unsure at all n locations
  Clone ID: MRT4577_96088C.1
ataattcggcngtacacacttcagcacgcagggacgaatttttctaaaaaaacagcgcaaagaccaaccgccgcgtggaacaatcgaaggaataacagcaaatggtcggctagacataagaacacagcgtctcctacagcggaggagggactaagtagtcaataccagtcgacacccaacgaagtggctcacgatccacataacatgccaggacccgggccaacaaaggacaagaactagagggcgaat

SEQ ID NO: 180381 - DNA, 772 bp, Zea mays
  Clone ID: MRT4577_96089C.1
cggggaaaaaaaaaaaaaaaaaaaaaaaaaaaaaaaaaaaaaaaaaaaaaaaaaaaaaaaaaaaaaaaaaaaaacccccggccgccgtcatgtcgaagcgaggtaggggaggttcggctgggaacaagttccgcatgtcactgggtctaccggtggcggccacggtgaactgcgcggacaacacgggcgcgaagaacctctacatcatctccgtcaagggaatcaagggccgcctcaaccgcctcccgtccgcctgcgtcggcgacatggtcatggccaccgtcaagaagggaaagcccgacctcaggaagaaagtgatgcctgccgtcatcgtccgccagcgcaagccgtggcgtcgcaaggacggtgtctacatgtacttcgaagataatgctggagtgattgtgaatcccaagggtgagatgaaaggttctgcaatcactggacctatcggcaaggagtgtgctgacctttggcctaggatcgctagtgcagcaaatgccatcgtaaaaaaatgagagcttgttggaatgtgtttagacttgagtatgatcatctcaattgtgtgttgcagctgttgtaagggtgctattggacttgatggctccttttatgtttggtcactcaattttgtagtgaacagaaatttgtctaccctggttgcctcaagtttgctgtctgagatggttatattatttattttgttctaaagcggacttcttgtttgtatgccacgtatacttttgtgactgcgaatttgttggtattggct

SEQ ID NO: 180382 - DNA, 507 bp, Zea mays
  Clone ID: MRT4577_9608C.1
ggccgcttttttttttttttttttcgcagagagattagttcattttctattgagaaaatagaaattccttcaaaaataacattccaaaacacccctcagccggttgttgaatccggtgcgtatctatcaagtttactttcgattcattcattcacttcacgattttgaagatggggttccctgtgctgctgacgtgctgagctccgtgatgaagctgatgaggcgcttgaattccaacgccgatgccccgtcgtcggcgacgtcacgcttcacctgctccgccagagcatgaaccgacctcctgatctcttcggactccattgcttccctcaccgtgctctccaccacaactctgtcgcacacgtccttcatgtccagcccgttcctccacacggcgcctacgaagcggctgttgatctgctggtcggcgaagaagggccagcacaccatgggcacgccctcgacgatgccctccatcgtcgagttccacccgctgtgcgtcagaaa

SEQ ID NO: 180383 - DNA, 280 bp, Zea mays
  Clone ID: MRT4577_96090C.1
ttcgacaccaggactggaacgtgcactcagtagctgaacctgtctgaaccggtcacgttcttggatcctcagaactctttgctcttgtcgggataggggtgggaactcacgtggggagcggtggctaagaaaatgtaaggattctggaatacatattccatgggactttccttccctctcctgcttcctcttagtcctgctccctaacgtttcggcgaatggggcagcatcactgacgtgtctgggcggccagtgcaggtgccaggttccggtactaatg

SEQ ID NO: 180384 - DNA, 636 bp, Zea mays
  Clone ID: MRT4577_96091C.1
gtccagccgcagccgccgccatgtcgaagcgagggaggggaggctccgcggggaacaagttccggatgtcgctggggctgccggtggcagcgacggtgaactgcgccgacaacacgggcgccaagaacctctacatcatctccgtcaagggcatcaagggccgcctcaaccgcctcccgtccgcctgcgtcggcgacatggtcatggccaccgtcaagaaggggaagcccgacctccggaagaaggtcatgcccgccgtcatcatccgccagcgcaagccctggcgccgcaaggacggcgtcttcatgtacttcgaagacaatgctggagtgatcgtgaatcccaagggtgagatgaaaggatctgcgatcactggacccgtcggaaaggagtgtgctgacctttggcccaggatcgccagcaacgccaatgccatcgtttgagagcttgtttcaagctgtgagactggttatataatgtcagtgtgggttttaactgttgcctgggaaatagtggaactttgcgttgctctgttgtttggcatctcagttagttggtgaacagaagcctgcctgtctacttagtttaacaactgtagcttcgttgccaggtaaaatggtgaactttgcgcgtctt

SEQ ID NO: 180385 - DNA, 656 bp, Zea mays
  Clone ID: MRT4577_96092C.1
cattgggtacctcgaggccggccggggattgggtccaacaccagccgccgccatgtcgaagcgaggcaggggaggttcggcggggaacaagttccgcatgtcgctgggtctgccagtggccgcgacggtgaactgcgcggacaacaccggcgccaagaacctctacatcatctccgtcaagggcatcaagggccgcctcaatcgcctcccgtccgcctgcgttggcgacatggtcatggccaccgtcaagaaggggaagcccgacctcaggaagaaggtgatgcccgccgtcatcgtccgccagcgcaagccgtggcgccgcaaggacggggtctacatgtacttcgaagataatgctggagtgattgtgaatcccaagggtgagatgaaaggttccgctatcactggacctatcggcaaggagtgtgctgatctttggcctaggattgctagcgcagcaaacgccattgtttgagagcttgttggaatatgttcagacttctatatgatcatcttattatcagttgctagactgcaattgggcttatgtttgttcactcaattttgtagtaaacagaatttggtataccaaggggatctatataacaatgtatgccataaattttctgtccaaaaaaaaaaaaaaaaaagcggcc

SEQ ID NO: 180386 - DNA, 965 bp, Zea mays
  Clone ID: MRT4577_96093C.1
attgggtacctcgaggccggccgggagcgagccaggcgaaaccctaccgattgggtccaacaccagccgccgccatgtcgaagcgaggcaggggaggttcggcggggaacaagttccgcatgtcgctgggtctgccagtggccgcgacggtgaactgcgcggacaacaccggcgccaagaacctctacatcatctccgtcaagggcatcaagggccgcctcaatcgcctcccgtccgcctgcgttggcgacatggtcatggccaccgtcaagaaggggaagcccgacctcaggaagaaggtgatgcccgccgtcatcgtccgccagcgcaagccgtggcgccgcaaggacggggtctacatgtacttcgaagataatgctggagtgattgtgaatcccaagggtgagatgaaaggttccgctatcactggacctatcggcaaggagtgtgctgatctttggcctaggattgctagcgcagcaaacgccattgtttgagagcttgttggaatatgttcagacttctatatgatcatcttattatcagttgctagactgcaattgggcttaataggccctttatgtttgttcactcaattttgtagtaaacagaatttggtataccaaggggatctatataacaatgtatgccataaattttctgtctaccatttctcatgaaatgcttatattgtttatattgctttggtgacagcaaaatttttggtagtttgtttcccatcctttatgtttgttcactcaatttttatttgtttcccatccagcagaaatgttttaatgtcatcattcttcctcatttgcatgaacatgtacaagagagttttttgtgattagttgtatttccagctagtttacaagcatgtaaaatgttacatttcccggtagttacaagcatgtaaaataagcatgtaaaatattatattctatttttaaggatcgattttg

SEQ ID NO: 180387 - DNA, 848 bp, Zea mays
  Clone ID: MRT4577_96094C.1
ccggccgggaggaaaccagtgccctaacggcgccgagggcaggttcgtcaggcgtccaaaaccctagttcccaagtcctatataatcagagagctaggtgaaatcctacggatcggttccaacaccagccgccgtcatgtcgaagcgaggtaggggaggttcggctgggaacaagttccgcatgtcactgggtctaccggtggcggccacggtgaactgcgcggacaacacgggcgcgaagaacctctacatcatctccgtcaagggaatcaagggccgcctcaaccgcctcccgtccgcctgcgtcggcgacatggtcatggccaccgtcaagaagggaaagcccgacctcaggaagaaagtgatgcctgccgtcatcgtccgccagcgcaagccgtggcgtcgcaaggacggtgtctacatgtacttcgaagataatgctggagtgattgtgaatcccaagggtgagatgaaaggttctgcaatcactggacctatcggcaaggagtgtgctgacctttggcctaggatcgctagtgcagcaaatgccatcgtttgagagcttgttggaatgtgtttagacttgagtatgatcatctcaattgtgtgttgcagctgttgtaagggtgctattggacttgatggctccttttatgtttggtcactcaattttgtagtgaacagaaatttgtctaccctggttgcctcaagtttgctgtctgagatggttatattatttattttgttctaaagcggacttcttgtctgtatgccacgtatacttttgtgactgcgaatttgttggtattggctacactcacattctactatcatattgtttcccatcg

SEQ ID NO: 180388 - DNA, 866 bp, Zea mays
  Clone ID: MRT4577_96095C.1
gccggccgggctgcggctcccacaggaaaccagtgccctaatggcgccgagggcaggttcgtcaggcgtccaaaaccctagttcccaagtcctatataatcagagagctaggtggaatcctacggatcggttccaacaccagccgccgtcatgtcgaagcgaggtaggggaggttcggctgggaacaagttccgcatgtcactgggtctaccggtggcggccacggtgaactgcgcggacaacacgggcgccaagaacctctacatcatctccgtcaagggcatcaagggccgcctcaaccgcctcccgtccgcctgtgtcggcgacatggtcatggccaccgtaaagaagggaaagcccgacctcaggaagaaagtgatgcccgccgtcatcgtccgccagcgcaagccgtggcgtcgcaaggacggtgtctacatgtacttcgaagataatgctggagtgattgtgaatcccaagggtgagatgaaaggttctgcaatcactggacctatcggcaaggagtgtgctgacctttggcctaggatcgccagtgcagcaaatgccatcgtttgagagcttgttggaatgtgtttagacttgagtatgatcatctcaattgtgtgttgcaggtgttgtaagggtgctattggacttgatggctccttttatgtttggtcactcaattctgtagtgaacagaaatttctggttgcctcaagtttgctgtctgagatgcttatattatttattttgttctatggtggacatcgtgtttgtatgccggccgcgtatacttctgtgactgcgaatttgttggtgtaggctacacttacattctactatcgtgtaaaggctttcggttgtgcc

SEQ ID NO: 180389 - DNA, 330 bp, Zea mays
  Clone ID: MRT4577_96096C.1
gcgcctgttcagacacaggtggcgacggttgttgcgagaatgaagacgaagtagggaagaggatgcacctacatgcctgcgacaacaatggctgcaacagattgtgccagctctgactcatctagctatggcataccctgcttgctactttcaacagctgcttgcatttaaccaactgactgggtcgcactgtgatgggtgcctgcaactgtgacttccgagacttattacactagctgtgcctaacccatgggacactgaatttctacagcagcaacatattgctaccatacagacagttctctttgatgaaccctggcttgccgtggc

SEQ ID NO: 180390 - DNA, 190 bp, Zea mays
  Clone ID: MRT4577_96097C.1
cggacaataggtgatgaagggtgccctcactctcttactatagctcggctgagaaggagcatgatggagcagcacaactgcatgttctcttccgacctccatggttgatcctgggagaaggaccttacgtgaagaggaagctgctagcgcctgtgcagtcatacacttccagacactgacgatggaacca

SEQ ID NO: 180391 - DNA, 945 bp, Zea mays
  Clone ID: MRT4577_96098C.1
gaccctccacaggaaaccagtgccctaacggcgccgagggcaggttcgtcaggcgtccaaaaccctagttcccaagtcctatataatcagagagctaggtgaaatcctacggatcggttccaacaccagccgccgtcatgtcgaagcgaggtaggggaggttcggctgggaacaagttccgcatgtcactgggtctaccggtggcggccacggtgaactgcgcggacaacacgggcgccaagaacctctacatcatctccgtcaagggcatcaagggccgcctcaaccgcctcccgtccgcctgtgtcggcgacatggtcatggccaccgtaaagaagggaaagcccgacctcaggaagaaagtgatgcccgccgtcatcgtccgccagcgcaagccgtggcgtcgcaaggacggtgtctacatgtacttcgaagataatgctggagtgattgtgaatcccaagggtgagatgaaaggttctgcaatcacaggacctatcggcaaggagtgcgctgacctttggcctaggatcgctagtgcagcaaatgccatcgtttgagaccttgttggaatgtgtttaaacttgagtatgatcatctcaattgtgtgttgcagctgttgtaagggtgctattgaacttgatggctccttttatgtttggtcactcaattttgtagtgaacagaaatttgtctaccctggttgcctcaagtttgctgtctgagatgcttatattatttattttgcaaaaaaaaaaaaaaaaaaaaaaaaaaaaaaaaggtacgcgggtattttcttcttgtgccatgtaaagtttctgaagagaaggagcatggcttgaggctgcggtgggtggttgggctggtcggtggtgacctctactgatttttgcgaagtctgcttattggtcaccttcgccagttaaaaaaaaaaaaaaaaaaaaaa

SEQ ID NO: 180392 - DNA, 887 bp, Zea mays
  Clone ID: MRT4577_96099C.1
agaatgttcttgtagtttgatggtgatcggttctgtatgttatcaggtggtgctgggttcaattccttggcccaccatttaaaaaaaaaaaaaaaaaaaaaaaaaaaaaaaaaaattgggtccaacaccagccgccgccatgtcgaagcgaggcaggggaggttcggcggggaacaagttccgcatgtcgctgggtctgccagtggccgcgacggtgaactgcgcggacaacacgggcgccaagaacctctacatcatctccgtcaagggcatcaagggccgcctcaatcgcctcccgtccgcctgcgttggcgacatggtcatggccaccgtcaagaaggggaagcccgacctcaggaagaaggtgatgcccgccgtcatcgtccgccagcgcaagccgtggcgccgcaaggacggggtctacatgtacttcgaagataatgctggagtgattgtgaatcccaagggtgagatgaaaggttccgctatcactggacctatcggcaaggagtgtgctgatctttggcctaggattgctagcgcagcaaacgctatcgtttgagagcttgttggaatatgttcagacttctatatgatcatcttattatcagttgctaagagggctattgggcttaatgggccctttatgtttgttcactcaattttgtagtaaacagaatttggtataccaaggggatctatatatcaatgtatgccataaattttctgactaccatttctcatgaaatgcttatattgtttatattgctttggtgacagcaaaattttttggtagtttgtttcccatcctgctgaaatgttttaatgtcatcattcttcctcatttgtacgaacatgtacaagtgagttttgtgattaattgtgcc

SEQ ID NO: 180393 - DNA, 167 bp, Zea mays
  Clone ID: MRT4577_9609C.1
tagcaaatgtcgaaaacaaaaaactattatcaaaatgtttaacagcactgaggtcccaaagcgcttaggcaaaatcaaaagccgaaaacaaagcagcatgataccacccctgggcaggcaaactctttgaactgctacagttttcatctctggcaagcagcaaaaaa

SEQ ID NO: 180394 - DNA, 162 bp, Zea mays
  Clone ID: MRT4577_960C.1
cccttgctttcggtcgccattatcttgaggactgagggggagctccatacggacgcggaatccaaagcctactcgcccactatcacgaggaaggatctgaccgaagccagcggcttgctcttgagctggccatgcgcctaggcatgctgatcgacgacatga

SEQ ID NO: 180395 - DNA, 365 bp, Zea mays
  Clone ID: MRT4577_96100C.1
cggggcgtctgtcatcatgggcgtttctccgggacccctgtccgtgctgtagcagctgtgcatcaccaagttctcctactggctcaccccattcacggaccacaagaccagcccggtgatgttcggcgccatggccgacctgggcaagtacaaaaccacggtgaaggtgcagactatcccgctgctgaagaacccggtggaggacatctactactacgtgcccatggtgggtatctccatcgggagcaagcggctcgacgtgcctgaggccatcctcgcgccgaggcccgacagcacctgcggcacggagcttgactctgcgaccacactggcataacctgtggagccggctttcaaggagctga

SEQ ID NO: 180396 - DNA, 798 bp, Zea mays
  Clone ID: MRT4577_96101C.1
cattgggtacctcgaggccggccggggattgggtccaacaccagccgccgccatgtcgaagcgaggcaggggaggttcggcggggaacaagttccgcatgtcgctgggtctgccggttgccgcgacggtgaactgcgcggacaacacgggcgccaagaacctctacatcatctccgtcaagggcatcaagggccgcctcaaccgcctcccgtccgcctgcgttggcgacatggtcatggccaccgtcaagaaggggaagcccgacctcaggaagaaggtgatgcccgccgtcatcgtccgccagcgcaagccgtggcgccgcaaggacggtgtctacatgtacttcgaagataatgctggagtgattgtgaatcccaagggtgagatgaaaggttccgctatcactggacctatcggcaaggagtgtgctgatctttggcctaggattgctagcgcagcaaacgccattgtttgagagcttgttggaatatgttcagacttatatatgatcatcttattatcagttgctaagaatgctattgggcttaataggccctttatgtttgttcactcaattttgtagtaaacagaatttggtataccaaggggatctatataacaatgtatgccataaattttctgactaccatttctcatgaaatgcttatattgtttatattgctttggtgacagcaaaattttgggagtttgtttcccatccagctgaaatgttttaatgtcatcattcttcctcatttgtatgaacatgtacaagagagttttgtgattagttgtgat

SEQ ID NO: 180397 - DNA, 742 bp, Zea mays
  Clone ID: MRT4577_96102C.1
cctactacaccaaggggattcatgattgatggtgtttccatgcctgtcccagggaaaatcgtaagatacaccataaaagagaattatcccggcaaattcttgccagaacttacctttgcacaagttgagaaactgagagcatcgttccgtccaattacttcactgccagtgccagaggcaccacccctgcattatgttggcaacagtcattccgctccatctgctgcttttctgcctccttcggcttcatcttcagactcaacacagccagctgcttatgtgcctcacccaagcgcccatgttctcactccagctgctcagctggtgccaaatgaaccttatgcatgcccagatagtcaccttcctgctccgactgctcaattcgccgcgcctgcttactatgtgacagcaactgcgcatcagtatcaagcaggttatcaaacatatggtgcatcgcctgccacctaccactatacccaagcgcctcctttgcaacttgtctatgtgcaagcccaacaccctgtgccagaacatgttacagaccctgcctgtccctctgatcccagctatgatgctaatgggaatgatccgtatctatttgatgctgtgaagtctcagtacctggaaactacttctgggagagctgctgcaccacatgaagtggccgcgaagaacccgcaacttgtcatgcattgtgtgtacgccccaggcagcgagtgtgcaaccggaaaaaccacgcagt

SEQ ID NO: 180398 - DNA, 351 bp, Zea mays
  Clone ID: MRT4577_96103C.1
tcggaagaaagccgggaagcctggtgggaagaagaactggaacatatttacaggattccatggatgatactggaaaccatattaaggccgaggtttttgatttttcaaatccgaggtgattaacacaagaatgctttcggaggaaagacaagtttattggtggattggaattcctgggctgggcctggtggcccttttatgctcctattggtctttggggtaaaccccaagggcatggtacatttcccattggtcctgcgtttggtcaaaagcgtaaacctcttgatggatttggctgtgtttgtcccggcaattttgtttaccaaacttaatgtgagaaatgtttttgct

SEQ ID NO: 180399 - DNA, 1751 bp, Zea mays
  Clone ID: MRT4577_96104C.1
ccggccggggacatgaagcatagaatacagactacagagtgagttttttcatagttcttacccttcttacagcgttgtctcctcaggagcaagagagaactcctaaatggaaagtttcctttctgcagtcctgggtgagctgatatctcgatccataaatttgatcatcaacaagttgtcaaagatgaatatggaggaaagcctacaaagggctcttctccgagcacaggtcatcattgaggaggccatgggacggcacatcacaaatcaagtcattctcctgcagctgggcgtgctgagggacgccatgcaccgaggctattacgcacttgatgcattcaggtaccagcctcactatggagaagatggcaatccagctgttaggcgctttgtgcgcctatccaaggtaccctgtgcaaaggatctctatttctccggtccaactgtacagtttcaggaacaactacaagaggcacttgacaaattgagctccatgattgttgatatgaatgagttggtcatgttcttgatgagctaccctcgcctgtatcgccagccatacaacaagcatatccttctgggtaactgcatgtttggtcgccagatggaagcacaacttgtcattaattttcttttgcacacaaaacctcatagttctgaagaattgtacgtcctgccagttgttggtccacatagagtcggtaagagtacactaatcgctcatgtttgcaaggacgaaagagtccgtgattatttctcagaaatcttgtggctgcatgactctgattttacggatgatgagctaactttgagacagggatgtgcaatgaaacgacagctttttttgtcaaactttaagaaaggcaagagatttctagttgtgattgaactatatggcaatctctgtgaagatgcctggaataagttttaccgtgcttccagacagagctttcttagtggtagtaaaatcatagtcacaagctgttcagacaagattgtaaagtttggaacggcaccagctctaactctgaagcacctgtctcatgaggcctactggtatttcttcaagacacttacatttggaagcattgatcctgagatgcaccctaggcttgctcagctggccatggagatagccagactgcagaatctttcaatcaatgctgcatatgtcacctcttatttgttgagggacaatcttaacatacacttctggtgtaaggtgctgagcttcttgagagggtacatccagaagcatgtctccaaatttggcacacatccttttgatcttataaacaaaaacaagcctgtacagcttggaagaatggcttcaccttctgaagatttcatgatttgtcgtcagtatcaccgctctccccacgaggaggttccagagataagattccaagatgtgttctatggaagcattaagaaaaatggaaaatttgaggttctagtatggagatctcagatacccccctactacagctatgtcactgcttgtgagattcgagagcgaaaaaatacaggtgccaagaggaagcgttgtatgaaagatagaaccacatctagttaattttatcattttctggtttatgcaggaagataaataatttttattcacttctttggggtaggatgtcataagttacagcagagtcaattctgaagtgtgctacattttcatatctgtagtgtaagtgtctatctacataatgacacatgagttagaggcatatatttttcatggg

SEQ ID NO: 180400 - DNA, 327 bp, Zea mays
  Clone ID: MRT4577_96105C.1
atataaccatgtgtatatatgtagtatgatttggtgggtacacactggtaattaataacggtagagtgacagtgggggggagagcacatgcattttgttgggtgggtgctccaatttcccccacatgcatgcatgttcgggcggcaacgggagccactaattaaataaagaagaaacatttaaacgcttaataagcgggaagcaatgaccgagggcgatcattattactggacgaaagagcggtatctcacgtccgggatgtatttgggcgggatgaccttcttggcaccaactgcctgccggattcttggggatgcccatggggaa

SEQ ID NO: 180401 - DNA, 784 bp, Zea mays
  Clone ID: MRT4577_96106C.1
cattgggtacctcgaggccggccgggcagaactgcagctgcagctgcttcaaaagattcaacaacaaaatctgctatctcaactgaacccacagcatcagtcccagctgatccaacaattgtctcagaaaagccaggaaattctccagcaacaagttcttcaacatcagtttggtggtgctgatgccatgggtcagctcaaacatttacagcaaacacctttgaaccataatacaggatccttgccaccccagcaacttgtaagatcacactcagcactcactgagagcgaagaaccttccagctcaacagttccatctggcagccgtatctccccaataaattcatttagtagagcaaaccaaggaaccagaaatttgcctgagatgccagcaacaccgcacattgagcacttacttcaggaaattcaaagtaagacagataatcgaatcaagaatgatatacaaggtagtaaggaaacggtccatgcacctaatcgtcatctagcttcagatcaacttgatgcgtcatctgctacctccttttgcttagatgagagcccacgagaaggcttttcctttcctccagtttgtttggataacaatgttcaagttgatccaagagagaattttcttattgcggaaaatgtggacacattaatgcccgacgccctgttgtcaagagggatgtgtctggaaacggtatatgcaatctaccttctggacaagggatcatagggatgtggaaaacgagctatcctctgctgcattcagttcccagtcatt

SEQ ID NO: 180402 - DNA, 374 bp, Zea mays
  Clone ID: MRT4577_96107C.1
aaaaaaaaaaaaaaaaaaaaaaaaaataaaaaaaaaaaaaaaaaaaaaaaaaaaaaaaaaagacaaaccatataaaagataccaaacttacatacacatacatgcgacgtcctatcttttggcatcctggctccctaactcatttcactggccgtctgtttacaacttggggcccgtaaatccccttccctgccccaacttaatcaccttcctgcccgtccaacttttgcctgctcccattttaacccactggccccaactgctcgtccttcccaacggtttctcagccttaatgcccattgggaccccccttgcaaccggtcattcagcctgactgctgattgggtcacgccctgtgtggccgcttcacttgc

SEQ ID NO: 180403 - DNA, 516 bp, Zea mays
  unsure (1)..(516): unsure at all n locations
  Clone ID: MRT4577_96108C.1
gcgtgcataatcattgcttctagtctttggttatctgcgaaacaatcttggagtacattcctttctttttgttggacacaacggtacaattccaataagaagaagaagaagaagaagaagaagaagaagaagaaaatggcggattttacaatggcgtgatgcgatcttggtcaaatgaaatcacatcatctccccgcacaaacccagcacggacaggcggagggacagccccaccgcgcgcaacaccaaccaccaccccttccattccatcggggcagggcagctcggcgtccgcgtcggcacggcggcaagccgagcgcaccgcttcgctttgcgccggtgccccgtgccgtgcgcgcccgcttctttctttgaccaaaactttcgcctcacacacctgtgacggggtcggttggtagcctggtactatagcaccagcagcagcagcagcagggcgccgagcaggaacggcgcgaggggcgaggcccggagcgccggcggngacaacggcgcgga

SEQ ID NO: 180404 - DNA, 436 bp, Zea mays
  unsure (1)..(436): unsure at all n locations
  Clone ID: MRT4577_96109C.1
attcggctcgaggtcctagttagcaggttgcagctccgtttactcatccgtcacccccttcccctccattctccatcccttcctcaagaagccgagagcgagaggcgcaatgggcgaccgggcgtacgcgccggccgtgaagccggttcccgtgcgggccaccaacggcaccgcgaacggcggcggcgtggggcctccgcggcccgcgccgccgtccatggtgcccggcgggcgcgtgccccctccgccgatgtacaggcggaggcccgcgcagtcgcgtcctccggcgcggcgccccgggcggagcgcccgcgggtggtgctgcgcgtgctgcctgtggctgacgctggtgctggtggggctggcgttcctgggcgccatcgcggcgggggtgttctacgtggtgtaccggccgcggccgccgactngagngctc

SEQ ID NO: 180405 - DNA, 149 bp, Zea mays
  Clone ID: MRT4577_9610C.1
ttcattcgtgcgtacccgatcaagaagtactagatgcgcttatacaggctgtgtttaacgatagatgtgcaatactaaatggaggagacactgaaagactctttcagatagctagcgagctgtgactatttgagccaggatcgcgtgga

SEQ ID NO: 180406 - DNA, 329 bp, Zea mays
  unsure (1)..(329): unsure at all n locations
  Clone ID: MRT4577_96110C.1
gcaaattggcaatatccaagacaagcaccgaaaggcttgtgccncgaaggcatgggcactcggccgtgccggtcggctactgggaaagccagaccaatccntcatacccaaagggtgacttcccttggtcggacaacatcaactttcacaggccctttgccaggggcgaccgtgaaccatccaggtggatggcaatctgctggcgaccacggacttaagccagtacaaggaccctggtatttggatcgagaattctacgtgtggattacctggtcatcaccggccagggaaaccttgaccggcagggcccaaccctgtggaacaagaac

SEQ ID NO: 180407 - DNA, 292 bp, Zea mays
  Clone ID: MRT4577_96111C.1
ctagaccgtggggcgtgtgcggcgcggcgaagttcctgtggttcctgatgatggatgtagcgcaagtgtgccgcagccgtggcgctgatggcgttcgctgtcatcgtttccggcgtcggcgttcgcgtccgggttcccggctgggtgcaccatcagcgttcccgaatccgtgggcggcattccaggagctgtctggctgtcacatgggggaggagcggcatggcctggccggggtcaaggactacctgatgcacttcggctagctgccggcggctccggcgtcgtccccctt

SEQ ID NO: 180408 - DNA, 561 bp, Zea mays
  Clone ID: MRT4577_96112C.1
attgctttgagtctgacgcctcctcgcgctggtggatgccacacgcaagaaggagtactcgggcggaggagctggagagagccccgactgataagcaacccgccgaacgcaggccggggtgcgccagacggagccgtagatggtggttctagcccgcagcagcacggcgcggacggcacacgcaagacgcaacggcctacgtgagtcaggaaaccttcgtcgtattcatcaacacgcgtttaacgagcacgaacacacctccaccctgaggaggcacatgaagagatggcgccagctgctgtatcagctgccacctatgtttgaccagctgcgtgccccacgcgctagcaggaatttcgctctgctcgaggtccagctccaggtcggcaacctgcacgacgtcaacgtcaagaccggactgcctgcgacgaccagcaccgatcgcctcgagtcagctcgacgacaatctgcacatactcggtgtctagttcgtctgcggagaccatcgcctacagactactgatgcatcataactgtgcacaccgagagctttgacgggag

SEQ ID NO: 180409 - DNA, 626 bp, Zea mays
  unsure (1)..(626): unsure at all n locations
  Clone ID: MRT4577_96113C.1
gtcgacccagcgtccgggttatggagtctgtggagatctgcctttttaagaatgtttttcaagggcagttatgtcccttgaagtctttcatgtattgtgctattcagtaagagttcattaatgngaaaacaacaacaacaacaaagcctttattaatgaaaaagtaaataaaaaaggactgtacacaatatcatttaaatgttgcagtgccttcacctgaaaagttttccagcgatgatgttgaagaatatcctggtgaaatacattacagttcttgtcgcatagtcctaaaccttcatcgcagggctttatctctgaaggttgttaacaaggcagacagacccattcagattggaagccattaccattttatagagaccaatccttatctggtttttgataggaaaagggcctatggcatgaggttgaacatacttgctggaacagctgttcggtttgagccaggggatgcaaaaagtgttatacttgtaagcatcggaggtcataaggtaatcaaaggtggaaatggcattgctgatggtcctattgacagttcaagtcttaatgtggtgatgcagaaggttaatgcaaatagttttggacatgaagatttccagatgcaaggg

SEQ ID NO: 180410 - DNA, 1781 bp, Zea mays
  Clone ID: MRT4577_96114C.1
cccccctcgagtttttttttttttttttttttcagcttaaaattttatcctgaataactgccccagtgagggagaagagaaaacacatttcttgtacaaaattgagatggcacataagaaacgaagagttttacaaagtcgccgaaccaaaaggccacaagtgttgctattaatcttggggataattgataaaaggataaatattacagcatttcacttcaattagcctaatttggggctaaatccaatctgcatcactgccaagagtaacaggtcatcaaatgctagtgcaggagtgcagcaaaaccctccaatttggtgctttctactcagatttaacgcaccatggagaatgtgttgtgctgtattgtagctggaaacaacttaagcttattgtgcaattgttagctggaaacaaccagaagagcccacagattgctagttgcagagcagtgcaattgtgcagcaggctaacagtgatattggccaattaagcacccttataagcgatcctgtttcccataactgaagttacttccacagtatatcacccaaaaaattgagagccggaacacctctaatctccatgtccacaagaggtgcttggataatgttcaaaccttttaactctgggtcagtccgtatcatatccaatgcacgcgtttgatcctttctttttatagaacagaatttacagtccgatgttgaaggtggcagaacttggttcacaatgagtctccttacaggaacactttccttttgcaacgaagaatgcagtcttgatgactcactgattgccatcaccgttgggattgtcacgattataaactctgttgattccgtgtcgcggaaaagctctcttactttgaccatcctttctctgagttgctctaatttgttcgctgcatcctcctgttggacctcttgtccaaatactgatttaatagctgatgttgcagaagcaatcttactcctcagcttcaagattttcccaatggacgcatccaagaaatctggcaaggataataaccggagtgtatggcccgtaggggcagtgtcaaatacaatgcgactaaacatgctgtattcttgtgcttcaaggaattgcataaccttagaaattgcaattgcttcatccaagccaggtggtggtgtgtccaacaattcccccaattttaactctccaagctgctcaacaagcaccccaaggcccatgctatccatgaaatcttttactcctgttcctccatttttttgacttactgtccgaaactcctcccgggccttttcaggatttatctcaagcgcaaacagaggtgaatcagggccctcgacctgcacgagcgtcccgccactcaaatcctgtgcgaaggaatcgctgagcgagtgcgcagggtcggtggagacgacgagggtcgggtggccgttgttggcgaaccgcacggccaacgacgccgcgcagctcgtcttcccgaccccacccttgcccccaagcatgtagtaccgtcgccgcgtcccggacgacatctccaggaaccccaggtcgtccgccccctccttcgcgggcggggcggtcaccgacgccgcgcgcaccgacgcgtaccggccgaagcatctgcgcgggaggcggatgctactgcagccctgattcacgggtacagccaggaagaggcggcgcgcggccgcctgaaggtgcggcgaggcggtcgcgagcatcgtgacgagctgggatgaggcggattgcttggtttctcctctctttccgcgtgccgaattgccgg

SEQ ID NO: 180411 - DNA, 276 bp, Zea mays
  Clone ID: MRT4577_96115C.1
tcttcctgcaaaaccatcagatctatcataactctctctacctcatcttcgtttgcgtacgcttgttgacctgatatggctccgatctgtttgaggatgatctctgcgtcgttgttctcctggctccctgccactgttttcctgttgctctcgctctccgtcgccgcacttacgctctcccatgctaagaattatctgacttatgttatccacaatgactacttcgacatcgagaactacggcaatcccgcatgcctggattgtcatgtgtctttt

SEQ ID NO: 180412 - DNA, 321 bp, Zea mays
  Clone ID: MRT4577_96116C.1
atgccgtcgagtacaccgtcgacagtggcagaggaggccccaactgcacccgcccccgccatcgaggtcgacgcggggggcgcgtccagctccatcccgccgcccacactggaggagacagaggtgatttttgggcggcggctccggtccgacgccgagccagaagtggcgccgattcccctcccccaggtgttgtctcgtgcccatcaggctcttcatgagactgaggcgacgatccaacgggagtgggaggcgcttgaggccgaacaccagctgttggaggtctgcttcgtcgccgaaggctgtgttatgtgcctataa

SEQ ID NO: 180413 - DNA, 182 bp, Zea mays
  unsure (1)..(182): unsure at all n locations
  Clone ID: MRT4577_96117C.1
ttccagttttcggnccnncaccgccgcccgggctcggttgctgtacaaagacacacacacgcgcacacacacaaacacacacacacgcacacagacacggcgccgaacgcggaagagagcagagcacgcacgaccgccgaaaggaacgcaccagcacagaggacgacgacggaccccaaggg

SEQ ID NO: 180414 - DNA, 246 bp, Zea mays
  Clone ID: MRT4577_96118C.1
cagaagataagaagttcttggaaagtaaccttgctccaatgcagaaggagggaacattctctgggcagggtaaaataatgggatggaatcctccaattaataatggtacaggtcctagtaaggtcctaacaataggtgggttgaacaataagtccacaatggtgagtccagcaagcatttgaggaccggcctccggtaaccaaggtaatttccaaggggcggctcaaccttcggtggcttaaggct

SEQ ID NO: 180415 - DNA, 279 bp, Zea mays
  Clone ID: MRT4577_96119C.1
tttttaggaaaaaacgacaaaaggactgttcctgaccgggtgtggccaccatcataaggcgctttcacctacggacatccacggtttcgatgaggtgctcaataacaagcctatacctgtactatcagcgcatgtagtaatattacgtgtgggtacacgaggatttcccggactacacaaacaaaagcccttccgctgggactggttcctcgagataaataagctcgtcaccctttagtgactccccttgactaacgttcaaaaaccagatttttttca

SEQ ID NO: 180416 - DNA, 857 bp, Zea mays
  Clone ID: MRT4577_9611C.1
ccctcgggctgccggacgaccgacactgtttccgatatttcattggcacacctccccatccgccgcatctcgcttcctctcccagttgcttcgtctcactttcatcctctttgcgtctctttgatttcgtcgccgtcaaggaaaactccgcttccgtctgaagacttcgacttctcttggcttgctcatcggctgcgtctctttggtgagatacaaaatttttttctttctctttcgccgtccttttcgattcggtcgacacctggttccagatccgttcgtcgatcgtatccaaagtcctctactcgagatcctcttgttttttagagatcttgttgcttcagtgcgtggagattgagatctaaaaggcaagtatttccttttggttaactggttcgcaagaagcgatggcgcgtccacgcatgcagatacactacgtcccgccgtacgctacagtgctacacactgctgtccttgcctcctccagctgagattgctagtgatttggcccacgcgcggcggcgcggaagctgttccatgttaagctgcagtcgatgctgctcctcccccttctccacctctcagagcggcgaacgcctgcaaaagaaagcaatcaaactatgatttccccatgcacgagagagattcgatgctaagccgcagtggaatgtaacgtcgaggaatgtcacttttccttgcaacctttttagcgtatatctatatctatgtaactgatacgggctgttgttgcaacaacagaccatggtgattatttaaagtaagcctaggatttagacaaccaaattcttttgaaagtatatatgcaacaatatagaaatcctttcttgctgcaaaaa

SEQ ID NO: 180417 - DNA, 554 bp, Zea mays
  Clone ID: MRT4577_96120C.1
agcattcacaacaaaaacctggtgtcctggtttgggggaaaaaaatttttttccttggggaattggttgccccctaaataaagccccaaataaaaaaccataacacttttttttctacttttaaaaagggggggcaaaaaaaaagggggggaataaaaaggcccctttcccatgaaaaaaagggggaattccctagggggaaaggcatacaaaggcggggtttccggaaaacaaatttttttacaaaagcgaaaagggggcgggagcttataaaaatggtgaaaggcagcgatcatccgggggggggggccccggttgccatcctgcccaaagtttttttttttccttgagccccgggaaccctggttccatggcccactggggggaaaaaccctttggcctgaaaacaaatccagggtttttgatcaggcggggcaccccccctttgaggaaggggcccccttccgagctgaaggaccctgccataaagtcctttggggggggggccttttcggggttggacttaaatacaggggttttttttgggggccccc

SEQ ID NO: 180418 - DNA, 259 bp, Zea mays
  Clone ID: MRT4577_96121C.1
cccactcgtccgggaggtttagtttttcgtgtaacgctagcctaagattgatcgcgaaccggtccatttgaagaatcatgaccctaacagcattacacaaccacttcaaacctgaatgctctgacccccatgcaactgttacactttccctcctccaagctctagctcacattgcagaacacaatcaagacatcttgacaactcatcttcaccaaatcgccaccaactccaccaccaaaccttatgacatcacgacgtt

SEQ ID NO: 180419 - DNA, 2400 bp, Zea mays
  Clone ID: MRT4577_96122C.1
atgcttggccaaggcggtggaaggggcgggacctgggcctggtgccatcgggatgtttgggaagctcggtcctaggatttgcaagttgctcggtgggcagggcgtgcaagccaaggcgggattactaggcatcatgggaagtttggcgcaggtgggagcaatcagttcccagaatatgcagcagactctgcaaagtatccgcgactgccttgagaacagcgattgggctactagaaaagcagctgctgatacattatgtgtctttgctacccattctgttcacttgataggtgacggaacagctccaaccattgctgctctcgaagcttgccgttttgataaggtaaggcctgtcagagatagcatgattgatgcagtacagttgtggaaaaagttgactggagaagatgcaaatgatggtagaaataaggatcttgctgatggtgaagggaaactggactcaagaaggtcaatacaaagaggtggaaaatcagaatcctttgatgattcctctccagattcacctagtaacaacgtgaagggcagtagcatagctgaaaaggcagcttttcttttgaagaaaagaccaacattaactgacagggaattgaaccctgagtttttccaaaagcttgagacaagaaaaacagatgacttggcagttgaggttgtagtcccccacaagactctacaatctcacttgcgaggtgaagatgaaacagaagaagatgatgatcctgttggtccagctgacagcaatggatcagctgaagatgaagcaaatctaactcaaatgcgtgctagctttaattttcagaatatccgggataaatgggctggccaaaggggaaatagaaacaaaattacaaaagctaggacaactgatgttgaagataggggtgaacccagtacaaaagattccactgctgcagcaatgaacatttctggagaaggccctttcataaataataaaacaaattggttagcaatacagaggcaattgtcacacttggagaggcagcaaactagtctcatgaacatgttgcaggatttcatgggagggtctcatgacagcatggttacattggagaacagagtacgtggtcttgagagagttgttgaggaaatggctagagaaatatcactctcctcaggcaggagaggtggtggtccagcgttgggctttgattcatctcctggcagatcatctaaacacaatggtttccatgaatattctaattcgaaatatggaaggagtggtgatggacggatgggatttgcagaaaggtatttctctgcagatgctatggcttctggtacgaaaaaccaatcttggagaccagattctgaaccatgggactcatatgcttattctggatcaagaagtggtatgaatgtgaggagaggattagattctgtttcatcagacaatagaatggcaagaaatgaacggagtaatgatcaagtgggtccccggagaggttgggacaaaggtcagggaccctttaggttcggtgagggtccttctgcccgaagtgcatggcgggcctcaaaagatgaagcaacactggaagctattagagtagctggtgaagataatggaaattcaagggccgctgcaagagttgctattcctgaactggatggagaagctttgaatgatgacaaccaaggggatgaaagaggcccactttgggaggcctggactcgtgcgatggatgctgttcatcttgaggatatggactctgcttatgctgaacttctttcgactggtgatgctgaattacttgtaaagttgatggagcaaactggaccggttgttgatcaactttcaaatgaggttgcaaatgaagtcctacatgcagtggggcagtttctcatggaagaaagcttatatgacgtagcattaaactggcttcagcagttgactgatctggtaatggaaaatggctctgattatctcggaatacctctagacgcaaagcgggacgtcttactgggacttcatgaggcgacagcgattgacctgcctgatgactgggagggagcgacaccgttgcagataatgaagcagctagcttcatcctggcacatcgacctacagcaacttatcaattagggtaacattgattaccgacatatgggttaatttcatttgttcgttgcctcttggtcttgtctggcctgttgctattaggattaggaatattatattggttggagtggaagtggcactgtgttgaaatggattggttgtattggggaaatatgatgtggatattgtctcaccttcatctaaaggctttcataattcatagtttgattctccagttatacaaaaaaaaataaccaataatgggggggggctcttgtatgattgttaccactgctttattacat

SEQ ID NO: 180420 - DNA, 156 bp, Zea mays
  Clone ID: MRT4577_96123C.1
cggatcttattctcgagccaacccacccgttcgatagtgcctacaacgctccttccttctgctagtcgacgcgcaaacctggacaatctggcagacaggtgatgcgctcatcctgctcctactaacgaggagccgcggcgcaaaattagggatgcg

SEQ ID NO: 180421 - DNA, 459 bp, Zea mays
  Clone ID: MRT4577_96124C.1
ctatggtaatcaggacaataactggatgagatatgggttaaaagccctaatcctaatggtttccctttacaaaaaactataggtcctggatctccatacatagcatagttaggtttgcaaacacatataatgccacaattttttatatttgtgcatgaatatatactattaaacactgcgatttacacctgttgggaacttatttatttacaataccgggataacaaattggtcatgctattaagagcgaaaaactacagtcctcatgcggatttggcaaatcaaattgctgtttgtccgaagtgaaaaacagtgtggtgggccccgataaaacatatccaagtttccagagaggaccgtgaggagtcggttcgtaaaatgccataaacccagtgatgcttatggtaggaactgattgatacatgttgactataaactgatgtggggttaaggtgaaag

SEQ ID NO: 180422 - DNA, 101 bp, Zea mays
  Clone ID: MRT4577_96125C.1
caccaattcatcttcgccatgccgcgtccggatccgtaccgaacaccggcggcacctcctcctgtatccacttcaccagtacatctggcgcaggaagtggg

SEQ ID NO: 180423 - DNA, 1901 bp, Zea mays
  Clone ID: MRT4577_96126C.1
cgcaacctccaaccgggcgggcgcgggccactggaccagcgacacatccggggagaagaaagctcggaggatccgaacgacgctgacggcgaggccgtaaccgcagagcagcggttcttgggatctcctgctcctggtcctggatgctggcacttgaattccagcatgaggtcaaagaagatatttggtttatcaatttcccttgtactcatcaacctagcttctatattggaacgagctgatgagaatctcctcccagctgtttacaaggaagtgttcttgctcttcactatgaccgccctgcagtgcttgcgatagggactgcgttctgggctttgtcaacgggggctgttggtgtcagccagtattttgggcaggttgcattctggagagctattaatggtgttgggcttgccattgtaataccagctcttcaatccttcattgctgatagttacaaagatggcacacgtggagcgggatttggtttgctatcacttattggttcagtaggtgggataggaggtagtgttttggcaaccatcgtggctggaggggattattatggttttccaggatggcggcttgcatttatatctgttgcatttgtgagcttcttaattggacttcttgtatacctttacactgttgatcctaggaaattatctccaagccattttggcggtggtgaggacaatgagaggttacatttggtcagcaatggtatccttcctccacattccatctggaaggattcgtggatagcggcgaaatccgtaatgaaagttcggacctttcaaatcattgtgttgcaaggcattgttggctctttaccatgggctgctgtagttttcttcaccatgtggtttgaactcattggtttcgacaacagcagctcagcggcgctgaatagctttttcgctattgggtgcgccagtggatcatttctgggtggtgtgatagcagatgtcttatctagatactatccagattctgctcgcgtcatgtgcgctcagttcagcgccttcatgggcatccctttttcatggattctcctcacagtcattccccagtctgttgattactggtctgcctatgccgtcacactctttttaatgggaattaccataagctggtgcgctacttgtgcaaacaaccccatgttcgcagaggtagtccctcccaggcaccgcacaatgatctacgcctttgaccgcgcatttgagggttcatttggctcgcttgctgcacctgctgttggattagtgaccgaaaagatctatggctacaatgcaaaggccgtcgatctatcacatggatcagtggatggagcttatgcactctctagaggtctattgactatgatgattgtcccttttgctctgtgcctcatgttttacaccccactgtatacagtgttcaagcgtgaccgagaaaatgctagattggccagcatcaaggagcaggaacttacttgaaaagctttctaacaaggagtactgatgtagtttggattacatagtctacaacaccgccaacctggaggttttgattgaagtactttggttgatgtctaggatactcaggttttatgtttcttcagtcggatatcatttatgagtacacattttgtacacaagcgatagattgtttgttctcgtcgtatgtaactggttcagtatacattcggaccttaacctggagagtggagacagggtgttgcagctttccattgaactttcagcatatagatacagttctttctcgttttgttactatttacggtctgtaatcttgttttgaactgccttaaccatcacgccattccaatgatgatgtcatttgcagaactcttgtaccagtttcagtttatatcattataagatcaacgcttttctgac

SEQ ID NO: 180424 - DNA, 613 bp, Zea mays
  Clone ID: MRT4577_96127C.1
aattcggcacgaggcaggcaccgccgcccgccgcgcccccacgcccgcctgctggtgcccccgccgcgcccctccccgcaccgccggcacgcccgcttcgccccggcccgcagacacccccgcccgcgacgagctgtgctgctggtggcggtggagcgcggtgaggatgaggcgcgcgtcacgcctggtggccgggtcatggaggcgcgccagcagagccctgagctcgccgtaggcggcatcgccagagggctcgcaccgctgcagggacgccttgacgatgctgccgtcgtcatccgcctccacgcccatgctgcccatctgattccgatctgattccagtcgctgaggtccgccggagctagctagagcctatagcttggcttcttgtttgcttcttccagcctgtacgcaaggtacggtggtgcagtacacgccatgtatgtagctttgctttatagacgccacagacatagtcgacgacgacctttgtggtagctagctagctctcgtcagtcgtcatatttacatttattattttttttcataatatactcacagcaaaattcgagtgaatccataatttggaaccgacaaaaggctagtgcatatt

SEQ ID NO: 180425 - DNA, 2133 bp, Zea mays
  Clone ID: MRT4577_96128C.1
cattgggtacctcgagggccggccgggacgcaaagagtaatcacaggtcaaaccacgcggaagtttttttcccaaccaggcgatctccggtccttgcccctcgtcacctcgtggtgggtcattggctcactgcttcctgcaacctccaaccgggcgggcgcgggccactggaccagcgacacatccggggagaagaaagctcggaggatccgaacgacgctgacggcgaggccgtaaccgcagagcagcggttgttgggatctcctgctcctggtcctggatgctggcacttgaattccagcatgaggtcaaagaagatatttggtttatccatttcccttgtactcatcaacctagcttctatattggaacgagctgatgagaatctcctcccagctgtttacaaggaagtcagtgctgctttcgatgccggtcctactgatctggggtaccttacatttctgatgaactttctgaagtccatagcatctcccttggcaggtgttcttgctcttcactatgaccgccctgcagtgcttgcgatagggactgcgttctgggctttgtcaacgggggctgttggtgtcagccagtattttgggcaggttgcattctggagagctattaatggtgttgggcttgccattgtaataccagctcttcaatccttcattgctgatagttacaaagatggcacacgtggagcgggatttggtttgctatcacttattggttcagtaggtgggataggaggtagtgttttggcaaccatcgtggctggaggggattattatggttttccaggatggcggcttgcatttatatctgttgcatttgtgagcttcttaattggacttcttgtatacctttacactgttgatcctaggaaattatctccaagccattttggcggtggtgaggacaatgagaggttacatttggtcagcaatggtatccttcctccacattccatctggaaggattcgtggatagcggcgagatccgtaatgaaagttcggacctttcaaatcattgtgttgcaaggcattgttggctctttaccatgggctgctgtagttttcttcaccatgtggtttgaactcattggtttcgacaacagcagctcagcggcgctgaatagctttttcgctattgggtgcgccagtggatcatttctgggtggtgtgatagcagatgtcttatctagatactatccagattctgctcgcgtcatgtgcgctcagttcagcgccttcatgggcatccctttttcatggatcctcctcacagtcattccccagtctgttgattactggtctgcctatgccgtcacactctttttaatgggaattaccataagctggtgcgctacttgtgcaaacaaccccatgttcgcagaggtagtccctcccaagcaccgcacaatgatctacgcctttgaccgcgcatttgagggttcatttggctcgcttgctgcacctgctgttggattagtgaccgaaaagatctatggctacaatgcaaaggccgtcgatctatcacatggatcagtggatggagcttatgcactctctagaggtctattgactatgatgattgtcccttttgctctgtgcctcatgttttacaccccactgtatacagtgttcaagcgtgaccgagaaaatgctagattggccagcatcaaggagcaggaacttacttgaaaagctttctaacaaggagtactgatgtagtttggattacatagtctacaacaccgccaacctggaggttttgattgaagtactttggttgatgtctaggatactcaggttttatgtttcttcagtcggatatcatttaagagtacacattttgtacacaagcgatagattgtttgatctcgtcgtatgtaactggttcagtatacattcggaccttaacctggagagtggagacagggtgttgcagctttccattgaactttcagcatatagatacagttctttctcgttttgttactatttacggtctgtaatcttgttttgaactgcctgaaccatcacgccattccaatgatgatgtcatttgcagaactcttgtaccagtttcagtttatatcattataagatcaacgcttttctgacaaaa

SEQ ID NO: 180426 - DNA, 375 bp, Zea mays
  Clone ID: MRT4577_96129C.1
caagcatataataaaatgttttttatttattaattgtattttaatctcgttctctatggctgggatttccaatacttctagccactagaaagaggtacacccaatgctaggggctcccacatgagtgggttctaggcttctagcccataggtattaaggcgaccgacaccttttttatctttaggtgataaagcataaggcgaggcaacaccttaattatatctataaacattaaaatttagataaaatgttatttatatatcattaattcaaagttaataagcaagctagcacttttataaggcctagtaggcccaatttcagcctagaagcaggaaaaataaaatataaaaaatcataaaataaaaaaaataa

SEQ ID NO: 180427 - DNA, 345 bp, Zea mays
  Clone ID: MRT4577_9612C.1
aagggcaagaccaggaagtttccccgttccattaaaatcagtttaggcaaacgacttttcaacgggggcggaccacccctcggcagaatctagagagatggaaaaaaaaacaggtcttttctgcttttggagctcccacaacaaaatcacctgggttgcttttgggcaaacacgaccattcattttttgggaccggtcaaacattggaacaaaaggggggagggagcttgttttgctccacaagaaaacattcccatccttttccttttttaataaggcttcaatggtgccctgaactttgcttcggggtaaaccggggtattaccgagctttttcttgaacctg

SEQ ID NO: 180428 - DNA, 520 bp, Zea mays
  Clone ID: MRT4577_96130C.1
cataacgctatcgcctgcaagcactcgtacataacatttcgagatcatatacggcacatgcctacaaaacacaatggtacagaaccggaaaaacctaaaactattgctgcaagatcacaacccgttacaacaaatatgcggagctcaattcggcagaacatgctgcatatcgtgtggaattgctaaagaaaaattacctgcacaataggcagcatatgaaatgccagactcaacatactgaatgagcaataacagggaccagatgataggattttatgcacaaaaaaaaacacagtttactaacagcttagtgagagagcaccaaacgcaaatagaaggttccttcaataaaaccgcacgctataaacagggaaggattttgtagggagagctttaagcaggctcagtcggttagctgagctacctttggcatcctatggctttagggcttctgggctagaagcaacatcccagagctttacaggacagttagccgaacccgatgcaagcaatgctcctt

SEQ ID NO: 180429 - DNA, 223 bp, Zea mays
  Clone ID: MRT4577_96131C.1
ctaacgcgtgcactactaacaagccccaagcacacacacccccggggaggaagcacacatatatgttcgactgctcaacaaccctacttcagatcaactcccctaagaccataactttcatgtatgaagtaaagatactcattaaacagcttgcactatcaaatgaccacaataacccattgaagagcaagagcccaaaaatccacactctgagcaaagcatg

SEQ ID NO: 180430 - DNA, 840 bp, Zea mays
  unsure (1)..(840): unsure at all n locations
  Clone ID: MRT4577_96132C.1
ctgcccaacaacttcacctgaattcaattgctctaccttcacactttataccccttttcatattctaacactattcaccatggtcccaattcccaaggccgacgagctcaaggatcttttcagccttaagggcaaggtcgtcgttgtcacaggtgcctccggccctaccggtatcggtatcgaggctgctcgtggctgcgctgagttcggcgctgacctcgctatcacatacaactctcgcgctgagggcgctgagaagaacgcaaaggagctgaacgagaaatacggtgttaaggtcaaggcctacaagtgccaggttggcgtctactcccagtgcgagcagctcgtccaggacgtcatcaaggacttcggcaaggtcgatgtcttcatcgccaacgccggcaaaaccgccgacaacggtatcctcgatgctactgttgagcagtggaacgaggtcatcgagaccgacttgactggtaccttcaactgcgcacgtgctgtcggtcttcacttccgcgagcgcaagactggatcgctcgtcatcactgcctccatgtccggtcacatcgccaacttcccccaggagcagacctcctacaacgttgctaaggctggctgcattcacatggcccgctcgctcgccaacgagtggagggacttcgctcgtgtcaactccatctcccctggttacattgacactggtctgtccgacttcgtccccgaggacatccagaagctgtggnactccatgatccccatgggtcgtgatggtaaggcaagaagctcaacggtgcctacgtctacttcgcttccgatgcttcttcctactgcactgggtct

SEQ ID NO: 180431 - DNA, 767 bp, Zea mays
  unsure (1)..(767): unsure at all n locations
  Clone ID: MRT4577_96133C.1
ggtaccctcgcggtctgnccgagngctagcagctagggcagctgctctctctcgtcgaaccacacaagatgcagggctagccattactcccatatactatactacacgagcgaggccgagacgtcgtcgtcgagaaggagaggcgcccgagaggagaaaccaggaaacagtttgtgactgttctagtagcagctggcctgcaaaagaggatcgggtcggagccgatgatgaagaggatggtgatcctgaggcggtgccacccgccgccgcctctgtcggtgctcttcggccggtgccgcagcgccggcgtgcgctacggggagtgccgccggaaccacgcggcgagcatgggcggccacgccgtggacgggtgccgcgagttcctggccgagggggaggagggcaccgccgccgcgctgcgctgcgcggcgtgcgggtgccaccgcagcttccaccgccgcatggtgcagcgctgctgcccctgcgacggcgctgatgccgccgacgtcgctttagccgccgccgccgcccggcgggacgactgctcgccggagtcctcggcgtccagcaccacgcccagctagagagaaagcaataatcagaacgtacgtacgcaatccagctctgccgcctctcgcagtcgatccttctctcctctcactagcatagctagctccagcctaaattattattgcctgctatattgtaacgtacaacccattcatcacacgctccccgtgtatgtatgccccctcttcctttttgtg

SEQ ID NO: 180432 - DNA, 574 bp, Zea mays
  unsure (1)..(574): unsure at all n locations
  Clone ID: MRT4577_96134C.1
tctttttttttttttcagagaaatatcgagaaaaatctcaatcaatatattgagtatttctagggaacacacgtgggggtgaggggaccattatcgagtacatctcatatgtaatctaaaaaaggcacctccaaggggggggggcggcctttacaagacaggattcatcaaagagaactgggtgtatggcaccaattgttgctgctgtaggaagggggggaccaatgggttagccactaccaatgggttaagtaactgtggtggctgttgtaggtacccaccaaagttcgacagagtcagtgtggttgaatggaaccagctgttgcaaggaggcaacaggggttgccacagctagtgtgaggcaaagctgggacaatctgtggcaacaattgtggttgcaggtatgtaggtgcattgcccacagggagcgggctanatgaaagcagttgttgttgttgtacgtaggcggcaggggtcaccatggctagtggactgagcgttggcaaaaactgtggtanctgtgtgggtggctgggttccaactacgttccccaaagcaagggggttggatgcaa

SEQ ID NO: 180433 - DNA, 796 bp, Zea mays
  Clone ID: MRT4577_96135C.1
ttcatccttagcattgactggacagagcctatggcaactgaaggttgtgcccttaaaattgactggacagagagcctatgtcaactgaaaaaggatggttcttatcatgactgtacctctgtttgtgggagtggaagtgttggcttatctacctattactcaaagaaacaccactgtgtcacctgacacctccggtgattgctgcaaacagaatgctttgttggttgttgaatgaagcaaattactgcggacgcgtgggctgcaaatcaggtggttcctctataggatacaccatgtgtggagtctgcaacaaggttctagtctcaacttgcacatatggtggctcttgcgagttgtgacatgatcgtctgacatcaaagcgtgaaagacgttaataaatctgttcaggagaagcagtcatctagcgtggcaagcttggaattgacaatgagtgaggtggacactggtagatctagtagcagggtcaaaggatgatttcttttaccaagtatgcttgcattcgtgaggcaaatcaatgatacattatttagagcgtgattggttgcctgctcggcccagcctgagcgtatccagtcattcaggcccatggcggcatgctaaagaggtgcaataggctattgtttggttactttgtttcatctcatgatggcccattaaagcttgcctttgtttgcaaggctgtacagacacttgaccatggcaagcctcccaactagagaacagaagacaccattcatgacaacgatgttctttctcctcactaagtatgcacctt

SEQ ID NO: 180434 - DNA, 290 bp, Zea mays
  Clone ID: MRT4577_96136C.1
ccgtccgaatgcttcagggatattagttgctagtcttggtgtatgtgatgcagctcacgtgacggatgacaagtgggacgggtcgtctcgtgcatagaaagattcaggcgtttcgctgaaccagcactttccatgtccgctgaagtatttcacaggtagctccagggaaagtatgtggatgctgaaggaaacgtgtgaaagagtttccagtggtgttcttggatggcaaggtatgcatgaccgtccctgagcaagtcaattctacattggttggacggcaattgagcgaa

SEQ ID NO: 180435 - DNA, 145 bp, Zea mays
  unsure (1)..(145): unsure at all n locations
  Clone ID: MRT4577_96137C.1
gtcgacccagcgtctttgggcgcgtgggcctaaactcgcggggggggcggcttgggtttcctcttcccatcccaggcgcctgggcgcctnctacgatgacagcgccgccacgatgttggagttgcgtctggtgctggggagcctt

SEQ ID NO: 180436 - DNA, 1425 bp, Zea mays
  Clone ID: MRT4577_96138C.1
ttgctgcaaacagaatgctttgttggttgttgaatgaagcaaattaatgtggacagtggtactgcaaatcaggtggttcctctatagaatacaccatgtgtggagtctgcaacaaggttctagtctcaactggcacatatggtggctcttgcgagttgtgacatgatcgtctgacatcaaagcgtgaaagacgttaatagatctgttcaggagaagcagtcatctagcgtggcaagcttggaattgacaatgagtgaggtggacactggtagatctagtagcagggtcaaaggatgatttcttttaccaagtatgcttgcattcttgaggtgatccttttctcttcttacctgtttttagtaaaaatagaagtagaaactgtaatcttcccatgagaaagacgagcttcttgagatctagatccactcaatgagttgtggcctgtgggttttggaaaggtttttgttttagtcgagcatcccatctttgcagctgaatttcacattttagtaaacaacagctaattggaccatagaaggttgatcatattgcatctctttttttcgtgaccatgtctaagcacatttttcattaggaggaaggagagtttacaacacacatcttagtaagcatgatccttgggtagtttacatcatatgatgaatggttacttctagtatttgcgtatgccttcagtagtacattggatatatcctctatatttgaactttcgatggaaagaatttgtaggccgcttatatagaccctatttggaaccacttataatcgattcaattataatcatcttactgtgaggatcttttctattctcgattatgctagtccaaagttataaacggagatcaaaagaatcagaaataatctgtgccatagtctcagtggtgaacaatgcagttgcccagttgtcccgttcaaattcctgaactattccgctcattgtcgccaccagtttgctgatttcttctttgatttccttgatgtaggcaaatcaatgatacattatttagagcgtgattggttgcctgctcggcccagcctgagcgtatccagtcattcaggcccatggcggcatgctaaagaggtgcaataggctattgtttggttactttgtttcatctcatgatggcccattagagcttgcctttggttgcaaggctgtacagacacttgagcatggcaagcctcccaactagagaacagaagacaccagtcatgacaacgatgttctttctcctcactaagtatgcaccttttcctcttgttgcctgccgcagacccactagtagcacctgcagctgcctcctagctcttcggagcctccccaaacagccttgaaacatcatcaaccttcatggcatctgtttgtagtgagctctcagcaaagtaagatgtggtacccattgc

SEQ ID NO: 180437 - DNA, 274 bp, Zea mays
  unsure (1)..(274): unsure at all n locations
  Clone ID: MRT4577_96139C.1
atttattttccnaaannnnacaagggggcaggctagtaaccaaaaagggtgcaccaaaaatggggctgggtccaaaataacagtctgaggggaacgacaaaaactgacataaaggtgggcgtaaaacgctgcgagaagggattcaacaaaggcgagcacgaggagagacatgccttgtgcccattaggggtcccagaagaaaactcaacagcagtcagacatattagtgagcttttgccgaagccttgggcacacccggaaagagagggatgcc

SEQ ID NO: 180438 - DNA, 1345 bp, Zea mays
  Clone ID: MRT4577_9613C.1
ctcgaggccggccgggaacagccttctttctttttcacaatggctcagagaatgcttcttcgtgcaagtggcccacgccgagtctactatggcttcacccgctcttttagtactgttctcgacacgcctgtagatccgggcacgcagcaaatacgcctggcgacaccgcggacgacggtgtttgagaatgcactcaatgcaaaggcaccgcggacaaattggacaaaggaggagatttcagagatatacaacacttcgctgattgaccttacctatgcttcggccttggtccaccgccgattccatgaccccgctgccattcagatgtgtaccctcttcaacatcaagacgggcggctgcagtgaagactgttcctactgcgcccagtcatctcgctacgacaccggtctcaaagccacaaagctcagctctgtcgaatccgtcctcgaagctgcacgcatagctaaagaaaacggcagctcgagattctgcatgggcgccgcgtggagagacatgaggggtcgtaagacgaacctcaagaacatcaaagaaatgatcaagggcgtgcgcggcatgggcatggaggcatgcgtgacccttggcatggtcgatgctgctcaagcaaaggaactgaaagatgcgggcttgacggcttacaatcacaatgtcgatacgagccgcgagcactaccctagcgtcatcaccacacgtacgtacgacgagcgactcaacaccatcaagaatgtccaggaagcaggtattcacgtgtgcaccggcggtattcttggtctgggggaaaaagcccgtgaccacgtcggtctcatccacactgtagctacactacccgcccatccagagtccttccccgtcaacgcccttgtccccatcaaaggcaccccactaggagaaacccaagccatctcctttgatgccatcctcagaaccattgctactgcacgactcgtgcttcccaccaccatcatccgtctcgcagccggccgccacaccatgcgtgaggaaaaacagattctgtgcttccaggctggtgcaaacgccgtgttcactggcgagaagatgctcacaacggcgtgtaatgggtgggaagaagacaaggctatgtttcagaggtgggggcttaggccaatgaagatggaggagacgattggggagaagagaaaggtgccggggcaggaggaggccgaggcggttgttgcggcggcggaggcggaggcgacggtgcaggcacttgcttgagggggggagaggtagatgtagtgcttaggctctgtgatgatgagctcttcaatgtgctactgaagccgaatctatgtcttgtaacttgtag

SEQ ID NO: 180439 - DNA, 149 bp, Zea mays
  unsure (1)..(149): unsure at all n locations
  Clone ID: MRT4577_96140C.1
gctctttcttgattctatgggtgggggggcatggcccttcttaagtggtggancnatgtggggggttaattccggtaacgaacganacctcancctgctaactanctatgcggagccatccctccgtgattaggttcttagagggacta

SEQ ID NO: 180440 - DNA, 348 bp, Zea mays
  Clone ID: MRT4577_96141C.1
cgcactcgagcgctgaagacagacgatcgagcagctctggctctcgctctacgatgacatgctgcagcgcagagaagcttacatgagtagaccgggcgaatatgccggggcatgcgttcgtggacgagcatgtgatgggccatatcgaggggcaacaactcgtggctgatggcatggcgggtcacgacggtgccgactgtgcgcagagcacgggggtccatgaggtgaagaccaaggacatggccaacatgatgaaggactgcgaggagccacggaaattcgcgcctacaggtctgtggctgggacctaccaagtacatggtcatgcaaggggagcctggggccagaa

SEQ ID NO: 180441 - DNA, 320 bp, Zea mays
  Clone ID: MRT4577_96142C.1
ggggcaaacaaaatttggcgggaatttaaataccggtttttttttagggggaagctccccccaaccaccgcaatggcaggagttttttttttttttttttggggggggtatggggaaatgggtatatatataccgggggggggccaccctcttcttcaccggtcaacgggacgtacgggccggaccaccaccttaatttttggggtgcgaacgggggagccaggctgcgtgacctggcaggctggcggaccagaccagaccagacctcccggtttggggacaacagggcgccccggcagaagctagcgctgggcttaatt

SEQ ID NO: 180442 - DNA, 1023 bp, Zea mays
  Clone ID: MRT4577_96143C.1
atgcagagaaagttggcacaaccatttgaggccaaacatcaagtgaagataaaaactctgaggtgggtggtggaggaggagagcgagggaggacgacgaggctgcctggccgagccacgaggggaaggtgagcgtcacctgcaaggccacaaccttggtgagactgccaccatgagtgtgccccacggtcgccgccaggatctcgagctcgccatcgatgacttcgacgaggagttgatcgaccctgagctacgctactcgttccagcgcaacagcaagtccattcagcaaaccttggcgctcctcacctatcgcaacctcttcggcattgccatcagacttcctgtcatgctgctccgagataggcgtgcctgtttttccgacaggagaggcgagggccgcctcaccgtagatggagcccacagggggcgcaaggagtggcgcgccttctctggctccttgcttcgctccaatggcgtcgaggtccacgtgccacttcatggagcggatgcagcacagttggctagaatatcttggaacaaagtgcaacacttgtgtgcagcctggtgcttcatgaatcaatatttcttgttgatagcttgtctgcagctatggtcacttatcactcctgtaaatcctgcaagtacctggggcccacttatatttatctttgctgtttctgcaaccaaagaggcatgggatgactacaacaggcataacctgacttatgctctgatgacagtggttgtacaagtaacgagtttaaagggtgtctactactacttctaccaaatattccggaacagggccgaggcaagggcccttgagcaatccaggagaaggcttggcgatgggtctgttgggatgctccagtctctcactatcgctgccctgtctggttgtgtcaatgtactgctcacaaacccgatttgggttgttgttacacgaatgcaagtcattactcatcctggcctcactgtctcgatggcacgagctataattcatcgatcttgggaccagtga

SEQ ID NO: 180443 - DNA, 478 bp, Zea mays
  Clone ID: MRT4577_96144C.1
gggaaactagtaaaaaaggaaccccttttattattaaatgggggaataccaaaaatcacaaaaaattggggggaacaacagctcctttaattttgctctaaaaacttttttaagttcccctagcacaaaaaaaacttaaggacaatccaaattatgaacgatgctataaatggaccattggaaaagggggaggggggattcagcccctaattggttactgacaaggatctatttttttcctctacactttaaactaaaaaaagggcctgaaaacaaggaaactactggtaagggggcatggaccacctgggttttccatggagctacatttttaaaaagcatgacatgtaaagcatccactcaatgaactcatttgaccgttcttgttgaggtttggccccgttttgaaagttttggaaaaagctgaacctgaattgcgggtgaagtactgcgaaccacctgggttttcccaaaacca

SEQ ID NO: 180444 - DNA, 206 bp, Zea mays
  Clone ID: MRT4577_96145C.1
gggggtgtgtgttttttcggccaccatcaccatttttttacagattaagattagccccaaaatttgttttttttccctaattacaagaccagcccactaaaccgggacgccggaaaaaggtaccctaccggaccgcccacactcctaaccggagcaggcgacggggcttaaggaatagtcgcgggggggggggctgcaaagctggc

SEQ ID NO: 180445 - DNA, 597 bp, Zea mays
  Clone ID: MRT4577_96146C.1
ccggccgggaacccgagctcttcggagacggatcgggggccggcgacggcgccggagggagcgccggcggcagcgacccgacgggaggagggcaggaacgagacggcgaggaacagaacatgtggctaggcccgcacatggcgcagagactcacccgcagccacgccgggctcgcgcgcagctgccgacgccacgtcatacatcgcgcccgcacacgacgaaccccaccccccccacccccagcaccactcctcgccctcccagcaccaccccccccgaccaggggtaacggcctacaagcccgccgccgctcagccgaccgcccgctctcttcccgccccgccgcgccgcccgcccccgcccccccccccccccccccccgccccccccccccccgcccccccccctcgtcccgccccccccgacccccccacccccccccccccccccacccctccacccccgccccctcgcccccccccccctctctaccatccccccccccgccggcccgtgcccgcgaggcccgcgcagcctccccccccccacacccccctcactccgcccccccctccccctatccccaccccccccccc

SEQ ID NO: 180446 - DNA, 822 bp, Zea mays
  Clone ID: MRT4577_96147C.1
agatgcagaacacagtacaactaaacagattccaacacaactacagtagtaccgtgctagtagaaaatggccggaggaggcgatgagctgaagctactcggcacgttcgcgagcccgttcgtcatgcgagcgaagctggcgctcagcttcaagggcctgagcttcgaggacgtcgaggaagacctggccaacaagagccagctcctcctcgagtccaacccggcggagaagaaggtgcccgtgctcatccacaacggcaagcccgtctgcgactcgcgtgtcatcgtgcagtacatcgacgaggccttcagcggcaacggcgcgcctctcctccccgccgacccctacgagcgcgccgtcgctcgcttttgggccgcctacgtcgacgacaagctcttggcgtcttggctgcaggccgcgaggggcaagacggaggaggagaaggcggaggggctgaagcagacgctcgtggcggtggagaccatggaggcggccttcaagacgtgctccaaggggaagcctttcttcggcggcgacagggttgggtacctggacgtgacgctcggcggtctggtcgtctgggtgcacgccggcgcggcgctgtatggcatgcggcttttcgacgacgccaagagccctttcctggcggcctgggtggagcgcttcggcgcgctggacgccgccaaggctgtcctgccggccgtcgaaagagtggtcgagttcgccaagatgagacaggcgcaggctgcggcaccggccacggcaggaggcaactaagctgcccataaccacgtgtttagacatcatccgctcggagtctgc

SEQ ID NO: 180447 - DNA, 489 bp, Zea mays
  Clone ID: MRT4577_96148C.1
gcgggggggggggggttttttaaaaaatttttttggtttttttttttttttttttttttttttttttttttttttttttttttttttttttttttttttaaccccgcaaacccaaacaaaccttaattcattctaaaaccaattttccccggggcccgaagggggattaaatttttttaaaacccagggaaccaaatccacccgcaaaaaaaacccggaggcccaagtttgaacccgttttttttaaaaaaaccccccccctccccaaaaacaaacatcccctcccaaaaacaaacatcccccaaaaacaaacccaacaacccccttggaaggggccaacacaaacaaacccctggccacccccaactaaaacatttttgccaaaacgggtttgaccccccggcttcttaaccccccaacaacccctctggcccccaaaaaaagcaaagggggaaaaacccccctggtttggcccccccccccccccgg

SEQ ID NO: 180448 - DNA, 346 bp, Zea mays
  unsure (1)..(346): unsure at all n locations
  Clone ID: MRT4577_96149C.1
gacaacgcacgcgcgcgtcacgcaaactaggaattcgcctccacgctcattcacttctgcccgcgcgcggcccnncaacggttgccaatgtaaaccgttttgtccggattgcaagcttcttccgggacgcgcgcctcccgcaaaaacccgttttggagggcgttccgaaactttctgtgcttttcccgagcgcccccgcgggcggaggactaaaccagttcctgtcaaaaattcgctcccagagggcgtaaaaaatccagcccttgggggggcactcaattacacttttactttatttacaacccgtggcaagggttcggccacttttcttaaaagaacccccgtt

SEQ ID NO: 180449 - DNA, 199 bp, Zea mays
  Clone ID: MRT4577_9614C.1
ctcttatacgactatctataaggaaagctcgcacgctctgcagagcaccgatcctgtatagccggcgcgacccacgctgttcggatcgagtggactaccatttgatcgagccacactaactaacggggttacgacgctcacctttattattttactcttcgctcgccgtggggactgcggcagatgcaccaagctttcc

SEQ ID NO: 180450 - DNA, 241 bp, Zea mays
  Clone ID: MRT4577_96150C.1
cgacgcaccagtgatctcccggcgaaatcccgctcccgcgtcccccctcctccggctgcctctgccgcgcccccgctccggaaggttcgcagcttcaacacccacagcatgcacactcccccgctgcttctgctgtcgttctccctctctgtggcattaggccgaacgctcggcggcccggatcgctggggccgcggatctgaggatccgcgtgcgccgctgctgtcgggatcgcgcgtgg

SEQ ID NO: 180451 - DNA, 155 bp, Zea mays
  unsure (1)..(155): unsure at all n locations
  Clone ID: MRT4577_96151C.1
aagnagttgataataaactggagggaggaaagcatgaggacgaagagataaacganattcaccggagcctatgccccagcagacagataacgaattggaagaggcagatggatccttttctccacagctaaagcagggcaatgaagaagaagaag

SEQ ID NO: 180452 - DNA, 101 bp, Zea mays
  Clone ID: MRT4577_96152C.1
cttaggctgtgaagcattttagtctgtgatccctgaacgacaggtcaccaccgggaagttattagcaggcatggcactcttaggagtcacaatcattctgg

SEQ ID NO: 180453 - DNA, 129 bp, Zea mays
  unsure (1)..(129): unsure at all n locations
  Clone ID: MRT4577_96153C.1
ataatatatgtctaaatagtttgagccattttcaggattagtctttgtgccattacataaataatatacatgcctanatacaatgtgccgttttcaggactggtctttgagttgcagcagagcgttgtc

SEQ ID NO: 180454 - DNA, 370 bp, Zea mays
  Clone ID: MRT4577_96154C.1
ttatattaactgtgcaggacacaacatttttttttctgaaaaacccacttacgacaatgaacataaaaccttcacatattccatgtcctaaaccattctcgaaacaataaacatccctacactctaaacaacaagcactcaacaactgaagcacatatacagccctccatatttaaaaacaactctctatcattgaaaatcaaaccacctaccaacaacataccataaaatcacccacaacaatatacattcacttggccctacaatttactaaccaccagcatctcaaaattataaaaccacattttaatgagagcctccactacctctaaggctgcaacaaactacaaccttaatcacaccaaaaaca

SEQ ID NO: 180455 - DNA, 244 bp, Zea mays
  Clone ID: MRT4577_96155C.1
ggaggcacaaccaaagcaacaaaatcaataatcaagcatcaagaaactcaagttggtaccgaatgaaaaggtgctctggttttttcatttcagaccaggcaaccattgcaacatttttttgagcttgccaacatcggcagaaaatgtatttcctaaatgtattttctgccaactccactatgtatgtgaacacaagtatatgacttgtccgttatctaagaccaactacagcaggttaacactc

SEQ ID NO: 180456 - DNA, 351 bp, Zea mays
  Clone ID: MRT4577_96156C.1
gccagctaaggcaggcccgcctgggagccatggtaagcaacagccgtcctcttcttggctctgaacctcctgctgctgacggaggccaacacgtgagagagctgcccgaccccaacgcccccggtcgagccaccgccgccgcctcctgctgctaccccacccccttggcgcagcggtacgtgcccactgaacgcgctcaagttcggcgtgtgcgcaccaatgcctacactttcaaaacggaaagaccggaaagtgcctgatgagccattatgaacactcattaaatgccttgcggacttagaggcacgtcgttgcctctgcacggtcatcaaggccaacctgctcggcgtc

SEQ ID NO: 180457 - DNA, 1207 bp, Zea mays
  Clone ID: MRT4577_96157C.1
ttttgggtacccttttttgccggccggggctaccgactagtcggttcatccactataggagtaataggacctgtatatatatccacagactctagcgaacgttcgggactcccatcccatattcccatccggaaaacaaagcagcaccagcacaacagatcgatagcaagagctgccgctgcaactcctactgcttcttccggccgggcactaccggtcagaacaatggagaacaaatcagcctcctcctcgtgcgtcatcagcccggcggccacgtccaccatgtcatcagccggcggcgagagcagctgggccgtgcacatcgcgaacttcctggcctccatgccgcaagacgacatcggaacgacggatgatccgcaagcggcggtctctggcggcggcggcagcttctcttcttccttcggttcctttggcgacgcctcctcctttatcacgtctcagctcatgtgcggcggcgacgacgacgagtccctacaggacaccgcctgctcttctgcagctggccaaaagatggctaccatggagagtttcggcttgaagcaaatggcagccatggatggcgcgaaagaatccaacatgccccaccacctgcagctcatggccaagtacgtggaagctgtgggttcaaaacagcaggtgactggcgtgggggatcaacaagccatcaacagttcaagtaatagcgagaaggcgctgctgtatgagagcaatgagctgaggaagagagggctttgcttggtccctatctctatgttgataaactatctcggctgattctttctcatgtataccaccagcagtatattcaatacagcgcgctgttattgcttcataaaaaaaaccacaatgagaacattcaatacagcgcgctgtgatagctagcaaaaaaaaaaaaagtaggtgatcaaagttgacgcactgaggaaaaacttcgtatagcggaccatactaagggttgaaaaaaaaatcagggaattggaggggatctataggggaggaaccaaaccaaagattcggtaaaccctcaagtgcaattatttatcggcttccattccatgcaagtaactgatgaaaacatatgtacctcgtctcagcgattagtagatcaacataacagcttaattagcgagggtgtgaactaacaaaacgagcaatttaagaaagtaattagctgcaggctcagtcg

SEQ ID NO: 180458 - DNA, 429 bp, Zea mays
  Clone ID: MRT4577_96158C.1
atgagggaaggagagggacgcggggagggaggagcttaccacagtgagagggagaaggaagaggggatgggtggaagactcaccgcgggcagatggtggcgcttcggcgaaggcgctcgttgcagaagcgaggcggacgatgtcaaggcgtggaaagagagagggaaggatggctggtggttatcgacgagggagatgaagtgggtgtgggcggttgacgaaaaaggggcacgtcttcttggacctgtaggccctccattggcaactgatcttctggcactcacagacacttcttcaaatgagacacatggaagacatcatgcaccactgacaaactttccggttgatcccagtgcaacggagttctacaactccttccataaagtgtatgaaacggtgacatctttagactggcctggtatgaagtga

SEQ ID NO: 180459 - DNA, 690 bp, Zea mays
  Clone ID: MRT4577_96159C.1
cccggggccacggcaatgcatgccggccgcctcgttggcagcaggaagagggaagagggagacgaccctgatggtttttgttctcgttcagtcgtcgttcgctgaggaagagagagagagagaggcagatcatgctatagtgacgtgtcgctgagctagctaggtagcttctgatcatatgcatcgatctgacgtctcccttttgcttttcttttttctgctggctctctccctcggggaatacgattgcagggacgaaatccaacgcatcaaggctggcaatcccaacatctcgcacagggaggccttcagcgcggcggccaagaactgggcgcactttccacatatccactttggactcatgccggatcaccaggggctcaagacgacaagcctgctacctcaggatcaccagagaaaggacgggcttcttaaggaagggctctacgcggcggcggcggcggccgcagctcatgcggcagccaacatggggattgctccatactaattaatttacaattactcctcctcaagcttgctactgatggtaccttgcttccgagaatctccctgatctttacattagcttgttaaacgttccaaatcacgtacgcatctgctgtgtaaacctgttccttcgatcgagctggtctctagtatatataatctactacgtttttgcgttggtta

SEQ ID NO: 180460 - DNA, 465 bp, Zea mays
  Clone ID: MRT4577_9615C.1
attgacatcatactcctcctcggaccgttttaattgtgctacggaagcgtatcccaccatcacctgtaaaagaattcaggtagacaaccagttccctcctatttacataaaacagatattaaatatcttatctgactcgcactaaagttctaaggcaatataaatatcactcacttgtctgctaaacagtatgcttcccaacactggtgaagcattgtttctgccttatcattgcaatttcctttctccagttgcgtcatccaatgaagtgcctgcttttggtatggacgaagctcacacagaaccttatgctgaatttccattttctgttgcataaattttcatgcatttttccaaacgaaatttccaatgttggatataaatcagccagaactcttgaaaataacaatacctttaattcagaactgtccccaacacccacaatgttatcaaaatcaccatccc

SEQ ID NO: 180461 - DNA, 258 bp, Zea mays
  Clone ID: MRT4577_96160C.1
gggggggccaaaaaagggttaaaagcccaaccctaaattgggatattttttaccccaaaggggggggccaaatacccgaccaaaaatatggggggctttcctattccattataataacaccaattggcccatttttccaaggggaagggggaaaaaaaccccaatgacccatcaggcggtcaagttcactccctttttttaaacaagggtaatgatttttcccttttgcactaaaacttccaacatggggaacttttt

SEQ ID NO: 180462 - DNA, 366 bp, Zea mays
  Clone ID: MRT4577_96161C.1
catgaactaaaggataagaccacggggattatgggcatattctaaggaacaaacattcccgatttctaaggccattggctcccgccgatggccacaacgtgctactccaacgaaccctcagcgcctgcaacagcatgacagaagcacggctggcgactgcgcatatgaatatggtgccaaaccgcagggaagctcaagtgcgacagatgcgcctggacattaccatgctcctacacgacaaacaggaggataccgaacgcattatggctgtacatgtaattatgaaacacaactttatggcagacaacgagatcattgagctcttatgagagctgattgatacacgcctttctatcattgcaaaac

SEQ ID NO: 180463 - DNA, 231 bp, Zea mays
  Clone ID: MRT4577_96162C.1
gctcggaattcggctcgagggcgagcttgcctgctagcgtttctaaacgggtgcgccagcctcatggacccggaagaggtacgcaatcgcttgaagacaagcataagtgcaaaaaaaatcacccgatccaccactgcgcggctccacttctacgaccgattcgtactcaccggaggcagcatcgaaacctacgagcacggtcatctgctgtgattctttgcgaacacccct

SEQ ID NO: 180464 - DNA, 423 bp, Zea mays
  unsure (1)..(423): unsure at all n locations
  Clone ID: MRT4577_96163C.1
naaaaaaaaaaaaaaaaaaaaaaaaaaaaaaaaaaaaaaaaaaaaaagaaagaaaaaaaaaaaaagataaaaaaataagggcagcgccggtttaaaggattccataacttatttactgggggcgtcgcgactaaatagctctggtttagggtcccctaacgttcagttctgtgaaccacccttttgcaaccccggtattgggtttaacccggccgttcccctacttaatcggcttggagaaaatcccggtttcgccagtttaggtcttttcgaagaggcccccccctttctggctattgaaaaattccctaggccgaatggttaatggccccccccctgtaggcgacccttaagggggcagggtgtgtgtgcatctcccagcgtcaccgcccattggccagggcgcttacccccgcgccttcc

SEQ ID NO: 180465 - DNA, 399 bp, Zea mays
  Clone ID: MRT4577_96164C.1
agaataatatgcctgcggtagccattataatataggtgtttagacatatcaactcacatgtgctgtttttttctgtgctagttttctatgcctaacgatatatttcttcgtttagttaatgagaattgtgggggtgcattcttcttaatatactgtactttcaggcgctagctaactcctgatgtggctactgtgcctcctgtctacaacaggtatcatatcatctattacaggttctaaccgaatatgctgtaagcctacatgacctgtatgtattgaagcccattgagatggagcatctgcatgctgggagttagtgcagtatctggaatcacaaaagaattccctcttttccgtctatcatgttccagctaactgaacggaaatgaaccgactaat

SEQ ID NO: 180466 - DNA, 365 bp, Zea mays
  Clone ID: MRT4577_96165C.1
attcggctcgagaccgactgaacctctttttggaaacatggcgggcgtacatgcaaaagagcctgtctttgacaacaatgctggcccctaagcgcttgccccaatggctttccgtccgaaaggtccatgctgggtcacaatcttctgatggccctggacatttggactgccacagcaatgacctggaaggacaactgttgacaagcctctcacctgttcaaactgcattgctaccagaggcaaatgccttggccgatcataccactgaattggccaagcaatgatcaaatgatcaaattcaaagacaaacaaacatggccagcgcttggaaatgtgagttctgtcattcttcccaagctaactga

SEQ ID NO: 180467 - DNA, 751 bp, Zea mays
  Clone ID: MRT4577_96166C.1
ccggccgggggccggcttttgtgaatgtctcgtcgctcgacaacttagacctcgcattgaacagcagcagcacaacatgtcagcactacggattcttgtccccgtgaagcgggtaatcgactatgctgtcaagccccgagtcaacaagtcccagacgggcgtcgagaaagccggtgtcaagcactccatgaatccattcgatgaactctcagtcgaagagtcagtgcgaatccgagagaagaagcgcgcccccggtggtgtcgaggacatttgcgtcatctctgcaggcccacccaaagcgcaagatgtgctacgaacagccatggccatgggcgcagaccgtgccatccacgttgagctcaaggagggcgaggaaatcgagcctctgacagtggccaagcttctccagaaggccgtggaacaacagaagagcaatctggtggtcctgggcaagcagagcatcgacgacgatgccaatcagacgggtcagatgttggcgggtctcttgggatggccacaggctacacaggcgagcaaggtcgaattcggcgccaacgacgaggttactgttacaaaggaggtgggacggtggtgtcaaaacggtgcgcgccaagctgcccatgattatcactacagatctccgactcaacgagcctcgatacgcaagtctgcccaacattatgaaggctaagaagaagatctgcaaagacaagctcgagggattttggattggatggagtgatcgtctcag

SEQ ID NO: 180468 - DNA, 204 bp, Zea mays
  Clone ID: MRT4577_96167C.1
acgcacgcaccgagagaaaaacgccaagaacaagaggagtgccgccgaccctgacacaaggcgggacatcaccgcaccggccatgggggcgcgcaagaagagcaccaaggaggttgacgagcagatcagcaacaaccaaaacaagaacggataccaccccggggagaggaaccccaacaacgccaagaccaacgagcgcgacag

SEQ ID NO: 180469 - DNA, 692 bp, Zea mays
  Clone ID: MRT4577_96168C.1
tgaacatgcatgtcctctgctgactgaactctgatgtgtgtgtatgtatatgcagctcgcaacggggaccggtattgctccgttccgctccttcctgtggaagatgttcctggaggagcacgaggactacaagttcaccggccttgcgtggctgttcttgggagtcccgacgagcgacagcctgctgtacaaggaggagctggagaagatgaaggagatggcgccggacaacttccggctggacttcgcggtgagccgggagcagacgaacgcggcgggggagaagatgtacatccagacgcgcatggcggagtacagggaggagctgtgggagctgctgaagaaggacaacacctacgtctacatgtgcgggctcaagggcatggagaagggcatcgacgacatcatgctcgaccttgcagccaaggacgggattgactggatgcagtacaagaagcagctcaagaagggcgagcaatggaacgtcgaggtttactgatccatccatccgttgacgactgcggagatcaatcaaatcgttggctcgtcgccgcgccagagtcagactcaggtctctatcatatccatgtacatataccttacgatgatggaagacattctctatctatcgatgtacatacatacatacataacttaatttcacacggattgcatcgtacatggatttattt

SEQ ID NO: 180470 - DNA, 146 bp, Zea mays
  Clone ID: MRT4577_96169C.1
ctcttgctcgcactcgccgagaacgaatgaaagcgcatgaagccccagcgggagcgccaacccacccccgaatcaaacagggcgcctgccgttcgcctcgactcgcgctcccgtcagctatagtcggtacaagccactttggggaa

SEQ ID NO: 180471 - DNA, 539 bp, Zea mays
  unsure (1)..(539): unsure at all n locations
  Clone ID: MRT4577_9616C.1
ccccnccccgcggccgtcgcccagccaccgagccagncgggggagacggagcgcagcnccaccgagaccgccggggcccccgggctcgacggcgaggacaccgcgcacacgctcaccctccgccncccgggctccgcgccgnccgccgccgcggccnccctgggccgcgccgccgcgccggcccccgcccgccccgaccccgaccgcaagcgcgccaccnccgacgccgaccccggccgcgccnccccgcgcgccgcgnccgccgacgcngcaccggcacccaaggcncgngaggggggcnggccgccggggagggcgnaccgcaagaacgcgcncgccgacgccgcgggcnccagcaaggccgccaagnncgncaagggggccgncgacggcgcgcccnaccngcggaaggcggaccnccaggcgnacgccggcnacgaccagcngcgccgcgcgccccaggacaagngcnncncccacnncaccancaggaagnncgccgacgacgagaggaagcnggcggacgcggngaacgggac

SEQ ID NO: 180472 - DNA, 380 bp, Zea mays
  Clone ID: MRT4577_96170C.1
gtagcactacagcctatctccctgctttatcgctgccctgaccaatctcgcaagcacagccctagctggcggggtagcaagatcttctccaggtaagctatgccgcccgggtgcctgagacaaaaagaatagagaggaacctgcattgcagtagcaacctcgtgtgtcgacaggcggagtgactctcattaataccgcgacttgccggaggtcacacacaggtcgcgacaaacgccgtctgttgaaccggaagcgggtgcctgggacccgtctatatgagcagcagcacctgtacgaccgtggtgcaggagggggtgctcctgcacttcgacaacgcgcgcgtggaggaccgcaccaacgtaatgaagatccaatacacc

SEQ ID NO: 180473 - DNA, 482 bp, Zea mays
  Clone ID: MRT4577_96171C.1
cggacgcgtgggctcagaatggaggcggtcgtcgtcgtggccgcggccgtcgccgtcgccgtccacccgctccgcgccccgccctcgcgtccccgcctccaatgccattaaccctacgcgcacggcggctagtgtttcgttccctcgtcctcctcccaccccgggccgtgacgatgccgtcctggtggaagcgctccaagtccgcgttccaccgctcgcccgtcaccccgttctcctccgcatccacgccgtcctctcccgcgcgggcgtccacctcgtgcgtccagcccggaggccgcgccgggagaagggacctcctcgcgccgcccaagctcacccgccagcgaaagctgcgccacgtcgacgacctctacgtcgcgctcggggacctccgcgtcgacgtctccgacaggtcgtcctcctcctctccgccgcagcagaggcgcctcgccaccgcctccgaggccatcgagatcccggtc

SEQ ID NO: 180474 - DNA, 835 bp, Zea mays
  Clone ID: MRT4577_96172C.1
ttgggaccctcgaggccggccggactaaccttttccagctccagcgaatgcacacagccgccgtcgtttcttcgtcttcctctcagcgccggcgctcccactcgtgctccctcccccactcgcgctcggcacgcaggccacgcggcggcgctcaggctcgggatatcagcgacggcggggcggtcccaggcttgtcgtcttcgtcagcggctccccctcctgcctctcgccaatcgcctcgcgccctcgcctctggttctccgcacacagcccggcgaccctgcgtgcgcccctaccgcctccggtggaccatcgacggctcctggcccggcggctgcgctgcacgccgcgcgcggccggcgggcagcgggagctagcagccgctgctgcaccaaggcggtcgcgccgctttgggagcgcttttgccccaaagcgaagcattacccgtccgcttaacgcttcagcgcgctgaagcgtgcgtttagttccgctttttggaaccctgtgctgacttctctttcgaggatctagagcgcacaatgatattttgctagcgttatgctcttcaactcgccaaaatcagcaaaacgaataggagtacagttcctatcagttgcaagtgcagactgctttggtcgagatgtctctccgacgcactttgcatccctgttaaaggaatgcaggtctgtgaatacagttcgtcaaattcatcagaagataattgcttgcggccttctttcgttccatcatctttgttgtctgtgccactcgcaccacttccatcacattcatatgtatcgccaaaatctttgggcaccggtgttgtagcttccta

SEQ ID NO: 180475 - DNA, 190 bp, Zea mays
  Clone ID: MRT4577_96173C.1
acgcctcaattgggtttagtgtaccttttgatggttaataaggcggaagcgaagcgccctcgcgtgagtttgatgattatattcgctagggggccctagaaagtccgggtgcttggtgtaccaaatcgaggccttttggggtttaacaccaagaaatggatgcgcttgctttcgtttcagttgtgtacat

SEQ ID NO: 180476 - DNA, 497 bp, Zea mays
  unsure (1)..(497): unsure at all n locations
  Clone ID: MRT4577_96174C.1
attctccctatantcattcctattacaattcactgtccttcattttacaacttcattactttttaaaaccctatacattacccaacttaatctcctttcancacatccccctttctccatctttcataatatctaatattccctcacctatcacccttcccaacatttactcatccttaatctctaatttacttctcctaatatcatcacatttaagctctttcattataattgtgtattactcaacattttacctgcttacactttaccatctccctatcccctcacctttctctttcttcccttcctttctcaccactatcaccttctttccccttcaaactctaaatcattgtctcctttatatttcctatttaattctttatgtcacatcaacaccaaaaaactttaatagacatcatatttcacatattttctcatcaccctttatatacttttttttctacctttttaatttaacaatccacatttcttta

SEQ ID NO: 180477 - DNA, 442 bp, Zea mays
  Clone ID: MRT4577_96175C.1
aaaacaggcccccattgtttttttttcttttaaacactcactggaccctgtttctgactttatgttcaggggggggggggaaacatttgccacaggtcccgggaacccccaaggggataaccttgttttaaaaacaggggggacaggaggcaatcccgggggatccaaatttaaaaaaaaacaacaatccttggataaaacctcacgatgacccaatccccgaaaagaccccggggttttaaaaaaaacattttccatgaaaaccctttttaggggaaccccatatactgggggggggcactgaatttcggggaccccttgaggaccttattgaccgcatcgaaaaaatcctttttttgcaccgttttcctgggggcacaaagggaatacatcccggtttttgggcaaaccctccttatttcccgtccagaagagggggggg

SEQ ID NO: 180478 - DNA, 290 bp, Zea mays
  Clone ID: MRT4577_96176C.1
gccgtcgacaacgctgtgtaccgtgcgagagcccaagcaccagcgcggtggccgatgcagaggcggaggctaccatggctgacggaaagaacacgaggatctccaacggaaagaagggtggcaagaaaaagaccgagcaccctatctctaagaaggattggaatgacatcaaggcactgtaggtgttcaatgtgcgcaacatcaggacgactcatcgatgcactacacaaggaaccaggattgattatgagggtgtgaatcacagagactttgacgattgactagctgat

SEQ ID NO: 180479 - DNA, 235 bp, Zea mays
  unsure (1)..(235): unsure at all n locations
  Clone ID: MRT4577_96177C.1
cttttcccatgaaaaaaaagatgagtccactttcctgtttnacattaattgtgtttcgcggnatcctcctcatctcatctttagctgtctcgtatttctctctttatatcccaagtatgcaccggtgtctcgctttatttttttctcaagacatgcttaccaaaatatcctatagtgtaacacaatattctatgctgcgccgcaaacaaagcctcgctaaatgacgcacacatat

SEQ ID NO: 180480 - DNA, 477 bp, Zea mays
  Clone ID: MRT4577_96178C.1
ccaaaccccctttttccccatacataacacccaaacagatcaaaggggaaaaaaagaaaacccccacaccccgcccgccaccccccaaagggcaaacaccagcccacgggccgcggggactaggggaccccaccaagggcccaaacatgggggaaaaaggggcaaaccgggtaacagggggaaactgtaaaaaccccacaaaaccaaacaacaaaaaacaaaaaaggaaaaagggggaaaccaagggggcccaaaaaaaaaaaaaaaaaagagggggggccacgggcccactgccacctaaaaaaccgggaaaccccgcgggacaaaagaatcaaaaaaaccgccaagaggcggggagaggggattggggcattgggcccttttccgaaaaatgactcactgacccggggcgctcgggcggggggaggcggaaaacgttaccaaaaggctaaaaggcgggtatacggagaaacacaa

SEQ ID NO: 180481 - DNA, 335 bp, Zea mays
  unsure (1)..(335): unsure at all n locations
  Clone ID: MRT4577_96179C.1
gaantaacgaaaataccttcggnagtggtcaatcatgcgaatcaggccctaggcgccctatgccaggtggttgtcgtaagccttggntatttctaggttgaaaccatgtncgaaaagaaggggagaggccttccggcttatttgaggcgatggaagaaagatacccgaggggctccgtgtcatgaattgtatggctcttactcaaagccagtgctgttctttcagaattctgcagtgaaggagctaactgtcagtgacttagtcagatcgacaaataactttgatcaagccaacataatagggggcggtggattcggtctggggtacaaggccta

SEQ ID NO: 180482 - DNA, 534 bp, Zea mays
  Clone ID: MRT4577_9617C.1
taaacttcctcgcaattcagcgtcgtcttctgaggctcttgtcgtctacacctcctatttggactctctgccttgcaagcatgaacttcatcttcagccatgagtaaggagaggaaccacatcaatgttgtgaacgttggccaccccaactctaacaagtcgaccaccaccggccacctgatctacaagcttgcaggcattcacaaccgtggataacacaggaatgagaaggacggctcgatgagatgaacaacggcgccttcaagtatgtctgcgtcgtctagagatctcgctgacgaggagaggagatcaccattgatattgctctggacaaaaatagagaccaccatcgatcactgaaacgtgcattgaggccactggacaccacgacttcatcaagaagatgatgactggtacctcccacgctgactgtgctgtccttatcattgtactccaccactgtccgtgtcctgaaactggtatctccaaggatgcacagacccgagagcatgctctccttgccctaactcttgc

SEQ ID NO: 180483 - DNA, 274 bp, Zea mays
  Clone ID: MRT4577_96180C.1
atggaactggtattgcagaacttattgctcttgagatttcgcaacagacgaatgctcccattgcagagtgctgcacgaaggtctgcctggaggagtccatggacgtattcaatagactgtatcagctcaaggagcttagcaccgtggagaatgccggcctgctgtccaaagccgaagagctgtgcctgacgctctcctcgcttgagaagctgggcctgctctccaaggccgaggacctgggcctgctacacctcgtcgagaccgcagcggggac

SEQ ID NO: 180484 - DNA, 655 bp, Zea mays
  unsure (1)..(655): unsure at all n locations
  Clone ID: MRT4577_96181C.1
cccacgcgtccgcccacgcgtcaattcggcacgagggcgctgcgctgctattctcccccctttccaattccatccgaatcgagaggcgcctccacatccacctccaccgatcctcaaaccctagatccgccggccatgtccgcgcgaggggtgcgcccgggggtgctgcaccacaaggagaacaatccggcggacgcgcagcctggaaagcgccagcgcaccgccgctggggccgggaggcagccgctcgccgctgcaccgccgccgcaggaggagcccatggtgttctcgggcagggaggacgtcgacgctctcctcaacgagaaaatgaaggggaagaacaagatggactacaaggggaagagcgagcaaatgatggaatacatcaagaagcttcgagcctgtaccaaatggcttcttgagcgggaagatgcaaatcttgttgaaatcgagaggatcactggtcagcttgacgcgacacacaagcaacactctgagatagtggctgtcttgaagaatactattgaagaaacaaaatcgatatgtgaggaacttcaaaaacaatgtgcatctctacaagaggctctaaagacagtggaggctganaaaatggatgccctgaggtctctaggagatgagagggaggccaggatgg

SEQ ID NO: 180485 - DNA, 255 bp, Zea mays
  Clone ID: MRT4577_96182C.1
ccggccgggcccgtcaccttcgagcatcctcaccacctccgacatctttggacggtccaggggggagccctgcgtgcagaggagtgccacctgaataaggctctccacctcgacctcctccaggcacatggtaggtcgactgattgtgcattagcatattcaaggcatgatgcatgtcccctggagggtgaactacccagcttgtaacttgccagtgcgtgctctccgaaaaaaaaaaaaaaaaaaggggcggcc

SEQ ID NO: 180486 - DNA, 361 bp, Zea mays
  Clone ID: MRT4577_96183C.1
ccggccgggccggggcactaccaagattatagacgtagcgctccttctgtctcgttttagctgcccgggtcgcacctttgcacaggtatcccaattccttgcgtgaggccggagattcctatgcacgaccagacgattatgaagtggattttgatccacattggacaggccgggatccaggtcgaaaacccctgctgcgcggtgaactgtcatgaccctgggatgcacgctgagggtgacatcgccggggaaaagaccattgacacaggtggtgaggctttccacaccttgttcagcgatactgtcgctggaaagactgtgctcggcgttgaatatgatgaccagtgcaccgactgccacc

SEQ ID NO: 180487 - DNA, 178 bp, Zea mays
  Clone ID: MRT4577_96184C.1
accacgccatggatttctgcagccacgcttgatatactggtgagctcgagactacatgaggtgcgcgtgcctatggtgccaaacggccaatacctgcatggcatcatcaactgacttcaaagaccgggctataggccaaagactcgatggacaagggtttcctgttgaatgcgaattg

SEQ ID NO: 180488 - DNA, 291 bp, Zea mays
  Clone ID: MRT4577_96185C.1
atgcgtccgcgccgcgcgcacacaagcacaagtggattgtggcttgtctagtgttcttccggtacagtcaaacagatatggacgctcctgcggcggaggcccaaggttgcggcggctcgcagatcgtgctcatccacggcgcgtgcctgggcagctggtcctggttcacggtggccccggcgctcagcgctgcggggtaccgcaaggacacgccggacctttcggcgtctggcgtggacccttcggtcactgccggaggtgccgacgttccgggaatacacggggccgctg

SEQ ID NO: 180489 - DNA, 314 bp, Zea mays
  Clone ID: MRT4577_96186C.1
ctgcggcgcagcacagaggcttaccaggacgaccgcaacaccactcgtcacctcaacagcggccaacacccacaaattagccccaaccactagccataattgagccgtaatttctgatcctctcggcggggcaaccagatgtgcacccactgttacacctgatggagtccatccagcagcggatgatctactcgagggacacaatatctagacacctatatcgcgactacctaacatggacaacataagaggagtcctacatggacatcatgcattcccagctacggttccctagtatatgcccgcacgccctc

SEQ ID NO: 180490 - DNA, 654 bp, Zea mays
  Clone ID: MRT4577_96187C.1
gtgcatagcagaatcaagatagccccaccatccaccgctacaagtgccttaagacaggatggagcaggccaaaggttatagactcccgtgtcgggaggaagtccaagggatgcaccttgatgcccaagattgtttatggccctgacaagtcgaccagtgactacctccccaacaagatcatcaactttgtgatccacaacgctttctgagctggagacgctcatgatgcacaacacgacctactgcgactgacattcgctcacaacgtgtccactaacacacacaaggagatcctcggagcagtcgctgcgacaggctcgaacagttgtgaatgactgaacaaggttgcgtatgatccaccagcctaaaggacgagtagactagcttacttgcctgtatcgacagaatggatgttgccatctctctttctgtctgacactactgttgctatgagacgtgttagaactgaaaaccaaagtcactcctaccttttctgcaatcagcatgtactagaatgcgttagattccaccaaaacactgaatgaaagaagcggacctcgagctcactaattctgtaccctttagagaaggataattgagcgacctgctccaacattgaacgagacagcgccccgtgcgaaattgctatccgct

SEQ ID NO: 180491 - DNA, 650 bp, Zea mays
  Clone ID: MRT4577_96188C.1
atctttaaatattaatagagctcctgcagagatctggggggggggggggggggctccaccgtgttcccgttcagtagttgtctagccgatgacactcgatccatagtccgacccacgatgttaccacgtaatccacgcataggcacacgagcagtcccctcgcgtcccccctactaacccccgcaccctcgacccagcacaccttatgggacaattcaaagtacccccataagcgtaggtgcacacgtcaggttctgacatgcatgataggagcatagttaagaagagaacgataattgcttgattagatatttatatttatttaaagcggtattaaaatagtaatatctactagtagtagattgttaagattatgatcgtcgtactctacatgttgtacactattattatcgtgatgaataatgataacttaatacaaaggaagaacaaggtcacagttgttgtgctcttcaactttatgaactatgttgtcatcatagtcttgttctacattatcttattctataagtactaaattgtcaacttagtctactagtaaatttaatcatataatgacgacagattcatagttatgtatgagaacaactttgacaagatcatgattaacaaaagtcaataataaatgaaga

SEQ ID NO: 180492 - DNA, 421 bp, Zea mays
  Clone ID: MRT4577_96189C.1
gcgtcagcggacgcgtggaaaaaaaaaaaaaaaaaataaaaaaaaaaaaaaaagaaaaaagaaaaaaaaaaaaaaaaaaaaaaaaaaaaaaaaaaaaaaaaaaaaaaaaaaaaaaaaaaaaaaaaaaaaaaaaaaaaaaaaaaaaaaaaaaaaaaaaaaaaaaaaaaaaggggggccctttttaaagtttcaaagtttaattacccttaatttcaaattaaaagttttttaataggtccacttaaataaaattcattggccacgtttttaaaaatttttaattggaaaaaccttgggttaaccaaattaaatccttttgaaaaaaatccccttttcccaaattgggttaataccaaaaaggccaaaaaaaatggccttttcaaaaatttgcaaatctttaatggcaaatggaacccccctt

SEQ ID NO: 180493 - DNA, 497 bp, Zea mays
  unsure (1)..(497): unsure at all n locations
  Clone ID: MRT4577_9618C.1
cccagcgtccggctntactggtttggtggaggtgtaatcatattccatccccgagtcttaccactcaaacttggggcgtctattttcctcttaatgaaaacctgtctagatcctggtcacattttcgctacctttttcttcaaagaaagaaacttttctccaggtagattaaagtgcaactcccatagtaacatttttgtctacattgtgggagaagatcatcccaaaaaaaaaaaaaaaaaaaaaaaaaaaaaaaaaaaaaaaaaaaaaaaaaaaaaaaaaaaaaaaaaaaaaaaaaaaaaaaaaaaaaagggagagggaaaaaaaaaaaaaaaaaaaaaagaaaagagaaaaaaaaaaaaaaaaaaaaataaaagaaaaaaaaaggggggggggggtttagaggaattatgttttttaaaaaggggggtggggaaataaaaatttttttatttggggggaatttaaaataaaaaagggtggggggnntttaaaaa

SEQ ID NO: 180494 - DNA, 364 bp, Zea mays
  unsure (1)..(364): unsure at all n locations
  Clone ID: MRT4577_96190C.1
gccttacttcatcaccagccgagggacacccgcggaaccgtcgctcgagctcgcgcctgaacccctcaaactctgccaaatttcggcaaacccagccggtcggacctcggaacacattgccaaaccaaccgggccggtcgacacaagccgcatcccgtggcgatggacctggcgttgagcgaccttgcggcgctggacgcggcggagctggtccgtgtatcggcgtagataccgcgcgcagatacgtgcacattctggctggtcaccggctgtctnagattcctgctgtgctagggcgtgctggcgcattggctctagagccagcccatactgatccgcatacaggtcgccacctactccgagc

SEQ ID NO: 180495 - DNA, 304 bp, Zea mays
  Clone ID: MRT4577_96191C.1
cagcccaagggcaaggatataatatagcgggtttgagggtcaatttgaaatttttacaagaacccgggactccatggggttaaaaaaaccccaaaaatttgactggtgtaatttcccgaaaggtctacaaaaaaattaattttgggcctctccaagggctgaatgaccataagcctgggccaattttaaaatatattgggtctggtccggttaacaaaaaaaggggggggactcccgggggatctaggggaagttttttggaatgggcctgtgaacatgaaaaaccccattcaaaatggggggg

SEQ ID NO: 180496 - DNA, 907 bp, Zea mays
  unsure (1)..(907): unsure at all n locations
  Clone ID: MRT4577_96192C.1
cccggtcgacccagcgtccgttagcttttacctcctatcgacgatgggaagntactacttctccaagtcgtttaaaactgctgcatcttttttgtcgctgggttctgttaatgggttattgacttctgcaaggagctttgattcttcaccaccctatcagaagaaaaggtcaaaaagaatggccatcatcaaatcagttgagaaacagctagatttttcagcagatggactggatacttctggttctgagattatgaactctccttgccataattcccaaggtgcaaattctaacaggatgtagcaactgatttgattgcaatctaattccacaatgtgcaggaattgatctcaatcttatgaagccatacaggacttagaatcccgtcctaactaaccagcctcatgcaaatgtcctggttcatgccaaaatccaaatcaaacaccttcagtggggacaagaccttaccgacagttaccctgtcatctcatgtaatcaggggtgtacaaaatactgtctaaattgaaagcacattccatagaagattacattgtttgctgcattttgtgaacttatagctagaagttcagattatagaaacccacagctgtgtacaaagaagaaaaacatagctttagaaacatatagagcttcccagtggaatgtcaaattgttcttagtttcttttattgcgcgcgtcccacatgttgcgaaacagcaagggtctgctcattttgtaacaataaagcctgatttgtgggctaaattcttgctaggcattgtcaagaaactggttatcacaggcttggcttcatggttggctgaatcttttgtgcttctattgttactagtttaatacccgtgtgttgctacggcatataatcatatttaatggccgcttaatcc

SEQ ID NO: 180497 - DNA, 2302 bp, Zea mays
  Clone ID: MRT4577_96193C.1
cgttgctgtcggcggagacactggtcgagccagcgagcgtgtgcgctcgggccggcagtttgccttcttcccaacccaacagaagcgaagcatctcttctccccccttcccaatcgggctgcggcatatccccttctccgtcctcccgcctgccgccatgtcttcgccttcgccctcgccgccggcgccggcggaagaggagggccgggcgccgaccaagtacgtgctgatcaccggcggcgtcgtcagcggcctcggcaagggcgtcaccgccagcagcatcggcgtcgtcctcaaggcctgcgggctccgcgtcacttgcatcaagatcgatccatacttgaacacagatgctggtacaatgtccccctttgagcatggcgaggtgtttgttcttgatgatggtggagaggttgacttggatttggggaattatgagcgtttcatagatgttactctgacaagggataacaacattaccactggaaagatataccagtctgtcattgagaaggagagaaggggtgattatcttggaaagactgtacaggttattcctcatgtcactgatgaaataaaacagtggatacagtcagtgtcttcggttcctgtggatgggcagactcgtccagctgatgtttgtgttattgaattgggaggcactgtaggtgatattgagtcgatgccattcattgaagctttgcgccaattatccttttctcttggcaaggaaaatttctgcctcatacacgttagccttgttccagtattgggtgtagttggtgagcagaaaactaaaccaacacaacatagtgtacgagaactgagagccttgggtctgactcctgatcttctagcatgccggtcagcacagccactaataggatctgttaaagagaagctttcacaattttgccatgtcccggtcgagaacatacttaacatccatgatgttccaaatttatggcatgtcccacttattcttagaaaccaaaaggctcatgaagctataatcaaacaactaaaccttgctagatctgctggaccacctgaattacgagattggacagatatggctgagtcgtatgacaacctcaataactctgttaaagttgctttggttgggaagtatactaatctgacagattcttacctatcagtggtgaaggctctcctacatgccagtgttgcctgttcgttaaagccatctatccagtggattgcagcttcggatcttgaagatgcaactgcaatatctgcaccagatgcccatgctgaagcctgggaaactcttaaaggttcatcatgcattttgatacctggaggatttggggatcgtggaatttcagggatgatattggctgcaaaatatgctcgtgagaatagagttccatatcttggtatttgcttgggcatgcagatatcagtgattgagatttccagacatgtcctgggcctggaagatgcagacagtgaggagtttaacaaggatacaccgaatcatgttgttatgtacatgcctgaggtttcaaaaacacatatgggaaacacgatgaggttgggctgcaggagaacattcttcagcaaacctgattgtcttacatcaaaattgtacggaagtcctccacatgtagatgagcgtcatcgtcatagatacgaggtcaatccctcttttgttcccatgcttgaaagtgctggtcttcattttgttggttgtgacgaaagtcgaaaccggatggagattgtggagctacaagatcatcccttctatgtaggtgttcagttccacccggagttcaaatcaaggcctcgaagaccttcacctccttttacaggtctaataatggcggccactaaacaactgggagcaatttcgaatagctcgaatggcttcgttggagcttctgactaatatggggatctccctctgggtgagaagcatgtcgcccgttgctgcagacacccaagttatttcttgtgcacattagatgtacaggaaaacaatctaagcctgaagcagagtgtttctctctctcgaccacctgagtggcgtaagctaacggtcttacagtgtattggggccgaaccgtcatggttttgttgactgtcatttcaattgagcttaacagcagtcagtgctcccatccttgtgattccaattgagattaacagtagtaagtgattatgatctctcttgccgtttgagtggaagtgaaagacactaccatccagtttttggttgttatttgttctgatttttttgtgtttgttttctatacaaatgtgaaaaacatagaatata

SEQ ID NO: 180498 - DNA, 2761 bp, Zea mays
  Clone ID: MRT4577_96194C.1
gggaccctcgaggccggccgggccgggatagcgataggccatgtggacgtgtcacatgctggtcaggtggaagtcaattaggtcatgtaaagaaatgcagaatggccacgactcatcagagggagatgggaaattgccgaccggtgtataataatacaaagtcttggacgtggatgagatctggaactttttattcctgcattgcctcaaatctgggacaggtcagaggcagctgctgctgcggatggacacgcgacacatccgcagcggctagccaatgagcggcgaccaggggagcaggtagtaggccgtgttctaggctggccttttccatcgttttcctcgccggtattattagcgcggatcgttcatcgttcgggattggggttctgactcggaacctgatcagtgagtgtggtcttctgaaagcgagcaaaggaggatggggttctccttcttcacctcccgagccggtgctcgactgctggacgggatcgcgcgccccggcttctccaccgccgcgcttctgctcacagcggccagtggcggaggccttgtggcgtacgcggattccgctgcagagagcgcgccggacccatctcaggatgctcccaggaagaaggtggtggttcttgggactggctgggctgggacgtcgttcctcaagaacctcgactgctccaggtatgaagtgaaggtcatatcgccccggaactacttcgcgttcactcctctgcttccgagtgtcacttgtgggactgtcgagccgcgcagcattattgaaccgaaaaacaaggatgccacattttgtgaagccgagtgtttcaagattgatgcaaatagaaaaactgtacattgccgttctgctgttggaactaatcttgatgggaatggtgattttatgttacctcgtgactacccaggtgttgctcttggggctactgtaagtacatttaacactcctggagtgctggagcactgctgctttttgaaggaagtagaggatgctcagaagatacggaagggtgtgatagattgttttgaaaaagcatcacttccaaatattagtgaagaagagaaaaggaaaatcctacattttgtagttattggtggtggacctactggagttgaatttgcagcagagatgcatgattttcttgtcgaagatttagtgaaactatatcctgccattcaagacctcgtgaagataacaattattcaatcggcagagcatatattgactatgtttgatgaaagaatagcttcatttgctgaacaaaagttcaagagggatggcatcgaagtgtgcacgggcttcagagtgataaaggtgtctgatgatttgattacaatgaagagaaaatctgatggtgaggaggtatcagttccttatggaatggctgtttggtctgctggcattggtactcgtcctgtcgtcatggacttcatgcaacaaattgggcagaccaatcgtcgtgccttggcaactaacgagtggttaagggttcgcgagtgtgaaggcgtctatgcaattggcgactgtgctacagtgagtcaaagaaaaataatggacgatatttcaacggtattcaagatggcagacaaggacaattccggcaccttaacactgaaagagatcaatggtgttttagaagatatatgtataagatacccgcaagtagagctgtatatgaaaagcatgcacatgcttgacattgcggatctaataaaaggcgcagttggcgattctcacaaggagtccatggtggttgacatagaggagttcaagaaggctctgcgccacgtggactcccaggtgaaaaacgctccagcgacggcccaggtcgccgcacagcaagggcagtatctcgcccagtgtttcaacaagatggagaaatgcagagaggagcccgaaggccctctgcgcatggcaggggggtccggccgccacttcttccgcccgtttcgctacaagcacttcgggcagttcgcgcctctgggtggagaacaagccgctgcagagctcccgggcgactggatctccatgggccacagcacgcagtggctctggtactccgtgtatgccagcaagcaagtgagctggcgcacgcgggtgctggtggtttccgactggactcgccgcttcatattcgggagggactcaagccggatctagctgccaaggattctcttctgcacagggggggtttcgttccgtccgaagaataatcggtttcgctgctgctggagcttgagcaagcaaagctgtttcccgtgcccgcgcccgcgcctggccctgccggcgaaactgctgttctttcttctgctacatggtggatggctctcaaagcctcacgccggttactttcactgaggttttagctctggtttatttgatgtccataggttttcttcctttgcttgtgatctcaacacatccatcactatgattcatttgtgtgtgatacatattgcaacttcagttaaaatccaacctttttttaaaaaaaaaaaaaaaaaaaaaaaaaaaaaaaaaaaaaaaaaaaaaaaaaaaaaaaaaaaaaaaaaaaaaaaaaaaaaaaaaaaaaaaaaaaaaaaaaaaaaaaagaaaaaaaaaaacaaaaaaaaaaaaaaaaaaaaaaaagggggggccccccaaagggttcaaactttatttaccgggaaagtaaaggctaaaccccttcaaaggggccccaaaagtgaatttaagggggccgcgtttaaaagaccgcggaacggg

SEQ ID NO: 180499 - DNA, 276 bp, Zea mays
  unsure (1)..(276): unsure at all n locations
  Clone ID: MRT4577_96195C.1
gacccaatagagcggccgacccacgcgaacacagacccctcataagacgcgaggaaaaacgcgngggaaagaggaacccccagggcgcaaccgccgggaacccccccgacccccccgaaacacgcaagcggcgccacgagccaggaaagaccggagccaacgccaacaaacagaacccgcacgcacgcgaacggccgcaagaggaggaaggagacagaccagcgccccagccgcagccagggcccggaaccacagcacccgggccccccccccccc

SEQ ID NO: 180500 - DNA, 178 bp, Zea mays
  Clone ID: MRT4577_96196C.1
agaactgttagaagttcttatgggcagcaaatagtgcaattctcttatgatagtgttgatgacctagtagataaactcggcgccccggttggatgtcgggctgcttgttccatttcagaagctgcatatggagctttggaacacccggtcaatggtttagaggactcccctctcatga

SEQ ID NO: 180501 - DNA, 634 bp, Zea mays
  Clone ID: MRT4577_96197C.1
tttttttttttttttttactctcaaatcttttagagagacatttataatacctagcacagggttttgggtgttacatcaacgaacgcaactcaagtggcaagccttctttttagcttaggcttgtttaagaaaagcgctctcaaggctctagtaagcacagaagttcacgagaagttggataagttgctataataaaggaacccccccttttttgttccacagccattacaatggtacccttccaccttaaccccctaggtggggtgtttccaagcagggcggctcctagctttcgagcgaaaggctccacggccttcatcatgccagcaaaattcgaatcactccaggcatcgtagtagtgcttgcttaggtcctccaactcgatccccctttgtagtgagacgttacgacagcgaagacctggtagatcccttggcagaaggattccttctcaagctcctctaggctagcgaggccctcaagatgagcgattcagactccgacgaaggaggtgctccgaagtgcacacacatggtgctcaccacctccgataggagatgcctctccttatctagctcctccaggcggctttgcaccttgacgaagttcccctcggtggcgtcaaatttccct

SEQ ID NO: 180502 - DNA, 262 bp, Zea mays
  unsure (1)..(262): unsure at all n locations
  Clone ID: MRT4577_96198C.1
ggaancngcagtttgcgcccnnagcgnggncgcgggcgagggaccgngaggagcgncgccccaaggagcgggncaagaagcacgcggagngcancagcnaccccancncccngnggaccgaaaagacaacagagaaggaaannncngacgacgaagacgaggaagagaaaaaagattttttttttggggaggttgaggangaaaaanattttttttttttttttnngatttttttttttgggcanggaggccccccacgaaa

SEQ ID NO: 180503 - DNA, 344 bp, Zea mays
  Clone ID: MRT4577_96199C.1
cggacgcgtgggtttttttttttttttttttttttttttttttttttttttttttttggtttgtttttttttttttggggacaggaagggccttttttgaaataatgaaattgaaaggctttgtttttccaaatgtcaatatacccattactttaaaagtacacgggattttaggcgcagtttataaagagacatttagcaaagtggcaaccaaaaacaactgttttttggggtccaactaacaacatggaaagggaacatcctccggtcctttagggttaaaacaaaccttggactcttttttttcacctgcaaaattggtctccacgtaataaatgaatgcc

SEQ ID NO: 180504 - DNA, 151 bp, Zea mays
  Clone ID: MRT4577_9619C.1
tctatttattcatatttttatcagccatttatattcagacacgatagcctcgggcggtttttaattcattaggttaaacatattcatccatttctgaacacatttgtaacacacatcttcctaaaactatgtcatatgaaaactgctttgg

SEQ ID NO: 180505 - DNA, 109 bp, Zea mays
  Clone ID: MRT4577_961C.1
aagatgtagtatgtagaacactctaagagattatgttttatgttcctgaagcgatcttgctcatgttcaagttactaatgtgtgaaatgtaagtgtgcaataaacgtat

SEQ ID NO: 180506 - DNA, 580 bp, Zea mays
  Clone ID: MRT4577_96200C.1
tgggtacctcgagccggccgggaatcttattccactcgtcgtgatgtagatcgtaggctgaagagtggcgctgggaacggctgcgcttgttcctgcgaatattctgtgcacgcgactgtgaattgcggggatcctcccgctgcgccacaagctctacatactgtgcggaaagggaataatgtctcccttttaacgactaacgctggcctgaattgccgacatggtggtggaccgcgctattatggagaagcccgagactatgaagaaggtgatgctggacgtcatcggacgatatcgcaagcggaggcgctgcagggacgatggctacgtgcacttgaaatacaccgcagagggcgatggagcatctgaggacgacacgttaggtttgggtatgaatgcagacgacttcgacgagtgcgctgatcatttggtctaccattgctaatggagcatgcgtcatcgccggaggagttgttgtactatgagcctactacatatatgatcgttctatgagcacctgatgatggtggtatcgagatcgacgggccgttcctggacggtcactcacttatgtacttca

SEQ ID NO: 180507 - DNA, 315 bp, Zea mays
  Clone ID: MRT4577_96201C.1
aaaacccaaaccgaactttcctgacgataagttcggacatagtttggattaacctcacagttcggacagattcacacctcagatgaattccatgtgaactaaaagggtataggacatgggttgaacgtgtcaacacaagatttccaaatggacccctgtgatacattgaaacgttgggggagaccaacaggcagcaaagaagttatctagcgggaccttggggaccttagttacaaaggtagaaggcatcgacacacaggtcctaattgaaaccgccactggaggggtcaaggagagcactggagagggccccct

SEQ ID NO: 180508 - DNA, 275 bp, Zea mays
  Clone ID: MRT4577_96202C.1
tgggtaccctcccggtccggcctccgtcgtcaccggcgtcgtcgactagctagctaactctcgatctccagttcctgcccccgacccacgcccggccgtggacgtcagcaatggcaggaggcctcttatccatggctcaccctgccggcaccctctccgagatctcaggagacatccatctgcttcctggcgggcctatggccagcgccaccggagcaactccctggcgggcgacggcgtcgagctcgattccagacgggccaccacgagcacca

SEQ ID NO: 180509 - DNA, 486 bp, Zea mays
  Clone ID: MRT4577_96203C.1
ctctcctccttctccaagcaaaaatcacaagggttttagggttctagaacgagcgggtcggcgagaacagccatggacgcctcccccgagctacaacagttcctggagcaagagaagcacaagatgatgatgagtgagatggtaaccaagctgactaatgtgtgctgggacaaatgcataaccagcaccccaggaagcaagttcagctccggtgaaactacctgcctgaccaattgcgctcagaggtaccttgacatgaccgtgataattgcgaagaggtttgagatgcagtagggcgtctccaacttcagccggttgcgtcatcaaaaagtttccaaactccgagcttcctttgaacatgccaacaatggcgagttttaacagtgaaaatatttaatcttctgtcgtaaacgcttggttagtagttgtatctgtggtgaaccttgatgtgtttagctttcttgtgaagctactgtcatttgatcc

SEQ ID NO: 180510 - DNA, 376 bp, Zea mays
  Clone ID: MRT4577_96204C.1
accaaaccttgggaggggctcactatacaatttatgtttataatgaagggaagaagggttgacctaatttgaccatccgtatatggctcccctaaccgatggcactataacgacatcggcagcttatgttcttttttaccttcggactcaggagactggcttaaatacaatggcactcctagactctggtatcacaacctggggggtgcgatgatgcaatttatgagccctagtcccgcactgtgtatagattcattggtttatggtgacagatgtgcggctgtgccgtaacttaactgagaaataggaacaggtccagaagagctttatcggcttttttatcactacggagacgataatcagtcgcggctcctta

SEQ ID NO: 180511 - DNA, 359 bp, Zea mays
  Clone ID: MRT4577_96205C.1
atgtgtagcattcataaacacaccatgcgttgcgcactatcaacaccctaacaacactgggtgcgaggatattagccctccttgcgcttttggcccttgtagtgagcgcaacatatgcctatattattccacagtgctcacttgctcctagtgccattattcaacaattgctcccactcacatacttcaatgggcttcaaacatccagtcgtgcaagtctacaagctacaactagcgtttgcggcgagcgtcttacaacaaccaattgcccaattgcaacaacaattcatgtcacatctaaaccttaaaactatcgtaatgcatcagccacaacagattctgacatcactgaaccacct

SEQ ID NO: 180512 - DNA, 211 bp, Zea mays
  unsure (1)..(211): unsure at all n locations
  Clone ID: MRT4577_96206C.1
attgggaccctcgaggccgccgggactatccttcatatcccccttgcagatagtctggcggctctgaagacatgggcaggacacgtgatcgagagcgggctggcggcgggagttcgctgccaggacacacggaccctccccggcgccgtgatcgacgcggntgagctgggtcctgtcgctgaccgcgccggatcgcgagtcataccacgct

SEQ ID NO: 180513 - DNA, 804 bp, Zea mays
  Clone ID: MRT4577_96207C.1
cattgggtacctcgaggccggccggggtcccgttcgacttcacctgcgttccccgggtcccgacacgccgctgtaccagtcccacccgcctgcgcacttctcccaccccgcgccgtctccgtcgccggcgagccctcccgacgctcctcgaacgatccgtccctctagcggcccttctctcagccgcttccagcccaagggaaggggagggagaggatgtggtcgtcgagccaggcgagcacgaggggcgtcgtggagatggggagggtggaggccgggccgtcgcatttccctaagagacccgcgcctcagaactccgccagggtcaatctgtcaaggacacacacagttaaacctacctctgctggcgaccgttcaggaatttctgttaaatgcaacttggggtggtcttctcaaccatcgcttgacttgaggcatcactttagaggatactcatcagcatcagaggcagttcttacttcccaatctgatgacattatccgtcttcctaggctctttcgctttctgcagaagccacttgcaaaattcatatcggaagtgagagcaccaaaaagtaaggaaggttatgcacccaataggtggcggttctcctctacgacaaattactgatgcacaggctgaagcactgagggaggattacatgggaaagatgttcctgccaacgtgtatgttggaatgcggtattggcatcccttcactgaagaagccatagaacaaataaaacgggatggaatcaccgaaacttgttgtgttgcctctataccctcagttctccatatcact

SEQ ID NO: 180514 - DNA, 577 bp, Zea mays
  Clone ID: MRT4577_96208C.1
gccggccgggtcgggaaactcagtcgggtcattccaatcgaaaccctagaagcgctccgccgagctccaggttcccgagctcgccgctttctcgcggagtaaaaaggccgaggccgggacaacctacttgtgctacctcaacggttcagccatggatctggagatcgttgggcggcatgccttactgttcgacgacgacgcgacggcggagctcgtcaactccggcgtctcccttgtcccctgggcggccgtcggcgcggcagaccttctgctcgaccgccacgacgtccgccacctccttgaccgcgtgccccctcgcccgcaccgcgcctactcgatggccctcctttacgcgccctcccctgacggcgtctctgagaccgagctcgatcgcgagcgctaccttgaccttccggctggcgacggcgaatacgagggttctggggatgcggctccttcaggaataaatgaagatacctttcgcgctgactataatgtccttccttcttcgtatggatatcccgctcgttcagatgaaccaaattcttcgaacgtgttacttgagccatcattttat

SEQ ID NO: 180515 - DNA, 2829 bp, Zea mays
  Clone ID: MRT4577_96209C.1
cggggttgcgagaggttgcggatgatttcctctcgtcggcccgcatactcccgtcctgtccgtcttcacctgcgttccccgggtcccgacacgccgctgtaccagtcccgcccgcctgcgcacttctcccacccccgcgccgcctccggcgccggcgagccctcccgacgctcctcgaacgatccgtccctctcgcggcccttctctctgccgcttccagcccaaggggaggagagggagaggatgtggtcgtcgagccaggcgagcacgaggggcgtcgtggagatggggagggtggaggccgggccgtcgcatttccctaagagacccgcgcctcagaactccgccagggcgatgagctccctccacacgtaatcgtgtgggagtggggctggacaaagagcgcggagacctggaatggccgtgcggcgatgctggccggctggcttcctggtgctgaaggaccaccgcgaaggttctgcatcaaggggaatcctgcctctgttccgctgaccgacagttctgttatgatggggtcataattttgctgcagccgaagggagttttgaacttctgatgctgtatatgaatcaatttgccttaaatcgtcgaggggaaaagaggaggaaaatggtataccttggccctttttctacgttctgtcgcgttatgcagaacccacctacataacttagaacatcaaaaagggctcaaagatgtgcatccgtacgtggaatactctcctctccgacaaactacaggcgcaacgactgaagcactgagggagccatcacatgggaaagatgttcctgccaacgtgtatgttggaatgcggtattggcatcccttcactgaagaagccatagaacaaataaaacgggatggaatcacgaaacttgttgtgttgcctctataccctcagttctccatatcaactagtggttcaagtctccgtttattggagagcatattcagagaggatgagtatctcgtgaatatgcaacatacagttataccttcctggtaccaacgtgaaggatatatcaaggctatggcaactttgattgaaaacgaattgacaaaatttcaagaaccccaaaaggttatgatatttttcagtgctcatggagttcctctggcatatgttgaagaagctggtgatccatataaagcagaaatggaagagtgtatcgatcttatcatggaagaactggaaaaaagaggaataacaaatccgtgcatacttgcttatcagagccgagttggaccagtggaatggctgaaaccgtacactgatgagacaattattgagcttgggcagaaaggggtaaagagcctgcttgctgttcccattagttttgttagcgaacacattgaaactttggaagaaatcgatgtggagtacaaagagttggctttggaatctggcatcaagcactggggacgggttccagcactaggttgcgaacccacattcatttcggatcttgctgatgctgttattgaaagcctaccttatgttggcgcaatggcagtttccaatcttgaggctcggcagtctctcgtacccctcgggagcgtggaggagctgctagcagcatacgactcgaagcgcgatgagctccctccaccggtaatcgtgtgggagtggggctggacaaagagcgcggagacctggaatggccgtgcggcgatgctggccgtgctggctctcctggtgctggaagtgaccaccggcgaagggttcctgcatcaatggggaatcctgcctctgttccgctgagccgacaattctgttcatgatggggtcataattttgctgcagccgaaggaagttttgaacttctgatgctgtatatgaatcaatttgccttaaatcgtcgaggggaaaagaggagaaaatggtaaaatatggacagaattcgacggtatatcatgttatattgtacctacctactacatgacatgggacatggaatagggctcagacatgcgctatggaacttggaatacacacaaacctaacacgccacatgctgcacaaactcctgcctactgccactagtaccttgtctgtccataagtggatgtgcgttgcttctagagaataatcatatgagcggatgagcttctgcattgtcgtgtcggtgtggatgctatatcaatccagcattccagctcaacaatttcagggttagctttagctcaagcagattaatttttgggttggctgagtttatatggtttttgtgcctctattgatggagattaattatagattttccatggatgaccgcaaaaaaaaaaaaaaaaaagaggccaacagagttgatattagtaacgggatctttatttataatcgattaaatttaaaatactaaaacgtaatattatattaaaattccagggtagtactaaagacagtttggaagaagacgagaccaatgaacgaacttggtcggcgccgctacaggcctagggtgacgatcggatgagatccggcacgatcgctagctgtttggtggtaaccttgattgaaccgtggtggatcatccccgcgcggaccagaccggggcaatgatttaacgtgttccgcgctacgatatatcgcaacccagcacgtgccgacggcccctctcctccgttctggctcgacgggcggataggagattaggagcacgtgccaacgaaccaaccaaaccaactcgactcacgtgggatgaaagcggatgtccgagttattcggatacgtccgtcccaaaatataatttgttttagatttattatatattcattaagtaacaagtgaatatagtatatatatagttt

SEQ ID NO: 180516 - DNA, 950 bp, Zea mays
  Clone ID: MRT4577_9620C.1
ctatccatttgcctcagtgcgtgtcatgtgttgtgtatccgagccgagctgagctgaggtcggcagttgatctgatctgcctaacgctaacagtctccaacgccgcgcctcccgggaggatggaaggggctgataggattggccggaggaaggcgcgacgacagcgatagcgatgccccaaccactgcatactaccctgcatgcagtggccttcaaagccaaggaccataacaaaatttcgagtgagagaagcacatacgctaacagtctccagccagccagccatccaccgtcctctcctctcctcatctgttgtgtcggccggcaggggcgcgcggctgctgaggtaagtagtagcgcgatgggcaaggtgtgctgcagcaaggaggcgcaggaggaggccgggatcgacctccttgggctgctggtcgccgccatcatcgccctcgtcctcatgctcctctgcacgacgccccggaggcgctgcgtcgccgtctacccgtgctgctgagtgctgactgctgactgctcagcggcgctcaagcctctctctgtctatatcgatcgcatgcatgcagcagaacagtgcaggccaggcagcaggctgcaggcatgggctcctcatctttttttggttcaccaattaatttctactcggctgtaataatacccatcctactgcaagtcatgtactaaaatatatccatcctaatgcaaagccatctctagcctgaatccgttgctttttgggtagccggcctgaactgaaaggtggtggtggtggtggtaccacatattattgcccacaaaaaaaaagtcttatgatccaccttgctaaaaaaaaaaactctgactcacccataaaaatcctctgagcgcacgcagtgaaccccctttgccccaaaaaaaaaaacaaaaccccctcccagctcctccctcccccccccccc

SEQ ID NO: 180517 - DNA, 739 bp, Zea mays
  Clone ID: MRT4577_96210C.1
ggccggatccgcccctcgccacacgggccaacaccacctccaatctagaccacaagaaccacagtccttcattcaaacaagatgcaattcaccgctgctgttgttgttgccttggcctgctcgagctctgtctctgctttcttcccctccctagccgcctttggaaaccctcttaccggcgccatgtccgggtgtggcaaccaagctggcttcgtgaacgtcggagcactcaacgagaacaactgcaactccgctggtggaccaggtggtatatcctgtggtaaccaggctggtggcttgctcaacgttgccctcctcaattccaacaattgtgcatctatggcctctggccccttgttccagaacggaccgttgttccagaagagcgacgattcaaagaaggctgacagcactgcataggatttcgtagtagtctcgctgtgccacagcgctcgattgacttcctcgtcagatcacgtctccgagtgctacgttcctggcacatctcggatctttgattttgtaacgagtgatatcttgacttctcaactcctttgttttgtttctcccttacgacgcgtcgtttaaatccctgcctttgatcctgtcgacgttcgttgctttacatttccttcttgaggctgttacttggtcatctcgttttcattaaatctcggacatccagctttccctccggcgagttgtgagaatgcagcgtttacaagaactagaggacccg

SEQ ID NO: 180518 - DNA, 2000 bp, Zea mays
  Clone ID: MRT4577_96211C.1
gggaccctcgaggccggccggggttgcggatgatttcctctcgtctcgtctcgtcgggatactcccgtcctgtccgtcttcacctgcgttccccgggtcccgacacgccgctgtaccagtcccgcccgcctgcgcacttctcccacccccgcgccgcctccggcgccggcgagccctcccgacgctcctcgaacgatccgtccctctcgcggcccttctctctgccgcttccagcccaaggggaggagagggagaggatgtggtcgtcgagccaggcgagcacgaggggcgtcgtggagatggggagggtggaggccgggccgtcgcatttccctaagagacccgcgcctcagaactccgccagggtcaatctgtcaaggacacacacagttaaacctacctctgctggcgaccgttcaggaatttctgttaaatgcaacttggggtggtcttctcaaccatcgcctgacttgaggcatcactttagaggatactcatcagcatcagaggcagttcttacttcccaatctgatgtgagaaaactgtttgttggcaatgaaaaaatcggtgttctcttgctgaatcttgggggcccagagactcttgacgatgtgcagcctttcttgtttaatctttttgcagatccggacattatccgtcttcctaggctctttcgctttctgcagaagccacttgcaaaattcatatcggaagtgagagcaccaaaaagtaaggaaggttatgcatccataggtggcggttctcctctacgacaaattactgatgcacaggctgaagcactgagggaggcattacatgggaaagatgttcctgccaacgtgtatgttggaatgcggtattggcatcccttcactgaagaagccatagaacaaataaaacgggatggaatcacgaaactcgttgtgttgcctctataccctcagttctccatatcaactaggggttcaagtctccgtttattggagagcatattcagagaggatgagtatctcgggaatatgcaacatacagttataccttcctggtaccaacgtgaaggatatatcaaggctatggcaactttgattgaaaacgaattgacaaaatttcaagaaccccaaaaggttatgatatttttcagtgctcatggagttcctctggcatatgttgaagaagctggtgatccatataaagcagaaatggaagagtgtatcgatcttatcatggaagaactggaaaaaagaggaataacaaatccgtgcatacttgcttatcagagccgagttggaccagtggaatggctgaaaccgtacactgatgagacaattattgagcttgggcagaaaggggtaaagagcctgcttgctgttcccattagttttgttagcgaacacattgaaactttggaagaaatcgatgtggagtacaaagagttggctttagaatctggcatcaagcactggggacgggttccagcactaggttgcgaacccacattcatttcggatcttgctgatgctgttattgaaagcctaccttatgttggcgcaatggcagtttccaatcttgaggctcggcagtctctcgtacccctcgggagcgtggaggagctgctagcagcatacgactcgaagcgcgatgagctccctccaccggtaatcgtgtgggagtggggctggaagtgaccaccggcgaagggttcctgcatcaatggggaatcctgcctctgttccgctgagccgacagttctgttcatgatggggtcataattttgctgcagccgaaggaagttttgaacttctgatgctgtatatgaatcaatttgccttaaatcgtcgaggggaaaagaggagaaaaatggtaaaatatggacagaattcgacggtatatcatgttatattgtacctacctacatgacatgggacatgaaatagggctcagacatgcgctatggaacttggaatacacacaaacctaacacgccacatgctgcacaaaaa

SEQ ID NO: 180519 - DNA, 648 bp, Zea mays
  Clone ID: MRT4577_96212C.1
aagagttgctcttccagcaagaaaaaggaatgcaaggctttcttttgcatttgtatacccagacaagaatggtcgttttgttgtcagacaggtaaggttgtaagaatttgggcatgtttggacacttggctccatctcgccttgctttgctgggcaaactagccttgccaggcaaaactggatgtttggttagttttcctgggtgggcgctaggttactcggcgctgtttggtttccagttaaaaacttgcttttgctggcaagctttgtgatttaactgcttggtactattgctcataaagatacactcgccaaattgccttataggtgagatttcctacatctatctaaatgaacacaacctgcttgaagttttgcagtacacatatcataacaagtcatatatagttatatacaatacaagacgacgaaagaacgatcccaagcattacgacgggcacaatattccacatgtcatacacccaaaatacaccatgccaaatatagtttcatatgtccaagatgcgtatattgccttgtgtacattataatttttatccctgtataggttcatatggtctgtaccattcatcattagtttcaaagtgccaaaatacacagtatgtcagtgttttccatacttttaaa

SEQ ID NO: 180520 - DNA, 378 bp, Zea mays
  Clone ID: MRT4577_96213C.1
ccctcgtttctgtcgagcagtctcgtcctgcactttcacatcttccacggggggggcgcggtcagtttaaccatggcggactccaaggccacctttacggtcaccctccgcaccctcaagttcatgaccaaccgcctcctggcccgcaagcaattcgcgcttgtggtgatccaccccggccgatccaacgtcttcaaggcgggggcgaaggagaggcttgccaaggcgtacgaggtgaaggaccccaacaacatctttgtctttatgttccggacccactttggaggaggaaagtacactgttttcggtctcatctactacaacctagaggctgccaagaagttcgagccgaaataccggcttttcacgaatggtctt

SEQ ID NO: 180521 - DNA, 981 bp, Zea mays
  Clone ID: MRT4577_96214C.1
atggaaaagttaaacctaggtatgatacaacatggaactttgacacagttgaagcttgagtcagttcttctacagagaattattgatgcccaaagaaccgacaagggtatgaagtgcattcgtgagaaaatgaaagccgggagtaccaagatgtatcaagacttaaatcaacattattggtggacaaaaatgaagattgaaattgcacgctatgtggtaagatgtgacacctgtagacgtgtcaaggaagtgcatatgaagaccgctggaccattacaatccttgcccatcccaacttggaaatgggaagatattagtatggacttcattgtgggattacctcagacagctaaaggatttgattctatctgggttatagttgaccggcttacaaagatagcacattttcttcctgttaaaacagatcacccagttgatgtctatgcccagttatacattgctcgtactctcagtttgcatggaattccaaaaacgatagtatcggaccgtggaccacaattttatccaagttttggagtgaactgcctaaatccttgggatcatgtatacctgaaagtatcaccaataaagggtgttaatcaattcgaggtaaaaggaaagttggcaccccgatacattggcccgtttcccattcttgaacaatgcggaccagtggcgtacagacttcaactgcctgaaacattatctgtagtacataatgtgttccatgtatcccagttgaagaagtgccttcggattcctgatcgaaccatcgatgtggtggatgttgctttggaaccatatttgacttattcagaacatcccattcaagttttggatcagaaggataggatcactcgaaaaaggaccctcaagttctataaggtacaatggaaccagcacaccgaagatgaagctacatgggagactcaagatttcttgaagaagaattttcctttttcgagttctataagtttttag

SEQ ID NO: 180522 - DNA, 297 bp, Zea mays
  Clone ID: MRT4577_96216C.1
tacatgataatccacgttgggggtggcgactatgctaacttagtacattatcacaaaattaaaaaggttctgcataagtaatagctttgtttcttaccatttcattcattccattattactgattgaaagacatgaaacgactcaaattcaatccaatgcatattgattgatggattgatattactaccgaaaaaaaaggttcactccgatctggcggcttatctttccacctttgtgtccttttattttattcctaccattttcttccctatccctcttcttacttcaaccaatat

SEQ ID NO: 180523 - DNA, 324 bp, Zea mays
  Clone ID: MRT4577_96217C.1
cgtgggggtttccaaccccgaggggcgcgcggcgggaaaatacccccggcttcaaactccggagagaccttccccacaaccacacaacatcaaaatggacgggggcagctgcccttggtccccatttgggtacccggccccggagccggtttgaacccttgggcccttcccaacgtctgggggaggctaaaaaaattgtttttttccggcctcgggctcggtttgggagaccccagggtttctgacccgtgcccccgcccctgtcggccgaccctttcgggcggggttcgggcgggtcgccgcccccggcgacgaggcccgacc

SEQ ID NO: 180524 - DNA, 267 bp, Zea mays
  unsure (1)..(267): unsure at all n locations
  Clone ID: MRT4577_96218C.1
accggaaggccagcatgcccncattttttacagncagcgaccccggggggtgtaaagcgcggaacctcaccgccacgggccaccacctgcggtacaacaactgccgaggacaccgcttttccgcgacaacggggtgagcaccagacgcactcttctgtcgggactccaagctgctgagcacggcacccatctgcgggcgccactcggttcgcgcgcccccggaggactcgtgaaggggcgcatcaatgcactaggcagcgtcccacc

SEQ ID NO: 180525 - DNA, 194 bp, Zea mays
  Clone ID: MRT4577_96219C.1
aacgcgcaggccggtaccgttgacgggaggaaggtggacgccgccgaggcgttaagatcgccggtattgagggcggcttcttcaagctcaaccccaaggagggccttgacattgctaacggtacgtccgtgggctccgtgctcgcggccaccgtgatgtacgacgccaacgtcctcgccagcctgttggaggtc

SEQ ID NO: 180526 - DNA, 439 bp, Zea mays
  Clone ID: MRT4577_9621C.1
ggaaaccaacaggggggggatcccccccccgaactttatggggcccctaaaaggcaaaaaaaaaaatccccgggggttggagagccaaaaaaggaagggaattcccggggtggggggtttaaccaagacaaaaaaacctggggggccctgaatcgaaacaaaaaatcaccgccctgcagggggttaatgaaacaaaactggggggggcaaagcaagctttattaaagggggggggttggtgaaccaacctaccatggaggggagggcccccttttggggcttaaacggaaaaggggccggggggtttaacccgaagggaaaccccggcttaaaaccctggaaaaaacttggggtgaaaaggaaccctggggtttttacccaggcaattccccaacccgttccctttttttgggggggggggactgtttttttgggcccc

SEQ ID NO: 180527 - DNA, 1616 bp, Zea mays
  unsure (1)..(1616): unsure at all n locations
  Clone ID: MRT4577_96220C.1
ggggtcccnttcttcatcctttattaattacatatatatccatagctagcctttctgtttcaccacggctccctccctccgtccgctgggatgttgggaagcataatgctagaatattactcaaccaatcgcacacacaacatgccaatgccaaagatgctatccgcctatccctatcctatcctaccgtagcaatggcaatccttaaaacccgaagcacatcgatgtttacgacgaaaccgcagaacatcgacaggttttcttgttccatcgtcagcgccacacgtctatacgggagacgagagatggaaggaggggaagaggtggagaaagagggcaacatgtcgcagttggctggcgttcagtttcttctctcgaacgaaggaaaggaagtacctctgtcatccatcgaagacaggacggcctgcctctgcctcttcttctcggctcactggtgcaggccatgcaggagcttcaccccgactctactccaggcctacacggcgctccggagcgccggcaagagcgtcgagataatcttcgtgtcgctggaccgcgacgaggccagcttccgggaccacttccagggcatgccgtggctcgcggtaccgttcgacgctgctggcctactacggcagaagctgtgcgcgcgcttcgccgtcgagcgtatccctgcactgatccctctgtcagcgtcagcgacgccgtccagcgggctgggatctggagaggacgcggtgaggctggttggcgagtatggagtagatgcgtacccgttcagtgcgcagaggagaagggagctggagagcatggacgatgccaggagagaaggaggccggcttcaggagcttcttggctgcgaggagagagactatgtcatcagtgcagatgacataaagattcctatagctgaccttgctggcaagacagtcggcctgtacttcggagcacactggtgcccaccttgccatgtcttcaccaaacagctcaaggaggtgtataacgagctgaaaatcttgagaccgggaagcttcgaggtcatcttcgtttcgatagaccgcagcaagggggaattccaagcaagcatgagctccatgccatggcttgccatcccttattctgacgctgcaaggaaaaggcttacaagaatcttctctgtcaagggtatcccaggactcctgatacttggtctggacggtaaagctctaaaaacagatggcaggacagcgatatcagcctacggggcagcagcattcccgttcacggaatctagagtttctgaagtgggtgaagcgctcaaaagggaaggagacaagctgcctcgccgagtgaatgatccaaggcacagacacatgcttgagttggacatggctaaggcctatgtttgtgatgaatgccaacagaaggggaggtattgggtgttctcttgtaagcagtacaactttgatcttcatccctcttgtgtaggagataataaagtagacaacatctaaaatatgtatatacttaaaagtgtgaagttctagcatcaaagtggactagaaaaatgtttatattgtactctaaactctataggactcggtgagagtaatgggcaaagagtcttagttccttgt

SEQ ID NO: 180528 - DNA, 297 bp, Zea mays
  unsure (1)..(297): unsure at all n locations
  Clone ID: MRT4577_96221C.1
cggctccagtccaaccaaaccaagccgcagaggtgactggaaagcttgttgagacggancacactgacgtcctccacctgcttgagtcccccaaggcccacaaggcaaaggctgctgaggcgatggacattctccacaatgaggcccatcaacacaacgcaaacacccagaccagtcaactagctgcatcatcactaaccgaatgcatactctcctaacttgacaaccataacaaactatcctcaggatgcaattgagcgaaggttacagaggacatcacacacatgacagtattgc

SEQ ID NO: 180529 - DNA, 237 bp, Zea mays
  Clone ID: MRT4577_96222C.1
tccaggcggtctcgtgaacattgatggcgacaaccagtcagaacttgaatgatgcggaacgaatctcgcataggcactgcaagagctcaatatgtaccgacctgcatgcaacagtgctatgcatgatgggccatgccgaggctcgagacctgacgaatgtccatactgattatcatgctgcaatagcaaagatagctaagacatatgaacgttcggctactgaacatgatcttgcag

SEQ ID NO: 180530 - DNA, 296 bp, Zea mays
  Clone ID: MRT4577_96223C.1
gtacgtaagctcggaattcggctcgaggggatggggaccctttcttttcccccagcaaccggttgaacagggggcgggttctaacacatgctcctggcaccaacaaagacgcggggttggacaccatatggcgaaaagccttccaggacgccataacaaaccagcaccagcgagtacatggcatattcctattgtcgaacctaagcagacactcttgagacccggcgtgctccaaccagcctgaagactaagaggggccagcgcacaccaagggggacgagttctttaggctgtcc

SEQ ID NO: 180531 - DNA, 562 bp, Zea mays
  Clone ID: MRT4577_96224C.1
gcgtagtactacgctcggggacggaacggagaggaagctagctaggagcgtgcatggttaggctctagggacgacccttaattttggttgcgcaagtcctccaaggacgacgagatttacctagcttctcccagctatgcccgggggcctgatgacccccggccgcaacatgccgacggcggcggccatgatcggcggcctcgccagctacgcagcctccttcggccagaacatgatggatgggcaccatcagctcgctatgatgcagcagcagcatcagaaccacggccagcagcaggcagccacgagcgagagcgacgcgcgaggcccgcgccacgacgagctgctgatggagagcaagtccggcagcgacaacatggagggaggcgcccggtcaggcggctccggcggtgaggagctgcaggaggaggatctcggcctgcggcagccggcccgcaagaagcgctaccaccgccacacccagcaccagatccaggagctcgaagcgttgagtcgtccctccaatctagctagctagtatctactatctagagtgatcggt

SEQ ID NO: 180532 - DNA, 692 bp, Zea mays
  Clone ID: MRT4577_96225C.1
aattcggcacgaggaggactctacctcttgctccgccggcatgaccttgaagcgccacaactgcggctcgagcaagcatgggcgacgtcacatgccagtcatacagtgctcaaactgcgaccagtgctgccgcaaggcaaggctatcaaaaaggttcatgtgaagaacatccatgaacaagtggtcatcagggacctacatgaagaatgcgtttatgatgggtaccacctccctaagctgtacgccaaggtgcaccaattactatggttcgctatccacgctgacattgttcgagtccgatccgttgagaagcacagggaccgaaaacatgcagatcacttaactctcagggaggataggcctcctggtggacaagaatgcctgcgccctcgtcctggtgatcgtgctacagatccaactgcagcatcggctagctgctacgacataggcctctaaccttatctaccgtgataagtacttatgcccactaactttgcgagttgggcgccgagcactactgaagctgctatattagatgtactttgtaactacagcttcaacattgtcgaagaatgtgtctatgtgaacatgctaatgcacgcactagacctgtcacagaattcgaatatgtgatctattgctgcgatgtggcggtggatgacgccgatcaagaagagccagccgtcggcgca

SEQ ID NO: 180533 - DNA, 332 bp, Zea mays
  unsure (1)..(332): unsure at all n locations
  Clone ID: MRT4577_96226C.1
gatcgtgaattcgacgtcaacgttctgctttgcttctgggcgggaagcgagaggagagggagccnagagagaggagggatggtctattaanagaggcttagtaggtggtccttcgaaccgaagatgtttggcggtgttcaaacgggcaggtggtggaggtgcctgcggagcttgtggcggcgggcagccggacgccgtcgcccaagacgaaggcgtcgcagctcgtggggcgcttcctggccgcgtccgagccggccgtgtccgtgcagctcggcgaccactggcacctcgcctactgccacaccaaccaggcgctccttcgccccaggtcg

SEQ ID NO: 180534 - DNA, 776 bp, Zea mays
  Clone ID: MRT4577_96227C.1
cgttgatccctcttcgacagccactccacccgtcatgtcctcggataccactttcaagcgttacgtcgaggtcggtcgcgtcgttctcgtcaacgacggtccctctgccggcaagctcgcgaccatcgtcgagatcattgaccacaaccgtgctctcatcgacggtccctcgactggcgtcccccgccaatcgttcaccttccgccgaatggtcctcaccccttacgtcctcaagaagctcccccgcgctgcgggtacttcgaccgtcaagaaggtgttcgacgcgtccgaggttgtcgccaagtgggacaagtctgcgtgggcccaaaagcgcaaggctaccgagcaaaggaggaacctcacggactttgaccgcttcaacgtcatgctcctcaagaagcaacgcaggcgtctcgtccaggctgctgctgccaaggccaagaagtccgcttaaacctcacccctctcccatttaagcgcccttctttcgtctcttcgttccttctcgttcccgctctctccctccccctcgtttcgatttcgatcgcctccctcgacagctcttctcccccgcttgttccctctccgaccccgacctacctctttctgtttcgacatgctctgctccgaccgctgcacccaaccacgcctttgccccgactatcgccctgttccggtacagaagccggaatgcgcacacggtggacgaaggatgggtcagcggaacgatctgagacgagttcagacggcaaagaaagcgtacgtccaaaaaggca

SEQ ID NO: 180535 - DNA, 545 bp, Zea mays
  Clone ID: MRT4577_96228C.1
caaagcacctctctctagctagctactagacgacagctagctagctcctcaacgacgacgcagtagtacatatggagaaggcggcgggcgtgagcgcggcgaggctggccgtggcggcggcggcggtgctgctgtgcctgctgctgctgctggcggcggggccgcagggggtctccggcgccgacgggaggaggaagacggcatcgccctacgataagttgatcagctgcagggtgctgggcaactgcgacaagaacaagggcccggaggccacccgccccgggaagccggtcaacaagtacacccgcggctgcagcaagatcgacaagtgccgcgactgatcaaccgtcatcgatgcaggcagccggagctatatatatatgcgtgtcgttctcgtaccgtgtgtgcatgtgaaagccgacgtttcttgcgttcaatcgattgatgatttgatgtacgtggcccagcttttcatgattaatgtacagtcccagtgacgaatcaaaattttatacaaatatatggtataagtcaagcagactgct

SEQ ID NO: 180536 - DNA, 275 bp, Zea mays
  unsure (1)..(275): unsure at all n locations
  Clone ID: MRT4577_96229C.1
cacgcgtncgccggcgaaagtcaatttaatctggtgctgaacattgagttgcaacaaatcatcgatagagactgagtcaccgcagctagaaaccactgtctcaaggtgctgaacattgagttgcaacaaatcatcgatggagaccgagtcaccgcagccagaaaccattgtctcaatttgaggagattttccatctatgtttgttagaaggcataatgctatttatctcttgtattcgaacatttggcaattaagaaatagaagattacttcccc

SEQ ID NO: 180537 - DNA, 303 bp, Zea mays
  Clone ID: MRT4577_9622C.1
ccacgcgcgctttttccgcctcgcctcgtccttctctccatgggggaccatgaagagagatcctgcacatctcgcgcggccagggccggaaccaagcaggcgctcacgatcagggaagagagtcactgactagcacggaatcgaccacagccacgtacattgtggcgattcaacactactatgcatggacgttattttgaaataaatatatatatatgtatatctgtgggactcactagttgatcaaaaggaaccagaaggggcgcccggtctagaggatccagactcacggacgcgggcatg

SEQ ID NO: 180538 - DNA, 312 bp, Zea mays
  Clone ID: MRT4577_96230C.1
aattcggcacgagggttctactgatgcaaactgaagcccctgcgcctaaactttcagccacaccatgcacaccgcccgttcctctatgctcctctctccggcagccgctaatccccatcggagggtgctgacggacaccactcatggaataaacagaaccaccgatcccaagagcggcgaggagacgaggcgtaagcgcagtgtccgaccctcatctacaagcaagacccactacggtgctcaatattttacatggaggacgaggaccggtacccaataccacctatatagtacaacgataatagcgtgcgc

SEQ ID NO: 180539 - DNA, 281 bp, Zea mays
  Clone ID: MRT4577_96231C.1
caaaactggacaaaaataaaatccaggggggataaaaacaaaacatggaacagaggcaggctaccagttttaattttcaaccatctaaaaagggccaatggacggaagaccgggccgggggggggaactggcagaaaaataacataacggcctaaatggaagcagggacagaagggcccctgggccaaaccagggggaacccccattccagggggcaggtcagggggccggaaccggtcagaatcgggggggaggttaagaaaacctccaaaccaaaaatc

SEQ ID NO: 180540 - DNA, 110 bp, Zea mays
  Clone ID: MRT4577_96232C.1
taacaagcaacgacacctgtgatatgacgaactacgcccctttcgctggtctagttcctccagctcttgtctctgtaacgccaaggctgaataatggattagcagcagca

SEQ ID NO: 180541 - DNA, 433 bp, Zea mays
  Clone ID: MRT4577_96233C.1
aggttcttagccattccccattgggaaccgtggaccgtttaccctgggcaccacgattaactcctgttggaagccaggattatttaaaaaacccggcggcctcttcctaaagtaaaaccgcttattttaccagttatggcccttgacaaacccaacccccacagatttgggaatttaaaatcgacccaaaattccacccattttacccttttccaccggattacattttttgcagcgccggcggcggcggcggcggtttaccttcttacacgttaagcccgtccaggcggcattgttggtttttaaccaactggttcttcggcctgatggcaatcgtccattccaccgacacctgcatttttggggaggagaacccaaccccaaggatcttggcgccaccgtccccggggatccgaacctcaacccggccgtt

SEQ ID NO: 180542 - DNA, 1011 bp, Zea mays
  unsure (1)..(1011): unsure at all n locations
  Clone ID: MRT4577_96234C.1
gtccaactccgccggtccgcccgccccttcacccgcaggccacacacatcccccttctccccccgcccgcgcaagggaaaggaaaaagggatcgacgactttgccggacgcggcggcgcatcccccatcccgtccgaccccccatcgccgcgtcgcaccgcatggctgaggacgacgcggcggcagcggcgggctcccccatcctggacctgccggagccgctgctgctccacatcctgggcttcctcaccgacgcgcggtcgcggcaccgcgccgcgctggcgtgccgccggctcctcgcggcggagcgggccacacgcgccgcgctctcgctgcgcggggacccacggtcgcacgcgtttctcttcctcaggccggcgttctgcttcccggcgctggagcggctcgacctctcgctggtgtccccgtggggccacccgttcctctcctccgcggcgccgtccgccgacgccgtcgcaccgtccgtgacggcggaggaggtcgcagagcagaacgccttcatcgcggcgcgcctcgcctactgcttccccgccgtgtcctcgctcgccgtctattgccgcgaccccaccacgctcgctagcctcaccccgcactggaggtccggcctccgcagtgtcaagctcgtgcgctggcaccagcgcccgcccggcctcgacgcaggcgcggatctcgagcctctcctcgaggactgccccgcgctcaggacgctcgacctctccgagttctactgctggacggaggacatcgagccggcgcttgcagcgcacccggcagccgccgcggcgctcaccgagctcgacctcggcctcgcgggcgccacggacgggttccacgccgccgagctggaggccatcgncggatcctgccccagtctccagaagctcgtggcgccctgtgtgttcaaccctcggtatattgacttcgtcagcgacgacgcgcttctcaccatcgncgncaggtgccccaagctggcgatcctgcggctccggg

SEQ ID NO: 180543 - DNA, 411 bp, Zea mays
  Clone ID: MRT4577_96235C.1
gattaaacggtgcggggatgcacgccagtccaactctgataccgacgggggcataccgcttttcaatatgccccaaccaagcacatgcccctacttgtacccaaatgaatgttggaccactagctgatttagacacgaacgcaccaccttcattattggggtgcgggttgctgctgaccaaacccgacaggatgcgaccaaccacaaacctgtggacatgtcccaccctacagacctacgaataatactactgtagccaccaggggaggtctaggaacctatcggacatcgcctcatcccttgccctgatactcgtgatacatgttctacagcacaggaaccggtttgcaaagagcgacaccttcctatgtgtcaaggaccttcctacgaacaggggaaacagtataattc

SEQ ID NO: 180544 - DNA, 1886 bp, Zea mays
  Clone ID: MRT4577_96236C.1
aaaggagattggctctgccctaagtgtgattttatgaattttgcaaaaaacactgtttgcttgcagtgtgatgctaagcgtcccaaaaggcaactcctccctggagagtgggaatgccctcggtgcaatttcttgaactataggcggaatatgtcatgtttccattgtgaacatgaccgtccttcagatgagtatgccaacagacaaatggaagcaaagcaatctgcactgcggaatagattagaaagacctccacgcaaatctgatatttctagtgcatggaactttgattttgaagataacgagtcagatggtgcagatgttgcggcgtttgaatatgctgattcatctaaggtgaggagggagagctcatcagcaggcagcatgtcgtatagaggtgtttccaagggctctgatgatgaggaatatagaatggctgaaacaatgactacaggacgggggaataagttctcagaaagagatagcttgccatcttcaagagatggttttaatgattttgatgatgaagatgatgacattgacagttatgaacttgacttgtcaaaaggtagtcacacaggtggagtgtcaaggatgagttattcggatcttgagagtgcttctgattcagaaggttttagtgaaattgataatagtagagagtccagatatggtaatagtaaagagtccagatatgataatggtagagagtccagaaatgataataatagagagtccaaatatgcagccaaggttgaggatgaatttgaggatcatcattccctgagatcgactcatcttgctgattcctggcaaaaaaccagaggtcggagtggttcgaatgactacagaagggcatcttttggatcagagagtgatgatgagatcaattcttatccggacgaggacattgacaaaggtcctagaaataatggaagccgtagtcagggaagtaccaacagagcttctgttaggcacaatgcacttgcctacagtgatgatgaaccattttctgatgatgtggattctggtatggctgatcggttcgggcctaggcagactaagtcttccacgaacatcaaggataacttccgtgacacaaggcgtaacttgaatggaagacgttctagtggggaccgttatggtagaacagaacggaatgagcgggaccgttatggtagaacagaacaacggaatgagcgggaccgctatggtagaacagaacggaatgagcggttcaacaattttgacatgcaccgtggcggttcagtcttggataagggccgtggggctaggggtaaccagttagatagtggttcaagaggtttacaaagaaacgcaagaagaaattgggatagaagtggtggctttgacggcaggcacaagggtgtttaaataataatagcaagagtggtatcttaagtaccaaatggcaaccagtgatatccttcatgtgaccttatccaatgccgagggtatttcaatccagctgagcatggctcttatgattccaccatgtgtccatgaccactcttccataatgctacttcaccctgcgacagaggctatggcgattcctctccatctgcacttccatttcaagcattgcacctctctgtctgcttgtttgttacatgtcattgcatcagtcagagcggtcgaacctgaagagctctggaactgggttcgttatttggttcactcatgccgcacaggtacaattttagactactagttagtctccatattgttttgcagagatgcatcaacaggattgtacctcgaattatgagagcaataaaactatacacttcaaacttaatgtgataccaaatgtaacgatgttgaagcgttttggtcgagttatagattctcgttgcaatatt

SEQ ID NO: 180545 - DNA, 391 bp, Zea mays
  Clone ID: MRT4577_96237C.1
ggcggctgcgccgtactcactcccgacacctgctagactcgctcttcgcccggcgcgttttacggtatttattgtccgtgaaacatacatataccgggcgcgcccggtttgggattgcccatcgctggggaggctctcctgaaagtcccgggcgcggtcctagtaaatggtgaggctggaggccgcgtccctcgctgttgttctcttacactacgaggcgctccttctgcatcccaagtactcaggcctcctacaccgtggcgataccatagatcgccgctgtacttttgacgacttctgcccgtcgacgcccccgaccatccaccatgtataacttaaactggcaggcgctatggctaacaatgtggaagcgcatgagctcatcagatac

SEQ ID NO: 180546 - DNA, 2894 bp, Zea mays
  Clone ID: MRT4577_96238C.1
cccccgctttccgtgcgcatggccgccgcgcgggcgcaaccaccaccgccgtggccggatgtctagaaagcccctcctccccacctgcgggtcctccacccctcccccgctcttcctcctccgccgcctcctccctcgccgccgcgcgacctcctctcccccgccgccctccacccggcggaggaccgccgccatgccaccccgcgccggcgactccgccgcggcggcggctgcggcggcatccttccgtctcgggatggtgcgggtggtctctttccttgtaggcgggctcaacctcgcggtgctgctgcttggactctacctcatcgacgccgtgctcccgtcggggtgcggcgggggggctcgctttcgcctcggcgcccgctctgtccggggtccgcgtgctctccatgatcggcgctgcgcgcgcgcagcacgccacggcggacgccatagctaagcgccacctccacgagagcgacgcatctgtcgcagctgatgccgtagctcgccacgagattagggtgaggtacaaacgctggttgtggtggaccagatttggtatggcagttggtgcattgcagttggttgcagcaatttatctcatgtttgtcattgtaagagatctctcaaatgaaagaagatccacttcctgcttctttgggaagtgttcgaccatggaatccgagaagctttgtgctgcctaggacgtgcaaaatatctaactgtattggaagaagatgaggtttattctgttgcaagactccttggtgatttggttgcatatcgtgcttctgggacaggacatttggagctcttagcagggcttgctctattgcagaagcacgggaatttatctgaattgcagactgaccttgtggaggcatcccatgagcttctacaagtagctgctttcctacgtggtttttcctaagcatgttatacgtgaccacttcttgattttggacgaaatcctatcctgtttccctgtgcatgggtttatagacaaggtgtgttaactccatgggcacgcagaagacgccctgcacttgatggtgataattggtggcgaggccatgctgcagctttccttagatttgttaatataccacctaaagcacttctgaaaggacgtgtttgccagagcaagcgtgaagctgcttattttgttgtggttctccatgacaaaagaactgttgtcattggggttcgtggaacagagacaccagaggatctcataactgatggattatgcagagaatgtgcttttactatggaagatttggatggactagtaaatgaacaattacctgcaactacaagagagagagttatttcaacatttccacactatggtcatggtggaattgtagagtctgccagggagcttttcatgcaactaaatggagaaaacacatcttctggaagacttggattcctttccacactgctgggggagggcagtgagtgtcatggatataaagttcgtcttgttgggcattctttaggaggcgctgttgctacagtcctaggaatgatgctatatggcaaatacccaagcgtgcatgtatatgcatatggaccacttccttgtgtggactttgtaatagcggaagcatgttcgcattttgtcacaaccattatttgcaatgatgaattttcctctcgcctttcaatcaattcgattcttaggctacgatctgctgcaataagtgctctttcagataactctccagctgatacagcaatgatacaaaagctcgctcgaagaattttgcatgtgaacaggtatcatgataatggtcctgacgatggcataatccagggctatgctgatcatacaagaacagcagatacaacagtaccgaatgaaagacaaatttctcatcagattccattatgcaatactgaactagacctccacaatacgcaaaatggcttttttaggtataatgggtccagtgcatcaatagatgagcatctgagctatgaaggcataagcagtggccatgatatgcaaataattccacttgatggggctgattctggttttgaagggcaccagacatcttacagagaaataccagtggagcctcctgagatgtttcttgcaggcttaattgttcacatagtgcggcaaagaagaagtctctttcctctttggaaatgctggagcatccaggaaactgaaccaccatacaaagctgttttagcgaaaagggagaacttcagggatatagtggttactccttacatgtttacagatcacttaccatggaggtgccactttgctatgcagaagattgttgaagctcaaacgcctatgagacgtgcgcattccgatccacccgtacaacaacatttggtctgaccaggacaaaactgctgctgcccatgtacagaattgcgtgaaggacagaaaattatgatgatcacatttagcagcatggtctattgcaggctggaccgctggaggtatatttcagtccttcaggcagccagaatatgtccgtgacagacccaaaatcgtgacgagcttattgacagtcagaggccaccgagacatgatcactggttactgtacaccaacagtatctaatcagtctactcaccctggcaacctgcgcgtcaattaattaattcatcgattgttctcttcaattaattaaattcatcgattgaatcattgttgtgcagctgcgtcgattccccattatttttttgttggtgcctagttatggtgtacataattcagcacagcaggattagccatagactgactggctggcaatggcaagtgacggtcaagatgtgattgtattgcttaccaagctggatactctgaatggaaagctgtgagtcaagtcggtaaaaaaaaaaaaaaatttgcggcc

SEQ ID NO: 180547 - DNA, 164 bp, Zea mays
  Clone ID: MRT4577_96239C.1
agcggccgggcgggcgggggcacgaacacagctcttgaaaggctcgggctaaaaactcctctgtctgttaacaaagcaaaggttggcctaccgccacctgaactgacaggagactagaagggcccctcggttcatgtggcaaccacacagccggggactcgctt

SEQ ID NO: 180548 - DNA, 573 bp, Zea mays
  Clone ID: MRT4577_9623C.1
cgagattaaaaaaagagaaagatagaaaaaaaacgatgaaaaaaaaaaaaaaaataaaaaacccccccctggggctggcgtcgaatttgggggtctttcccctgcccgcggggggcataaaaacggggggggtcgcgccaaaccaaaaaatggggaacggaggggacaaaaaagggggggggcacgagaaaaactgggacgggatggtgaaaaagagaaaaacgccgaaggtgttggacctttggcccccgtgttgcgggccgcgccggatgatttcaaaggggatggactaggtggccaattaatattccgggggggtcaaagagatgtatattgcaactcggaattaccaggggcaacgcgaatgtttagctaccgaatacgcataaaccccaccgtgttcatgtacaagggcggggagaagaacgagagagaaaacggcggcgtcccaaaaaaaaagggcaccacgctcatccactaggacatcgggggggcatgagaatgttttgccaagacacgcatacataaatagaggacgaggctcatatgtgtatttacaccaaaaaaccgccc

SEQ ID NO: 180549 - DNA, 412 bp, Zea mays
  unsure (1)..(412): unsure at all n locations
  Clone ID: MRT4577_96240C.1
atcacgcgtccgatcaggtaccgacgatgctcgtggcgatgaccgatgagaaaacggatcccatggtaaagccttcgtgggggggtacatatgaagatcgctcgacagatcgatagacatcagctgatacgagatgtactacgagctgcatctcgagctcgagctggtatgccatctggaaggccctgtggaagaccgttcacgatcaggctgtcaggtccgattaaacgaccgggaaatcgatggtgacgacctgtgggacgactcggggcatgacttagggagcatcatgaggcgcataacgatcgacttgccgcangacctgcagcacatgggccgtgaccgtctatgtgaccctgtagctacgactgtagcgaggatgctgtatgacaactattgtgacgactattat

SEQ ID NO: 180550 - DNA, 690 bp, Zea mays
  Clone ID: MRT4577_96241C.1
cggcctcaaccttcggcgctgctgctgggactctacattatggacgccgcgctgccgtccgagtgcggcggggggctcgatcatcgcctcggcgcccgttctggctggggcccgccgtgctctccatgatcggggccacgcgcgcgcagcacgccacggcggacgccatagctaagcgccacctgcaccagagcgacgcatctgtcgcagctgatgccgtagctcgccacgagattagggtgaggtacaaacgctggttgtggtggaccagatttggtatggcagttggtgcattgcagttggttgcagcaatttatctcatgtttgtcattgtaagagatctctcaaatgaaagaagatccacttcctgcttctttggacaggatgaagctgatcgggtctcagtacgagcacttattgctttatttcttatcctttcatgggttgtgatcattgtccaatgcttcacgggttctgatatattgaggtggcgatcattttatgcaacacatgatatggcatggaaagctcattacagggaagtgttcgaccatggaatccgagaagctttgtgctgcctaggacgtgcaaaatatctaactgtattggaagaagatgaggtttattctgttgcaagactccctggtgatttggttgcatatcgtgcttttgggacaggacatttggagc

SEQ ID NO: 180551 - DNA, 883 bp, Zea mays
  unsure (1)..(883): unsure at all n locations
  Clone ID: MRT4577_96242C.1
ggtacccccgggtccggccggggatcctcttcctccctctcctccggtcctcccgcgccgccacccccatctcccaccgcaaaaccttaggtccgacgagcccccgccgttgccgtgggcgccagaagcagccatggcttcgagttcgacgtgtgttcttaagaagaactaccgctgcgaccgctccctgcagcagttttacactggtgggccctttgcggtcgggcttgcccccggcggcgatggcgagggcggcgccgaggctgaggccttcctcgcatgcgcctgcggtggagaggtgcgcgtggtgtcctccgcggacgcctctgccataggggagcccgtcgacggcgactcggaggccatcaccgcgctggcgctgtcccccgactcacggctcctctttgccgcggggcacagcaggcttattagggcctgggacctcgcgtcccgagcttgcatacgcagctggaagggacatgatggtcctatcatggccatggcatgccatgtttctggtggtttgcttgcaactgccggagcagacaagaaggtctgcgtatgggatgtggatggngggattttgcacccatttccttagaggccatacagggggttgtgacatccgttatgttccacaaagatccaaagcgccttctgttgttttcaggaagtgaagatggcaccgtgcgagtgtggaaccttgaaactaaaaaatgtgttgctgtgcttaaagagcatttttcagcagntacttcattggcattgtctgatgatggacaaacattgctgagcgctgggagggataagatngttaccgcgtgggatattcgtaaatacagctcaaagaagaacataccgacatatgaaatgatagaagctg

SEQ ID NO: 180552 - DNA, 387 bp, Zea mays
  unsure (1)..(387): unsure at all n locations
  Clone ID: MRT4577_96243C.1
gggagtactgctaggtagctctgcaggcacgagtgttctatcggctctcgncgcctccggcgccgccttcctcttcgccgcggtccggccgtgcggcggtgtactcagatgtggtctactcttcctgcagtgttacatgtgcttgtagctgtctccagatactgaagcttctgatggtggttgttgttatggacgaaatgaatcataggtgtggggggggctcgagtttttacacagccagggtgcgaggacgacattctctagcctgcggaacgtgactgggatctgttgggcggcctgcaggctagttgtgtgcacatacaggcatagcatgctgatctggtgaggctgttgccaaccgtatcaaagttggaatcactgacaagc

SEQ ID NO: 180553 - DNA, 477 bp, Zea mays
  Clone ID: MRT4577_96244C.1
gggaaaaaaaaaaaaacccccccccgttggggccaggagtccccaaagttttgggttcaaaaaacaaaccagggccccagggaccattcttgaggggaaaaaagagggaaattcaccaaaaaacctaggggggggcaaacaaaaccccccccacagaaaaaccctcgtccttccaaacggggatgcatgtttaaacaccccccggggagtttaaaacctgtttttgaacgggagggccctgataatcccctggggggaaagggcacccagggcggcccccataaaggggcccccccaaaaaacccaaggggccctccccccataaccccggttgtaaaaaatgggggccccaaggtttttaactgggttaatccccgcccccgtgatggggatgggggcaagggggcccaaaaaccccgggaacccaattggaaggggggcaaggggggggccatgggagcccctgggggtcctttt

SEQ ID NO: 180554 - DNA, 582 bp, Zea mays
  Clone ID: MRT4577_96245C.1
ttttgaacaagcagggttttaaggatgcaccttacaatatgtccgtcctcggttcatgttcatcccgttcttcaaaggtccaatacagaggacgcagaatgtatgtactatagatgtaccgaactacattaactgaattaactacattaatttagttattaactaaattaactaaactaggcagacaatggggcccaattgcggacctttacaccgttgtccaccctacctctcaacaaacacattattctctctctctctctctcgtagctacaatgccaaacccgattaagacttgttgggtttgaggtggattcccctctgatccacctcaaatcgaacaagctcttaagattcctaagcagaaacattagcactgctcctgagccctgattgcctacgaggcacagcccaaaagcagcatcagaccaccagttcacccacaaccttctattctaagaccctctcggctggggacaattggccggcctgtgaccgaccacgccgcaacggaaacacctacttcgcggagacggcttagggcaggcgctgatccagggccccttctcgccgcacccgaag

SEQ ID NO: 180555 - DNA, 818 bp, Zea mays
  unsure (1)..(818): unsure at all n locations
  Clone ID: MRT4577_96246C.1
gtagatgtgtttcttgcatgttgcatctcccacaattggatattatcgcacggggcagattttttctcccacctgaggaagcatggacaacaaaccaaccttctagttcaacaagttcncatcaggagcaagtacaagaaaacagacaatgggttcagtggaggcagcaacttgcaaattggatgtgggaaactagagcagcttcccatgtacaagaaaccggccgggattagatcataaattgaaaagtggcatcattctttggatgaagatggatgatgtccaagaaattgaacaaaggtcccagtcacaaattttctggacacaagaaatgtctgcatgtgctttgaaatacttggcccagttggttgctgatggaattcgagtagacaaaggtttcaaaagctcgcactataatcaatgtgctaaagtggtgaaggaaagatttcaggttcaagtttctggttctcaagttaccaatcatcttaagacatggagaactcgctggtcagctaatcttcttataattgcagatgtttgacctttagagaatattctcctcagatccggaacagggtagtattatgtgcaccgtcataactgtggcaacagaaaacaatttgattatgattatccatgtgacattttctaaaaaaaaaaaaaaaaaagcggggttgattgaattttttttatttatatagattattattttgctgtgttggtttcaagtcatgtatgataaaaggcgtcatgtatcctgttggtggattgtagtggttctgttctaacgagcaaaggagcagagtagtattctgttt

SEQ ID NO: 180556 - DNA, 130 bp, Zea mays
  unsure (1)..(130): unsure at all n locations
  Clone ID: MRT4577_96247C.1
acccacacggtcttaaaaacataaccaattcctctatctttcatcgtcttccataatccaaaaacgcgccanacccgcaacaatgaccgctttttccgcaacaacaaaccannnccatctcaacccttcc

SEQ ID NO: 180557 - DNA, 417 bp, Zea mays
  Clone ID: MRT4577_96248C.1
gcctgcgtgtgccgggctgctatagagcggtcgacctacgcgttcggtgaaacgccgagaagggcaggatcatcatggttccagacactcttatgacggcaagggccgacggggaccgcctggtgaccctctaagacctatgactgggctgagggacacggcagcatcatgcaagcttgcccttgagagaccattacctgatttttcaatacatcagatgcatgataatgatgattaccacattgtattcaacagaggacgggctgctgcgggctttctgatcagtgctcagtgggctacaaagataaacgaatgttctactggggatgtgaaatcacgttatgctgcgttctccctaaggttgctaagttcttatggatgggctatcatgtgcaatgagaatggtggactcaatca

SEQ ID NO: 180558 - DNA, 161 bp, Zea mays
  Clone ID: MRT4577_96249C.1
actgactcaggagtcttgccgcctcctttccaaacatacgtgcggtgaatgctgtggcatattgcgattatagttacgcttttgcctcaagctcgaagctcgatactaagaaccctccacacgaggctacgaggacgaaggctcagatcattcagagctta

SEQ ID NO: 180559 - DNA, 856 bp, Zea mays
  unsure (1)..(856): unsure at all n locations
  Clone ID: MRT4577_9624C.1
ccggccgggcccgggtacctggaagggaaaactagatcacttttaatccctccagcacctctcacagcttgtggtgattggccattgttgagggtgatgcgtggtatttttgagggtggactagatgctactgggagggcagagcaggaggaagattatgatgatgctggtggtgactggggtgatgaagacctggaaattgttgatgcaagtaatgtgatagaaaatggagatgccggccatgccgatgaaagtgaaacaaatgaagaggatggggatgaggaaggtggctgggaccttgaagatctggaattgccgccggaggcagatacaccaaaagctagaggtccggaacgctctgctttgttcgtggctcccacaccaggcgtgcctgtcagtcaaatttggactcagaagtcatctcttgctggggagcatgctgcagctgggaattttgacacagcaatgcgtctgcttagccgccagttgggcatcaagaactttgctcctttgaaggctttgtttcttgatgcgcatatgggcagtcacacctttctgcgtgcgtttgcaagtgctccagtgatacctattgctgttgagaaaggctggagtgaatctgccagtcccaatgtgaggggcccacctgcacttgtgtttagctttgcgcaaatggacgacaagctgaaggctgcgtacaaagcaacaaccgagggcaagttcccagaggcactgaggcagttcctcaacatcctatacaccatcccgcttcctcgtcgtggactcacggagagaggtcgatgaggtgaaggagcttatcgagatcgntgagggagtacgtccttggcctcaggatgga

SEQ ID NO: 180560 - DNA, 693 bp, Zea mays
  unsure (1)..(693): unsure at all n locations
  Clone ID: MRT4577_96250C.1
ccggccgggaaagatgaaaaaaaaaagtgagttcaagaccacacgaggagtaagaaactaaagaggctcgtaagcgggccgacttcatatggcgaccttccccgtcctccgctcgtctcaagtggccgccgacgatccgccggcattcgaacgtgtggccgaccacgcatctgcggcgccaagaaaaaggtgcgactcctgtagagacgccagcagcaggtcactggccatcatcaggtgagagaagacttcgaagaaaggcgccgggccggacacatgaatagactccgtgcgcacatggtaggattcgcctacgctatcgccgtcgatgtggacaccgttaaggacttccttcagaacttgcgcgtgggatactccgtcagcctacactggttctgcacgagtctgtactcgtggacggacatcgccatcttcttactgctgcaggacggatcccgaggacagacccaagactgacgactgatgcaagccatgatctgacagcatgcgtataacgaacactccccactcgacatcagatgatgtgctgtacagcgtgcccaagatgataaacgaggacatatatcatcatgatgtgatgtgctgcacacacgatcactatcagtgagccgtaaggcgtcacaatgacgnagaacgacgtcacgtacatcagcttcaaggattgcactctta

SEQ ID NO: 180561 - DNA, 328 bp, Zea mays
  unsure (1)..(328): unsure at all n locations
  Clone ID: MRT4577_96251C.1
aaaacaagcatactcaataagggggccagggggatattttatacaactnaacccaacactttccctcttccctgtctccctacttgacattgcctacatcttaataattaaaaaacaaacatcgaaacaccatgtcttctcctattactttaatcacttatccaacttctcttcatccaagaaccatcccctataaaaataaagtaccaaactttcatacttgcaagccttttatgcctttgtttggcatttctaaaataaactttttttaatccaatcaaattacttaacaaggtataggccggcggagcctgaaaacacttcccat

SEQ ID NO: 180562 - DNA, 643 bp, Zea mays
  Clone ID: MRT4577_96252C.1
aatcttacctatcatgaattatgcgggtcttcttctaatcgaactcatccatgataagaataataataaccaaggcgatactcctaacctacctgcttgaagatggccgccaccacaaccgtgcctacccctgaggagagctatccgatggagctgcctgcctcctacccggacttctccaagagctgcctctactctgccgctaaatgggacgacagaggaggacctctatggacagctgaatgcgatccagcgccatatcggacgtcaccgagatccaatacgagtacgctaaagactaacagaagaacctcatatggaccatactcctccagtgcgcaggacgaggttaagcgaatgacagccgcaccgctcgtcatcagcctagtaatggagaagcccgatggcaacaacggcatacggggttctactactgccagacaactactatgtgcgaatcctcagcacaataaaacgtgatgtgctaaagccattaccattggtcgcagtacctccgcactccaaacgtgtagtagaagcactgtcggcctaaggcaactccactatcacgttactgggattacatgagaagacagaagtcacctaagacaaaaatgaaggatgttacatgctaaatgaagaa

SEQ ID NO: 180563 - DNA, 565 bp, Zea mays
  Clone ID: MRT4577_96253C.1
agggacctttttgattttttatttttttcttttgattacaaagagagaacgtccgattctccttatattgatgcttttcccatcgactagtctggatacatgccgcaacgtacctgaacttgagcaatggagtaaccaaactgggctatagctctattagcctttgcaattctatgattcgcttgctttttgcgtaggcgccccccactcccttagacagcgatatactaattccttacctagtttgaaagccatattatatacccggacgctattgggaagcctccaataaccatacgaatggcagtgctgcttccttgcgtagatcctatttcaatcaggacctttccgcgtcgatccttggttactacggaattgaccttactcctatactgagagacactctacatatggctcggcgttaaaaccataatgaacttaggggatggcacttgatgaatatttgtgaaccctcgagggccaacgatctttgacacagatttccagtacgactttatgaaccggggaaccaccctggctactagcgaattacaaaacactggat

SEQ ID NO: 180564 - DNA, 358 bp, Zea mays
  Clone ID: MRT4577_96254C.1
ggccgctttttttttttttttttcttttttttttttttttttttttttttttttttttttttttattgttttttttttttttttaacacaggaacaaggaccctttttttgggatataatacaaacagacgacagggagctcacacaaccttccctcaatctttttgacacaagacaaaggcctcccagcggggggacctatgtatatcagacataatgttccatgcactgctgaacttccacttgggggcatacaaaaaataacccgttgcagatatacatgaacacgacccgttcattaaaaataccgggttccaagtttacatggagaccaaccctaaccctggggggaaaggtg

SEQ ID NO: 180565 - DNA, 297 bp, Zea mays
  unsure (1)..(297): unsure at all n locations
  Clone ID: MRT4577_96255C.1
cgcccttttttttttttttttttttttttttttttttttttttttttttaannttttatttttaggggggggggttcaaacacgctcaaagagtgggttaactttccatcatttctttgtacatataacctttcaattccattaaagatgatttattttgaatgatcatataaattctattattaaacatccattctattcaaaaacttatttgagggctctttttttgtcctattatcaagtttcttcaaaaccaaatgaaattaacctattcctccctcaaaaatcttgtttttt

SEQ ID NO: 180566 - DNA, 328 bp, Zea mays
  Clone ID: MRT4577_96256C.1
atcaagctcatcaagtgctagttcgatctgctgccggatcactgagactctgtatcgcagtccagtgactatccacagcagcagcagcaggtcctcctcgacgactcagtaggcatggactgctaactggtaatcaacagctaacctgcgctctgccactagtgcctcgaagaaatcctgcaagtcaacgacttcaagagagcggggctgcatttcggcctcgagcactgcaagaacctgctccacagcatcaactcttaaagaaccggttaggccgacctgcacgctgccctagaccgcgctgaacacatacgtctgctgtacaaca

SEQ ID NO: 180567 - DNA, 412 bp, Zea mays
  Clone ID: MRT4577_96257C.1
ggaaccgcaaggtcaattatgggacttggctcgctagaacactggcctacaaacaagggctccatgcgcccaaaatccaatttccatggaactcctttacttaacaccccgggcacaacttatccccatggccaaaacatatagagcgcccaccggaaaggcttcacatttagcctagcccctttgtcaattgggccaaaggcgatgcacctgacttctgggagaaagatgccttccaaaagggccaaacccaaaaaaaaaaggggcgcccttgttgctgtaaacccccaacatatgaaacactggtttccctggctgcatacaaagctggacccctgggacgaccccggaattaccgaccggtgcctgaaggctgaccaaattctcctatacggaaaccgattaaagcctg

SEQ ID NO: 180568 - DNA, 122 bp, Zea mays
  unsure (1)..(122): unsure at all n locations
  Clone ID: MRT4577_96258C.1
ccggtnccggacattcccgcggtcggacccacgtcgtctcgcatccatctctcgcgcccctagctgaggggacggtacccagcggcaccagagggtggcgacnngtacgacngtatcgacga

SEQ ID NO: 180569 - DNA, 517 bp, Zea mays
  Clone ID: MRT4577_96259C.1
gtcctctcatccgccgtgcgtgaccgccgccgcgaatcgtccccaacgccgatctggctggaccctcgccgtattagccgtccccgacctcgccgtggccagtcatggccggatcctccccgcctaaccgtacccgagctcgccgtggctcgatctcgcccgacgaagtgaggcgacggtatgaaccgaccggcagagggaggaagggaggtacctgcggtggtggcggcggcgcccggcgaccatctggttctgattcggccgcgtccggctcctattcaatgtcaggtagatctgattcgatcgcgtccgacacggaatccgggtcagacagagggagcagcagatcgaaaaaaaccaggatgtctaagcggctccagggagaggagatacaggcaaactgcgtccgcaaaaggtcacgaccttctgatcagaagcacctctatctagtgttggatgactggaaagatgggcccagcattcaccagattgacgccgacgacgatgacgcggacct

SEQ ID NO: 180570 - DNA, 379 bp, Zea mays
  Clone ID: MRT4577_9625C.1
cgacccacgcggactccccgtcttcgcctcctcagatttaatttttacgccgccgcctcctctgacccgtgtttttgtgatatttcccgctgtagaagccgttaattatacatgctctttccataaggttccttccttgaactaaaggatactgtcatccatgtccagtaggtctgttgctgcacacccttggcatgatctgtagataggtcctgttgctccaaccatattcaactgcgtcattgatataccaatgtgcagcaaggttaaatatgaacttgacaagaaaactggactgatcaatgtggaccgtttgctgtattcttcatttgtttaccctcacaactatggattcattcctcgcactctttgttaatac

SEQ ID NO: 180571 - DNA, 445 bp, Zea mays
  Clone ID: MRT4577_96260C.1
ggccccaacatggttaccggaccacttaattaacacggaaacaagttacagcaatagaccccggggcccggcttttaacaaacctaaactttggtgaacaagcccaaaaggacaggggttgcgttacaagaaacccaaaaaaaaattggggggggaccctttccaaaaaatggggatacaaaatttttggggaaattggacaaaaacatgcctaaaatattccccacctttctaaaatggacccccttgggattcccttaaggcctcgaatccaaaggaagggaaaatttttttcgaggaccccttggaaaggccaaaagttttaaaaaactggcccgcaaaagccttaaggggggcaaggaaaacccttttgcccggaaaggaaaagagtacctttcaagccccaggaacccaagaaacaggcgagggggcttttaacccttgg

SEQ ID NO: 180572 - DNA, 672 bp, Zea mays
  Clone ID: MRT4577_96261C.1
cggccgctcgagccggcgggccgggctcctggaccctcgcctattagccgtccccgacctcgccgtggccagtcatggccggatcctccccgcctaaccgtacccgagctcgccgtggctcgatctcgcccgacgaagtgaggcgacggtatgaaccgaccggcagagggaggaagggaggtacctgcggtggtggcggcggcgcccggcgaccatctggttctgattcggccgcgtccggctcctattcaatgtcaggtagatctgattcgatcgcgtccgacacggaatccgggtcaggtacgcaatcttgcctccgaattcgactacaattgggctcaagccccaagcacaacaaaagatccagtctttaggcctctatatatactgcttgcagacagagggagcagcagatcgaaaaaaaccaggatgtctaagcggctccagggagaggagatacaggcaaactgcgcccgcaaaaggtcacgaccttctgatcagaagcacctctatctggtgctggatgactggaaagatgggttcagcattcacaagattgacgccgacgacgatgacgcggaccttggccagccaccggtcctccggttggtgttgccggcgcctggctttccaatgcgctttgcggtcgtgggcagcaacatcgtcatcgtc

SEQ ID NO: 180573 - DNA, 877 bp, Zea mays
  Clone ID: MRT4577_96262C.1
acactccatagggcgattgggttcctcgaggccggccggggctgcgaccaatacagtttcacagtcctgccccataccctcgtcgatcgttagcgagagcgcatcggttccctgcagccaatccaaacgcgcagtggtgatgtcgctccgccggtggaagtctttcttcccggcgttcgccgccatcgacaccgccatagagaccgccaccggggcccgctcccgggataagtttcggcaactgaggagcgagctggtggagatgctctgcgatgccgcggacgacgacgtcgatcgagtcaaggggctctgccggctgctcgactcggccatggctgaggcgcttttgacgctgcatgtggtcccggtgacgacgaccatgctgaccaccaccggcgtggacaaggccgtcgaaggcctgctgagccacgaggacgggaaggtgcgcgccctcgcgcgcgacatcttgatcaagtgggcgcaaggcggcgtgttggacaccacggtgttggccgctcctccgtccactccccggatgcgtccgcaggcgcagaggcctgagacagccattctactagctgatacccccaagatctcggacgagaagatgcctcctgtcgtttccaatgccggcggcgatcgcgtcaggagcgggcagacaggagatgcgaaacgcaagcacccaggctactaccgagaagctgatgctgatgacgagaagcggcagcgcaaggtccctgagaaggtcgaggacaggccaaggaagatggagccggacatcaagagtaggagcatctggagatccagggacaccagagcaggagcccggcgagaagctggagatcagggacacgagacacgagccgggcgagcagct

SEQ ID NO: 180574 - DNA, 600 bp, Zea mays
  Clone ID: MRT4577_96263C.1
gggaccctcgaggccggccgggctcccattcccgtttcgtcgtctcatttcagcagctactagaagtagtagctggctcgctcctgctgccggtttcttgccgtcttcttcttcaccgacgacggtcgcgcgttcctacaccaggtggtccggagacgtttgagatcgtccttcagcgcttatcatatacatcaagcagatcaacaagggcttagttcacaagacaagagaggatgggtttcttctctctatttctggtggcgtctatgccgatcatccaggtcctgctcataggtgtcattggagcttacctggcctctggtttcagcaacgttctgacgacgagtgctcgaagggatatgaacaaggttgtttttactgtgttcaccccatcattgatgttcgccagcctcgcgaagacggtcacccttgcagacgtcatttcttggtggtttatgccagttaacatagcgatcacgttcatgatcggtggcactctgggctggatagcttgccacatcttgaagccaccgcagcactttaggggcttgatcatggccttctgctcagaaggaaaccctcggaaatctgctcctgatc

SEQ ID NO: 180575 - DNA, 948 bp, Zea mays
  unsure (1)..(948): unsure at all n locations
  Clone ID: MRT4577_96264C.1
ggcccgctcgaggccnggccgtttctcgggaagaagaaaatggacaagaattcatttagaacgcacaccttccatcacaaatgccacacttagtagttacaattacaaccgtgccgactaaaaagaagacaaagaacgacacatctaagggcatgcacaaccctgagactctggccataccatggaggcagtcaagaaggagatttctctagcccctgccttaggccaaagtcgacgctcatcccctgccacgattagggtttgagaaacactaggagtcataacgtcaaaaaaaaaaaaaacaacagttctggtggatccaagtgctcaatatgatctgagagttgatcccacattggatcataccactgattgaatattggtttcctctttcaactgcatagtagtgttattatccaagtaacgattcttctaacttttgcctattgacaggtccttcggtacaaggtggatgctgtgccaccggttgttgagccggccttgtcagccacggaactctgaagaggtctgtcttaatataatgatgtaacgagggccgatgcatgcccgagtatagctgtacaaatgtttctgaaggccccacacggtgctgttactgattattccatcgaatgctttgcggtgttctgatcgcagcattccctgatagctcgctgtcagagcgcatggataagtaatatatatgcacatggctgcggccacttgccaccgacgaatgcctgaatataacagaaatgtattatatcgaccaataagagcatgtctgattggaagctgtcgtggtttgtttttatttttttttctcgaatacggagagctgtgtgtcattgcaccaagaggaagagttgtggtcttgtggacgtgctccctggaaagagcatcccctttggctaccaattgttgaattgcatcacggggttagatccc

SEQ ID NO: 180576 - DNA, 419 bp, Zea mays
  Clone ID: MRT4577_96265C.1
tttttttttttttttttttttttttttttttttttttttttttttttttttttttttttttttttttttttaattttttttttaattttattttaatttaaaaattaaaatataaaaaaatataattaaaaaaaaaaaaaaaaaaaaagaaagggaaatatattaaaaaaaaaaaaaaaaaaaaagacgcagaaagctgaacacggcccctcaatagggaggggggggaggaattttgatgacggggtaggcatttttaaccagcaaacgtttcttaaagcaggctatttgataatacagattaaaatttctgaagggagggttgacaaaaagaatgaaacactggaaccacacccgaaccatccttggaaataaggaaactttttagagaaagaattaataatggggataactgtttt

SEQ ID NO: 180577 - DNA, 2276 bp, Zea mays
  Clone ID: MRT4577_96266C.1
caacagagagccgacggcgagcacagccagcacaaggacttggacaggtaacacgagggcgaccggtgcccgtagccgacagctgaccgctgcgttggcgccagccgccaggccgggtggatgcggtgcaggatccatctcttcagccttctcccgcttccgctcggctgcgctcgcatcgcctctgccttgttgctgcctctgccgttgagttgaagcccgcctgcggcccgcctggtgtatatatatataagataaagggtaccgcggccgggattctccctgcaccgtttcgtcgtctcatttcagcagctactagaagtagtagctggctcgctcctgctgccggtttcttgccgtcttcttcttcaccgacgacggtcgcgcgttcctacaccaggtggtccgaattgttttactagggtgcaacggattcgtatccaggagacgtttgagatcgtccttcagcgcttatcatatacatacatcaagcagatcaacaggggcttaattcacaagacaagagaggatgggtttcttctctctatttctggtggcgtctatgccgatcatccaggtcctgctcataggtgtcattggagcttacctggcctctggtttcagcaacgttctgacgacgagtgctcgaagggatatgaacaaggttgtttttactgtgttcaccccatctttgatgttcgccagcctcgcgaagacggtcacccttgcagacgtcatttcttggtggtttatgccagttaatatagcgatcacgttcatgatcggtggcactctgggctggatagcttgcaacatcttgaagccaccgcagcacttcaggggcttgatcatggccttctgctcagcaggaaacctcggaaacctgctactgatcattgtcccggctgtatgcgacgaagacgggaacccgtttggggatgattcaagcacttgccgctcacgcagtctctcctactcgtccttgtccatggctctgggtggcctcttcatatggacgcacacgtacagcctgatgcagaagtccggcaagctgtaccacaagatgcagtccaaaagcatccagtgcccagccgacagcgacgaggagcatgagcaagcgaaagaagatgggccagctggctgcgctgacgaggaggcacctcttccgacgtcagtcaagcctcgcgagcacgagcacgtgggaagaagaagaacaccaaatggaggcccctctcttgtcctgcgagagcgaggtcgctgacaaggggttctggacgaagctgaaagacgctatccaccagttcatcaaggagctgatggcaccgcccaccatatccgcgataattgggttcgttgttggcctggtcccatggctgaaatccctaatcgtcggcgacggagctcctttcaaagttatacaggatgccctccagctgatgggcgacggcacgatcccttgcatcacccttatcctaggcggaaacctgactcaagggcttcggaagtcggggctgaagcgtgcggtgatcgtcgcggtcctgtgcgtccgcttcgtgctcctcccgctgatcggcatcgccgtcgtccgcgccgcgtacgggctcggcttcctgtcccgcgacccgctgtaccgctacgtgctgatggtgcagttcgccgtgcctcccgcgatgaacatcggaacgatggctcagctgttcgacgttggacaagaggaatgctctgtcatctttctctggacgtacctcgttgccgcggttgcgctgacggcgtggtcgacggtcttcatgtccgttctgtcttgattgaagtctgtcaccggaaccaatgcacagccgcattttccgagcctattgttgctcaaggcattcagcttagcaacaggaaaggaggggatggtgatgggtctcatgtctcaatgagcagaagcaaaagctaaaggtgacatacaacaatatatatacacataggcagtagtagactatgatcatataggtaattgtttattattttattgtgttgggctgatgggtgatggctgacctattcgtcggcaattattggcatagttcaaacagttcatggaactagagggttccattttgttccatgtatacggatgaagaaacaaggaatcatccctacagaaaaacagaagaagggtctattattcaaaaatgagcgctatttcgatcagaatcagaaacagtggcgatccaagcacatgcaccccctggacgggacgaccgcgcgttctgaaaccgatctgaactctg

SEQ ID NO: 180578 - DNA, 124 bp, Zea mays
  Clone ID: MRT4577_96267C.1
gggggcgggaaaaatagtagtcattacaatccaaatgtttatagctgtctcacaaagcgagcatgttgcttttggccaaacttttcgttccttagccggcaataccttttaaacaatttataat

SEQ ID NO: 180579 - DNA, 159 bp, Zea mays
  Clone ID: MRT4577_96268C.1
acccttccgggacgcctgggccccaaaccacatgaagaagccagcgcggcaccgaggtgtttctagcgataggatatgggcctgtccatttctacaggtgcgcgcggtgtggggcgcccctgtaactgtgtggggggcacacgtgccccgggggctttt

SEQ ID NO: 180580 - DNA, 636 bp, Zea mays
  unsure (1)..(636): unsure at all n locations
  Clone ID: MRT4577_96269C.1
ggtaccgcggccctccttctcggtttttttttttttttttttttttttttttttttttttttttttttttttttttttttttttttttttttaaccccccccccataagctaaactttttaccatcagaaaaaaaaattcccccccctaaccctggggaaaaaagggtattggtttcgcccaaacaaatttgggcccctttttcccccccccgttaatccccggaaaaaaaaaccaaaacgggcgggaccgtttttccgggacgaggggggagggcccttggaaacaaaacaaaacaggcccgatttttcaactttttttttgttttcgcccccccaggaggaaccgggcctttaatcttcgataaacccctcccccaggagttttttcccccccccccaaaaggaggttccgttgaccccccccagccccaaacggggaaaatatcccttggaacatgttttttgggtaaaaggccatttttgggcccccaaaaaaaaaatctttttcccggccccagggtttccaggggggggtcccccccccattccttttttgggggggggtttggctttttttcccccttttaacttncggggggctttggaaaagcaacattgatggttggggggggggg

SEQ ID NO: 180581 - DNA, 771 bp, Zea mays
  unsure (1)..(771): unsure at all n locations
  Clone ID: MRT4577_9626C.1
caggtaccggtccggaattcccgggtcgacccacgcgtccgggaggcggcgggcgggcccatggcgagctctgcggggctggcactgtgcgcccagacgctggtggtgcgaggaggcagccggttcctagccttctccactacgggcagtgatgatgactgtgtcttcacatacgactgcagtactgcagagaagaaggccacgccagaagataaaggggaggacggacagcccgcagacacagggagtgactcgattctggcgtccaccttctccaagtctggccgctattttgctttaacagatgacagtaagcgtctgattcttttccgtacaaaaccatggcaatgtctgagtgtcaggatggtggtgcggaggtgcaccgccctgaccttcacagcctcagaggaccgagtcttggtggctgacaagtctggagacgtctactccttttcggtgctggagccagatggatgtggcaggctggagcttgggcacctctccatgctgctagacgtggctgtgagtcctgatgaccagtttgtgcttactgcagaccgggatgagaagatccgggtcagctgggctgctgccccgcatagcatcgagtctttctgcctgngacacactgagtttgtgagccgcatccttgtagtgcccagtcatcctgaactgctgctttcttctctggngatggcaccctgagactctgggagtacagaaagcgtaggcagctgccaaggctgtgacctgnccggcctacaggagccc

SEQ ID NO: 180582 - DNA, 399 bp, Zea mays
  unsure (1)..(399): unsure at all n locations
  Clone ID: MRT4577_96270C.1
cgggccggaattcccgggggggcggacgcgtccgggttaaactactaatttatggacatcattgaagagttaacactgaggttnttatttagggggaactcaggcaccctgatggtacaaacgtatctttcataaaacggttctccttttcttccattggagaactactaaaatgcacagggatctaccggggtccatctggcaagacaccagcgtacaacacaaggaccaggtcagatagaccaccatcattacaatagggcacaagatcatgggaggtattacaaccacatgggggtcctccttgataacgggatggtgctcgaccatgacgggacacacaagttgctagagggacaaggtctggtctccaaactcggagctggatacaccaagggg

SEQ ID NO: 180583 - DNA, 469 bp, Zea mays
  Clone ID: MRT4577_96271C.1
aataggaacaacaggagtcttatgtgcattggaaccaacatggatgcaatggacactttcgcacccacacacgttgcaaagacactcacctggaggcacctgccggtcgggggtgcgatcgatgctgctgagtgtgatcttaacaacgacgaccaatggatctagacggggatctggcctagggcgcccgtgttcttggagccccaacgcgatgccccacccccatgatgtggccgacggcgccgatatggcagttggtcacgtagggtgaaccctgaggggtcacccatctgcaggccggagttgcgcgccttcagtttgaaccccaaacgtcccttgcggttcatccactgggccagcccgaaccgccccacgaacagcattgatgtggtctgagacaccatgatcaagttggttggacagccggagtactcggactggatgtcctgggatgaacagctcttgctgt

SEQ ID NO: 180584 - DNA, 830 bp, Zea mays
  unsure (1)..(830): unsure at all n locations
  Clone ID: MRT4577_96272C.1
gggtacctcgaggccggccaggacttccgtccccgccgccacgctagagaggagaggaagagcgcgcggagagtgagagcccgggagaagcagcggcttggggcaagatggtgcggtggctcacctaccggaagcggcacagctacgccaccaaatcgaaccagacccgcgtcgtcaagacacctgttgattaggtgggaaacttgtgttccagtacaccaagaagcgcgcgagcggaccgaagtgcccagtcaccgggaagaagatccaaggagtatgtgccgcccatctttctattttatcctctcgttattgtgttaggtcgttgcatcatgctccatgcagagatttcaactttaatgctgcttgatcagcctaggctaagagtttctgatggaacatgtatttaaaccgcggcattagtattttgtgtagcttatgactcattcttgtgaagtgtcattgcaaactggggatttaagtgcacctattattgtcgaatcatgttgcgggctcttggttggaacagtttattatccttagatttaaaagaatgctataggcccttggcaaactgtatttgtagctaatccctaacctttatgtgtttgctggagctggttaatttgcatttcaatctatctgtggtacgggtacttattattcatcccagggcagtgtacacatctgagcacaatggtgttgtgttgtcaaattttgcttggtgctataggtcggcatcaagttgtcctttctccagnctgcccttcccttttttgnttttgagtttgttggccacaattatatagttacattgacaacatatgtct

SEQ ID NO: 180585 - DNA, 511 bp, Zea mays
  Clone ID: MRT4577_96273C.1
ataatctacaaccgtttacttagtatgccaacaggtattacagcaaacatgggatacctgcggccgttgcgagtgccatctatacattcatgggcgctacacgcgccggattttatgtgccgtcaaacacgacgccacaataacggatcaggaataagcataacgaccacctgcacctgtcgatgcattcgagtcccgataatttacaagagctactataaggggccaaataaagcctgatggtaggccatgtaacttgtgctatgacttgagaggcgtccacaatgactctcgacacacccacatcacgatgaactaagatcttattgacaaaactattggccaagagcggtgaatgcttagcattaaaaagtgacaccctggcttcaaatatacggaggcctaccctggacacatgaaaacatactcctttgtcagccattacctgtgaccgaataaacaggtcttacagacttcggagcaaacatctgtgatggactgacaaactgaa

SEQ ID NO: 180586 - DNA, 111 bp, Zea mays
  Clone ID: MRT4577_96274C.1
ctagctcaccatggaccggctgctaacgttgtgggacctagatgcagatacgggctagtgcagtgagctgcggacatgcgtccgggaccggtgcggacttagcacatgcgg

SEQ ID NO: 180587 - DNA, 448 bp, Zea mays
  Clone ID: MRT4577_96275C.1
caacatttttacagttcagatgttaatctcattcacattatattttatgtgcaacttggtggtactcctgaataaactaaaaggaatagtttttaaaatgttaactcacgttgtgaagtgcctgaaggtatgatgccaaaatgaacaacacatattatgttactttaggcatttcccactgtgattcatatgcacagccaaagcatactagtttgaccaaggcatgcaatattattactcatagcatatgcatatccttagacattcatgtattttaaacctcttcgtacatttgttgctatggcagaatgaggctgcgctggagtccacaacagatgctggaaagcaggcatctatcaaagaagcagacaagcactgcaaggcgatctttggaaagctgacccgtggcgccacctgcctgaagagcaaccctggggtcatcgcgctc

SEQ ID NO: 180588 - DNA, 382 bp, Zea mays
  Clone ID: MRT4577_96276C.1
gtcacggaggcgctccccgggaactccacgcagcagaacacggtgtggcaggcgggcccgctcagcgctgtccagatagcgtcgcacccgatcgccgggccaaacgtgcagagcaccatggtgctggacttcctgtctggcggcaaaagcacagcgctacccaacttcgtgcaccgtcgtagcttgaggagtttccggggatgaaaggctatcccatgcaacatcgtctagttcatgtctcgagcacagagcagagacatagtgacgtgtctaaaacatatattttactttatttattgtaccaattaaacatttaatgaacttaattgatcaaataagttaatggtctgaatgatccttagtttgaatccatgttttgagt

SEQ ID NO: 180589 - DNA, 482 bp, Zea mays
  Clone ID: MRT4577_96277C.1
aggaaagccctaccacgccccttttttggttattaaaccatgttaccttcgtttacccagtctgaagaattacccccgaggggtcatcgaccccaaattccggttccttttaagaaagaacctctttggttagtcatgggccccctggggcgttggaaattggaccccagattttgggaaccagggcccggattcttcggaaaaatggaaaaaaaaaaaagggtttttttttactggcctccgcttcttttattttccggtttcctattggttggccagaccccccttttttccaaatcgcttacttggtaacctgccccaaagtaatgaataccccgtccagtttttattccggttccggttaaaggctttggcttggctttatttctttgattggtttaacctaatctggaaccccaaaaactggaaaaccttgcaacatgggctttggcccacacttcattaccttggaaggatttttt

SEQ ID NO: 180590 - DNA, 338 bp, Zea mays
  Clone ID: MRT4577_96278C.1
aggcctacggacggacctcatgggcatagtactcctgtgaagggctctatggtccaacttgactgatgccaaggtaggtcagcgcacggagcctgcctacattgcttcagtaacattctggccgctgcttgtctccctagctttcatcaccttgccgaaaaagtgcgggaatccgttgcgagcctgaatggatcatactaatatcatgtcattacaataacatcaagcaacattctttgagctacgaaggccatttttccacgggtcgtcacagcttcctgtgtacagtatcattcaccgatcatcagcaaacatttggggcgcctggataaactgat

SEQ ID NO: 180591 - DNA, 330 bp, Zea mays
  Clone ID: MRT4577_96279C.1
aatgacacagcgcaccacggcttacattcaagcttgtgacatatcggtacattgcattgataagcgatgctcaggggctataatgcttgtaccggatcatctgcatcgacgtctaaagctctagacaattacatatctatacacgcgaacagaacacctgatgtctccaacttcactgagtgatctggtacggccaaaaccaccatcggaaggaagttgagaatttcccgggcgaatggatgagtatgacccaaaaaccggagcggctagcatcttacgctttataggaagaccagatacgggtataacatttgagacgggctagtgaac

SEQ ID NO: 180592 - DNA, 662 bp, Zea mays
  Clone ID: MRT4577_9627C.1
agcagtggtaacaacgcagagtactttttttttttttttttttttttttttttttttgtgaattagaggtattttgactgaatagttaagaaaactatacgaagtagtctgaccggacacagccgcacataatatgaacatgctacactgaaacactgacgcggaccacaataaaaaaccctgaaactttagcactactgccctttttctcttttcagctactgaccgctactgttaatggaatggaaatgcacgcacggcatctaatttgggtggccggcggtggacgggctggacccccttgtctgctggtgtgctgcgagcggcgacgcgccggggtggtggtcgaccgaggaagagttggcctcggccatgtcgagctcgacctccttgtgccggagcatgagcagcaagcgtcggctctggatccggaggcggtcattctgcaggcgcgcgcgttccatgtcgcgctctttgttggcgcggaaccgatcccatttcagccgctgccgctccaggtcgtacgcgtgggattcgaggaggatctgctgctcctccacctccaccgcgcggcgtcgcacccagcacctcgtgcgctgcgggtccatcgccgcggcagccgcggccgcgagctcgctcttcaactgctgcagcattgccga

SEQ ID NO: 180593 - DNA, 279 bp, Zea mays
  Clone ID: MRT4577_96280C.1
cgttcccgtccacggtctcgtcgagcgtcagccctgtctccggcgggttctcttcggtgtccggactctccggcgggaggtgaataattagacggtcgctgtcggagtagacttttgcggttttgcccgacttgcgttgttgacaatatatagtggtactgtaacaccgagtggtaaatttctcgccgtactgattttgtacaattgtactggtaagtaaaatactctccgagtgtgactgtgatctgtgacatgcgatcaatgattcgacgtcacgag

SEQ ID NO: 180594 - DNA, 263 bp, Zea mays
  Clone ID: MRT4577_96281C.1
tttttatttaacaaaccatcccaaattcgtgaggggatggtgcaaaagttgtggctgaaatgccaacaatggtgctcaagccgtgaatgctgagcatgactcaggcgacgtccaaattttgttcgggtagatgcaagatttaccgctccatgacaggcttgttgtaaaccatcctactgcgtggagatcacagcgtcgatcaggtcatctacaacgctactgagagcaaactcggtgtggtgccactagtccagcactttcac

SEQ ID NO: 180595 - DNA, 739 bp, Zea mays
  Clone ID: MRT4577_96282C.1
tgcctatgctagtgcctgccgtccaccatctccgaaacctcacaagaactgtcatgggtcttttaagtggatgccagttggttggtcccttccttcagcatgctagctctagccttcgtaatggacttcgtcggaatgcgaatgaataaaccactatacacgatgagctacactctggctactgctggcgctgcgggtcttctcttcgctggaatctatgctcttgtggatctgtacgggttcagaagacctaccatcgccatggagtggatggggaagcacgccctgatgatatacgtgctggtggcgtgcaacatccttcccatgttcatccgtggcttctattggagggaccccaacaacagccttctgaaagtcattggtatcggggcgtgaagccatgaccttctacatgttcaggcccaaacttggacatgcacagcgctctcgcatgtttaagagcaataatctaggtgctcaggccaagttttgctatgcggttagaggaccatagcgcgctcaggtcatgcgccatggggctgcctatattctcagcactgccgagatgcctgttgccacttgcagatgcatggaatccattctcccagccaactttgtatatggtggagttgagcacatgtacatgatatcacacgagtaatatgttgtgattcagatgaaatatatactagtacatatcagtccatattctataataatactacctccggtcttgaat

SEQ ID NO: 180596 - DNA, 285 bp, Zea mays
  unsure (1)..(285): unsure at all n locations
  Clone ID: MRT4577_96283C.1
cacgcgttctctcgtctcaccctccctccctcacacaatatttaatttttaggtcccgcccttttcctccgacatccactttttttaggggagggggggtgcacccacccnccnacaataatatcctcatttccctctccttctacaactaccnccnccaaaatcctatgcctatgcttcgtcctctcctgtgccacggctgactaccccaacctccccgactacttcatccagttccacgtgtactgctacaccttccgcgcctggttcgtgaccaacgtcacc

SEQ ID NO: 180597 - DNA, 158 bp, Zea mays
  Clone ID: MRT4577_96284C.1
ccggacggcttacgcatcgttgtctccgtggacggcaaggggaagtccttcgtacgcgcagtcgtatggtgacctggcagcgcagttagtgagtttgatggggactcaaagagggttctgagctgtgacttcaagccaaaacgtctatttcgcattgt

SEQ ID NO: 180598 - DNA, 347 bp, Zea mays
  Clone ID: MRT4577_96285C.1
tttcttaagcagtggtaacaacgcagagtactttttttttttttttttttttttttttctttttttttttttttttttttttttttttttttttttttttaacacaggggcgatccgttaatccatgctttgatcgataaggcaaccccaacgacagggaattcgcccattacacactgggggctgtagggaggttatttttttttccaacggttgtccagagggcaatacctccgtaaacagcaagaggggtttgttttaaaggggggaagcaaacaagagtccaccccactcttcagtatttaataagggggttcctcaaatttttcttttaaaagccaagcggg

SEQ ID NO: 180599 - DNA, 183 bp, Zea mays
  Clone ID: MRT4577_96286C.1
gtatccctaaaagagggagaagccgccgccgtagtcaatcacagcagcccgcgagaaagaccaggccgcgacaagatgcagatcttcgtcgaacacgctcgacagaggaagaccaatcaccctgcgaggtcgaacagcaggcgacgccatgcgacaatgtacaaggcacaagatcccaggaca

SEQ ID NO: 180600 - DNA, 486 bp, Zea mays
  Clone ID: MRT4577_96287C.1
gtaatgttatgccagcagcagatcttaatttgccccgttaaaaaaaaaaaaaaaaaaaaaaaaaaaaaaaaaaaaaaaaaaaaaaaaaaaaaaaaaaaaaaaaaaaaaaaaaaaaaaaaaaaaaaaaaaaaaaaaaaaaggggggggccgttttaaagaatcaaagtttacgtacgctggtttggaaagcaaaaatttttttttagggccacctaattaaaattaattggccggggtttaaaaacgtggaaactggaaaaaccttggggttaccaaattaaatagctttgaaaaaaatccccttttcgcaagtggggtaaaaaaaaaaaaggcccgcaccaatcgcctttccaaaaatttgcccaccctaattggaaaatggaaccccccttttacgggccatttaagcccggggggtgtggggtttaccccaagaggaacagttaaatttgcaagccccttagcccccgttcttttttttttttt

SEQ ID NO: 180601 - DNA, 306 bp, Zea mays
  Clone ID: MRT4577_96288C.1
cggaccttcagttcgttggacgcacatgacttatagttttaaatactaggacacccgtttgggagtggtggagtgtgcagggttttgggtgcggaaccaggctaaccgggcacacaggctccggaccaccctatggaacgggcattcgtttcttagaaccggcccttaggccttcccctattttatttgaaatagatattatttattaagcagtatttaacacttgtaaacctggttacttaatgagcgtatttcttgtcgataaaattgttttctccttaaaatagtttttttatttatattttt

SEQ ID NO: 180602 - DNA, 367 bp, Zea mays
  Clone ID: MRT4577_9628C.1
cccacgcgtgcgcggccgctcgggagggggacttttaacgcagaacacgcgacctccaaggcaggcggaaacatatgcgcaatgctatacccgttcaggaccatcggaaggccgatcttctagtgcagtgaggccgcatcgacagctgtacggagggcggggaaaaacccgctagaggagttctcatcggtcgagcggagaaccacggagggcaagcctacatgacactacagacgcagaaggaacgcttctgaactgccgaataaaatctagggatgacagctagaaatcgcggccatgtggtactaaaggaaaggaacaggcgtttgacacagaggcgattgcgttcttgaaagagcatgaggcc

SEQ ID NO: 180603 - DNA, 609 bp, Zea mays
  Clone ID: MRT4577_96290C.1
agctagtgttgtagagcttgaaactgttgttgctgctttgtgaggcggttcatgatggaccagttggtcttttacgaatcaagagcagcagccgctgacccccacagggacatgagactggacatcgacaacatgagctacgaggacctgttggctttgggagaatctatgggcaatgtcaacacaggcttggccgatgagaaaatttcgaagtgcgtgaaagaagtggtctgctgcagttccgaccagacgcaaaccgatcaagatgaccaggatgacggaagctgcgtcatctgcctggagggttacagagacaaggatatgctggggatactgaaatgcaggcacgacttccacgccggctgcatcaagaagtggctgcagacgaagaactcgtgcccggtgtgcaaagccgccgccgcctaggacgacaccagaggagcgagcaactattttgtgctcctcctcgatctattcatttttttaggctcaggtcgaattatatatgtcgttccattcttttgattccagccagtcgtgtaaataaatgccgtgtgttggttattttagttatcacttgggttacattagcccaaattctcctgttgc

SEQ ID NO: 180604 - DNA, 239 bp, Zea mays
  Clone ID: MRT4577_96291C.1
gatttctgtgtttttttatttgctggagccctaccctcaaggctcatagtagcatcatacgcaacagctcttgacctcatagtgcatttgcgccctcatacacacgtgatgcctaagcattggttctttgatggcactgtcacatggttacaaaatagactgttggactatctgcattttcatgtctttgacttcctggaaacaactttcttatatagtttaaatactgtaaatgaaga

SEQ ID NO: 180605 - DNA, 311 bp, Zea mays
  unsure (1)..(311): unsure at all n locations
  Clone ID: MRT4577_96292C.1
gccgggtccggggcgtcgtcgtcgggccacgtcaggggggcgtgcgccgtgtgcggcgacaacgcggccgacgtgctgctgctgccgtgccgccacctctgcgcgtgcgccccgtgctgcggcccgcggctgagggggcgtgcccgagcgtgcgtgatgctgccggggaatggcanggggtgcntcaacttttcgtgatggtcctgaaaccgatagaattactggatagactagaattttttttggagacggatgcatcttttgcacttgccttnccccctccccccctccaaaaaccctcgagcgagaag

SEQ ID NO: 180606 - DNA, 1814 bp, Zea mays
  Clone ID: MRT4577_96293C.1
cattgggacctcgagccggccgggacaaccagagaaactaccagcttaagtttccagcaccagagcaaactaagtttccagcaccatagcaacgatgacatccaacttcacgcccaatgtctgggcttggatcgccagcctgcccccattcacccagtggcgcaccagcaccatgtccctttgcatctgcgccacgccatcagcatcatcttcatccagccacagccacagccatcgataaacctctcggttacgaaaactacttccatcgcacagcctccttatgttatcttctccgtcttcgcaaactacagcatgccagtttcgctgtggaagtcacagccagtccacctgaaaacaaaggcgcagcaaactctagacgaacaggacatcatacatatcttcgtcaacatcgtcgactccgtgctgaagtactgtccagacaagaactcgtcgttccggttccctggggcacagcagcctcgtggcaacttcagtgacgtgttcaacatagctttcttgtccctggccttcctgctgtgcatcttcgaggtccctcgcgacctccgtccaggatgcctgggctcgctaggagcccagctcaccggttccaggtgcagagatgccgcaaagagcctcgtgaggatgctcggtgccaacctcgaggaccagtggatgcagacgatgaacctcgcagtaaccaactggatagtcgagctgagatcctcgagccgctcgtccggcccgccgtcgccgctcttctcatacgccgtctcagcaagcgggctctggaaggtgcagctgtactgcccggtcatagccatgggtatggaggaagctgcagagacaccacaggatgagcgtctcctcttctcactcatttatcaacaagtcgagtgtgtcattcagctggcctatagaacgacaagaagggataactggatcgatgtcgaggtgaaggtggacaacgtaaggtgtgatgtggactctttggtctccgagacccttatggcggagcgtggatatggctccgaagagaagcacttcccatctcgtgtgatgctgcaaatcacacctacgcaacaatctgatgtgctctctgtttctgtcggcaagtccaacgacaaccccacacacgaattcggcatcgagaagggctttgagggttcatttgaacccccaaacgcatttggcctgaaggcgtcagtaactgaaagccttacactagccatgaagccctggaaattcgagcagtctgtgcatgggaacactgcaaccttgaactggtttcttcatgacggcgtcaacgggagggaggtttattcctcgaaaccttcaaagatttctctgctccaaccgaaggcctggttccgtgacaggtactcaaatgcgtaccgccccttcacaaagcagggcggtgtcattttcgcacgtgacgagtatggagacagtgtctggtggaaggtgtgtggtgcaacgttaggacagactatgaactggcaaatccgaggctggatttggctaacctactggcctaacaaacaacggaccttccacaacgaaacgagatggcttgaatttagagagtgcctgcagctcccccttaccaagtttccataaaccacttgtactctgaaatgaatgggttgtatagcagtgtagaaccatagacattgaaaaatccatgcatatttggggggcacaaaaaagagtatgatactctattgtaactgaatgtactgttacatcgaaatgacctcctcatatgcctgccttgcaattttaatgcaatcctaaaaatttattcggtgtac

SEQ ID NO: 180607 - DNA, 1460 bp, Zea mays
  Clone ID: MRT4577_96294C.1
ctcgcgacctccgtccaggatgcctgggctcgctaggagcccagctcaccggttccaggtgcagagatgccgcaaagagcctcgtgaggatgctcggtgccaacctcgaggaccagtggatgcagacgatgaacctcgcagtaaccaactggatagtcgagctgagatcctcgagccgctcgtccggcccgccgtcgccgctcttctcatacgccgtctcagcaagcgggctctggaaggtgcagctgtactgcccggtcatagccatgggtatggaggaagctgcagagacaccacaggatgagcgtctcctcttctcactcatttatcaacaagtcgagtgtgtcattcagctggcctatagaacgacaagaagggataactggatcgatgtcgaggtgaaggtggacaacgtaaggtcagttgttttaacatgtaagaatcagttgtttctataacatgaactggattcaggtttatattctctttcctagaaattcatactatgattaactatataaatcaactttattgaaaaaaacatttgtccatatacatggactatctaataataaaacaacataaaaggggggaaaaaaaaccactcacttttggcagctatcacaggtgtgatgtggactctttggtctccgagacccttatggcggagcgtggatatggctccgaagagaagcacttcccatctcgtgtgatgctgcaaatcacacctacgcaacaatctgatgtgctctctgtttctgtcggcaagtccaacgacaaccccacacacgaattcggcatcgagaagggctttgagggttcatttgaacccccaaacgcatttggcctgaaggcgtcagtaactgaaagccttacactagccatgaagccctggaaattcgagcagtctgtgcatgggaacactgcaaccttgaactggtttcttcatgacggcgtcaacgggagggaggtttattcctcgaaaccttcaaagatttctctgctccaaccgaaggcctggttccgtgacaggtactcaaatgcgtaccgccccttcacaaagcagggcggtgtcattttcgcacgtgacgagtatggagacagtgtctggtggaaggtgtgtggtgcaacgttaggacagactatgaactggcaaatccgaggctggatttggctaacctactggcctaacaaacaacggaccttccacaacgaaacgagatggcttgaatttagagagtgcctgcagctcccccttaccaagtttccataaaccacttgtactctgaaatgaatgggttgtatagcagtgtagaaccatagacattgaaaaatccatgcatatttggggggcacaaaaaagagtatgatactctattgtaactgaatgtactgttacatcgaaatgacctcctcatatgcctgccttgcaattttaatgcaatcctaaaaatttattc

SEQ ID NO: 180608 - DNA, 3007 bp, Zea mays
  Clone ID: MRT4577_96295C.1
agaagctcgctgtctgtagcagatgcaatgacggcgcagagcacacgtattgcatgcgggtaatgatggaagaggttccagatagtgagtggttgtgtgaagactgccaaactgctgtagaatctgaaaaggagaatagactagaaaagtctcaggtgaaggttggcacttcaaaagagctttccttagaaggggagattaacaaacctgccattgctgcaaagggaagaagttcatctgactgtgaattgaaggctgggaatatagaaaacaaagagtcaaataccacaaatgagaggaatggcacagtcaaaaccaggacggaagaagatgctgtgacgacatcctcaactagagatattttttctgaaactggtggcttgtacatgggggctgactctagaaagagaatggaaccatcacacgagacattcgtgtctgatgctgacaaaggaaagcaacctagccatcaagtatcaacttcattggtggttaatgctctgaagaatcaggcaccacagtctcgtggtaaattgtcaactttccaaatccacttctttcaataactcaaaggtccccaaagtgaaacagctattgaatgaagttcctcagaagccaaaatttttgaaggaatcttggtcctctattatcaataaaaaggaaggaccaatcagcatgactactaagtcagcgaccttcaaaaagcctaagccttgtgagccaacaaacaaggcaaagtcttccgtcttgtcacctgccgaggagccaagggtgccgaatcagttggcgagccacaatgtaacaaatggtcagtgttctatattggggcctccctctgccacatcatcaatggttgctcctgttctaagaactgatagcacaactcagctgctctctacaagaaataacacagttgactcaaataatttaggttctgttcatctacaaggaaacagtgagctaaagaagcctcgtttagcaaaagtgccgggaagtatgatgctatctaatgctgaaagatccgcaggtgggattcttggttccggtgctcatcgagaagtgattcaaaattcagacccttcacatagggatgctaaaataaaggaccaaactggcttcagacagggtgcttctagcagtaatcggacaatccgttgccaaagatgtaatgaatatggccattctacacatttttgcgaagttgaaaaacttcgtttgtcttcaggaaaacctttgagtgagcgaaacttgaaggatgcatctgccaaaagaaataagacatccgaagttagtacattggcttctagtgaaaaaactccttccagagaaccagagcatgtcgtaaagtgtgctattaatcagaatctgataaatgggcctaatgatggtatacctgccccatccagccatgtaaagaagcactcattatcacctcgagctaatgtgtccatccctgggagcggagtagattgtagcaagcctaagttcaaaaataatgatccatctctatctggcacagcaggaatctttgttcataatggtcgcattatgccaaatgatcatagggatgaacctgctcaagggttttcagctggtgatgaaccaacgtcttcaactgtccctgagctgggctggatatggcaaggtggttttgagctgcagaggactggaagttcaccggagctgtgtgatggtttccaagcccatttatcatgttctgcttcacagttagtgctggacgcagttaagaaattcccttctaaagtccagcttgaggaagttcctcggaagaattcatggccaacacagtttcagaaaaacggtccaacttatgacaacataggtctttttttctttgctagagatgttcaaagctatgaaaatcactacagtaaattagttgagaatatgctgaagaatgatttagttctcagaggaagtgttggtactgttgagttgcttatattcccttccaatatcctatcaaagaacttccaaaggtggaatatgttgtactttctatggggtctattcagagttagcaaaaaagattcctctaacctcccatcttatctatccacaagtagagtagaacaaaattttaatgatgatctccaggccatggattggatgccatctacccattcattctcacagaacaggagtgatttagccgaactggaccctggtttgttaaagtcaactaattttgaaccgagtttggaagccagtcgtgaggtgtgtttggatggagagaactctttgaatcaacttgtacgcagaagagctctagataatcacctagattcagatgcaaaagcatgttcaacgattagcaatggtgccatgggttcctctgccatgtctatgcaaagaaaacatcagaaacctgattatccagaacatcaagataaaacgagggacacttttggtggtaatgttagtgaaagagatttcgatgtgaacacggtgccagttacttgttctgtctccttaactcaccttcaggaagaacctggtaagctgagcacagccatcgacctcatggatatagaccatggggttagcgcaggtgcactggatcgttcacatgcatcaggtggtgcaggtaaaagaagttttgagacggccgaagtagctgatgaagtacccgagcataagaaaactaagctggataataatgcctgtacgaatgatggcaatagcgataaactaatgcctggaagctcaagcagtgatggcaagcgcgtgtttccacttgatctaaatgcagtgggggatgaggacatcgtaaatattccagccttcaggtgatgaagagttcgctgttccattacaaaccaaccgtggtggtttggttcagaatgagagatctgcattgtaaatcgcatgtgcagtttttggcctaatgttttcagacaacacttacagatgtgatgttcccctctttggcagtgaataattctgctccagaatatgcttacaaaaaaaaaaaactcgagcccgg

SEQ ID NO: 180609 - DNA, 378 bp, Zea mays
  Clone ID: MRT4577_96296C.1
gaaaaaaggtgtcatcttaaatttacaaggccccttcaattaattttctgcaaaattacaagcttatatccacaagaattatttttggagtcaagccgtttaatacaacccttgtttcaggcatttgaaaataaatacaaactttttttttctttcacaacccataatttaattgcaattgcaaaaccaacccattcccgttttcccaacaaaccccccttaaataatcaacccacacttacacaaacataagttctttcctccgcttgacctaaaaatctttatatgcctttaacaaaaaactcatcatcctttttatattaatagggaggctcttggttaaatgctaaagattccctccaaataaatttttttatt

SEQ ID NO: 180610 - DNA, 317 bp, Zea mays
  Clone ID: MRT4577_96297C.1
ctggggcactatacaccaaggtgtccgaagaaaaagaaccacgtggatggagacgcaaattcctggagacaacaatttgtactaagacgtttttaagccttaacaagcacattttcaggattgggacgtggaaaacatacttgtcaaccaacagggagtatacacggggccaaactttatcatgaggcctaaggtattataaggcttatttttcactaaggatgaaaactggcctcgcccctatttggactgaggccttctgacgtggacaaaagttgatacaaggtgaatggggaagcttcgttcctacacgtgga

SEQ ID NO: 180611 - DNA, 1700 bp, Zea mays
  Clone ID: MRT4577_96298C.1
ccacgcgtccgctttgttcataatggtcgcattatgccaaatgatcatagggatgaacctgctcaagggttttcagctggtgatgaaccaacgtcttcaactgtccctgagctgggctggatatggcaaggtggttttgagctgcagaggactggaagttcaccggagctgtgtgatggtttccaagcccatttatcatgttctgcttcacagttagtgctggacgcagttaagaaattcccttctaaagtccagcttgaggaagttcctcggaagaattcatggccaacacagtttcagaaaaacggtccaacttatgacaacataggtctttttttctttgctagagatgttcaaagctatgaaaatcactacagtaaattagttgagaatatgctgaagaatgatttagttctcagaggaagtgttggtactgttgagttgcttatattcccttccaatatcctatcaaagaacttccaaaggtggaatatgttgtactttctatggggtctattcagagttagcaaaaaagattcctctaacctcccatcttatctatccacaagtagagtagaacgaaattttaatgatgatctccaggccatggattggatgccatctacccattcattctcacagaacaggagtgatttagctgaaccggaccctgatttgttaaagtcaactaattttgaaccgagtttggaagccagtcgtgaggtgtgtttggatggagagaactctttgaatcaacttgtacgcagaagagctctagatgatcacctagattcagatgcaaaagcatgttcaacgattagcaatggtgccatgggttcctctgccatgtctatgcaaagaaaacatcagaaacctgattatccagaacatcaagataaaaagagggacacttttggtggtaatgttagtgaaagagatttcgatgtgaacacggtgccagttacttgttctgtctccttaactcaccttcaggaagaacctggtaagctgagcacagccatcgacctcatggatatagaccatggggttagcgcaggtgcactggatcgttcacatgcatcaggtggtgcaggtaaaagaagttttgagacggccgaagtagctgctgaagtacccgagcataagaaaactaagctggataataatgttgtgcctataagctctggtccacgcgagaatgcctgtacgaatgatggcaatagcgataaactgatgcctggaagctcaagcagtgatggcaagcgcgtgtttccacttgatctaaatgcagtgggggatgaggacatcgtaaatattccagccttcaggtgatgaagagttcgctgttccatgacaaaccaaccgtggtggtttggttcagaatgagagatgtgcattgtaaatcgcatgtgcagtttttgacctaatgttttcagacaacacttacagatgtgatgttcccctctttggcagtgaataattctgctccagaatatgcttacagatgtgatctcatctgccagattccttgtgatgtcatgctaatatcgtacaccacctggcttcgcttggcaggatacacgtccatcaagttactaattaggatgcgtgtatgcacgtggagacaccgttcaaacggacgtgtaaaacactgttttctactctgtaggtgacaatttatagatagccttaccatcttc

SEQ ID NO: 180612 - DNA, 226 bp, Zea mays
  Clone ID: MRT4577_96299C.1
gggaaagaaagaattttttttagattacacagatgggggtcaacgcccctggggagcacaacggccgcctacccatgggatccacgcatgtcaaaaccaatgggatgggaacaggctacagacttttggggccacaatatactgggtttttacatctggctagaaacatcatgggaaagccgttttatgccgccttaaccaggtcacggagacccattagggcctg

SEQ ID NO: 180613 - DNA, 562 bp, Zea mays
  Clone ID: MRT4577_9629C.1
ataaaaatgcgcaaaacaaaaaatctaaaatataacagtttgatcaagttgcataagatgtacaatttttccaactgcttctgcatttggaagtccacctttctatgttatctttgctatttctgacttaatagaatccaaatagtattgaacactaacaaaaatacaaaacgagatggagttgtgttgactgaaaaacatatgtatgtagcatttggaataaaaatatatactttaagtatttaaggaccagataatgccagacaagggattaatgccacaaaacaaagtataaaatccatgactagatatttcataaattattaatccttatttttgcataaatttagaatttttatcatttaaatgtgggaaaggagagagaggtgaatggaattgttgcgataagatatataagaaatatgggtctgtaccaagaacataaacacaaattaattagcatattcttgccccctcaagataaaataatgcatcaatagtaccacaacaatacaaatccgatgtgcatactacataacaggaatgtaggcattaattaaaa

SEQ ID NO: 180614 - DNA, 255 bp, Zea mays
  unsure (1)..(255): unsure at all n locations
  Clone ID: MRT4577_962C.1
gaaaaaaccgcgtggaattttttttaagtgtttggccccccggtttcgtgtcaggtttttttnttttcatttgaggttttgcctggggtctttttttttttcccaaanntccctcgcccaaatgggcttttttcgtggcgtcttctgcccttcaacaaatggggcctcccatttttggaacctgaaacaactgtgttttcctgggttattatacccttcacctgacgggtcccccctaatttctcttcttgtctt

SEQ ID NO: 180615 - DNA, 523 bp, Zea mays
  Clone ID: MRT4577_96300C.1
gcattgacaaatcttcagggaccaacacgactatgcagaggggaaaatttcaaaaggtccatctatgaaggatatcaggaagggatctgaatgagtcgaagtggctatgtcaactttgcgtctaaaagtcttgatcaaggctatattgaactgcttggatgctcgcagctctttctatgtcaatttccccccatttcatcaggaactctatgagtactgttagcgtcttagattccttgtctaattgcttctcttctcatatgccgagaatccatcactgatccttcaggctgctgacaggttctatcagatgggtctaggttgcttagaccccaggtatacatgacaaacttccgcagcttatcccaattccgctgagcacgtcgtttgctcagaattttcagcattctggtatcctcgtcacgaagcttctttatccttgcttcacattgagacatgaggcagagacaaattgccacactgaaggcataaaggccaccaatacttgcgagtacactaactg

SEQ ID NO: 180616 - DNA, 1529 bp, Zea mays
  Clone ID: MRT4577_96301C.1
ttccttgccactctctatttcccccagtgctagctctctctctctctctctctctcaaatactgcccatgcggcttgccctcctcgtttgatgaggccaatggccagcaatggcatggcgtccgcaccctcgcccttcttccctccaaacttcctcctccaaatgcagcagacaccctccgatcatgagcatcaagaacagcatcaccaccaccaccaccacgagcaccacctcgctgctcctccccttcatcctcaccacaaccccttccttccctcctctcaatgcccctcgctccaggacttcagaggtatggcgccaataatgctggggaagcgtccgatgtacggggcggacgtgcaggtcgtcggaggcgaggaggtgaacggctgcggcggcgtgaacgaggacgagctgtcggacgacgggtcccaggccggcggggagaagaagcggcggctgaacgtggagcaggtgcggacgctggagaagaacttcgagctcgggaacaagctggagcccgagcgcaagctgcagctggcgcgcgcgctgggcctgcagccgcggcaggtggccatctggttccagaaccggcgggcgcggtggaagacgaagcagctggagaaggactacgacgcgctgaagcgccagctggacgccgtcaaggccgacaacgacgccctcctctcccacaacaagaagctccaagccgagatactgtctctgaagggcagggaggcagggggctcgtcggagctgatcaacctcaacaaggagacggaggcgtcctgcagcaaccgcagcgagaacagctccgagatcaacctcgacatctcgcgcgcgccggcgtccgaggcccccctggaccccacaccgccgcccggcgccggcggcggcggcatgatccctttctacccgccttccgtcggcggccgtcctgcttctgctgctggcgtggacatcgaccagctcctgcacacctccgcccccaagctggagcagcacggcagcggcggcgccgtcgtcgtccaggccgcggaaaccgccagcttcggcaacctcctgtgcggcgtcgacgagccgccgccgttctggccgtgggccgaccaccagcacttccactgatagatcgcctcctcttgtccccgccacaagaaataataattctcaatgccacaattgcgatcaacgttcgatgcagccagatggaacagcggaggatcgattcttggcgagtggagcagcgagggagagagagagagagagagagcgagtaagcaaggttgtgtatgatctgatcgatcggcgaggtcgtagctgcgagatatgcgatggagctagtagctgatcatggtggaaagtggggtttgtaagcgcaataagcggagatgcggtgtaatttaattaggtaggttttggtttgagttttgatagtatctttatttttgcgtcttcattttttttttggtcttcgcgttttgttcgcttttttttttgttcacacatatataaatttgtgaattgtgatg

SEQ ID NO: 180617 - DNA, 422 bp, Zea mays
  Clone ID: MRT4577_96302C.1
ggggggtgtttggttttggttgggagggccaaaaaaaaaggaaacggacccgggaaggcaaaagccgccacaggggttcggccacggggggaaaggaaccaaggcaccaaagaaaagggaccaaactccagggcggagaaagggaaaaaaaagggggggagaactaacggcagaggcgcaggggccacgggggaaaaaaaacagcaggggggaccaaaaacagggccgtgggaccagaacggggggaaaggaagcccaggggacggaaagccctcggacgcgaggaaggcccccacggccaacaaaggagcggatgcaagaaaaaaaaggctaggcgcgggggaagccgaaagccgacgggccaggggaagcgccaccctcaggggaaggggagcggaagcaccctgctccacctggggggg

SEQ ID NO: 180618 - DNA, 313 bp, Zea mays
  Clone ID: MRT4577_96303C.1
aaaaacgcattggtgggggacattttgcactgaagagctttggaaaataagatacccaagctttcgggtccagtcatgtgtcaaacttagcagagcaatgttccacaactaacacaatcaaaacagggggaatttttttcaaaaaaatagtagaacttctcgttgttcattttaaaaaagagtttcaaaaacttgtttaaaccgtaacaagaaggtttgggggccaataacttcttgttattttcaagggaacctttgccattgtaaaaccccggggtgaatcctccaagttgactaggttggcccttttttt

SEQ ID NO: 180619 - DNA, 367 bp, Zea mays
  unsure (1)..(367): unsure at all n locations
  Clone ID: MRT4577_96304C.1
gggaccctctagagcggccgccccccactataaaaaacnnttttnctcggcggagagaaaaannaaaccnggntgangaccccggggggggaagaccgcggaacccaaccagcccggaaaacgcaacaaaagggncaaaaaccagaacgggccacccaacccacagacaaaaaacaaccaaggcaggcaccaaaaagacccgaaccaaaccccgacacacccacaggccacccacgccacccggcagccccggagggccggccacggacaagcagaccccagcagcgacagaccacaggggcccccgggccaacccagcccaaagacaaccccaagccgaagcccccggcaagggcgccgaaacaac

SEQ ID NO: 180620 - DNA, 265 bp, Zea mays
  unsure (1)..(265): unsure at all n locations
  Clone ID: MRT4577_96305C.1
agctcatgtttctgctcgagccagaaggtgcgncaccggctgaacgacgactgggcttacggcaatgatctcgaggcccggccatgtgacttccaagcagaggcattttgctctccgttgccaacatggaacgcttcaatgcccggcgctatgaccggacccacagcaaccctgacttctggccagtggacaattgcctgcagagcgtcttgggccaacgggtagatcttctctgagacttccagatgaactatgacctatggct

SEQ ID NO: 180621 - DNA, 343 bp, Zea mays
  Clone ID: MRT4577_96306C.1
ctcacctcaaagctcgatccctcagccttccatctcctaccaaagccgacgggggtgcaggggatctccatctgatcgaacgctcatcgtatatttcctaggggtacaaccgcgccgaggtactgagccgccactgcgcacggccacactgctgcatgaaggcggaggctacccggccactacatagccagtcgcctgatgctacggagaccaccgtcaagccctagtcggcgcaaggtggctatcaggcgacaaggtatcatctcacggaacacggttcggcagaaggaacataggactctggccgcactaacttgctttactgaagcccaggatgagacaa

SEQ ID NO: 180622 - DNA, 516 bp, Zea mays
  unsure (1)..(516): unsure at all n locations
  Clone ID: MRT4577_96307C.1
aaaaagcccccggccnccnccgcccgcanacccgatcccgcncgcncgccgccagggggcccgcagcncggancgacacaaaccncggcgaaaangagagagancnngcacanccagggagggcaangnggcaaccagancggngccaagnncngggaggncgngngngacgaacacggcanngacacnacaggncggnacacnggcacggcgggggggagnnggagcgcgncaagggcnaccacaangaggccnccngnggccgcnnngngccccgngccgnncncanggaccnagagccngggacaanggacagngnccgcacnggacccnangggcagancnaccgcccngacaacnnngngnnngggcaancnggngccggcaacaacngggcgaaggggcannanacngagggcgcngagcncaaagacncngnncncgangcngcgaggaaggaagccgagaaccgngacngcnngcaaggannccaagnangccacccccnngggggcg

SEQ ID NO: 180623 - DNA, 388 bp, Zea mays
  Clone ID: MRT4577_96308C.1
ggttggaatttgggctgtttagtgctgttattgctggtgagggtgaggggtgggttgattacggagtagggtacggggtgccacggagttgatgctagtaagaatttcagtaggtgcatttaatcatagggttctgatccggtgcaatgaggggtggtgatgctctatcatatgtggagggctcggggtgagagatcataaggtatcctagaggtctgtaggattaagtaagcggatttcggatcatccagaatgagtagatacttgtaccgtcaaggatgacgactttggtttactagactccctgatgtttagtaaaagatgagagctgatacgaccgcgaccacacaacagacgactcgtccgtcgtgcgagttggcgtccgtac

SEQ ID NO: 180624 - DNA, 454 bp, Zea mays
  Clone ID: MRT4577_96309C.1
cttgttctcggcaagaaaaaagaaaccagatcaaccacgactcacgggcacattccatacaaaaaaaagggaagggagccccttccccgaaacacaggaacaaacactagataaccccgaacaggagcagcttgaacaaccgacggctgaggaacaaccgagaggacggggcccagtttccacggtgctcggcctccggatgttgcagtcagaaaggaaacccccacccaccagccgcctgccggggaggatcatacgctgccgggcaaagggaaaaccctgggtgccctggatctgggccgacacgttgaaaaaggaaccagagcactccccctccagggaactcgtcggggcagacacggaccccacagagatcgggataccgaccctgacgcggagcaccacacggaggccgcgggaagtccggatgtccaattccgccaacgtaaaaccg

SEQ ID NO: 180625 - DNA, 766 bp, Zea mays
  Clone ID: MRT4577_9630C.1
atttcacttttagcgcgaacgcgcggcggctgttggagatgctctaaagccggccaccacccgcacgccattcctcttccttggtcctccaccggactccctacccggcttcctccactcctgtcttccgcttgtgcgctgccgtcggtgttgagagtgaagggcaactgcaaggaagatgccgcgccgccgctcccgctcccgctcccgccgccccaccgccgcctctcggctggaggcgcccgagggccgcccggcctacgtctgcgcgtccaagtccctcgactaccccgtcccggcgtctgcgctccgccactgggctccggaccccccggaggtcagctctggccgcccgcgccgcgggtccacggtgtacgtgcagatgacacccgagatggacctcgaggccaggcgcatcggctacgcgttcatcgcccccgaccccgaggccgctggtctcgaggacgcggacacgaaggccctcgtccgctccgccatccacgccacggcgccggacctgcagttcgagctcttcgccgtctccccaatgatggccgacatgtgcctgcgcttcgccttgccggaggaccgcgtggcggccatggccaaacagccgttcgagctcgacggctactccgtacaaatcgggcctgacccgaagagctgcatccagtcccggctggactacctcgtccacatcaacctgcacaactaccccaaggaggagcgcacggaggaaaacatccactccaactgcttcagcatc

SEQ ID NO: 180626 - DNA, 370 bp, Zea mays
  Clone ID: MRT4577_96310C.1
cggactcgtgggcggactcttggtctgactcttgggttggcatgccacgcggcttggcgggattcgttggtccaaggttccctgtttactttgctagaggccctataccagggatgattttccttgtcacgatttcgcatcctctacctctgcgacttgacatgatgattgggccttaccacgattcgctgatcgcaggcctgtctacgctacgagctacgttgcttattgaactcttggctgtgcagcagcacactccacttggaatgatgaatgccctgcattgcaaaaattattagatgatcttctgcttcaacctcatgatctgcgtttcatctcttatctatgggctgtatctcatgcacctaca

SEQ ID NO: 180627 - DNA, 142 bp, Zea mays
  unsure (1)..(142): unsure at all n locations
  Clone ID: MRT4577_96311C.1
atgagtaccatggggaaaaatcggtacccctccccactnnngcctaattatntnntactacacnngaacaagaaccgnngaggcaggcggttgcacaagcannaccccgcgtacctctgcggttgttacccactgcttaagn

SEQ ID NO: 180628 - DNA, 508 bp, Zea mays
  Clone ID: MRT4577_96312C.1
ctcgaggccggccgggccgggagcatagcaaagcatagacacctcgcctatctatctagcgagagagagagaggaatgctatgctagctaccatggagtgcggcagcgagaatgcagcaggtgccgtgttggcgctgctgcttctccaactggagttagctccgactacagagacgggccgcctcactggaggcggatacctcacaccgcggatgatctgcacatcatcgccagggagcttggccatccagtgagaggaatcctctgtggtgaaacctgcgtcttcctaccatgttatacggcagccatgagttgccaatgcattggccaaaactgcatgatgcgatatctggactagcgctatttgcaatttgagctgggagaagacacaaggacgcgacggtggagatcaacttattgcatgtgtatggtgatctaataagcaaactataataaaaaggcatatgttggatggctacatataaaaaaaaaacaggcccctagggtc

SEQ ID NO: 180629 - DNA, 284 bp, Zea mays
  Clone ID: MRT4577_96313C.1
ctatgttccatatcctttcccgatggatgtgacgccgtagcaccgctttagaaaaaccaagcctatcaatcactagcacgcgtaaaacaaatccatgtagagcgtatcctcaattacatcctcacgccgtgggttctccaccaggtgtatctgaatgccatggtgctacactgcttcacaggcttgcaaatttactcccttagcagatggcgtgatcccatatggggcccctccgagctccttgttggcccatattatggaaaccatgatatgatctcaacccc

SEQ ID NO: 180630 - DNA, 282 bp, Zea mays
  unsure (1)..(282): unsure at all n locations
  Clone ID: MRT4577_96314C.1
tacgtatttttcacacaaaacgtggggtttggataagattatagatggatggtaacacagcacgccggggcacatggctagcctcctcccntactgcacccacacaacacaacacactgctcgccagaagcgccccatgaggccagtggaggacactacgccgccatcagccatcatcattatctcatactcatagcatgccatggcacgcaacttactgactgactcgaaacacacacattgactccgctatactttattaagctttataattagctaaat

SEQ ID NO: 180631 - DNA, 422 bp, Zea mays
  Clone ID: MRT4577_96315C.1
gaagcagtggtaacaacgcagagtactttttttttttttttttttttttttttttttacttttttttttttttttttttttttttttttttttttttttttttttttggaaacaaaaagggaagcatcctttccaaaacaaaatcgccaaacggttcagggggggacaaaaatcagggccggaattggcaactcaacttaaaacacacaatcaagggctgactagggagggtgggcttcctctctcgggctttctttttggcaagggcccgatttaaggaagggtccaggcaacgggaagctaggcaacgggaagctctagggcaaaaaaaaactttattatgcctggcaaagaagggttttttcacttgggggacaggccacccccccatgggggacggtaaaggggctgtttgacccctt

SEQ ID NO: 180632 - DNA, 294 bp, Zea mays
  Clone ID: MRT4577_96316C.1
cctttcttttttttttggggtatttaaaacaacacatggcaagtgcatctgaaaatcagacaaaattacaatgaaccaacacacatatgcgttgaatctcattacgacaacatgaggattgacaacaccttaggctaatccttgcttgatggaataaacatgttcttctactcaaactctgaccacaagatctaaagaaattaaagacgaatgtcctacagcaattacttgccattcatctttcccaactgaaaatggtgttatattaccagaccttctaagacatcacctttt

SEQ ID NO: 180633 - DNA, 244 bp, Zea mays
  Clone ID: MRT4577_96317C.1
acccacgcatctcactcagcttataaaatatagatatcatttgtatcccatcctccacaatcacacgacggttactaactccaatctggtggatagtcatcactgaatacaagaaattcatcaccctatcactcaactatatcaaatcttccaagatcttactgtcctaatccatgatcaagcagcacttatagatcacattcattcccatatatacaatcctcttctagcgacttcctaacct

SEQ ID NO: 180634 - DNA, 305 bp, Zea mays
  Clone ID: MRT4577_96318C.1
ccaacaaaccgcatgttgggatccaatctggttgggacttacccgttacactagccaacctgtaaatactaaaagcaatgcatgctttgggattccccacacgggacaccaaataatttgttacctgaagaggggaaatttggtttcggcccagcaccgtaattgagatgcccaggtaaagaggggatcctcctttgggggcaagccactggaaggggaagggggccatggccacttggatcatcgaattatggcgggctccaaaaaaaaaaaaagagatcacttgccccgggggctgtttttga

SEQ ID NO: 180635 - DNA, 261 bp, Zea mays
  Clone ID: MRT4577_96319C.1
ggggcagaaacaaacaccagggcaaaggcaaaaaaaaagaccaaaaccccgggaaggcaatcagcacgaaaccaacgggacacgagcctaagggtttttcccggcccaagggggttggaaaaaaccattggctttaaaccccaggttaaaccatttttccaacccaaatctaaaaccaccccccttttggaaggccggggaccgaaacaacaaaaggtggacccttggaaaaaaaaacctttggaccaacgccaaacctgc

SEQ ID NO: 180636 - DNA, 322 bp, Zea mays
  Clone ID: MRT4577_9631C.1
catgcgtaaaaaaaggttcatggacgttttttatattaaaaaacattaccacactacaaataaaaggatacacccggtacgttagccaaccacaacctggccacattggttgaccatcccatgaaacgcccattcccaaaactggcctgacctgcagcgccagagattttgatgagatcgagaaataattctgattattccaagttgaagccactgctgcaacataagatttcccacaagcgcccactcatgacattggctccaccttaaaacatcggtatgcccgggctcaagattcgcaatttttggaacctttttcctt

SEQ ID NO: 180637 - DNA, 703 bp, Zea mays
  Clone ID: MRT4577_96320C.1
ataaaaaattctgttgcacatttgactggcttcttttattttgcacaatcttgtctagtattatatattttgactcaaaatcggaagataactatcccttggattgtgtgcatattcagtagatgaactttcagaatatttagatactcattaaggggatgaagccaggaaaaattatttgggggtgggaatatagccatttttaactagctagagggctaaacttattttttgagtgatttattatatggtaaatcatgagtgcatatggtgggtgcatgggtgaactctgcaaaactgcatgcattctgcaaaaactatcaaaggtggacctagttccgaaggctcccacatgagtgggatctagagagggacaaaccgaggcaagccttacaccttgcaaatgcggagaggccccttcgatctcatgacctggtgactcagtgcgacagctgtcagcactgcaccagacctgctcttcctgccaaaaccatcaaggaactactggtttaagaattggtaatgcaaggctacatattttagtgcaatttgtcgtgttgagctgaaggtcattgagtgacatggaacatagcatcattgtgctccttttgtgcaatcttgtcctctttgttctgctaattgcacagtctttacatgcatttggcactgtatagtgggctcaggatgtaatgactgcattgat

SEQ ID NO: 180638 - DNA, 262 bp, Zea mays
  unsure (1)..(262): unsure at all n locations
  Clone ID: MRT4577_96321C.1
actaacaatcaatgtgttctctttttatatacttttattttgcaaattgcaatggacggcgacacctaagcgatcggtcggtggaaaanaatagagaatcaatttctggaaacaaggagttgatcccgccgacgaggaagatacgctaggcctggactgcacgctctctcgcttggccacgtgcccgcaccgccgcgagccattgccaccagatcggctgcgcgcacgccatggccgctgaggctcgcctaggctgtgcccc

SEQ ID NO: 180639 - DNA, 362 bp, Zea mays
  unsure (1)..(362): unsure at all n locations
  Clone ID: MRT4577_96322C.1
ccgcccttttttttttttttttttttttttntttttnnnttttttttttggcagggggaagggtcatcttcttaccttgaaactgaggtacttcatttctattagataattgctgctaaaatatggttacattattaacgtctggctgtttcgtcacgcagctaccaacatatctatatcttctccgtgatctgcataacaaattagataatttgaatccttcaatcaagccttttcttagtacttctaaagcaaaatatactcctactcattgccataagagtacacaagattttcttgacaaaatccagccactattcttagttttaaggaagcatctggatggagcagtttcaatgatc

SEQ ID NO: 180640 - DNA, 596 bp, Zea mays
  Clone ID: MRT4577_96323C.1
aattcggcacgagggccgattcaaaaccttcccgatgcgatagcgaagcagcctccacagcagctcgactcccacccggcaggcacagccgcacaggaacccacccggcctctccaccgctgcacctgcagtcctgcacccatttaaatttaaacatttaaaaaaaaaacccaccccacgaaattcgcagaccaccttaattcccattacatcaattattttctcttcccgacccagtccgccgctgcctgcttccttccttccttctctctcctccctctcctccagcgacagagacagggaaggaggcggaggaggaggccgcgtggctgcggaggcgggcagccgcggcccgtgcgattcgcggcgcctctctcgccgtatctgcggtggcgcgggcgggttggcggccggccagcgagatcggctgttgtttttggtggtatttttttttctttccccacggcggtttttgggagttggagcgtggattgaagacggctgacggccggaggggtttggggggtccagttgaggcccgtcgggcggagatcccgcggggagctgcggttccgccgcgggccgtgagttggatt

SEQ ID NO: 180641 - DNA, 417 bp, Zea mays
  Clone ID: MRT4577_96324C.1
gctcatatactacagcaccatctactaccactcagccagatagctactgcctagtctcaggagcaaccatgccttccattgaaccaatggggcgcactgtaccgatctgcttatttacagtagcagatactactaccatttggccagatagctacgtcatgcaccacttccactatgaaacaacaacattcgattacgttctaccatcagtctgtggctaacaccgcaacagtattacaactgctacaactgctgccctttgtccaacttgctttgacatagcccgcatgcttgtaccaacatcacatgatcgtcggcgtcatctttcaaatggattataacctggaattcaataatgaaggagctcggctgctgaatgtggcctacttaaaataacaactatcagatgcatatgct

SEQ ID NO: 180642 - DNA, 1634 bp, Zea mays
  Clone ID: MRT4577_96325C.1
tcgaggccggccggggttgatagatcatcgtcgcatccaaatacatcgaatgcatgggcagcgtcgtggcgctgtactcatggatggtccgtggccacctccaccccatggtgcagctcgccgaccgcttggcgggacacggcgttcccatcaccatggcaattgccgacgtcccgtcatccagcgagtcccatgacaccgtcgcccgtctctctgccacctacccctccgtctccttccatctcctccaggcggcaacagcccgctccggcgacgaggccgaccccgacgccgaccccttcatcacgctcatcgccgacctccgcgccaccaaccccgcgctcctcgcgttcgtgaggtccctcccgtccgtgaaggcactcgtcatcgacttctgcgggtgcgcgctcgacgccgccgcggaggtcggactcccggcctacctgttcttcacgtccggcgcgtccccgctttctgtctatctgcacatccccgtcatgcggcccgacgtctcctttggggacatggggcgctcgttgctacacttccccggtgtgcacccagttcctgcctcggacttgcctgaggtcctcctcctcggtcctcgcaacgagcagtacagggcaaccattggtctcttcgagcagctgcccagagcgaagggcatactagcgaacacgttcgagtggttagagccccgcgccgtgagggcaatcgagcagggcagcccccgccccggtgagccagtgccgaggctgttctgcgtcggcccgttagtgggcgaggagaggggaggagacgggaagcacaacgagtgcttgacgtggctggacgcgcggcctgcgcggagcgtggtcttcctctgcttcgggagcgctagctcgttgccggcagagcagctgcgggagatcgcgctggggctggagaggagcgggcacgccttcctctgggccgtgcgcgcgccagtcgcgcccgacgccgactcgacgaagcggttcgagggccggggcgacgcggcgctggaggcgctgctcccggatgggttcctggacaggacgcgcgggcgcggtctggtggtgccgacgtgggcgccgcaggtggaggtgctgcggcaaccggcgatcgcggcgttcgtgacccactgcgggtggaactcgacgctggaggcggtcacggcgggcgtgccgatggtgtgctggccgatgtacgcggagcagcggctgaacaaggtgttcgtcgcggaggggatgaagctcggcgtggtgatggagggttacgacgaggccatggtgaaggcggaggaggtggaggccaaggtcaggctggtcatggagtcccagcagggagaggagctcaggggcaggctggcggtggcgaaggatgaggccgccgccgccgcgctggagacggccggatcgtcaaaggcagcgttagatgacttcatcagcaacctgcaaatttcgaggaaccagtgaacctatgtatctatcacagtgagtgttggattgtgcttaagctaatattgactttctggtgtgatgaccaactctccaagagatacctaaatcttttggccatttggactaaataagctccaaactgttacacagaaaaaaaaaaaaaaaaaactcact

SEQ ID NO: 180643 - DNA, 228 bp, Zea mays
  unsure (1)..(228): unsure at all n locations
  Clone ID: MRT4577_96326C.1
ctcgagcctggaattatgcttcccaatccaccgaagcctaccagacttgtgtaaactcagcgagcgncccgatcgcagccatggcggagaagaagccggcggcagagaagtccgcacaggaggagcccgcagccccggcggcgaacagtgccgctgcgaagaatgcgaagcggaggcacggctctcggtgggaaaatcagccgggaaggcaggcggtgttcccaagaa

SEQ ID NO: 180644 - DNA, 154 bp, Zea mays
  Clone ID: MRT4577_96327C.1
agcatcctacgaattcaaggatacagacagcatgcagcacccatgtccaaggtcttcacccttgactcggtcaccaagcacaagtgcaagcaggatagctggctcatcatcggcagcaaggagtatgatgtgacgcagacatgggtataccact

SEQ ID NO: 180645 - DNA, 891 bp, Zea mays
  Clone ID: MRT4577_96328C.1
aattcggcacgaggatccaatccaaattccaatcccaccccgcccccttccaagaactctagtatcaaccaaccgtccaacaaaagcaggagtcgcatcccagatcccccgcgcatcagagacaggcagggagggaaccgagatccgtccgtccgtccgtgtcgatggagtcaacggtggagcggataagctcgtcggtgcagtcctgggtgaaggaccacgagctcgcagccatcggaggcgtgtgggctgcggcggtgggcgcttcggtggcgtacagccggaggaaggcgccgcagcggggcacgggcctgcgcctcatccacgccaggatgcacgcgcaggcgctcacgctcgccgtcctcggcggcgccgccctcttccactgctacggcgacggcggccgcaggaagagggccgacgacatcgacctcgacttctactcgcagctgccgccggccaccgacgctgacggcaacgagaaccagcggtggagctggtaggaggaggagccgaggaggaggaactgtagcagactagcagtgggtgctttttgcagcaataataattgaggtggggcctatgacgtggcggcgggcgggagggaaggattagtctgtgctaatcctaatccatccagctcagacaaaacgacgggcggcccgtttactttacattatcgatccatgctgtcatggccggccccccatccatttttattgttatttaggagcaaccgcccatagtttgctgctgctgcttctctcctgtatcacagtactacccccccccccatttgtttattttatgagtgaacggtgacgataatgacgattttgtttttttgggggggggggggggggggggggggggggggggggggggggtggc

SEQ ID NO: 180646 - DNA, 728 bp, Zea mays
  Clone ID: MRT4577_96329C.1
aaaaaacgtaaaaaaaaaaaaaaaaaaaaaaaaaaaaaaaaagaatttctctcctgcttttctcccctggcctcttcactcccttgcatggcagcaccggtagggtaggcctgggctgctcccgggcctaggctggcggatcccgtcgccctgggggctggatctggcgcccctaggtctgggggcggcgatgggaggcggctgcgctggtctggggcaccaggttctccgtcttcgtggccggatccgaggccctttgggcttggggcttcgaccgggggcggggctctcgcacccggcagcaactggcgagggtgtcgcatgtgctggggtcgacggcggcaaccggaaacggcttcggcgcgcggcagtgtgtcacacgcggcaagaatggggagacatatatgcaacaacaaatgtaccattgcatcaaccttccttgccattgcagcgggatcaagcgttggcaatcataaacaagttgtcaaacaggagagttagctcttcgagcagtgttgtgagcgagatctcttacaatgatgagccggccctgacaaggtcacactccatgatatctgagatgcagttcagcagtggtagcagtggaaattctgtttacaagagcttccaaagggataatttgcctaacaactctgatgaggcatcagtttcagaaatttcagaaaatgtaaatcatctgagtggtcaggatgacctgaggcttgaat

SEQ ID NO: 180647 - DNA, 2134 bp, Zea mays
  Clone ID: MRT4577_9632C.1
tcatgactgcgtcatgcatgccaattaattagccaccactccatcgaaaggacccgatcaaactttagtctactcgtcctcctcttctcgcagcagccagcagaccaatcgggacaagcaaactcccccgattagtttaagcagcccgggcccggcgacgaccagctccgttccgcgcggggatttaaacgcgcgaggcgagaaggcacgcagcaggcggcagcggcaagcaacgaacgcgatcgcgcgccgccgacgacacgcggtgcccgcgcctggtggtgccctgttaccggactccggtgcatcgcctcggtcggtcgtcgtcatatcatgggtggcccgccgccggtggcgtggtccgccgcgcccgtcccctccgcgcgcgcggtccagccgcgggagtctccgaacgccggtccagcccgccggacacacactacgcctccggctaccgggcgccgtcgtatgtgcctccttattaccgacctgcaaattggattggttgcttgtagtagaagtgtagagagagcgagacagagatagatgacaaacacgaaacgaaccggaaggaggacgataaggcgcgcgtgccggccggtcttctactcctctctgttcatagctgtcccatatctatcgtagtcaagaaaactgagcagggaaagaaaccgggcgatatttctgttgcaaaaaaaaaaaaaaagaggggctggaactctgggtccctccgcacgcagatccactcgtgctagggcatgaagcccaagctgtgcgggcaggagcaggagtgccgggacctgttccggcggtcgctgttcatcgtgggtgagttcggcgggaacgactacaactcgccgctgttcgcgttccggccgctggcggaggcgcacgacatggtgccgcacgtggtggagtccatcgggcggggcgtggagcggctgatcgcggagggcgccgcggagctggtggtgcccggggtgctccccatcggctgcttccccgtctacctctccatcttccgcaggcagccggccggcggctacggcgcccgcagcggctgcgtcaaggagctgaacacgctgtcgtgggtgcacaacgccgcgctgcgccgcaaggtcgaggagctccgcgccaggcaccccggcgtgcgcatcgtgtacgccgactactacacgccggccatccagttcgtcctccacgccgagaaatacgggatgctgaagcagacgccgcgggcgtgctgcggcgcgccgggcgtgggcgagtacaacttcaacctgacgtccaagtgcggcgagccgggggcgtacgcgtgcccggacccctccaaccactggagctgggacggcatccacctcacggaggccgcctacggccacatcgccaggggctggctctacgggcccttcgccgacccgcccatcctcgacgccaagcacctcggctaacgtcgtccatccaccgtcttctccaacgccggccccgcccgcccagtacagactactcctccggctctgggcgccgtcgtatgtgcgtccttattaccgacctgcaaattggattggttgcttgtagtagaagtgtagagagagcgagacagagatagatgacaaacacgaaacgaaccggaaggaggacgataaggcgcgcgtgccggccggtcttctactcctctctgttcatagctgtcccatatctatcgtagtcaagaaaactgagcagggaaagaaaccgggcgatatttctgttgcatcttgctttgtttgagagtgtgcgtgcgtgtgcggccagctcgatctgaagtcgataggcaggtgcgtcgcgtcgtggatgaactggtccgtggacgtgatcttgtttatttttttaaggagcaggtgttgtcaaaaaggtaccgacatacaaatagaaggacgaagacaacccatgctagttaacctagtttgatttgcaaaaaaagtttccactattgtactcgaagggtttttttaaaacagtataaaaatataaactgtacatgtaagtttgcgctatgttagcctctgtacataacttgggatcggagtatatataaacttgtactattacatgttgagtaataatatacagatcgatctctttcgactttttt

SEQ ID NO: 180648 - DNA, 361 bp, Zea mays
  Clone ID: MRT4577_96330C.1
ctctctttcagtgcatgttacagagagacggatgacgtgctgcccaggcaagcgagctccgagcaaggcacatcaaaagaaaagcagccggagcagatcacccaggactcgccagcggcgcagtgcgggcagaagaggcagcgcagcgatgacaatgcctccggaagagccgcgaccaacctgcaggggcagctggttgaaatcctagaccggagcagccagatggtagcagcgcagctagaggcgcagaacatgaacagccgactggacagggagcagaggaaggaccaggtgagcagcctgcttggtgtgcttggcaaggtggctgatgccctctacagaattgctgataagctatagc

SEQ ID NO: 180649 - DNA, 859 bp, Zea mays
  Clone ID: MRT4577_96331C.1
ccggccgggatcagttcagttcaatccaatccaaattccaatcccacccagccccttccaagaactccagtcgtccaacaaaagcaggagtcgcatcccagaccccccgcaatcccgcatcagagacaggcagggagggaaccgagatctgtccgtccgtgtcgatggagtcaacggtggagcggataagctcgtcggtgcagtcctgggtgaaggaccacgagctcgcagccatcggaggcgtgtgggctgcggcggtgggcacttcggtggcgtacagccggaggaaggcgccgcagcggggcacgggcctgcgcctcatccacgccaggatgcacgcgcaggcgctcacgctcgccgtcctcggcggcgccgccctcttccactactacggcgacggcgggcgcaggaagagggccgacgacatcgacctcgacttctactcgcagctgccgccggccaccgacgccgacggcaacgagaaccagcggtggagctggtaggaggagaaggaagaactgtagcagactagcagtgggtgcttgcagcaataataattgaggtggggccctatgacgtggcgggcgggagggattagtctgtgctaatcctaatccatccagctcagacaagacgacgggcggcccgtttacttaacattatcggtccatgctgtcatggccggcaccacatccacatctactagtcatctaggagcagccgcccatagtttgctgctgctgcttcttctctcctgtatcacagtactaccagcaccatttgtttatctgatgaatgaacggtgacgatgatgccgatattttttaaaaaaaaaaaaaaaaaaaaaaaaggacgacac

SEQ ID NO: 180650 - DNA, 922 bp, Zea mays
  Clone ID: MRT4577_96332C.1
cattgggtacctcgaggccggccgggagactcatctcttcaattcaatccaatccaatccaaattccaatcccaccccgcccccttccaagaactctagtatcaaccaaccgtccaacaaaagcaggagtcgcatcccagatcccccgcgcatcagagacaggcagggagggaaccgagatccgtccgtccgtgtcgatggagtcaacggtggagcggataagctcgtcggtgcagtcctgggtgaaggaccacgagctcgcagccatcggaggcgtgtgggctgcggcggtgggcgcttcggtggcgtacagccggaggaaggcgccgcagcggggcacgggcctgcgcctcatccacgccaggatgcacgcgcaggcgctcacgctcgccgtcctcggcggcgccgccctcttccactactacggcgacggcgggcgcaggaagagggccgacgacatcgacctcgacttctactcgcagctgccgccggccaccgacgccgacggcaacgagaaccagcggtggagctggtaggaggaggaggagccgaggaggaggaactgtagcaggctagcagtgggtgcttcttgcagcaataataattgaggtggggcctatgacgtggcggcgggcgggagggagggattagtctgtgctaatcctaatccatccagctcagacaagacgacgggcggcccgtttactttacattatcgatccatgctgtcatggccggcaccacatccatatctactagtcatctaggagcagccgcccatagtttgctgctgctgctgcttctctcctgtatcacagtactaccaccaccaccatttgtttatctgatgaatgaacggtgacgatgatgacgatattgttttgaaaaaaaaaaaaaaagggcggccgtcgcgatctagaac

SEQ ID NO: 180651 - DNA, 1066 bp, Zea mays
  Clone ID: MRT4577_96333C.1
cctcgaggccggccgggccggggacactggcagagcagcttgccctgtctgaaacacaagcggcctggaaaaccaggagccgagccatcaggaacgaagaagacaaaacagaaggcgggggcctccggtttggttcccctccctcccggttcccaggcttccagtgggcaggacagccactggttccactcgcccgttcagctataagttagtcgagacagggccttgcactcagactcatcagttcaattcaatccaatccaatccaaattccaatcccaccccgcccccttccaagaactctagtatcaaccaaccgtccaacaaaagcaggagtcgcatcccagatcccccgcgcatcagagacaggcagggagggaaccgagatccgtccgtccgtgtcgatggagtcaacggtggagcggataagctcgtcggtgcagtcctgggtgaaggaccacgagctcgcagccatcggaggcgtgtgggctgcggcggtgggcacttcggtggcgtacagccggaggaaggcgccgcagcggggcacgggcctgcgcctcatccacgccaggatgcacgcgcaggcgctcacgctcgccgtcctcggcggcgccgccctcttccactactacggcgacggcgggcgcaggaagagggccgacgacatcgacctcgacttctactcgcagctgccgccggccaccgacgccgacggcaacgagaaccagcggtggagctggtaggaggagaaggaagaactgtagcagactagcagtgggtgcttgcagcaataataattgaggtggggccctatgacgtggcgggcgggagggattagtctgtgctaatcctaatccatccagctcagacaagacgacgggcggcccgtttacttaacattatcggtccatgctgtcatggccggcaccacatccacatctactagtcatctaggagcagccgcccatagtttgctgctgctgcttcttctctcctgtatcacagtactaccagcaccatttgtttatctgatgaatgaacggtgacgatgatgacgatatttttc

SEQ ID NO: 180652 - DNA, 363 bp, Zea mays
  Clone ID: MRT4577_96334C.1
ggaggaacccatcattttccggggatttttgtaggaaaacgatatattccccggacaaactccggggatggccggagcctgaaacctgacaaaacatctttggcctcccctccctgctttcccttccggcttgggcacaatacaatttcatttaccccggagctgcactggactgcactggactggactggaccaaaaaatggttgctggcttttgaatgggctcccttgtttttcacccaaaggaaaacccaacaagaacccgagcttccttccaaggcccaacccctgtatgtacaggccaaccgaggcttcccttccgtcccgtcccgttccggccggtcaatttcccaaagcgaagggg

SEQ ID NO: 180653 - DNA, 740 bp, Zea mays
  Clone ID: MRT4577_96335C.1
gccccttccaagaactctagtatcaaccaatcgtccaacaaaagcaggagtcgcatcccagaccaccccccccgcatcagagacaggcagggagggaaccgagatccgtccgtccgagtcgatggagtcaacggtggagcggataagctcgtcggtgcagtcctgggtgaaggaccacgagctcgcagccatcggaggcgtgtgggctgcggcggtgggcgcttcggtggcgtacagccggaggaaggcgccgcagcggggcacgggcctgcgcctcatccacgccaggatgcacgcgcaggcgctcacgctcgccgtcctcggcggcgccgccctcttccactactacggcgacggcgggcgcaggaagagggccgacgacatcgacctcgacttctactcgcagctgccgccggccaccgacgccgacggcaacgagaaccagcggtggagctggtaggaggagaaggaagaactgtagcagactagcagtgggtgcttgcagcaataataattgaggtggggccctatgacgggcggcccgtttactttacattatcgatccatgctgtcatggccggcaccacatccatatctactagtcatctaggagcagccgcccatagtttgctgctgctgcttctctcctgtatcacagtactaccaccaccaccatttgtttatctgatgaatgaacggtgacgatgatgacgatattgtttaaaaaaaaaaaaaaaaaa

SEQ ID NO: 180654 - DNA, 785 bp, Zea mays
  unsure (1)..(785): unsure at all n locations
  Clone ID: MRT4577_96336C.1
tggacgcctgcagtttccggtccggaattcccgggtcgacccacgcgtccggcgccgggaaggagtttgcagctgctcggtcatcgtgcggcccgacgcgagcccgcgctggtgtgcaggcccggctctgtgcctggtctctggtgtgagggtttacgcgaggcccctgcttcggtccccggactaggcctcgaccccgggcgccatgaagcaggagggctcggcgcggcgccgaggcgccgacaaggcaaagccgccgccgggaggggaacaagaaccgccgccaccggccccccaggatgtggagatgaaagaggaggcagcagctgggagcggctccacgggggagggagacggcaaggcagctgcgaccgagcactcccagagagagctggacactgtcaccttagaagacatcaaagagcacgtgagacagctagagaaggctgtttccggcaaggagcctcggttcgtgctgagggcgctgcggatgctgccgtccacgtcacgccgcctcaaccactatgttctgtacaaggctgtgcatggcttcttcacctccaataacgccactcgagacttcttgctacccttcctagaagaacccatggacacagaagccgacctgcagtttcgtcctcgcacaggaaaagcggcatcagcgcctctcctgcctgaggtggaagcctacctgcagctgctcatggtcatcttcctgatgaacagcaagcgctacanagaggcacagaaaatctctgatgacctgatgcagaagatcagcactc

SEQ ID NO: 180655 - DNA, 914 bp, Zea mays
  Clone ID: MRT4577_96337C.1
gaattagtttagacgggccttgcactcagacccatcagttcagttcaattcaatccaatccaaattccaatcccaccccgcccccttccaagaactctagtatcaaccaaccgtccaacaaaagcaggagtcgcatcccagatcccccgcgcatcagagacaggcagggagggaaccgagatccgtccgtccgtgtcgatggagtcaacggtggagcggataagctcgtcggtgcagtcctgggtgaaggaccacgagctcgcagccatcggaggcgtgtgggctgcggcggtgggcacttcggtggcgtacagccggaggaaggcgccgcagcggggcacgggcctgcgcctcatccacgccaggatgcacgcgcaggcgctcacgctcgccgtcctcggcggcgccgccctcttccactactacggcgacggcgggcgcaggaagagggccgacgacatcgacctcgacttctactcgcagctgccgccggccaccgacgccgacggcaacgagaaccagcggtggagctggtaggaggaggagccgaggagaaggaagaactgtagcagactagcagtgggtgcttgcagcaataataattgaggtggggccctatgacgtggcggcgggcgggagggagggattagtctgtgctaatcctaatccatccagctcagacaagacgacgggcggcccgtttactttacattatcggtccatgctgtcatggccggcaccacatccacatctactagtcatctaagagcagccgcccatagctgctgctgctgctgcttctctcctgtgtcacagtactactaccaccaccatttgtttatctgatgaatgaacggtgacgatgatgacgatattgtttaaaaaaaaaaaaaaaaaaaaaaaaaaaaaaaaaa

SEQ ID NO: 180656 - DNA, 367 bp, Zea mays
  Clone ID: MRT4577_96338C.1
gcgtaccattgatcgttactgaccctcataacttgttccacagagcggatgcctcaactcctgcgaatatacaaagcctacatatgatgcatatgcctgaacaagcactgcctgccatcacagactgctgaaccaagctcaccggacgtttctccaacctatcaacattgatctagtacttatcgagcattatggtggtaacccaagcaagatatactttgcgactaggcctacatgaagtgatagctcacaagtatcatatgcacatccagaccaatatgatagatgctgttctcaactaccgatacaatcatatggacctgcactcattcttgaatgcccaaataatggtcactgcattagcaac

SEQ ID NO: 180657 - DNA, 849 bp, Zea mays
  Clone ID: MRT4577_96339C.1
ctctcgagactcatcatcagttcgattcaatccaatccaatccaatcccaccccgccccttccaagaactctagtatcaaccaaccgtccaacaaaagcaggagtcgcatccgaccccccgcatcagagacaggcagggagggaaccgagatccgtccgtccgagtcgatggagtcaacggtggagcggataagctcgtcggtgcagtcctgggtgaaggaccacgagctcgcagccatcggaggcgtgtgggctgcggcggtgggcgcttcggtggcgtacagccggaggaaggcgccgcagcggggcacgggcctgcgcctcatccacgccaggatgcacgcgcaggcgctcacgctcgccgtcctcggcggcgccgccctcttccactactacggcgacggcggccgcaggaagagggccgacgacatcgacctcgacttctactcgcagctgccgccggccaccgacgccgacggcaacgagaaccagcggtggagctggtaggagcctaggaggaggagcggaggaggaggaagaactgtagcagactagcagtgggtgcttgcagcaataataattgaggtggggcctatgacgtggcgggtgggaaggattagtctgtgctaatcctaatccatccagctcagacaagacgacgggcggcccgtttacttaacattatcggtccatgctgtcatggccggcaccacatccacatctactagtcatctaggagcagccgcccatagtttgctgctgctgcttcttctctcctgtatcacaggtactaccagcaccatttgtttatctgatgaaatgaacggtgacgatgatgacgatattttt

SEQ ID NO: 180658 - DNA, 572 bp, Zea mays
  Clone ID: MRT4577_9633C.1
cggacgcgtgggcgcaacgcaaacagcatcgccgaacgggtcgcgcccgcccgagcccgataagcccgcgaagcccaggcccacccgcgaagcgatgcgacggaggagatcgtgagatcgcgcgccgccgccgccccgctgccgccggcgatgacctccgccgtcctcgccggccggaatgaggtccaccacgcgcacccgcaccaccaccgccactggggcggcgcccgcgtccccctcatgcccaagccgtcctccaaccctaaccctaggcgccaccaccgcccgggcccaaaccctatccccacaggctcgccgccgccgcgggccgtcccggcggtcgcggccgagcccctgccgtcgtcatcggggcacgtgaagttcaggccgtcggaaatgacccccgccgaggccagccttctccgcgcgcggctcaccggcgagctcggccgcgtccgcgctttcctctcccgcatcgactcgtggcaggacgggcagcgccggcgccggcgcccggagcccgagcacgagcacgcgccggagccccccgtcgggcgccgctcgtccccgcc

SEQ ID NO: 180659 - DNA, 1330 bp, Zea mays
  Clone ID: MRT4577_96340C.1
agactcatcagttcagttcaatccaatccaaattccaatcccacccagccccttccaagaactccagtcgtccaacaaaagcaggagtcgcatcccagaccccccgcaatcccgcatcagagacaggcagggagggaaccgagatctgtccgtccgtgtcgatggagtcaacggtggagcggataagctcgtcggtgcagtcctgggtgaaggaccacgagctcgcagccatcggaggcgtgtgggctgcggcggcgggcgcttcggtggcgtacagccggaggaaggcgccgcagcggggcacgggcctgcgcctcatccacgccaggatgcacgcgcaggcgctcacgctcgccgtcctcggcggcgccgccctcttccactgctacggcgacggcggccgcaggaagagggccgacgacatcgacctcgacttctactcgcagctgccgccggcaaccgacgccgacggcaacgagaaccagcggtggagctggtaggaggaggagccgaggagaaggaagaactgtagcagactagcagtgggtgcttgcagcaataataattgaggtggggcctatgacgtggcgcgcgggagggattagtctgtgctaatcctaatccatcctacgacgggcggcccgtttacttaacattatcggtccatgctgtcatggccggcaccacatccacatctactagtcatctaggagcagccgcccatagtttgctgctgctgctgcttctctcctgtatcacagtactaccaccaccaccatttgtttatctgatgaatgaacggtggcgatgatgatggcggcaaaaaaaaaaaaaaaaaaaaaaaaagttgacagctacgtgttcacaggggcactctgttactcttttgtcagagtagctctaccctcgtatggggtctgaataaagcacctggatgtttgctggtttgtctctcctgccatcagcaatgcggtaaccgtattttaacataatgatgagtattgctgagaatgccctagacagacaatgtggtcctcctatccaagcaaatttggctgttgaagatataaccgaagatcacggccgccagcttaacgtcgacagtgttacggacttggggcttgagatggcctttccagctcaaccagtctgttgcagacttgtagctttgggtgtacatagtttatccttttttttcatagggtagaaaggaaagcgtaattatccgtcgcaaaagctgttaactgtgtattgaggcagcttatgtcaatatgtactatacctgttggtatcgattgttttaatgatccaatgcatttgattggtaact

SEQ ID NO: 180660 - DNA, 755 bp, Zea mays
  Clone ID: MRT4577_96341C.1
tttttttattctggcttacctctaacgatggcgccgacgaaagatgaggtcggcgccaccccaagcacggacgctgatcacgccagcagcagcgaggtaggagacgtggcccgtggaccagctgtggagcttcctctccaccttaccgagaagatcctttgctgcatcaacccgctcgcggcggcgcgacaacgttctgcaatcacgacgctgctgtgttccccgccatccttggcttcgaggtgtaccggctagacttgaaggacagacggtgggcaagggtgaagaagttgccaggcgaccggcgggcgctgttcgtgagccacggatcgtcgttcgccgtgcgctcctcggagacggcgggatgcaggagcaactgcatctacttcgtcggcaacaaatggtactgctccctgtgcaacagggacgccggcaagacctggggtgtgtactccatggaagaccgggaggtattgtttgagcacgctgtaaccgagccgggaccatgctcggcggcgacgtggttcttacctagtgtagtctaggagcatgtataatttcgtcagcaccccggagaatgcggaggccagcaaaggtgttgtttcttgcatagggtggagtgacgcctaaaaatatttgggccccacggccactgagaagattttgctttgctcttcaaataccgcagcgtgtccgcagtattgaatgtcggaaaaaacctaacccaagcaggggtggagagatgtatatttata

SEQ ID NO: 180661 - DNA, 403 bp, Zea mays
  Clone ID: MRT4577_96342C.1
atccaacgatcccctcccggcctgccgcccgtccggacccgagccggcctcgcattcggcgccgcgccagtcgcgcctccgcctccgtcgccgcctgctccggcgagcgggacccagctcgccgctactcccctactgcgaggtacacgatggagggagccggaagagatgccaaccctttgcgcagttaccgaattggcagaaccctgggaattggatcgttcggtaaagtgaagatcgcggaacatatattgactggccataaggtggcaatcaagatcatcaatcgcctgaagatcagaagcttgaaaatggaaaagaaagtgaagagagaaatcaagttactgagattattgatgcatccttatattataccgccttatgaggtgatacatacacctgc

SEQ ID NO: 180662 - DNA, 644 bp, Zea mays
  Clone ID: MRT4577_96343C.1
attacgactacatttcaccaccgtacgtaaataaagatggggagcaacaacgcctcttgtgccctgtccgtgttgctcctcatcgtcatctgcgccgcggctgcgctgcgcgcagacgcgtcccaggcggaccggctgagagagttcatcaggtctaggaggaacagtcgtcctagcgacgacaagggcgcgtttaaggttaccaacgtaccacaacagagggttgctactagcagcctgctgagcacaagcagctactccgacagtgagcagagcgccatgaaggcagccgacaagatcaccgcgctgccggggcagccggacggcgtcgacttcgaccagtacgccgggtacgtgaccgtcgacgagacgaatggccgggcgctcttctactacttcgtggaggcgccacaggacgcctcgacaaagccgctcctactgtggcttaacggagggcccggatgactcgtcgtttggctacggagcaatgcaagaactgggatccgttccgcgtgaacagcgacaacaaaacgctgagtacaaacacgaatgcctggaacaatctggccaatgtgatcttcctggaatcgccggcgcgttgtcggattgtcctactccaacactacctctgactacgaactcag

SEQ ID NO: 180663 - DNA, 287 bp, Zea mays
  Clone ID: MRT4577_96344C.1
ggtggtttcaacaccgtcgccgtcgttgtagctatcctctgacgggttggtcaatggatccactcctcgctgctgacatggagcacgctgctgcacatcgatgagcgtaggatgcacctaccaggtgcctccactgaaagctaatctgggaagccaatgacgacttcttccatccgagtaagagaaagaacagaaaaccatagatgtcctacacgtcctgcaacccgtagacaccaaaatgcactacatgcagaatgacccgatgatataaccacaaaaggaatgga

SEQ ID NO: 180664 - DNA, 219 bp, Zea mays
  Clone ID: MRT4577_96345C.1
caaagtccatatgcgttgaaaggaaggaggacgtcgcgcatgagacgagagccacccgccccgcccgcctccaaccgcgcttaaatgcgcgcctttcttcttccgcgttaaaccctccggctgtctcattgcttcgcgttttaacccctggttacaaatggccagctgttcgttttgctccgccgtgcgccgtttgttggttgctctcccgttcgctct

SEQ ID NO: 180665 - DNA, 183 bp, Zea mays
  Clone ID: MRT4577_96346C.1
acccacgcgaccggtgatacattacacattgttgttagatctagaagacacaacaacatgggggaaaggggacctttaaacttactttcccgccccaccacctttttctttgccgtctaaggaccagataacgacgactaaacccatcggaggaaggacggcgtcaacaacaaacaccttgtg

SEQ ID NO: 180666 - DNA, 257 bp, Zea mays
  unsure (1)..(257): unsure at all n locations
  Clone ID: MRT4577_96347C.1
cacccgccgccgccgaccaccaaaccgaccccggcccccagccaagcaggcggggaagcagcgacggcggaanccggaggcacccgcgagacccccaggggcgaccgaccccgccgagacgaacgacaggcacgcgcccaagaccagccggaaccccgccgagcgcgcacgacgcggcaacgacgacaacggcaacgaccaccgcaccaccaaagacgccaacgagcaaggcggggaccccacaggaaccggcacag

SEQ ID NO: 180667 - DNA, 587 bp, Zea mays
  Clone ID: MRT4577_96348C.1
actgcgcacttctcttttacgttccaactcctgcgcactttctcctcgtgcctgatagttaatgtaagccgagatacggtcatggtctgcaccggcaccggtgcaggtggtaaggataagaaggtagcgcccgggctcaaggatcggcgggccataggtagaactcggtgtctcggtccgtgtatggccgagcttcattatcctgtcattcgtatcggtcgctatttgaagatatggccctacgctcattgtgtgtgaaccagctccccagtctacctcggcggtggcttcatatgcctctctcatgagcatctggagtttgatgggaatgctgattactacagatgaaagacttgtattattgctgtgctactgtgcttcttgcgatccgagaccgacatagggacgcttgtagatagcatgtatgtgctggtgttaccattgctaacggctgttatgctgcacaaatatcaaccagtgttgttctgcccatgaacacagctcatatggcttgcaaggcctgccattaagggagcaatatcgagctacaggggctgctattaccgcaccatggcatacactgactg

SEQ ID NO: 180668 - DNA, 835 bp, Zea mays
  unsure (1)..(835): unsure at all n locations
  Clone ID: MRT4577_96349C.1
ccnnnnnnnnnnnnnnnnnnnnnnnnnnnnnnnnnnnnnnttttttttttttttttttatgaatttaattagttttgtctaaattataattattaaaatggaattcaattccaacgaaacaaacggggcctcaacgtaagcatgattagttagatcatgctcatgatgagctgtttagcatggttatttatatctggattagtgcaacggtggtgatacaaaccaggatcactaaatatttaggagttgcttagagcaattacagctaataagcaaggtgtcaaagcaactggatagaagggctcaggatgggggagggggactagcagcgactgagaatggcaagtaaaataagctgtaagcctcagctacttccatgtaccacattgcttcacgatctggctgagaagagaggtccaccatcttatgcaccttgatagatggataattgtccctggactctgctgcaatgtatgcaccaataaccattacatacatccctggccgccagaaccggccctctgcttctcttggcaagacgaaaaggttggcgacgcaggacccatcatccagcaacaagcgccctccaccggattcgttgtagtccgttgacaggatcataccctggacccaggcgcgctggaagcggatgccggagagcatctgcgcggcagagcaaccctcagagcacggcgcctcggtgcaaccggcgagctgggagccgaagatcttcagcgccgcgagggtatagtccatggccaccggtcaccggacagccggtcgccgccgcagggtttcggcggacgctggggcagccgcgtggggaatgacgcgt

SEQ ID NO: 180669 - DNA, 318 bp, Zea mays
  Clone ID: MRT4577_9634C.1
gaaacggggaaaatgggtttttccccaaaatttaaaaacccacaaacccaaacttgtttaatggttaaaggcccaaacttacaaaaccggctggttttgttaaggaaaaaaaggctttaggggtcccccccggggtggtttggtttccaaaaaaacctccgggaccctaaacccgggggggagaaatggtttaacttggttggccttttaaacataaaaaccccagggggggcccaagtcctgggggcaggggcccttgaactggacaacaccctggcccctttggattttaacggccccctggggccaaattccggg

SEQ ID NO: 180670 - DNA, 410 bp, Zea mays
  Clone ID: MRT4577_96350C.1
gcggattgcattggagatcagacttagtcgccatctcctatggatgtgttctctggcttcaatatttcatatgttgactgtggttggacgatcgtctccatcactctagccacatttgggtggcatggactctcatcgtgaagaatcatcaagtccatttgacataggatttgcatccgacgttgacgccaatgacatgttcatggttctgacatcactgcagcatacattactacatcatcacattctcaacatttattctgggagcttaacacagacatggatttctcacaattccagaactgtcatatattccttctgagcatcaaagctgtttatcctacgtcgcacgacaggactctcagatgttgcgttcaatacatcaacgagcttttacagctacgaatcca

SEQ ID NO: 180671 - DNA, 244 bp, Zea mays
  Clone ID: MRT4577_96351C.1
attcctcctgccccagcaccggccagcctcatcaggtcattcctcctcgctgtgccccctccaccgtattcaaccacctcttcctcggcaccaaacgtagactccttctccgcgatgcccttagaccgtccgtcctcgcccaacatcttcttgccgcatatgctcgcagcggctgccttccatcccgtccgtacgccacgcttttgcacccgcgcatggatgctcactgcactcctactatggt

SEQ ID NO: 180672 - DNA, 170 bp, Zea mays
  Clone ID: MRT4577_96352C.1
catgcacccctacgtaagctggaatcctttaaagaggccggctttttttttttttttttggcacaaaccttacacatgttctcgacgtattgtataactggtatctacacaccaattacaatctactatcttcaatgctcaggcagagaccacgcgattcttgatgattt

SEQ ID NO: 180673 - DNA, 192 bp, Zea mays
  Clone ID: MRT4577_96353C.1
gattccggtcgaccacgcgtccgatccgcaatcgcagttcctgagcaacggcggctatccgttgacctcgggaggcctgtccgtcgcgatcggcggctcgggcggcggacactggcctccccagctgcagcacctgcagcagcagaggctgcacggcgcctgggccaactgcggcggcacgagctggccgtc

SEQ ID NO: 180674 - DNA, 337 bp, Zea mays
  Clone ID: MRT4577_96354C.1
atccacgctttcgaacacgcgtacggtcacgctttcttgtatcctcaatacatataagacctaggatgtacattgacgatgggcagcgtgtcattaactttattgcacaagcactaaaaaaggaacccttgacggtttatggtcattgaaagcaaaccaagattttacaatatgtctctgatcttgttaaaggccttacttaatcttattgaaagcgagcatgagtggccattcaacctgtaattaccctggctagttcaccattcttaatctagacaacgtttgttcactacaccataaacactcaactcacggatcgagtttctcaaataacacc

SEQ ID NO: 180675 - DNA, 616 bp, Zea mays
  Clone ID: MRT4577_96355C.1
cgaggccggccgggccgtccccgccgccacgctagagaggagaggaagagcgcgcggagagtgagagcccgggagaagcagcggctgggggcaagatggtgcagcggctcacctaccggaagcggcatagctacgccaccaaatcgaaccagacccgcgtcgtcaagacacctggtggggaacttgtgtaccagtacaccaaggaattccacacctgagacctgctgagtacaagaggtccaggttggcaaggaaccaaaggactgtgaatcgtccatatggtggtgttctgtctggtactgcagttagggagaggatcatccgcgcctttttggtcgaggaacagaagatagtgaagaaggtgttgaagatccaaaagaccaaggataaggcctccaagagctagacgatataggcccaatgtttgagtccattcgaatttgtttcagcaagaatttctcgcgggtatggggaatcctggtacttatgctagtagtatgtgagatgggtgtggtttaaattttgagcgtaagttgagttctgttaacttgttaagttcggtggaatgttttaaactgtggatgtcagattttgttaatgtttgcgcagttgcccc

SEQ ID NO: 180676 - DNA, 360 bp, Zea mays
  Clone ID: MRT4577_96356C.1
tattttttttcttttttttttttttttttttattggtactttttaattgttttttgggttcttaccccctttccttttccttgccaaaacagggtgccgccccccccatactccaggaaattcccttttcttcgggcaaaaaaaaaaaatgggtcccttgaaggggtccaatttccaggttctcaccatgctttcaaaaaaaccgggcaaaaaaaaaaaaatttttttttttctaaaggcctgtccggatgccggggatttggaccaaatcccccaacatttaggtcaaattggaactaaacccctggaagggcccctagaacaacccctttcacctaaacaagccttaaaggaaagaaa

SEQ ID NO: 180677 - DNA, 853 bp, Zea mays
  Clone ID: MRT4577_96357C.1
cacgactctcggcaacggatatctcggctctcgcatcgatgaagaacgtagcaaaatgcgatacctggtgtgaattgcagaatcccgcgaaccatcgagtttttgaacgcaagttgcgcccgaagccttctggcggagggctcgtctccctgggggccgggacttccgtccccgccgccacgctagagaggagaggaagagcgcgcggagagtgagagcccgggagaagcagcggctgggggcaagatggtgcagcggctcacctaccggaagcggcatagctacgccaccaaatcgaaccagacccgcgtcgtcaagacacctggtgggaaacttgtgtaccagtacaccaagaagcgcgcgagcgggccgaagtgcccagtcaccgggaagaagatccaaggaattccacacctgagacctgctgagtacaagaggtccaggttggcaaggaaccaaaggactgtgaatcgtccatatggtggtgttctgtctggtactgcagttagggagaggatcatccgcgcctttttggtcgaggaacagaagatagtgaagaaggtgttgaagatccaaaagaccaaggataaggcctccaagagctagacgatataggcccaatgtttgagtccattcgaatttgtttcagcaagaatttctcgcgggtatggggaatcctggtacttatgctagtagtatgtgagatgggtgtggtttaaattttgagcgtaagttgagttctgttaacttgttaagttcggtggaatgttttaaactgtggatgtcagattttgttaatgtttgcgcagttgccccaattttgttctaaaaaaaaaaatatgctgtagccctt

SEQ ID NO: 180678 - DNA, 1017 bp, Zea mays
  unsure (1)..(1017): unsure at all n locations
  Clone ID: MRT4577_96358C.1
ggggacccccgaggtcggccgggaaatagacccggacgagtgggtgaaggtgctggtaatctcaagtcacagatcggaccgcccattctcttggaaaatcatctcccgccgtcagatctagggtcacccggcagccatcctataaaacctctccacctctcccccggccggccgtccccgccgccacgccagagaggagaggaagagcgcgcggagagtgagagcccgggagccgggagaagcagcggctgggagcaagatggtgcagcgcctcacctaccggaagcggcacagctacgccaccaaatcgaaccagacccgcgtcgtcaagacacctggtgggaaacttgtgtaccagtacaccaagaagcgcgcgagcggaccgaagtgcccagtcaccgggaagaagatccaaggaattccacacctgagacctgctgagtacaagaggtccaggttggcaaggaaccaaaggactgtgaatcgtccatatggtggtgttctgtctggtactgcagttagggagaggatcatccgtgcctttttggtcgaggaacagaagatagtgaagaaggtgttgaagatccaaaagaccaaggataaggcctccaagagctagacgatataggccacaatgtttgagtccattcgaatttatttcagcaggaaaatttctcgcgggtatggggaatcttggtacttatgctagtagtatgtgagatgggtgtggtttaaattttgagcgtaagttgagttctgttaacttgttaagttcggtggaatgttttaaactatgtggatgtcagattttgttaatgtttgcgcagtttgccccgaaaaaaaaaaaaaaaaaagcggccgcttttttttttttttttttcagcaagtggcagcatataattcctgatcaaagtgaaattacagattacgacaaggggtataatgatgtatcattcttgataggcaaaggacatgtttgaatatcttattcgacctgntacagatacttcaaagttg

SEQ ID NO: 180679 - DNA, 626 bp, Zea mays
  Clone ID: MRT4577_96359C.1
cattgggaccctcgaggccggccggggcctctcccgctacctgaccccgcactcgcgacatcaccaaatcgctcccctcttcccaccagagcaaaggctccctatcggcctgacataacaagccatggcggcgcgcgatgaggccattgcagatgctgtcccgaataaagatatctcccggaccttccaagctggactgcaactaccactcaggaggaatcagcgcacagatcctcaagatcatgaagaaacgcgaacgcatgggacgccgctccccctgtatacctctccgctgacctcgagtacctcgacgcttagggactgcagcttggtgcgaactcagcaaggcataacaaaaatacccgcatcgtgccgcgtatcatccagatcaccacgaccaacaacaagaagctgaccaaattgcttggtgcagccaccatcaccagcggtcgcagtatgcctcaacatcgcaccaggagctcctctccaacaacgctggctcgtccaacgcctccaccgtcgatgaccatcacaactgaagctgaccactgtagaagaggcatccactaccgtcttgtgtcctatgataccacacagatagtcagcatgtctttgagagctcgatg

SEQ ID NO: 180680 - DNA, 1710 bp, Zea mays
  Clone ID: MRT4577_9635C.1
atgcatgccaattaattagccgggtccctcgagaccggccgggcgcacactttagtctaggccagttgcactcgtcctcctcttctcgcagcagccagcagaccaatcgggacaagcaaactcccccgattagtttaagcagcccgggcccggcgacgaccagctccgttccgcgcggggatttaaacgcgcgaagcgagaaggcacgcagcaggcggcagcggcaagcaacgaacgcgatcgcgcgccgacgacgacgcgcggtgccggcgcctggtggtgccgtgttgcggactccgctgcatcgcctcggtcggtcgtcgtcatatcatgggtgtccggctgccggtggcgtggtccgccgtcctcgtcctcctcgtgcgggcggccgtggcgcgggagtacgcggccatcttcaacttcggggactccctggtggacgccggcaacctggtggtggacggcatcccggactacctggccacggcgcgcctgccctacggcatgacccacttcggctaccccaccggccgctgctccgacggccgcctcgtcgttgacttcatcgcgcaggagctgggcgtgccgctgctgccgccgtccaaggcgaagaacgcgacgttccaccgcggcgccaacttcgcgatcacgggcgccacgtcgctggacacgcccttcttcgtggagcgcgggctggggaagacggtctggaactcggggtccctgcacacgcagatccagtggttccaggacatgaagcccaagctgtgcgggcaggagcaggagtgccgggacctgttccggcggtcgctgttcatcgtgggcgagttcggcgggaacgactacaactcgccgctgttcgcgttccggccgctggcggaggcgcacgacatggtgccgcatgtggtggacgtcatcgcgcggggcgtggaggagctgatcgcggagggggccgcggacctggtggtgccggggctgctccccaccggctgcttccccatgttcctgtccaccttcgtcggcaagccggccgcggcgtacgggccccgcagcgggtgcaacagggagctcaacacgctgtcgtgggtgcacaacgcggcgctgcagcgcaaggtggaggagctccgcgccaggcaccccgacgtgcgcatcgtctacgccgactactacacgcccgccatccggttcgtcctccacgctgaggagtacggcatgctgaggcagacgccgcgggcctgctgcggggcgccgggagtgggggagtacaacttcaacctgacgtccaagtgcggcgagccgggggcgtacgcgtgccaggacccctccaaccactggagctgggacggcgcccacctcaccgaggccgcctacggccacatcgccaagggatggctctacgggccctacgccgacccgccaatcctccacccatgaatccttctcccgtactccctccgcccgccggcgccgggacgccgggtaccgtaccgtatatacacacataccgacataagaataggcatcatcgttgtacgaatacacatgctagttaatctagtttgatttgcataagaagttagcttctgtacataacttgggatcggagtataaacttgtactattacatgttgagtaataatatacaggtcgatctctttcgactttttttttaaaaaaaaaaaaaaaaaaaaaaaaaaaaaaaaaaaaaca

SEQ ID NO: 180681 - DNA, 190 bp, Zea mays
  Clone ID: MRT4577_96360C.1
aaaaaaaagggccctggtatattatggccttattagcattatcacaattgggacacccccatacagttgatttgtacactggggacacattccggggatgcaaacaaaacgaaaattaacccccccttcgggttacacacattatacatttggagggatgttccattgaacggcccatgtggcaacaaaa

SEQ ID NO: 180682 - DNA, 468 bp, Zea mays
  unsure (1)..(468): unsure at all n locations
  Clone ID: MRT4577_96361C.1
tcgtggtctttatcttggtccttgtcttggaggggctccttctgtgtgggttcttctgtntgttctgagggctgcctggcttccctgtccgtggcgggggctgatgaagggtgctcgtgttttccctctcgctacccaacgccttcggggcgggggggcctttggttttgtgcccgtcgctgccggggttgtgtcgngttcgggcgctgctgtttgttcccgcggggcgcccctgctccggctgcgagttccttcccccgtcccgcggctcccctgacgttgtctgctccgtgagggtccctctctggctaatgtgctggtctctttgccccgccctgtgctgctgggcgggatcgctgcgtcgccgcgcggcccctccccgtgtcccgaggggtgctttggcnccctagccgtctcgggtccttcagctgcagctgctccgtgtcgcccgtgacctggtccgggtgc

SEQ ID NO: 180683 - DNA, 415 bp, Zea mays
  Clone ID: MRT4577_96362C.1
aaaagaaaacgaaaatacaaaaaaaacttttcactggtttttttaagatagactaaaaggttccaacttggttatttaacagttagaggggggggaccaccagttttttgtagtaataaaaaagtgcttcattggcaataggcttaagttttgggtttggatactgaaagaacagggtacccgaggcttttcgattttaaatttaaaggattggggccccttttttggggggtttaatttttgggcttaagggaagggggttttcgaaacggggggggcggtttttttgagggagggggctttttgggagggggcttttttgggggaggaggggattttttgggcaccggggccttttttcctggggggggcttgggcgaaattttttacgccttgggggggggggggggttttt

SEQ ID NO: 180684 - DNA, 324 bp, Zea mays
  Clone ID: MRT4577_96363C.1
cgcgtcttttatgttgagacgctgatccatcggacagcctgggctgattgatgcaactcgctgcctagctaactccgttagtggtgtgttctctcgtgacccacgagagtggagtaaaataatcatgcgttggaggatgcaacgagctgagcagattcacggttcgtgcgtgggccatctcgttacacacgcgttgagtaaaaatatcgcggatggatcatgctaccggtactaaccatgctgctaactagctagcaattgggagtaacatggtgcccttgctgtcctcgtgtgagtgtgctacctgtggtgaaatgtatgagc

SEQ ID NO: 180685 - DNA, 647 bp, Zea mays
  Clone ID: MRT4577_96364C.1
ctgcccgaagagaccgagcgtgtcgcggaggaactcaccgaggtaggagagaactgcaggaggatggagatctcgagcttctgtggaacaacactaagaatcaccagctggttttagtggtggtgacggttctctcgggcgtgtgatcggcggcggcggttccctcgggcctgcgatagacggcggtggcgatcctaggaccagcggtggtgccgccccgaggtgggcgaccgatggcggtgctccaccaagaacgagcgaagacgacgctcccgaggcgagcaggcaagcggtgacggtgcgtccgaagagaatgagcggcgagggcgcatggcaacggcgtttgcgcgaggcgcgggaggcgtcggcagcggcggcggcggcggccatgagggacgcgggtcgctccggcggtcgcgggcgcggtcgtctctggcgatggcgaccacacaaggcatgggtggctcttgcgtccttccacaactaactcctccgatctggtggcttcggcggcatcctttgatctaacggcctcgggatcgtcctccggtgacgaactatctgatgtatgtttatgtcatcgatgattatgttttatgcctgctgcttacactatttatgcattccagtgatgatttttacgaatc

SEQ ID NO: 180686 - DNA, 188 bp, Zea mays
  Clone ID: MRT4577_96365C.1
cgtccttatttttttgggggggtttatagggttactgagtgcttaacaaaccacagaaaactgagaaatcagaataggcacaaggacgactgaaccaacatataacgatgggccggggaacacaacgtccatagtgagtgccgaaacatcaggagaagcaaatgcaagggcgcacactgattacaaaa

SEQ ID NO: 180687 - DNA, 381 bp, Zea mays
  Clone ID: MRT4577_96366C.1
tttttaagcgtcggggttttggctcctgttcaaaattcgtatgtcgcccttggacaagtcaggaaaggagagagaaagagaaagagatagcgactagacgctcagccatggcggacaaggcacgggcctcactgacggatgctctgccctacgaggtgcgggcgtgcttatctgtgtacggcgccttcgcatttgacagtactgcctgtgccttcgatgccgggttctatgtcctgttccagagcagaaacctgatccgatcgtcttacttcgaaagcttccgccttctgctggaccgctagctcatgttacagtacatctgttcacactactacctgcatgggtgtgtcagttctgacgtctatccctccatggattaca

SEQ ID NO: 180688 - DNA, 256 bp, Zea mays
  Clone ID: MRT4577_96367C.1
ttccttctgagcaacgggatatttaaacagcagaagaaattgtccatcgaggacaatcagcacgcacacgcaaccgatggtgaatgttagcacgcattcactgactagctgttcatgattaataaaagcagacagccagacatggatgggatcccccctggtactatgtgctagtgctgaccgactgactggctggctgggctccatgactgatgaggccgacgtatgtgtcatccatatatgcgaggccatcatg

SEQ ID NO: 180689 - DNA, 686 bp, Zea mays
  Clone ID: MRT4577_96368C.1
ctcgaggccggccgggatcgtgtccatttcgtgatccactctctgagccccaatctcttgagcagcagaatcttcaggccaagccaggtaagcaagcacaacacaaccccgaaatggcttctgcttctgttcccatggctttctcgctgagctctgttatcaacaacaacaagccttcatccgaagccttcttcaggccactacccctacggcaaccaaagaggaccctcttcaccacaaaggcagtgtcaaactccaaggctcaaatcaatgcatctttgaaggagaaggcagttgcaggactcacagcagcttctgtgacagcatctatggtggttccggaggtggctcatgctgctggatatgagttctccccttccctcaagaactttctgctaagcatctttgctggtgggtttgttctagtagccatatttggagccgttattggggtttccaactttgatccggttaagagaacttaaagcccgcatgctccaatgctttttaatttcatatgtctttttcactactcttctatcttcttctttcatgtatgttatatgcaactggtatatgttatatgcatactatctatatcccagctgcactttattttatgttatattctccttatatatgcttattaatcttcatggttcaaaaaaaaaaaaaaaaaagcggcc

SEQ ID NO: 180690 - DNA, 284 bp, Zea mays
  Clone ID: MRT4577_96369C.1
acccacgcgtccgcggacggtggcgcccagcaggacggcagcaagatggccactgacttcctcgagtgcatgctcaagatggagagggaaggcggggacggcaaggccaccttcactatgactgacgtcaagtctctgctcctggacatggtggtcgccgggacggagaccatgtcaaataccgtggaatgggccatcgcagagatgctgcagaaacctggggttcttcggaaagggcaagaagaactcgacatggtggtgtccagggacgccatcgtggagga

SEQ ID NO: 180691 - DNA, 415 bp, Zea mays
  unsure (1)..(415): unsure at all n locations
  Clone ID: MRT4577_9636C.1
gggggcaggggcgggcaccccaaccgccgccacgaagcgcaacccccgcggcacgagcgcccgccggaagagccgcacggcgcacggcacggccccgcccgccgnccgccgcgngcgcacgnccgcggcgcgagcgacggagcgccgccacaagggcagggggcgggccaacccgacccgcaaggacgacgaggagcaggccgggcgcggcaccaacaagggccgngagggcaaagcggcgcaggcgcaccgccggcgcggggccanccacgcggagcgngccacccgcgagaaggggaacggcnccaccgcgaacgggggcagccacccccccaagggcanggggcccaagcggaagccggacaaggaccgcaaggcgcgccncgaccgcaagggccggggccgcgccgccgac

SEQ ID NO: 180692 - DNA, 1184 bp, Zea mays
  Clone ID: MRT4577_96370C.1
ccggccgagcagcttcctcgcgagcctgcctgcacgttaatcaatcctgtggcctggcctggcctatatatacacaccaggcgggccggcgtaatatatatgcgttataacagcagagcagaggtcaacaagacgagacaagagaatgcctgtgagcaggatcgccgtgggtgctccgggcgagctgtcccaccccgacaccgccaaggccgccgtcgccgagttcatctccatgctcatcttcgtcttcgccggctcaggatcgggcatggccttcagtaagctcacggacggcggcgccaccactcccgccggcctcatcgccgcgtctctggcgcacgccctcgccctcttcgtggccgtctccgtgggtgccaacatctccggcggccacgtgaaccctgccgtgaccttcggcgcctttgtgggcggcaacatcagcctcctcaaggccctggtctactgggtggcccagctcctgggctccgtcgtcgcctgcctcctcctcaagatcgccacgggcggcgcggccattggcgccttctcgctgtcggcgggcgtcggcgccatgaacgccgtggtgctggagatggtcatgaccttcggcctcgtgtacacggtgtacgccacggccgtggaccccaagaagggcgacctcggcgtcatcgcgcccatcgccatcggcttcatcgtcggcgccaacatcctggcggggggcgccttcgacggcgcctccatgaaccccgccgtctccttcggcccggccgtcgtcaccggcgtctgggagaaccactgggtgtactgggtcggcccactcgcgggcgcggccatcgcggcgctcgtctacgacatcatcttcatcgggcagcgcccacaccagcagctgccaaccacggcagcagactactgatgaccatcatcatcatgcactgaataattaagaccagaccactcaatatatatacatatgaagaataacatgccaaatctcatctcctagagctagcaacttgattctccatatatttcttaaatacaaactaaactcgattgagtatagcttggtatgaaaccacatgtgtgtgatgttattttgtccttgtggtaatttgtacatctctatctctatcatattaaagcatcaatttcgacagtcgtcataccacaaaaaaaaacaggggcgg

SEQ ID NO: 180693 - DNA, 164 bp, Zea mays
  Clone ID: MRT4577_96371C.1
gaccaattaaggccatttaaaacacgcttaaaaaaaggccgggaaccaggctaaaaccgcccacgagagaggccacagccacaaaaaccacgcaggggacagcggcgcccccgaaaagtgcaccgggatggccgagaactcggagccagaaccagccaaacgca

SEQ ID NO: 180694 - DNA, 843 bp, Zea mays
  Clone ID: MRT4577_96372C.1
ggtaccctcggtgtcggccgggcctatatggtgacaacagcaacatcaaacaatgcctttgtggcgtggcacctggatggggatccagcccaagggcgagaggagtcgttcttttgcaagcacagccaacagatgcacaaggcccaaccaaacagctccaagttgaggatgcccggaccaccgaactgtgtaggccgctgaacaggggtggacccacgttgggctgagtgggggcacgagcccgcactcaattttctggttttagtggacattttatcttatttaatgtagctatagaggtccattagttaataggtctctatttaggcccccactcagatgttaggcccttactcaaatattgggctgggtccgcccctgctactgaatagtgtcccaggagacgagttgcacccatttgcatgttcttatcctttccaaaggaaacttctccttttatcgatcgcgttgattacccatttggggaggtccatggtgagcataagatagactgggatagaggaaagaactaccttaaccatcacaagacgaccaactctaccatgagcatggctttccaccctggcaatttatcagctactttgtcaattaagggcagcaactcagcattagtaggcttccaaattgagagagggagttccaaataagagcaagggaaatctttaatctcacactgcagcaattctagatgatgttgcctctgtttagaaacatactttcataccttgggttgtgttgacaactctttgtataactagttgcatgggatgtacaacttgcacatgcacatgggcccacccgtaccaatgataatgagctagc

SEQ ID NO: 180695 - DNA, 116 bp, Zea mays
  unsure (1)..(116): unsure at all n locations
  Clone ID: MRT4577_96373C.1
aaataantaaccaaggaccatgccgagaaaaacaggggtttttttgactgtgcattgttttaaacacgacgggaggctgtacgtcctggaccaccacgactgggtgattccatacc

SEQ ID NO: 180696 - DNA, 801 bp, Zea mays
  unsure (1)..(801): unsure at all n locations
  Clone ID: MRT4577_96374C.1
gtatatacgttggcatcacttcaacatcccaatttatgtaaactcatcggctatcatgcaagagatgaatctaatgaaaggatgttggtttatgagcggctccatcatggcagtttagacaggttactctttggaagaccggaaggtcgtttgatggactggtctacacgtttgaaggttgcccttggtgctgctaaaggtctagctttcctacacgatgaaggaccctttcaggcaatgtatgatgacttctcaacctcaaacatccaaatagagaaagatttcacggcaaagctgtcgggatatggttgtgttggcttcaattctgaggaggaaagatctaaggcatctgtgactgctacaaacctctcagaggaaaccttggagaaaggggtactgactcccaagagcaacgtatggagctttggagtcgtcttgctcgagctaataacaggaaggaagaaccttgatgtacgttccgccaaagaagaacgcaatattgtcaagtggggcaggcctttcctcacggacgatagtcgcctatccctcatcatggatccccgtataaaaggacgctttcctcccaaggctgctaggactgtggcagacatcatcctgaagtgccttcatagggatccatccgaaaggcctacgatgagggccgtcgtggagtctctagcaagcgtccaggacataaaggtcccctgcccgtatcctctttcagtaccgtccgnncgcacgaggaaagtgatgctaanatccacgagtctcaacggcattgntcctcagcatcctgtcatg

SEQ ID NO: 180697 - DNA, 546 bp, Zea mays
  Clone ID: MRT4577_96375C.1
aggaagatgccggagaagcacggggctggggcacgcgggacgcgggacctgaccgggcagccgttccggaagaaggggtacatgacagtgaccatgtacctgagcacctacaagatcggcgactacatcgacgacaacgttaacggcgccgtgcacaagggcatgccgaacaagttgtaccacaggcgctccgggagcgtctggaacggcaccaagcgcgccatcagcggcgagatcaacaagcagattaatgggcgcattatcaggaagcggatccatgtgcgggtgcagcatgtgcaggcctacgggcgcacggaggagttccggtagaagaaagccaagaatgaccagctcaaggaggatgccaaggcccgtggcgaggtgatcagcaacgagaggcagactgagagacccacacctggatccatggctgagggtgctacactcgagacagccactcctatagcttatgatgtggccaacgatctgaagggcggtcactagagcagatactagtacctacagcagttcatacgagctggcaaa

SEQ ID NO: 180698 - DNA, 886 bp, Zea mays
  unsure (1)..(886): unsure at all n locations
  Clone ID: MRT4577_96376C.1
ccggccgggcccgccggcagggggctgagctccccgcctcgtctcggcctggcctggttcgccctcgctccgacgcgtggtggacgcaaccagtgcgcgacgcccccggctcctggtccgttccgcagttccgcaccccgcttcgaccaaccaatcgccgccgcgtcgcgtcgcgtcgcctccttttttttccccgccctcccggacggcggcctcgttcgccagaagaaacccaggctgcagccgaaatcctcaagtctccgtcgtctgaccccacctcgacggcccagatccactcgccctcgccgccctcgtgcccctcagtccctcactccctcgcctcctcagcggcgaagacagctgcgaacggggccatttttaggcgggagcgcgggcggcggtgctagcagattggttggtttgagtggttgggccggctcttcgaaacgccccgccgcggcgatgggatgcttccattccacggccaagcggcagcatcctggctacgaggaccccgtggacctcgcctcccagacctccttcagtgttagtgaggttgaggctctattcgagctgttcaagagcataagtggttcagtgattgacgatggcctgatcaacaaggaagaattccagttagcattatttaagaatcagaggaaagaaaatcttttcgctaatcggatatttgaccttttcgatgtcaagaaaaggggtgccattgattttggactttgtccgagctctatcatcaaattgatttcgtcggcttctggggaacaatccccatgccattacggactgagattacgaactncgtggccagggttcagctaccatgacccccgatgcccttacatggggcgtacaacaatgaaatacctgt

SEQ ID NO: 180699 - DNA, 681 bp, Zea mays
  unsure (1)..(681): unsure at all n locations
  Clone ID: MRT4577_96377C.1
aattcggcacgaggcagccgaaatcctcaagtctccgtcgtctgaccccacctcgacggcccagatccactcgccctcgccgccctcgtgcccctcagtccctcactccctcgcctcctcagcggcgaagacagctgcgaacggggccatttttaggcgggagcgcgggcggcggtgctagcagattggttggtttgagtggttgggccggctcttcgaaacgccccgcggcggcgatgggatgcttccattccacggccaagcggcagcatcctggctacgaggaccccgtggacctcgcctcccagacctccttcagtgttagtgaggttgaggctctattcgagctgttcaagagcataagtggttcagtgattgacgatggcctgatcaacaaggaagaattccagttagcattatttaagaatcagaggaaagaaaatcttttcgctaatcgggtatgcatctgcttgacaaccatactcatttgaacttcatcactactatattgtgctttgagaactattgtcatcagttaaatttacatganactggcctcagatatttgaccttttcgatgtcaagaanaggggtgccattgattntggtgactntgtccgagctctaatgtgtttcatccaaatatcccaatggatgaaaaaattgatttctcgttcaagc

SEQ ID NO: 180700 - DNA, 351 bp, Zea mays
  Clone ID: MRT4577_96378C.1
gaatcccgttcgaggcacgcgtcacgcgtgcgagatggttcaaatggctgtccttgctcctactggagatatgactgctggcagaagaaccggtaaattgttgcttaatagctgtcacgaacaactagcacatcaaaggaaggatagagaaatggcaaccccacaacttgaattcagatagcaataaactaacgaggacatgttcgaaatgaggaagcacagacttgctgcactgggacaggatctttcgactaccgctactgatcaaccatttggctctactggcacatccacatttgtcgtcagagcattctcagagtatagaggggattgagaaaggctcttgatcct

SEQ ID NO: 180701 - DNA, 1156 bp, Zea mays
  Clone ID: MRT4577_96379C.1
ggggctgagctccccgcctcgtctcggcctggcctggttcgccctcgctccgacgcgtggtggacgcaaccagtgcgcgacgcccccggctcctggtccgttccgcagttccgcaccccgcttcgaccaaccaatcgccgccgcgtcgcgtcgcgtcgcctccttttttttccccgccctcccggacggcggcctcgttcgccagaagaaacccaggctgcagccgaaatcctcaagtctccgtcgtctgaccccacctcgacggcccagatccactcgccctcgccgccctcgtgcccctcagtccctcactccctcgcctcctcagcggcgaagacagctgcgaacggggccatttttaggcgggagcgcgggcggcggtgctagcagattggttggtttgagtggttgggctggctcttcgaaacgccccgcggcggcgatgggatgcttccattccacggccaagcggcagcatcctggctacgaggaccccgtggacctcgcctcccagacctccttcagtgttagtgaggttgaggctctattcgagctgttcaagagcataagtggttcagtgattgacgatggcctgatcaacaagggcttctgggaaacaatccccatgccattacagactgagattacgaactccgtggccagggtccagctaccatgaaccccgatgccctttacatgggcgtacaacaatgaaaaacctgtccaaaatactcataagttatctgtctagattggagtgagatgccatctcagattatgggcgtacaacaacaaaataccttctcaaaaataagctatggtatctggtgccattcatattgtggataagctaaatttgaactgcataattagaggaagtgtatggactatggagtgagatgccatctcagattattggcgtacaacaacaaaatacctgttaaaaaacaagctattgtatccggtgccattcatattgcggataagctaaatttgaactgcataattagaggaagtgtatttccgttccatatttatttcaaacatcatgttataaaaagtttttgaaatgtcatgcagaattaccactttatgccattgagaaatgaaattttgtggacataaaaaccaattagtgattaatctttgccatcat

SEQ ID NO: 180702 - DNA, 571 bp, Zea mays
  Clone ID: MRT4577_9637C.1
tttttttttatttttttttttttttttttttttttctttttttttttttttattttttttttaaaaacacccacaaccagccacaccaaggcatatggcatccgaacacaaaaaaatactaccttccaacagcttattaaaaggagggggaaaaaaaacataccatctattccacccatcccgggttctcgccagctaaaagaaaaaaacggaaaaagctccccaggggccaaacaaaaaataaaaaggttggtgaaattaaaaagaaataaaaagggccttttaggcaaacgaccccaaaagaaaattgaaaaaaactcgtgaagaggcccaggcgaaaaaaaaaaacaggctggtacagcgcccaccaaccaccatggccaccttcccaaggaaatttaaatcttgttgaaggacaaaatgccgcaccttgggacgtatacagacacgggctcagcccaaaaatgggccccggagagagtgagaacaaaaacaagggcaaacacaagggacatcatgagtggcaatttctggacgccaaatccaaccgggacaagcttggatgcccccc

SEQ ID NO: 180703 - DNA, 429 bp, Zea mays
  Clone ID: MRT4577_96380C.1
catgatccgctcgtcataccctggaggccccgatccctctttcattacaactcgcatctccggcgccgcgcctgcccagcccggcagcccccatggacctgccagcggtagatatcacgccgaatctaggggccacagccaggggcccggccgcgttaggcgttgaggaactgcccgcgctgtgctccacagtgagctctagtttgcgtgacacgggggcgctgcatggtgatggacccgcgctgctccggcgcagacaacgaccgattactcgacgtagagcagcgcttcttgttccgatcgcgcgacacagagcgcctacaggaactggcccacctccactaccagggtggtgtcacacctgtaggagtgggtgtgcctcgcagtctggtcgactagaacatgcaggaaacgatcaggagcatttct

SEQ ID NO: 180704 - DNA, 227 bp, Zea mays
  Clone ID: MRT4577_96381C.1
tagacacaaccacattttgcttttttagctaacagccaacatagaaacaaaacttctggctatttgactacatgacatctttgacatactcgtattcataatcaccttatttgcaaaaacctaactgaattatgtccttctaggagcaggtagttagtgtaaatccaacgattgataaaatgaatcattattaggaccatccaaaagtaaaactttactattttgga

SEQ ID NO: 180705 - DNA, 526 bp, Zea mays
  Clone ID: MRT4577_96382C.1
ggccgcgggttttttttttttttttttggcgtcaaactttcttatattaacactgccaatggcgaacgacacaaggcttaaagagtgccaaagtctgaagagccaccaggacaagcagaaagccacacaagatacaaggatagaacacaccttataagcttccttgttataaaacaaagccaagggtgctggggtacatactggcaagacgcgacaacagcatggaataccaccggacagggcctacgggcgcgcactaccaggctggattgcaggaacctgtggcggccgccgtgaccacatatcatcatcagatcgataagtctgaggctgctgacgagaacggagaccatgctcctgtggaatacgtgcttgctctacgttctggccaccactttcaacaacctctagaagtgcgcgaatagcacgcttgatggggtcctggcaggggggctcattggagatgttttccagaaacttacgcatagagtcctagtgcctttccgcggggaccggcttccaagca

SEQ ID NO: 180706 - DNA, 278 bp, Zea mays
  Clone ID: MRT4577_96383C.1
ctccattaaagtccacccaaaagtacccacccgggccggttccaactttgttttctacagcataccccaagtgacctaccatctgaacgtgctgagcactagaggccccacgcagacgcactgcttcatgctctccataccagacttccccgatgtacccggccggcacgatccccgtacagcccgatcagatcctgccccggtccctgctcgaggattaccaggaggaggacgactcatcgtctttccgccgcaccaacaccggcaccaccttcttc

SEQ ID NO: 180707 - DNA, 420 bp, Zea mays
  Clone ID: MRT4577_96384C.1
tctttcacgcgtccggttctagcgacagcgcgactgatcatacggtggtgtgccaaaatgcgtgccaccccttatgggacaccgtgggatagtcttagttcaatgagactggaagacctcactgacgcttacaagagcccacatataaacccctccgagattaccaattataatggtacgaatacgcttaaccacccatatcggaaggctgacacgtgattggatgattagttggctacgctctcaggccagagagttacggtgatcacgctagctgcctgataggatggctgcaaagtgtgcatattgcctgttcacacgcaaccggggactccatctttcttcactgggtaaactgcatgcactgaaactctaacacctttgctgacagcagaccatgctggcaccatgctggtacaa

SEQ ID NO: 180708 - DNA, 173 bp, Zea mays
  unsure (1)..(173): unsure at all n locations
  Clone ID: MRT4577_96385C.1
cagagcgagaacgagtacgtaagataggaattaagatagagagcanatacaacacaaggacaataaaaagagctagtagtggaaaagaagatgttagggaacataggaaagataaccatcataggagacatgaagggcagcaacaagaatgcgcaaataaagggcaacgtggt

SEQ ID NO: 180709 - DNA, 260 bp, Zea mays
  Clone ID: MRT4577_96386C.1
ctggcggggaaatgagggcaatattcccttggccctgaaaaggatgaacccgggcccccgaaaagggagaggaaatcctaaagggcccctgccttttttgcaaaaaaaaccccacggcttttgggcttttccttttttccctgggccccgaaccaaccaccttcaaggaaaaatcggccttttaactctggcccggaaattgggaggcccaggacaacaagacccaaaaggttgcggtcgtataacccactttttatatg

SEQ ID NO: 180710 - DNA, 356 bp, Zea mays
  Clone ID: MRT4577_96387C.1
tcggccctgacgatccatcaaccgggaacatctcttttagcttggatccggcctcctcaaaccttcagatgttcatttggaatgggaccttgccgtatttccgttcctctgttgttaatgatgtctccgtatccggcggcacgtaccaggccaacaatacctctgtcacataccaagggatattggtcgacacaggggatgagatctactacacgttcacagtcttagccggttcgccctacatgcacttctcacttcactacacaggcaagatgaggatcctggcctgggaaaatagcacatcatcctgggtggtcatttttgagggccctagtgttggatgtgatctctacgcc

SEQ ID NO: 180711 - DNA, 760 bp, Zea mays
  unsure (1)..(760): unsure at all n locations
  Clone ID: MRT4577_96388C.1
acttcttcttcctccccatttccgttgtccggcgagcacctatcttatcttgggagggcggtcgcgatgatgaccatggatctgattggaggatacgggagggcggacgagcaggtggccatccaggaggcggcggcggcggggctgtgcgggatggagcacctcatcctgcagctctcccggacaggcaccagcgagagctcgccggttgggtcgtcggaggcgccggagcagcaggtagactgccgggagatcactgatatgaccgtgtccaagttcaagaaggtgatttctatcctcaaccaccgcactggccacgccaggttccggcgcgggcctgtggtggcgcagtcccagggccccgccgtgtccgagccggcgccggtgagggcgtcttcgtcgaggtccatgaccttggacttcaccaaggcgtcttccgggtacggaaacgacgccgggttcagcgtctcggccgcgagctcatccttcatgtcgtcggtgaccggtgacgggagcgtgtccaacggacgcgggggcgggtcctcgctgatgctcccgccgccaccttcggncagctgcgggaaaccgccgctggcgtcctccgcggcatccaccggcgccggtgccgggcagaagcgcaagtgccactaccacgcgcactcagagaacggcgccggcggaaagtacggggcctccgggggccgctgccactgctccaagcgcaggaaaatccgggttcgccggatgactcccgtgccgg

SEQ ID NO: 180712 - DNA, 679 bp, Zea mays
  Clone ID: MRT4577_96389C.1
ccgggactcctcgaacccctcgcccctgtctgcgccgtgttcctcttcccaatggcctcctcctccgtcccaccggaaccctagcgccgcggcccagctcgctcggctcctgtccagatcccacgccgcgccacaccacatggcggcggacgcggcgcagcagggcctcgggcgtccaccggaggcgcggcggggccgccccgcgcgcctggtgctgctccttcgccggcgtgcccgacagccccgacctccgcccgatcccctcctcggcagcgtccccggcggcggcgtcgaggaagctgccgcccaagtccccgccggcggcgtccttctacggctcgcccacctcgtccaggctcgcgggcctcggcggcctgatcgacccgcagccgcatcctctcgcccggccgcgtctcccccatcgaccccgacggcgaccagtcggctctataagggcaaggcgaaggcgcgggctcctgcggagaacgtcctgctggaggtcctcaagaccaaggagatggatctcgcctaccttgctttcatcatcaagaacgccctggtctcagtggcacgtctacctgacgaccttcagaggcaggccaccaaggtacgccgaggtcattgcgggcctcaatgcgaagcgctgactcacgatcccactggtgctgctatggtctac

SEQ ID NO: 180713 - DNA, 393 bp, Zea mays
  Clone ID: MRT4577_9638C.1
cacagagctagctagccagccagccattagccagcttgctcgccgcgcccgtccggcttgctcgcctccgttccattccgtcccgccctccaccgccgccgccgcattcagggatggagatgaagaagatcgcctgcgccgtcctcgtcgccgcctcggcggccaccgtggcgctcgccgcggaggctccggctccggcccccaccagcggctcctccgtcgacgtgcccgccgtagggaccgcctgcaggcctgtgctcacgtgctaatgaaataccactatttgcgtgagcggctgaatgattttccatgtcatacataaactgctctaacaaagatagcatggcccgtcataatgacgttgctcttgctgagaatgagaaagaaatttct

SEQ ID NO: 180714 - DNA, 834 bp, Zea mays
  unsure (1)..(834): unsure at all n locations
  Clone ID: MRT4577_96390C.1
cctcgaggccggccgggagatccccctcctaacgtcgccatctccatccgtcatccgccctccgcgccagcgccatcacgattccgcaggagacacctatcgtcccagtgaccgacgcgaccgctcccctcgtcgccgttctcgctccccgcgacgctcccgacgctcctactcacctcgcagccgctctcgcagccgagacgactaccgtcgcactgaacgccgctcgcgctcccccaacagtggtgctcaaggtgcgggaagctaccagtcgtacggtgccagcagaggcggctcatcgcgacccactgagaacaagggcgagatgatgcagaacattagggactcttcgcaacaagaccgtcgcgtctacgtcggcaatctctcgtacgatgtcaagtggcatcacctaaaggatttcatgcgccaagctggagaggtcccctttgcagatgtcttgctactaccgaacggaatgtcaaagggctgtggcatcgtggaatatgcaactcgggagcaggcgcagaacgctgttgcaacgctcagcaaccagaacctcatgggacgcctcgtatacgttcgcgaagaccgagaggccgagcctcgattcagtgcccccnggcggtcgtggtgactttggcggcggaatgggtcgcggcggcggctacggtggcttcggtggtaataacgctgctgctggaggtcaaccggagcacgacaggtctatgtctccaaccttccctacaacgttggctggcaggacctgaaagacctcttccgccaggctggcaacaatggtcaagtccttcgcgctgacgttcacattgcacctga

SEQ ID NO: 180715 - DNA, 2123 bp, Zea mays
  Clone ID: MRT4577_96391C.1
cattgggtacctcgaggccggccgggatagctttcactggactgcaaggctgcttgctgccactcctcgaacccgtcgcccctgtctgcgccgtgttcctcttcccaatggcctcctcctcctccgtcccaccggaaccctagcgccgcggcccaccactaccagctcgctcggctcgtgtccagatcccacgccgcgccacaccacatggcggcggacgcggcgcagcagggcccgggcgtccaccggaggcgcggcggggccgccccgcgcgcctggtgctgctccttcgccggcgtgcccgacagccccgacctccgcccgatcccctcctcggcagcgtcccctgcggcggcgtcgaggtagctgccgcccaagtccccgtcggcggcgtccttctacggctcgcccacctcgtccaggctcgcgggcctcggcggcctcatcgacccgcgccgcatcctctcgcccggccgcgtctcccccatcgaccccgacggcgccgtcccgctccctcctcctacgccgccgccgccgccgccgcccgctgagtatccggcagctgtgggcaccgcggagcagccggcgccggtgctggcgtcggcattgccctcggcagcggtggcgccgcaggtggtgtccgtgcgggaggaagcggacgcgcacgcggctggcgtgctggatctgaagctcttcctgcgggggagggacgggaggtgcgtcctcatggagctcgactccacggtgttgtgcggctgcagcgacttcttcgccgccatggccccgcacgaggacgctgctgccactgctgctggtgccggcgctgccgggaagacgatcgaggtggacggggtcgataatttggatgctttcagggctgcagtggaactcatgtacgactctgatccaatgcggggtcttgcagctgccggtgtgtcaagggctatagatgtgcttgaggtatgctcctctatcatgttcagcaagggaatcaaaacatgtttgacatacatagaagctgttccctggaatgagaacgaggaggagaagctgaagaatctctttgcaagattcacttttgacgaagcaatatcccaggatatactggcaagactgcgaccacacaactggaaaagctcagatgacctcgctgtacagcttattcaatctgtcactaacagcaccagcactatggcaagaaaagacatgcaatctttggtgaatggtcttctaagcaaaagttcagtctatcaaaaggactcgtcaggattaaacaaggagagcctgtatcagatctgttattcatgtctagagtcactggttgacctctttgaagaggccatagaaccaacatattacacaggtcaggctgtggtagttagagggagcaaaccactgatcgagcgaatctctacgcaaacagagaacctcaattggctattggatattctagtaaacattgacattgcagaagaatttgtagaactgtgggcgaagcaaggcaggctcattaggatgcacgagcaagcatcagcgatcgtcaggtatgagctaagtcgaatatcagctggtgtgttcattgcacttggtaaaggaaaagtgcagtgtcgtggtgacgtacgaagcctcctctttcatggatggttcagcacaatgttgttggattttggctggcttcagcgctgccccaaaggtctcgacctaagatcgttggaggagaatttagggcgaggccttttaaccctccctctcaggcagcagcaatgtttgttcgaggaatggttccagttctatgcgaccaaaggacccgagtgtccgaaccttattagagctttccaggtatggtggagaaggtctttcattagatcattggtagaacctcaaaactaagtttttccttgatgtactagtatgttgcgtgtatgatttgtaaaattgcaactgttctgatgacccttaaaaatgttttttcgtttgtagtttagttcttcccattgtatgtgaatagctggatgaatttgcttgaggataacatctgcggcgtggagtatgtaataacccaacccagtcatatgtcgactttgtctttttgtagcatataaaaaaaaaaaaaaaaagcggcc

SEQ ID NO: 180716 - DNA, 456 bp, Zea mays
  unsure (1)..(456): unsure at all n locations
  Clone ID: MRT4577_96392C.1
cccaagcctccgaccagactagcccgcgcccgccgatccccacctcgccgacccgcgccgacaccccgacgccaaggcagccgagacccgttgaggagcagcagccagctgccggacacgcggatggtcggcgcggacgcgaccgtgctgngtacaagggcagcgaaggcggggggaccgcgnncgaggaccaggcgcccaccaagcgcgacccaaccgccaacgggctcaaggccgaaaccacacgcgacgagcgcccgcgcggccccaccaacaggacnccgaaggggngcaaaaggangccagcaccggcgaagaagacagaaaanaggccagcaccgaggggcgcgaaggacccgaacgaagcagcanccgaaagaaagcgacgaaacgngccaagcggcaaggagggggcncgcagccnggaagcagcacacgaacacgccaaggaaaagc

SEQ ID NO: 180717 - DNA, 805 bp, Zea mays
  Clone ID: MRT4577_96393C.1
ggcctgccgggaaaaaaaacaaaagggtaccggaagcggcgaaagcctcgccccccgccgctctcgcatcgtctccggagcgcacgtcagatcaggtgcgccgcgcccccctcgcctaagctgcgacgaccatccatcgaacaggaaggatgacgggctccatggatctcccggccaagggcgggttcagcttcgacctgtgccgccggaaccgggaccctcgccacaccgcccccgcaccacggaccctagtcacctctccgccgcccactccatggaggacgacgccatctcgacgctcatggacatcgacgactcgccgctcagcgctgcgggggccgggttcctcgacgaggaggacggggaaggcgagatgttcttcgcccctccccttttccgggttcttcaacagcttcgacggcgccgattttgacgacgacgacctcgcctgagggaactcccacccggttcggtaacggatgttgttcgtggatcgcgaatcgtgttatgtcgataccgtgatggggtctagcagtggtaacaacgcagagtacgcgggtgggcaatctgaagatgtttagggatcaacattacctttgtgtacctttgtggcctatggttcgtggatgcacagggatcaatataagtacctttgtgccccatggttcgtggatcactgtgcatgtgttcttccgcgtctttgttgttattttggctccatctgtatgatctaatgaaccttcctttgttagcaaaaaaaaaaaaaaaaaaaaaaaaaaaagtactctgcgttgttaccactgct

SEQ ID NO: 180718 - DNA, 210 bp, Zea mays
  Clone ID: MRT4577_96394C.1
ttctctagacctttatatctatcaagaccatgatggaaggggggggtataaacatattatgagagccaacaaaaacgacattaatacaaaccataccactattaacatctttcagaatcaatacatcatcatatagatctctattcagatgaccatacatctggtcctgacttgcatcatacattgagacactttcaatataatatgatc

SEQ ID NO: 180719 - DNA, 802 bp, Zea mays
  Clone ID: MRT4577_96395C.1
actcctatgggcgattgggatcctcgaggccggccgggaccctcgccaccaaccgcccccgcaccacggccagaaccctagtcacttccccgccgcccactccatggaggacgacgccatctcgacgctcatggacatcgacgactcgccgctcagcgctgcgggggccgggttcctcgacgaggaggacggggaaggcgagatgttcttcgccccgcaccgcgcggcccgcggcggcgctggcgatgcccgcgggcccctccccttttccgggttcttcaacagcttcgacggcgccgatttcgacgacgacgacctcgcctgagggaactgccgcccggttcggtaacggatgttgttcgtggatcgcgaatcgtgttatgtcgataccgtgatggggtctcttaattagcgcatcgattcagactcgtttgggcaatctgaagatgtttagggatcaacattacctttgtggcctatggttcgtggatgcacatgcacagggatcaatataagtacctttgtgccccatggttcgtggatcactgtgcatgtgttcttccgcgtctttgttgttattttggctccatctgtatgatctaatgaaccttcctttgttatcaaaaaaaaaaaaaaactcgatgacttgttataggttgttaaatgcctatatctgtttgtcaaaaaaaaaaaaaaaaaaaaaaaaacggccgccaccgcggtggatctaatgaaccttcctttgttagcaaaaaaaaaaaaaaaaaaaaaaaaaaaagtactctgcgttgttaccactgct

SEQ ID NO: 180720 - DNA, 1731 bp, Zea mays
  Clone ID: MRT4577_96396C.1
aggccggccgggtggagttctatagcgtcagcaacttcttttccttccgattcgaccttgaagaaagcggagctgtccgggtgccttcgcagggcgcctgctacttgccagtactgtcgtctgaccttacccggcgggaaaaaataaccccagaccgcccaacaccatctccaccctcgccaccaaccgcccccgcaccacggccagaaccctagtcacttctccgccgcccactccatggaggacgacgccatctcgacgctcatggacatcgacgactcgccgctcagcgctgcgggggccgggttcctcgacgaggaggacggggaaggcgagatgttcttcgccccgcaccgcgcggcccgcggcggcgctggcgatgcccgcgggcccctccccttttccgggttcttcaacagcttcgacggcgccgattttgacgacgacgacctcgcctgagggaactcccacccggttcggtaacggatgttgttcgtggatcgcgaatcgtgttatgtcgataccgtgatggggtctcttaattagcgcatcgattcagactcgtttgggcaatctgaagatgtttagggatcaacattacctttgtgtacctttgtggcctatggttcgtggatgcacagggatcaatataagtacctttgtgccccatggttcgtggatcactgtgcatgtgttcttccgcgtctttgttgttattttggctccatctgtatgatttaacaaaggaaggttcattagatgggccacatttacacactgtttatccacacgggtccactgatactcttccttttgccaccatgggctctggttctcttgctgcaatgtcagtgtttgaatcgaagtacaaagaaggccttactagggaggagggaatacagattgtgtgcgaagcaatctgtgctggtattttcaatgacttgggtagtgggagcaacgtggacgtctgcgtgataaccaaggggaagacagaatacttgagaaaccaccagttgccgaatcccaggacttatgctagttcaaagggatacagtttcaccaaggggcagactgaggtactgtcttcaaaggtcacacttctaaagcagaaggttgaggtcgccgagggtggtgatgctatggaggagtgatcttgcatcctgcattcatacaagcatattctgaatctgtgtaactttgcttagtggatcagctagaacaagaaaaaagaaaatttggagatctttgctgtactcgctggaccaaagccagggttcttatgctaaatgtgtttctaatgtttggcacattttaaattgcttgttgtttccgaatgtttaaaaccggtgaaggtatggtatttgcttggagatgttgttgtccgcaaagttccacacatctcaagcagaaggttgaggtcactgatggcggtgatgctatggaggagtgatcctgtatgcttgcattcaggttaggagaagttcctccttattgatgttgaatggagcacatgcaacggttcgtggtatttgtacggtcgatctaaatcttactttgggaaagaccatgcaactaaaaaacatgtagcatatcccctcaataaggaaaaacttagttagttatttgttcctgtatcaagatggttataaagttatgtttaagcctaataaatttatgttatggatgaaacttttattggtaaagaatatgagagcaaaggcttgttctgct

SEQ ID NO: 180721 - DNA, 400 bp, Zea mays
  Clone ID: MRT4577_96397C.1
atcgcccaagagcgcttcacctggaataaacactaggttagtgtttgttagacgtcgatcacttgacgaccatcctttgtcccgatacttgcatcgtctgtccatctccagttccgttcatcagcaccatcttatggtcgactcagttctggttctccgcatcgcgtggttaattcacgtaccgtttccacagctgacacgaatccgcgagatcggtagcgattttccgatccaggcaatttgtcgagcgcttggggaatatcgcgctgctaactccgtcttcacccgattcttgcttggggaatatcgcgctgctaactccgtctttacccgatttttgggatttcttgacgacacgcggaacgacgacgagatcgtgtccaagtgaattttatggcgc

SEQ ID NO: 180722 - DNA, 305 bp, Zea mays
  Clone ID: MRT4577_96398C.1
ggaaaaaaaaacccgggggggccccagttttttcaagggcccacattgccctccctcccttagggccttagcccttttccccctgggggccaggggctgtttccccggaaccccggagggctggaaaaagggatccccttgaagccccttcagaagagaatagctcaaaatggccctttgccccaatccctcagtgggattggccccccaaaattttcatacggggctttttgccggcgggggaacccccccctcaaaaaaatccccaaggtaaggggggggctcaccccccaccttggaaattt

SEQ ID NO: 180723 - DNA, 124 bp, Zea mays
  Clone ID: MRT4577_96399C.1
acgcggggcaggggtgcttcataggtacaagtgagggacaagaaatccaaacctaggcgttctttcttggtggcgacagcagcaggagatgcctcgctgagatccacccgtagcgcctggtact

SEQ ID NO: 180724 - DNA, 226 bp, Zea mays
  Clone ID: MRT4577_9639C.1
gaaaacccggcccgacccacgcgttcggtcccattaaggaggtcgagaccctatatttaaacttaacctaccttagcggtgggagcgagaactatagctgcgcgttaactctcaaacttaaccatgccataaagcaagacacagaggctgaattccttatggaccgtcgcgccaagatgtcgtatatctaggtgcacttgcgctacaactagctaaccagcgatgg

SEQ ID NO: 180725 - DNA, 216 bp, Zea mays
  Clone ID: MRT4577_963C.1
attctctgttgtcacagtgtctgaataattgaggcgtgggacttcaaaggtggtccgggtcttggagatgggtatgtttgaagcttgcttggaggtctgaaactttgtgcttggtcactcaagaatcaagatgctgagttattgcattctgaacctgtaatttggtgccagcattcagttgttgcagttgacgcatggcttgtattttaaggtagc

SEQ ID NO: 180726 - DNA, 273 bp, Zea mays
  Clone ID: MRT4577_96400C.1
acccacacactctcatacgcacaatctacacgactcaactgaacagatccatcgactccacaccgacgccactgttacttgggacgctactactactactcccctcctcgctcctcctcctgctacgctcgcgaggcaagcgcacggctacccccatacccatcgaaactgccgatgctcatcaccacgacatgactcaccaactcacccgcccaaatcgaacccctgctgacacgcctatctaagcgttacagtcccatcacggctctccgc

SEQ ID NO: 180727 - DNA, 864 bp, Zea mays
  unsure (1)..(864): unsure at all n locations
  Clone ID: MRT4577_96401C.1
gccggccgggtcgggaaacaccccctcatgtcgcggtagcccattcacgcccgtttggaatgtccacgcacctcctccgccatgacggaaacacgccgaatatcatgacaatgactgccgcgcaaccctcccgcgcaacctccatcatctccagccatgaagccgctccgccatcctcgagggacgagcagacgaatatgaataacaaggaaaagaagaagacggacaagaagagcaccgagtatgtcatcaagagcgggctggcgggtggtttcgctggatgtgcggccaagacggtcgtaggccctctcgaccgcgtcaagatcctgttccagacgcgcaacccccagtttgctaatacacaggctcctgggccggattccccgaggccatgcgcgacatctacgccaccgccggactgcgaggtctgttcaagggccactcggccacccttctgcgcatcttcccctatgcaggtgtcaaattcctcgcctacgaacagatacgcgcccgtgtcattaagaacaaggcacaggagacgcctgtccgtcgctttgtctcgggcagcttagccggcatgatgagtgtttttttgacatacccgcttgaagtcatccgcgtgcgcctggcctttgagaccgacgaaaatgcacgaagtagtctggccaccattgtccgcaaaatctactcggagcaggccccccgcgtccaccggccggaaaacccaatcaccgcaactgcgacgcatctcgtcgataccgtcaccccacgctccggtctcccaaacttcttccgtggcttcacccccactctgctcggcatgataccctatgccgggcgctcgnttctcgnccatgacctcat

SEQ ID NO: 180728 - DNA, 260 bp, Zea mays
  Clone ID: MRT4577_96402C.1
gccttgggtcaaaccctaagcagggagttgatttatccgctgagccatgagtaagttggagtctgagtctgtcaaggatgccatcttccatattgttggggatgccaaggagaagaataggaagttcactgagactgtggaacttcagattggtctgaagaatttatgatccacagaaggacatgcgtttcagtggctctgttaagtttgccccatattcattcggaccaagaagaatgtgtgcatgcttgttgatgccc

SEQ ID NO: 180729 - DNA, 426 bp, Zea mays
  Clone ID: MRT4577_96403C.1
aggacggcaacttaattgactggtagccctggagaataatatgaaattctgcctgtttgccaactacaaatacctggtttgtcaacagaaactaatattaagaatacacggtgtcacttgccactctttaagctcctggtgctgagactaaaggcatgtttggttcgcggctaactgtgtcacactttgactaaggttagtcgtccgaattgaagaactaaccttagtcagaaaagttaggcaaagtgtggcaagttaggtagtaaaccaaacaggccctaattgtagtacacaataccagccagggggttactgcagaaatagcaaaatatgcgataaaggaagctggggcacaactccctcctttcataggagtcggcttgataggttcctatgcacgaagtccaggttcgtcaggtgtaattt

SEQ ID NO: 180730 - DNA, 352 bp, Zea mays
  Clone ID: MRT4577_96404C.1
cgcacccggttccacatgcctttccccacctattctcgcagatctcgccagccagtctagggtttccgtcccgagatgcttatccgccctgcgccggtcatgtcgaatcaaggacggaacgccatgccgctgaatgcgcccaaagccgacacgcaagagtaccacgacacagatgttgcatatctgcataataagaatgatgaggaaaaagcactgaaggagcttaatgcccatgcacagagaggcgcaattgagggctccggtctgacgatgcgtggtctgaaatgagactggtcacacgtctccaatacctaaaggatgagaatgcatctgtctatctgtgttgcgcttc

SEQ ID NO: 180731 - DNA, 472 bp, Zea mays
  Clone ID: MRT4577_96405C.1
tttttttttttagataaatgtgctgccatatataaataaaaatggacacttttatttcagttcatacaggacacacaaatagatgtgagtgcaaactcagaaaatgaacactttcatttcaattcacatcatattttcctttcagttcaccctcgacttcacccttgaatgtcaccaaataattcagctcacatcatattttcactatcaccaaataatttcagctccatctttggcaaggccttctctcgggttatctttccttgattagataattggctagtgtcttgctgcagcagcgagctatatacttcaagcaattttacctccttctgctcctgtgcagctttgagtcgtaaccttgagatttctagtggagtttcagccacctttttacgctcttgcttacggtcatgttgcacttcaataattttgtttatgctatcaccaaggcgagcaataccatccaaaa

SEQ ID NO: 180732 - DNA, 332 bp, Zea mays
  unsure (1)..(332): unsure at all n locations
  Clone ID: MRT4577_96406C.1
cgaacgcgtggttcctccctctttggatacattcttttatcccattgggctaactacactgggtggtggcctaccactatatcagaagatacaaaatcttttcacgatactcaacactccttcattgacaactattcactcttttaagccaaagaactatcgcaccatcgcaatgatgttctccaagacttctgtccttctctaactgccctacaggccactctcgcagttgctggcaacgccatcgtcagcacccgttgctcttacgatatcntggtttggtctgtggaccagtcgcacacctcgggagcaattcgtgtgcctgcttcgtc

SEQ ID NO: 180733 - DNA, 116 bp, Zea mays
  Clone ID: MRT4577_96407C.1
ggtcggcttacatcacaccctccttacatgtaccggcgacttttcatcggcgcggcaacaccttgccactgcccttacttatccattatgcggctaaattctcttaccaccatgcc

SEQ ID NO: 180734 - DNA, 286 bp, Zea mays
  Clone ID: MRT4577_96408C.1
gcattatgaaggctacatctgtgctttgtaagtaccacttcaaaaaatcgttctgtttacttactacataatatttcagtgtctgtcatacattaaaaatacttgtcactgttttaagatcttgactcttcatttgtttcagaataactcttcttctgtattctgtcaactctttgctttatagcattttgttgtattcaaatgataatggtagcatttccatgcttgtgacagcatttttaagttattaatatattttatcaacctttccatcatgtctgttttc

SEQ ID NO: 180735 - DNA, 429 bp, Zea mays
  unsure (1)..(429): unsure at all n locations
  Clone ID: MRT4577_96409C.1
gcgggcgtgcgcggaatgcccgtggaaggaggggagagagggggggcgcatgcgcangcgcatctgagctgagctaagctgagcccgcgagggtcgcggtctgcggtgcggcggcggaggtctctccagcgcgatggccagcggcggctcctcctcagggtacagctcgtacaaggcgccggggctgcgcggcgcgctgctggaggcggcgcacttgtcgtgcctcgaggaccggtacccgctgngcccacatctggggtggggccatttcggcgtgatccgggcctgctccgacctggtcaccggagaggcgctngcctgcaagtacatcgacaagggcgcggctcgtgtccccccaccacgtgcgcgnggtcaggctggagatccacgttatggggcgcctggggggcccccccaacggcggggggc

SEQ ID NO: 180736 - DNA, 389 bp, Zea mays
  Clone ID: MRT4577_9640C.1
cttcattcgctccaccagttgttgggtttctagccgagcatgtctatggctattggagatgcttctgaataattgcagagagcctgtccataggcaggtcattgataatggccttcttccaatacttgtgaagatagtgaagaaaaagacggatttaccggttcgagaaaaattatttcttctattagatgcaacacaaacatcccttggtggagctaaagcaagattaaaggctgctggtggtagagctaatggagatggaacaaggaagacaaggacacgggaccgacctagggctgttccagctccagaggcaaacgccgaactgcaagcaaatattgataaaagaaggttaataacttatgcaaatgcgaagagcaagagtgaaa

SEQ ID NO: 180737 - DNA, 266 bp, Zea mays
  Clone ID: MRT4577_96410C.1
gttacgtggtcttttttttgttcacattttttctgtcggaccaacgaaggggctgccaaatgacttcggcagcctgcaaatggttttaaagcccccaggacattctagctgaaatgaatccaaatttttgccctgcctgggggaaagggggagcacaacctaactgacacatttttgggggggaaaacaacaaaaattgatttcctttggggtgcaaacctgaaccaaaccccggcataactgggcctcctactacagtgcaaaaa

SEQ ID NO: 180738 - DNA, 380 bp, Zea mays
  Clone ID: MRT4577_96411C.1
agcaactataatcaatctggcctgctcacctttagtacagcatagctacatacatccaggcctggtgctcagcctcataagaaataattgatggctgacactgggcgggggaggaaactgatggctgacacatccagctccaataaagaaaaatctaaaacacacaataagactctgcagggagaaagtggataacgtttaacatagagtcaaggtttcctacactataataccatgacaagcacatttgtcccaaagctgtcctgatctaaacacacaactaacagcatggagaagctgagggatccatgaaagacaaatcacttcttttttggaaggtggctgtcttcctcatcgtcgcatcctcttcatcttcatct

SEQ ID NO: 180739 - DNA, 1230 bp, Zea mays
  Clone ID: MRT4577_96412C.1
gtacctcgaggccggcccggttttctgctgaagaggtggacttcgttgttgttgatgcccaaaacttgatggagctaaacaaagcaaagaaaggtcctcctcttgggagttcattaaaactctatctccaggtaacacatcaaacccaaaggttctgctaacacatattccactataccgacctgataactctccttgtggcccgcatcgttcttcacctgttataaatcagagggtatcttatgccgccttagaccaaggaatcacctaccaaaattatctaactaaagagacttctgaccttttgctaagcttgttgaagccgatccttgtgctctcaggccatgatcatgaccaatgcacagttgtccactccactccttttgggccagttacagagcataccctggggacaataagttggcagcaaggaaatctctatccatcttttatgctgctatctgctggacccaagttatcacaaaattcaactgatctggaacatgaggttgcaatgaacctttgctttttgcctaaacaaacccatatttatatctggtatatctgccagtttgtagtgaccatccttctcctagtcttttggccaacaaatggtctcggttctcttccttgcatgaacacattcatgagcttcatgaggtcggtgggcgccgaactgctttcaaggaccaaggaaaaagatgacgaggacgatggtgattatgatatggtttttgatgcggaaggatccatgcacctcgttaaaaaggcagtggcaaagaccccaagtgctagctcagactccagacctactggacgcggaagtgttgttgcaagggcaacagcaggaagacaccgattggagcctgattcatcgattcgtgtcgacatgggttctgagatgacatcagaagatgggggaaagttggcccgcgctggcaaatcgggagcaaggaaggtgctccaacggctgttccgtgtcattcagtctgttcttgtcattgccgctctgaatgcccccttgtacatgatgcttctcttcaaggattggattgatcgttgaagtatgtgagaatctattgtttttcagtaactcagtagattgatatatcaatatgaacgactgcacatgcaaaaaataaagttcgtttttgccgaggcatcaaaaaatatatataaaaaaaaaaaaaaaaacaaaaaaaaaagaaaaaaaaaaaaaaaaacaataaa

SEQ ID NO: 180740 - DNA, 318 bp, Zea mays
  Clone ID: MRT4577_96413C.1
aggaacgcaggcacttcagcagagttcgacatagtcagttggttgaatggaagcagctgttgcaagtatgcatcatggtttgccacagctagttgagtcagagctggtacagcttttttttttttttttttttttttttttttttagcaaagacctgcttgaactatttataattaattgaattttatatggggaaaggatgtttttgataacactgccacccatggtgatgggtgaaaatctgttcctctttgactctaatagagggaactaactttggtgagttcttgaaagagttgcttacattaatacaacaga

SEQ ID NO: 180741 - DNA, 291 bp, Zea mays
  Clone ID: MRT4577_96414C.1
ccaccttcttcgtcgcttgtcgccttgccaattggcaccggcggatgccaatatgccgtcgcatatcccgtttctttctacacaaaccctacccactcctggtatgggcaccaggcggtggaggtgtctggccagtgtctctctttgcaaacgcggcctttcgtcaagagagcggcagcagctagcgacggcgggttcaaaaagtgctcctcccatttggatctgatacgagacatcgaggggtctctccctttgtacactgcacaccacggtttacaaaaccattttagc

SEQ ID NO: 180742 - DNA, 813 bp, Zea mays
  Clone ID: MRT4577_96415C.1
cattgggtacctattggtcggcccggggatgccacatcagatacccacactccaacatcaacacttgattcaattctccctcgactcaaccgtcaacgacacaaacaccctcatacaccatcaagatgcgtttctcctacattgccactgctctcttcgccgctggtgctgccaacgcccagattgacagcgtcatcgcctccctcacctctgctgccggcagccttccctccaacgtcgcctccgatgttgagagccttgccagccgtatcacctctggcgctgctggccttccctctggcgctgcctctgctgcctccagcattggttcccaaatcacctctggcgctgccggccttccctctgacgctgcctctgctgcctccagcatccgctcaagtgccgacgctgctgcctcatctatccgctccgaggctgagtctgctttgagttccgccacagcatctctgggctctgctgcttcttctgccacctcatctgctggttcccagtcgaccggtgctgccaaccagaacgctctccccgccatgggtgccgctgccgctggtatcttcgccattgctggtctcctataagtgcccctagatgggttctaagtcttcttgtcgacaaatcatcttcatcagcatcatatttccctccggtagcttcttccatcggctagcgatgcctcagccaagagctgacatcgctttgtctcaacaaacgaggcattagggataagaatgggttcatggcgaaactggggtataaccagacggtctatattataatattaagtcatttcaatgg

SEQ ID NO: 180743 - DNA, 886 bp, Zea mays
  Clone ID: MRT4577_96416C.1
tcgaggccggcccggccgggacctctcctccttcggatcgtcgctccactccagtccaagtcccagcccgccaggaggccggagcatcgcgcctgcaccgcacgcccacaggcccacagcaagcaccaaacaagccagcacgatggcgctcctggtgttgcgcgcgcctgcagccgtccacgaggcctcccggctgctccctccgccgccgcggtggcggcggcggctcgtggccgtcgcctcagcggcgtcctccgcgccgtccggcgaggtgtcgtcccagcacggcggcggctacgggatcgtgggcggttgttatcgtttccgccatgggtgtcctccgccctgacctgatcgtcaagaatattattcccgtcgtcatggctggtatcattggtatctacggtctcgtcgtgtccgtgcttatctccaacggcttgagccagcactcttcgctgttcaccaacttcattcaactcggcgctggtctttccgtcggtctgtcgggtatggcggctggtttcgccatcggtattgtcggtgacgctggtgtacgaggaactgcccagcagcccaggttgttcgtcggaatgatcctgattcttattttcgctgaagtcttgggtctttacggactcatcgttgccctgctcatgaactccaaggctggtggtgccgatgagtgctagacgatcacatagcctacgattgcagacgcgatacgacaacatttatctgcaagagacaagtattggcattgattcatcgagtgcgacgatatgttctgtgtgcatagcgcgcacaactgacatgtgcggcatgttgtaagtgtgctatatgtatctctttggaagacggacaaagactgcttctacgacagggagcg

SEQ ID NO: 180744 - DNA, 384 bp, Zea mays
  Clone ID: MRT4577_96417C.1
attcggctcgagggccagcttgccgttttttttttaaatgatgggagccccactcggccctgggcttagccacccacagacactagcatgcctgcacagcgctcactggatgaacctgtccctgcatggtgcgacaccactaacttttggagggcctataccgagaagtgcacatcaaccgacggtggctgctggctgcggaacacgcaagccctgtactataaaccaaaggtgtccgtgactgaaaatgcaccagaagtagaactccagcttaaagaacttcacagatcagaacggctagagcacacacactatggagggcacccaaagtggcttgatcttacaagcacctggagagtgtaagttggacccatacaacagatc

SEQ ID NO: 180745 - DNA, 729 bp, Zea mays
  Clone ID: MRT4577_96418C.1
actacgtgatacaccatctcacgacagcgattcaaagaaacacgttaagagccgaacccttgtgctctccaaacgcgtaccagttcatcgtcagcatccaccagccataaataatctggtagcacagcagcaccagcacaggcgatggcggagttctcgtggctcacggcgctagggttcgccttcctgaccttcaactccggcatggccgtgtaccgctccaacggcgacgcggggtccgtcgtcttcgtcgccgtctcctacctcgacctcgtcgccctcttcgcctgcctgcgcctctacgagcgcctcgaccgccactccccccgccgggagcggctcaaggccgccgtctgggcgctcaccacgctgctcaccgtcatgttcacctacaaggtcgccgaggtcatgccgctcgccgtcaagctcctcgtctgggcgatggccgccgccaccacctgcggcggcttctacgtcttcttcgtccacgacgacaagccgtaccagcagctgcaggacgcgtcggccgccgccgagcgcggggacgtcgccaactagtggctatattagacggcggctgggcgctggctgccgcgaggtacgtgcttcggtgctaacagcggcgtcgggcgttagatctgggggcaaactattaggtcgttcctgtatcttggctgtttttcttcccttttttttgccggcttgatgtcacatggtctgctttggctt

SEQ ID NO: 180746 - DNA, 278 bp, Zea mays
  Clone ID: MRT4577_96419C.1
gtgtttttgcacataatccatatttgctgttcaagttaatctagaaatttattcaattctgtatgaacacctggaagcaaaatcatagtgcaaaaatacatttaaggtgtggtcaaaaataagtctttaattggtaaataataagcattaattttttatagcctgtattcacaattctgcggtaccttattgtacctaagggattctaaaggtgttgtcactgtataaaacagaaagcacaaggctacatatgaagcttaattactaaagtgtaattc

SEQ ID NO: 180747 - DNA, 295 bp, Zea mays
  Clone ID: MRT4577_9641C.1
cctacgcacacgagaacatgcctgtgagtgctttggtccaggtttcggcggagatctcgctgttctgtccgaactctcccctcacgctgatttcggatcgtagagggtcctcatttaccctctgcacttcttaggacattaactccagggaccgcagcggcccacgggccacccgcacagacgggagcggagaggagataagatggcggcccagctgcgcagacaccaggggcggcgaggggcgagctctacccgctcgcaaaggatctccttcatcctctccagaagaggagaa

SEQ ID NO: 180748 - DNA, 264 bp, Zea mays
  Clone ID: MRT4577_96420C.1
aaaaaaaaccaaaaagttgaacttttttccaagattttttgggccttccaaaccccccggttgtgggcttcccttctttaaaatcaggggccggaaattttcttttccccttaaccccacgggggggtttaacccgcctggaatttgtgattgccattgggcctgacaattgttaaagctaaatataactgttttgtggcccaacttcttttgtcagctcctttattttgggcattaaaggggttaactaggttaccttttttt

SEQ ID NO: 180749 - DNA, 387 bp, Zea mays
  Clone ID: MRT4577_96421C.1
gtgacacctgttggtagaaagaacctttaaagatacggaacgtgtcattcatggtcaaagcggtacctgtgctggataacatgttgcatgagtatcggcgcaacttataacacattgtcaaatgggactatgggagtccaaaacatattacatttaaccaattggacgaactgaaaccacgatgattatttgcagcagaaaatactactaaccatttagccagctagctgcaagcaaaccgagcttaaattgggacaccagttcaaggtgccgaatttatactagcagtgagcggataaccaagcatccctattacgactacaacaatgagtgcacgtacgtgcaacttgcaatgacagacccagcaaacccctaccatcaacacat

SEQ ID NO: 180750 - DNA, 325 bp, Zea mays
  Clone ID: MRT4577_96422C.1
acgaaaccacatgtgttcaagagcccgaattccaacacgtatgtcatattccactaagctgagagcgaggacctgagcgggcagcgtgcagacccaggcaacaaaccaattcaaggcttctgactcgacccaaacgatctcaaatccacacacgtgtggcccgggacagtaagacaatgatgaggaggtctactaaactgctgttgaagccaacgacattaagctagcgatcacccatgcatgtcattcaaggtccaaagctgccaaggccctcaaggatcataactgtgacattggcactagcatcatggatctgacaacctaa

SEQ ID NO: 180751 - DNA, 412 bp, Zea mays
  Clone ID: MRT4577_96423C.1
ccaacaaaacaaggggccatggcttatgagcccctgcctttttacccggggggggggggagaggggtcacattacaacccaaaaacccgaatccaaaccattgcctttaaaagcttgaccagaaccatgaccccccaataaaagggccctaaaaggggaaattacaaaagatgggatcccactatttattttcctttggacaatgtaaccccctcaccaaccccaaaaagcttatttttttgacccttaaaccccaccacccccaaggctgttgatactgaaccggccaacccctggctttaaaacaaaatcaacaaacccttgcttgatatctcttgctatggaaaaaaaaacccgctccacatttaaggtcgttttcgcactcctttcaaaaaaattgatgccctactca

SEQ ID NO: 180752 - DNA, 449 bp, Zea mays
  Clone ID: MRT4577_96424C.1
gttccctgtttttgtttttttttccggcgggagggagtggcctcaaagtcccaccagggcccggagcccccccgggggcaaaaaacccgcgcaaaaccattgccccgggcccccccgggcgtggcaaaggccccctaggcaaaaagctcgggaaacccccaagctcgggacctgcacaatcaccctccgggggttcccccccaaaaccccaacccccccacggaaccggtgttttgggccccccacccccgaaaaaaccgccaaaaaaaaaacccggttccaaaaagggcggccccaacccacgcggggggaaaacccgggccttaaaattcaccgggttggggaggggcggacccattagatccaaagcgggcaacccccccctgaaaataattatccccggctggggggggggccccctttaaaaatgggggacccccccgcccccc

SEQ ID NO: 180753 - DNA, 601 bp, Zea mays
  Clone ID: MRT4577_96425C.1
ttgttgatcggcggcttgggcgctgtgtgatgatagaatggagcgcattgctctcgtctgcacgccgttctggcctcgctcgccagctcgggcggctccacgtctttgtcctgcagcagggggcagtggagatgaccgatgaggccatctcccgcttccctgtcagctctggaatgagatgcggcacgatctcgttgccctgttactccgcgccagctccatctccgtctccggcggcgcttgcgcagcacagacgctccacccgctggcgctcaagtccgggcgcgccacggaggctcgcgtggcgaccgcgctggccgtggcgtacgcgcggtggggcctcgtcgcgcacgcacgccgcgtgttcgacgaagcgccgcgcagggacctggtcctctacaacgccatggtctcctgctacgcctcccacggcctcgcgcgcgaggcctgggcgctctttgccgccgcgcggcgctccgggatcgcccccgacgggttcaccttcagcgccctgctccgtccgccgccgcgccgtggccgccacccaaccgccggcgccgccgatgacgggctgcctgctcaggatgggagccctggcgca

SEQ ID NO: 180754 - DNA, 269 bp, Zea mays
  unsure (1)..(269): unsure at all n locations
  Clone ID: MRT4577_96426C.1
gaacacaggaacttagtatgtttatgctatggccatctacgacagaaagactgggnagcatgcaatatcgggttgctcatgtcgtctgctgtcttttacggcactcactcataccattctctttggctctggaagggcaatgaacaaatctgccggagtactgacagtgcacctatgaaatttatttgctatttgccccaaagcctctacactgcagcagcctccttgacccatgccccaaaatgttgccgtccaacccgtgtggttcc

SEQ ID NO: 180755 - DNA, 1610 bp, Zea mays
  unsure (1)..(1610): unsure at all n locations
  Clone ID: MRT4577_96427C.1
agagtttcctcgaggccggccggggataaaaccctaggccctagcggccgcccaccgtcgcctcagcaaatcctcctcccgtttcaccatgccgccctgctgctcccccaccacctccgccgtcaccgctgcggcggcatctcccggcgcctcgcgcagcgggggcctcctgcgccgctcgcgcccagcccccgccgccgtgaattgtaaaaagattgattctctgaggtcaatcaatggagcaccaccttgcattccggtgtccaacaggtcgttattgactcctgtaaccttgccagttttccgggatccaaacatgaggaacgacacgaggctgcgcatcttctcaggcacagccaatccttccctttcccaggagatagcaagttacttggggctagaacttgggaagataaccataaagaggtttgctgatggtgaaatatatgttcagttgcaagaaagtgtacggggctgtgatgttttccttgtgcaaccgtcgtgtcctccagcaaatgaaaatcttatggagcttctgatcatgattgatgcctgtaggagagcatctgctaagaatatcactgcagttatcccttattttggttatgcaagggctgacaggaagtcccagggcagggaatctatagctgcaaaacttgtagctaatatgattaccgaagctggtgccaaccgtgtccttgtttgtgatcttcattctagtcaagcaatgggatactttgacatcccagtagatcacgtttatggccagcctgttattcttgattatctcgccagcaagacaatatgttcagatgacttggtagttgtatctcctgatgttggaggtgttgccagggcacgtgcctttgccaaaaagctgtcagatgcacctctagctattgtagataaaagaaggcaaggacataatgtcgctgaggtgatgaatcttattggagacgtgagaggaaaagtggctgttatgatggatgatatgatcgacacagcaggtaccatttccaaaggagctgagctactgcaccaggaaggcgcccgagaagtatatgcttgctgcacacatggtgtttttagcccacccgccatcgaaaggctatcaagtggattgttccaagaagtaatcatcacaaacaccatccctctgaaggaggagaagagttttccgcagctgactattctttcggttgctaacctcttgggggaaacaatctggcgcgttcacgatgattgctcggttggtcatgagccatactccagcttggatattgactgatgcttaaggaatagttgtggcagctcgcaaccttctctttcttttcttttggcctcggtttttgtctgtgcgtgtaataagcaatgtttttgtggaattctgttagcgcagaacctcagccttgtatttgagtgacagcacataagatgacattccagattgtagtgcagtgtttcagctatcctcaatcacagcacataatatgtgtttgcttgcagnattattaggctttatatgatgatgggttttatctcaccaacgtctcatgaagccctgttgcgactacatgcagcaacaataatcaaataaacgtctgttttac

SEQ ID NO: 180756 - DNA, 275 bp, Zea mays
  Clone ID: MRT4577_96428C.1
gggtgtccgagtttagaaattttcacacgcaagctgaactctcaaaaaccaaacacacaacggcagaacaagccgtgcggcaagaaatgccacccgacatacaacaactaaagaccttcaccgctggcagaaaaaaagcatcactggggaaaaaagggctcaatggagcacgacccacctgggagggaggaactacaattccccaaaaggggggaaccaatcccaccccaaccaggacagggggcctccttctgggagggccaaccggaaccccc

SEQ ID NO: 180757 - DNA, 494 bp, Zea mays
  unsure (1)..(494): unsure at all n locations
  Clone ID: MRT4577_96429C.1
ccaggactcagtgctccctccccacaggagagggggagcagaaaacacacacgcncgaacggagagaacgcagccaaaaaagggggagccgaangcccgaaacaacggaagcncaaaaagaacgcccgcggcacaangagngaggcngaccnagagnncaacgacaacccaggggggggggganacancaanncccnncccnanaccacaaangnnccncncgngaggannnacccacangcncacccnnnnnccanngaacngnngcaaaagaagcncaacnncgaccccaccaaaaggancagnggcaccgaggcncncgagcacccnaacangnccccgggggangaaccaagcgcaaaacccccagcccaagngcccaacganccggacaaagacaaaaacannagcnnaaaganganccgggaaangaagnggcaggagaagcnnaacaaccacccngaagnngccacaaaannaagcaggggaggaga

SEQ ID NO: 180758 - DNA, 424 bp, Zea mays
  Clone ID: MRT4577_9642C.1
ggaaaaaaaaaagggggagaacaagggaaatggccagcctacgggggggaaaccagcacgtacacgtactcattgatcacccccatgcccggggtgggactccaaaaaaaaattggagcacccacgttgtatgccgtatgcggttacagcaggcaaaaaatgtataaaggatcctacgtttttacaaaggcatgcaaacatgccctagctagttcaaaatgcagggcacacacacacaaacaacgctaaaaaaacattggaaaaaaggccggccgtaccttttcttcttcccgttaaaaccccaacaacggaaagcgctggccggcccgccggccaaaaccctaacaaaatttgatggtaaaaatcgaccggcacccccccccgtttttttgtcgcgcccgttgggttaaatgtccccgggggg

SEQ ID NO: 180759 - DNA, 489 bp, Zea mays
  unsure (1)..(489): unsure at all n locations
  Clone ID: MRT4577_96430C.1
gcacgaggctcatgtatcggcacattctcgtcttctatccgatcgaccggtagcttttagccgaagcgtggggcataaatcggcgcggcgcaggatcgagcggttacgtgaagacgacctaacgcacntaccaacggtcggagtcactgaagcttgtccggcaggaggagcagcctaggtggaagcgcacgtcgnatggtagtgctgcaacagtacgtcgagtcgacgaggcgcgcaccgagtggtacagggccctgtattggcggaggagagccgncggtgacgtggnccgagtcagacgggctgcagcgcagcgttgcagtgacgatcacgccgtgctctgcaaacgatgngcggcaacggcgaccattcgtcgccatncgcacgaggatgacacgagcagccgttgtcttgcacaactacacgaagccgctagcccgacgggaggcgggccctaggagccagtgggcagtgggcatcnccctctcc

SEQ ID NO: 180760 - DNA, 305 bp, Zea mays
  Clone ID: MRT4577_96431C.1
caattattttctagcgggctaacatgaccgttatagaggaataggtatgcacaaaaaaattacaaaatgtagagctcaatatgagtgattaggcctggcagttcctgtaacatgttcttgtggaaaccggcgatgatgaacattgcttaaagacccgcagggccattgacatccttgttctcaggtacgtctccctttggaatctccaactttactccaagctcggcgaaagtagtcaccttgcccatgagtggattacagacgccaacggcacattaccagatactcttaagcgtgtaagctca

SEQ ID NO: 180761 - DNA, 828 bp, Zea mays
  Clone ID: MRT4577_96432C.1
agctcatcaatctccttttcagtgagtggcttctttggtggtttgtagctcttcctggagagctggaacactatgactgcaataagaagcccttccacgaccaagtgacccatcaatatggaccccaaagacgactgcgcgggcaagggggccattgaaggcagctgagacacgggcgagcaccgccgcatagagcgatggagctcccagtcccaaacccaaaggaagctggcgcgattccctcacacggtagacacaatatctattaaacctaacacctgacgggcgctgcacaaatttcacttctcttttcttcatccaacagacttctgaaatctctcacctacaaccacatgtttgttggggaatgacagcaagctctggccgatgctgggggtaagcgaccaccaaggaaactcggtcggcggctagatgaagtttgcaggggagctcgccatggaagaaacccctgcgcacagatcagagggggggcgagctagagctgggcgacgccatggagaggggcagggagccggacacgccagggagccgttacggctcgaaggagatcgagcagggagggctgggctaagcgcggctggggaaggagcgcaggggctgtgcggttcgacgaggccgtggcctgggtgagctcacggctggagcagggacggccaaaggagaacggcactggcttggaatgaccatcggaacggcactggcctggtgctccacggaacggcagggaggaggcggcttggggagagaaagagacgtgagggagaagggaattggaaggggccccggccggcctcgaggtacccaatg

SEQ ID NO: 180762 - DNA, 884 bp, Zea mays
  unsure (1)..(884): unsure at all n locations
  Clone ID: MRT4577_96433C.1
ctcacacctgcttcccctcgaggattcccttctccctcacgtctctttctctccccaagccgcctcctccctgccgttccgtggagcaccaggccagtgccgttccgatggtcattccaagccagtgccgttctcctttggccgtccctgctccagccgtgagctcacccaggccacggcctcgtcgaaccgcacagcccctgcgctccttccccagccgcgcttagcccagccctccctgctcgatctccttcgagccgtaacggctccctggcgtgtccggctccctgcccctctccatggcgtcgcccagctctagctcgccccccctctgatctgtgcgcaggggtttcttccatggcgagctcccctgcaaacttcatctagccgccggccgagtttccttggtggtcgcttacccccagcatcggccagagcttgctgtcattccccaacaaacatgtggttgtaggtgagagatttcagaagtctgttggatgaagaaaagagaagtgaaatttgtgcagcgcccgtcaggtgttaggtttaatagatattgtgtctaccgtgtgagggaatcgcgccagcttcctttgggtttgggactgggagctccatcgctctatggtctgatggtcgtggatttgtgacaccaatgtcggcggtgctcgcccgtgtctcagctgccttcaatggcccccttgcccgcgcagtcgtctttggggtccatattgatggtcacttggtcgtggaagggcttcttattgcagtcatagtgttccagctctccaggaagagctacaaaccaccaaagaaagcactcactgaanaggagattgatgagctatgtgatgagtgggagccgagctgctatgccctccatc

SEQ ID NO: 180763 - DNA, 291 bp, Zea mays
  Clone ID: MRT4577_96434C.1
tcacaacgagctgcgcggaatccgcgggaagctagccatgaaccccacgatcgactcagccataagacctacgttcctcgacttctttgccctttcgccctcggttgtgattgcttaggtagccacgggattgccagggcggggaatttggagccgtcgccatcgaccgtcgtggggagctctgatttcggccggggttgcactggcgtcgccgcattggactgcagggcgtgtgcgcactgcatctccgaggctcggacacctggcgtgcgcccaattatcgcgccagtg

SEQ ID NO: 180764 - DNA, 345 bp, Zea mays
  Clone ID: MRT4577_96435C.1
aaagcattcggccattttaaaaagtttatgctggaatcttcattacattggaaaaaaaaactcaaatggcaagaaagtaaatcagataagtatggttgggacaaacaggagaaatttattcttaaaagctgtcactcatgcattaccgggaactcgaattcctttttggacccaagaagtagctcaacagcatcagggtaagacaggggaacaaagttcttctttactacatcattaaaccgatctatgaggcctttttcaatccaaggatggaagaaacccatatccttttggcggttctccagaatatcctttactccttccgggggattgccggtggcccac

SEQ ID NO: 180765 - DNA, 263 bp, Zea mays
  Clone ID: MRT4577_96436C.1
cccgtatcgatgagagggagagacatatgcaaattgaagtcgagaggaagacacttgcgcttggagaaagagactatgattcaattataagtcagaaacgaacagaagtatatagtttggaacagaaaataaaagtgcttctgcgggagaaagatataataaatagaaatgctgatgaaagagtaaaactgggtttgaagaaggatgcattggaaagcagcaaggacaagctcaatgagatagttaatgagcataaggataaa

SEQ ID NO: 180766 - DNA, 260 bp, Zea mays
  unsure (1)..(260): unsure at all n locations
  Clone ID: MRT4577_96437C.1
agagaagtggtgtacaggaaattacttcatttgacaggagtatgtatagaaaatccaagttttgtttgagacttcataagcttggtgcatttttaagatgttttagctgttcaaatctgtttgtctcttgaaacagtgacacaaaggtgtaattctctatggtttgaaatggatcatacgaggcatgtaataccaagaattgttactttacaatgtgcccataagcaaaattgaanttgctatgaacttttagttatgca

SEQ ID NO: 180767 - DNA, 610 bp, Zea mays
  Clone ID: MRT4577_96438C.1
caagtcatatctatcgttagtagctcccttgcagaagcatgagagcggaggagccatgtcgtgaagagaagcaccaccaccactctgtcacaccaccgtatgccagatgaggagggcgcctacggcgaggacggctacctgaagaaagagaagcaccacaagcacactggagaatctctgcgagctctgtgccatcggcggcggcgcgtacaccctgcactagaagcacaaagccaacatggaccacactagaacgagcacggccaccaaatcaaggaggaggtgaggcgcagcaacgacgtgggctacaactgattcgatatccactatcaccactagaagaaggacgccaataaccacgcccacaactgatccagctcgaatgcttacacatctgttcttgcagactgcgatgaatgtactgtgtgcacaacatgccttgatcttatgctaccgatatttgcatggacgaatgaactgagtaggtcgatactaggcggtctagtatcaagatcaaatcatgccttgaataagagtgtgcgcatatatctgaagatttaataactatcaagactcctgcagactcgagagatggacaggacaatgcgaa

SEQ ID NO: 180768 - DNA, 298 bp, Zea mays
  Clone ID: MRT4577_96439C.1
cctcgaggccggccgggccgggcatccaaaccctccatcattctacacgcgccgccgcactcctgtacacgccccgccgccaccgtctccaccaacacagagcggaggaatccctctctctcttccaagctaacccgcgcacgtatgtacctataagacgaccgctataagtatccaagccatggaccccagccgtccgtgacgcgaatctctcccgcggcacctcgccccgtgatcgatctctgactctgatctgctgtctcgccccgcggaaagagattctccatgcgtacagaga

SEQ ID NO: 180769 - DNA, 519 bp, Zea mays
  Clone ID: MRT4577_9643C.1
ccggccgggaatggcacctcaattcctgtaagctgccagtgctgtgtccctatgaccggttccttgcaacgtctgggtgctaagatgatctcttctggtacgcggacctttataactatgaatgtgttcagtggactcctaaaaattggcggttccagctcatgcatgccaaaataggtgccctacaaactgatgtccgtcgggccaacccagatgagcccatgtgtgcgtgccagatggcatcatttccatcatatgtaaattgttccctcgtttgtaaaggctagttgagagctaaaatatcagagggggttggaggagttaaaatccatttcttattcaaaattgaataaggagattttagcccctttaacccctccggttttgtggctctcaaactaaccttaaatggttcgtctaccatgggaaatacatggttgattctggcatttttgaggccggagcgaaagttactattgaagccccttctacaaaaaaaaaaaaaaaaaaggggcggcc

SEQ ID NO: 180770 - DNA, 166 bp, Zea mays
  Clone ID: MRT4577_96440C.1
ggggaaagggaacccgtagaaagctccaaaatggaaatcatgaatgcgctagggaatttaaggatactcttgggggataaaaaacaccggcaagtatagaacaaccccctaatttcagacagacaaaccttgccctttcattgaccacaactggggataaccactg

SEQ ID NO: 180771 - DNA, 379 bp, Zea mays
  Clone ID: MRT4577_96441C.1
aaattgtgtttttttttttttattatttcattctttaacataaaaaggcccggacaacgggggcggacgcaggggccaacccggagaaaaccggcaccggggcgggggggggaaccaggttcccccacagggagccgaacgagagcccggaggaaacaagggcaaaggcgaggccggggggaaaaggaaaaccgctaacaaggccacaaaacatacccacccggaagcacaaaggggaaaacccgggggcccaaaagagggagctaattaacaacaaaagcagtgcgcgaaccgccccctatacagttcggaaaccgggaaggccacccgcaaaaaaaaattacccaacccccgaagaaagggggggagagaaatgggc

SEQ ID NO: 180772 - DNA, 363 bp, Zea mays
  Clone ID: MRT4577_96442C.1
gttcttagcttctttctacctgaataagaagatttctgcagacccttttccttaaaaaaaaaaggaatattttaaaaaaaggaagaaataaaaaaaaaaaaaaaaaaaaaaaaaaaaaaaaaaaaaaaaaaaaaaaaaaaaaaaaaaaaaaggggcggccgttttaaaaaatcaaagtttacttacccttgcatgcaacgtaatagtttttttatagtgcaaccaaaattaaattaattggccgttgtttaaaaacgttgtaattgaaaaaaccttggcgtaaccaaattaaatcgctttgaagaaaatccccttttcgcaagttggcgtaaaaacaaaaaggcccgaaccaatcgtcttttc

SEQ ID NO: 180773 - DNA, 215 bp, Zea mays
  Clone ID: MRT4577_96443C.1
tctctttttctttttttttttttttttttttttggggtgttttttttttttttttttgggggccccaaaaaaatgggaggtttggtgtataaatgtccccgcaaaccattggcccttttcccggttttacccctttgtttctccatcaaaaagagatttaaaaccgatgttgcccatcaattcccaaccccatcgaggggcggcccccggggtgt

SEQ ID NO: 180774 - DNA, 470 bp, Zea mays
  Clone ID: MRT4577_96444C.1
ctaaaggggaccaaaaaggttaactttgaggacaaccactgaattaaggcagccatggttaaaaaactacctttaaaaaacaaaatggaaacgtttttgacaaaaaaaaggaaggaaagcccgattgaaaacaacatattggaagcacaaaaatccagggtttcgaaaaaatttgaccttaaaaagctcgtttttttttaccctaaaggacaccgccaccagtttttaatcaaaggaagggggttttttcagggaagggagttatttacagctagcaatgggagggggggactttttgcactgacataagggggggaaaaaatctccatgtaaatgaagccaatcaccgggtgaaatggaactttggctactgaaaataagggttgaaggcaaaaccctcttggaaaaaaaaacccttaatttgttcttaaaacaatgcatgctgctcaaagaaaaagctgaagggcatt

SEQ ID NO: 180775 - DNA, 158 bp, Zea mays
  Clone ID: MRT4577_96445C.1
tcaaaaaggctgactgagatacacggatggggcacttctacgaattctggtaatactaccacatgcttggaatgtcatgagaaaccaacacaccgattactcatgccaggatagcgtgattgggacacgaggtactatccgaacttgaagacgaatgg

SEQ ID NO: 180776 - DNA, 359 bp, Zea mays
  Clone ID: MRT4577_96446C.1
agacctgctagcttgcatgcacgcctactctagatgatcctctcggtgaattacaattccacacactctagacaccatgggcatacatgttcatatgctgaataggaatcatttgctcatcttattaagcctatcctgcagccataggtaatgagttcggaactcctcgcagaatcccaattccacattttcaagaaataaggtcgcaatactgttcacatatgaatcggaattctttgatgccttatcatgactatcctgcagcctacggaaatgagatcggaatctcgtagcaaattccaattgcacattttcgagaactccggaagcagacatgctcatacatgaattggaactat

SEQ ID NO: 180777 - DNA, 217 bp, Zea mays
  Clone ID: MRT4577_96447C.1
accgggcatgcggtgagagactggctggggagaggaaaaaaaaatctaaccgtagcatacgcagcgctagggtttggaggttgcgatggcggctgcggcgagacacctacggacggtgaagtggttcaacgacaccaagggcttcaggttcatctaccccgaggacggaagcgaagatctcttcctgcaccagtcctggatcaagtaggagggcttc

SEQ ID NO: 180778 - DNA, 368 bp, Zea mays
  unsure (1)..(368): unsure at all n locations
  Clone ID: MRT4577_96448C.1
agcatctacgtgagtgatcagaccggtggcccgccgatgataggtgtcaagggaaggacgaaactggagctgggagcctatcgaaccatcctgtatccgctatatacagcatatcctgtattcccacagtgaaaaggatgcacctggtccttctnngttcccagtttggtggaatgcacccttctacggtaagtaatcaaagcggctacgtgttcaatgcattgctgnnncgcatcttatctgctagttagaaatcaaagcttgtcataccgttcgtaaactgaggacaaactgannaaatggaatggtggcatcagggaggttgtattntggtacgggcttgccgaagggtcaaaggctagggtgtg

SEQ ID NO: 180779 - DNA, 1074 bp, Zea mays
  Clone ID: MRT4577_96449C.1
tttgaagcagaagaaggctcacctcatggagatccaggtcaacggtggcactatagcagacaaggtggactatggttacaagttctttgagaaggaggtccctgttgatgctgtgttccagaaggacgagatgatcgacatcatcggagttaccaagggcaagggttatgaaggcgtggtcactcgctggggtgttacccggcttccccgcaagacccacaggggcctccgcaaggttgcctgtatcggtgcatggcatcctgctagggtgtcgtacactgttgctcgtgctggtcagaacggataccatcaccgcactgagatgaacaagaaggtttacaagattggcaaggccggacaggaaagccatgacgcctcaactgagtttgacaggaccgagaaggacatcactcccatgggtggtttcccccactacggtatcatcaagggcgactacctgatgatcaagggttgctgcgtcggccccaagaaaagggtggtgactctccgccagtctctgctgaagcagacgtctcggttggccctggaggagatcaagctcaagttcatcgacagtcgacacctcgtccaagtttggacatgggcgcttctagaccacagacgagaagcagaggttctttggcaagctcaaggcctgagttgctgtcttgctgatggtgtcaagcgaaatggaaatgtattaccagatagttttttgtttttcagattcagctttgttggagatatcataagaacatgtttgatttgctagtctgagttgattctattgcgggcggctgaagttatattacttctaatgaactcgaaagtctctgtgattcaagcatcataggcctgagttgatttgtcagcttgcaagtggggtgcctttacatgcgcaagcccttgccaattttgagggaatctcaaatcttcccgcccccaatatgctcttgctcaattcacccgtttttttactgtaatctactggtaatcgtggtcagcacatctgtctacagtgaataaacccggtaattgttttgaatttttaaaccaattatcttattattcccc

SEQ ID NO: 180780 - DNA, 159 bp, Zea mays
  Clone ID: MRT4577_9644C.1
tttacgctcacgaccacacccctttgaacctcagctggggcctttttaactacatcgcggatcataaaccactggagcaacgaataaaaaatggaacgttccagcaagcacacgatgagctcgactgattgaatctaatgcaaaaaaggacgtgcagcc

SEQ ID NO: 180781 - DNA, 801 bp, Zea mays
  Clone ID: MRT4577_96450C.1
ctttctctcgctgtccagcaaatactcgaaaaccacctcgcaagacttggaaaccgcaacgcctcttcctccttgccaggacaggagtctcaactctcaaccaagtggagagtggaccgaccatggccaccgccgccgacatccgcgtctccatcggctaccagacccgcttcgggctccgcctcgccgccgcgctctcctccccacccccatcccccgccagcaactccgccttctccccgctctccctccacgtcgcgctcagcctcctcgccgccggcgcgggtggcgccacgcgcgaccagctcgccgccgccctcggaggcgacgctcccgccggggccgacggcctgcacgcgctcgccgagcaggtggtgcagctcgtgctcgccgacggctccggcgccggcggcccgcgcgtcgccttcgccgacggcgtcttcgtcgactcctcgctgaagctcaagccggccttcgaggaggtcgccgtgggaaagtacagggccgacacccagtccgtcgacttccagaaaaaggctgctgaagctgctggtcaagtgaactcatgggtagaaaaaattacttctggtctcatcaaagagatcctgcccccaggttctgttgaccacaccaccaggcttgttcttggtaatgcgctctattttaaaggagcttggactgagaagtttgatgcatctaaaacaaaagatagcgagttccaccttcttgatgggagctcagtccaagcacctttcatgtccagtacagacaaacaatatatcgtggcttaaaacaacttga

SEQ ID NO: 180782 - DNA, 346 bp, Zea mays
  Clone ID: MRT4577_96451C.1
ttcgtcccaggcctctattctaagtcatattaaactcgccttgatctcagtcaacacaatcccattgcctcaagcacgttgactcttctcccccatccctaatgacactcaccaaccctgccaatctcgtggtcgttattaccggttgcgataccggtttcggctcagagatcacggaggacctctatcagcgtggacgctttaccatctatgcgacctgcttgaccgatcaagccgtcgagaactacaacgccagacagtcatcccgcatccgcgctctccaagtggatgtcacaagacagaacgacgtccaccgtcttccggctcaagttgcggcggagtgccc

SEQ ID NO: 180783 - DNA, 1653 bp, Zea mays
  Clone ID: MRT4577_96452C.1
ctttgttcctcggaacaccgagaccctagcacacagacaccgcgcctgcggacactgctcgctccccttctcctccgtcgccgccaccgcagaagcctctaccacgcgcaaccagctcgccgccgcgcccgccggggccgacggcctgcacgcgctcgccgagcagatgggccagctcgtgcccgccgacggctccggccccctcagcccgcgcgtcgccttcgccgacggcctcttcgtcgacgcttcgctgaagctcaagccggccttcgaggaggtccccgtgggaaagtacagggccgacacccagtccgtcgacttccagaaaagtggtcatatcaaccagaacttatcaaggaagggcgccggcggcccgcgcgtcgccttcgccgacggcgtcttcgtcgactcctcgctgaagctcaagccggccttcgaggagatcgccgtgggaaagtacagggccgacacccagtccgtcgacttccagaaaaaggctgctgaagctgctggtcaagtgaactcatgggtagaaaaaattacttctggtctcatcaaagagatcctgcccccaggttctgttgaccacaccaccaggcttgttcttggtaatgcgctctattttaaaggagcttggactgagaagtttgatgcatctaaaacaaaagatagcgagttccaccttcttgatgggagctcagtccaagcacctttcatgtccagtacagacaaacaatatatcgtggcttacaacaacttgaaggtgcttaagcttccataccagcaaggtgcggacaagaggcagttctccatgtacattcttcttccagatggcaaaagatggcatctggagcttggctgaaaagctgagctctgaaccagagttcctggagaaccatgtcccaatgcacaaggttccagtcggacagttcaaagtccccaagttcaagatatcctttggatttgaggcatctgagttgctcaaaggtctcgggctccagcttccgtttagtgctgaagcggacctgtcggggttagttgattcaccagagggacggaacttgtctgtttcgtccgtattccacaagtcatttgtcgaagtgaacgaggaaggaacggaggccgctgccgcatctgctgcaacagttgtgctccggtcgttcacgatgcctcaggatttcgtcgcagatcaccctttcatgttcctgattcgcgaagacttgactggtgtggtgttgtttgtcggccacgtggtgaatcccctccttgctccatagtgtgttgttcagaagtgtggccttggtgcggttccatccccttacagatgtgtggctttgacagctgatcaagctttatgtgtaatctgccatgttttgtttttgaataaatagatgcttgatcgatgtatgtaaggctgcgagatgatagttcagaattggtatgtgtggtcatggactcatggtacttactgtttccttcttcctctctgatgtttctggttctagtgacctttttccagtgacatctgtaagactgataacatatagattctgttgtgaagcacgtatcggttactgatgattatatttactgtttaatatataacaaataacgtaaaaaaaaaaaaaaaaaaaaaaaaaaccctagaagggg

SEQ ID NO: 180784 - DNA, 155 bp, Zea mays
  unsure (1)..(155): unsure at all n locations
  Clone ID: MRT4577_96453C.1
gttcgttgcctctttctctttgnggtaagcgtgcggggcgatcttatcggtgcgttcatcacccactacgcattcaaatgggttcccggtcttaccaaagaccgcccgcacggtggcgcgcttgaggagccctttgcttaagcccaagcgttccc

SEQ ID NO: 180785 - DNA, 1482 bp, Zea mays
  Clone ID: MRT4577_96454C.1
tcgaggccggccgggaaccgcccttctccatccggtctccaagccgcacagcagtgaaccggagcttcttgcttgctggtctcgccaagtagcaagagtaggacgtaggagctggtctctcgccaagtcgcgcctctccctcctctcttcccttttctccctcgcgtcgcgcgctccacatgctgagcctgaggtcagtatccggctccaactcctcgaggggcatcgccgccgtggtcggcgtgggtcccaggctgggctcggcggtggcgcgcaagttcgcctccgagggctacaccatcgccatcctctcgcgcgacctcgagaagctgtcgcagctggcggaggagatcgcgcaggcggccaaggcgcaggtgttcgcgctgcgggtggactgcgccgacgcccggtccgtgcgcgaggccttcgagggcgtgctctccctcggccccgtcgaggtgctcgtctacaacgcctgcgagccgcctggagccaacgaggacgcgcgccccgcgcccttcctcgccgtcacccccgacgccttccaccgcgccctcgccgtgtccgccggaggggccttccactgcgcgcaacaggtcatcccgggcatggtggagaggggcagggggcaccatcatcttcacgggctcctcggcgtcggtcaccggcttcgccggctactccgatctaagcagcggcaagtttgccctgcgggggctgtcccagtcgctggccagggagttccagccggccggcgtgcacattgcgcatgtgatcatcgacggcgtcatcggcgagaggaggtcgctgacgaggagcagcagggccggcggcgacacggcgggcgcggacccggacgcggtggcgcagagctactggcacgtccacgcccaggacaagagcgcttggacgcatgagatggacatccggtcgccgtccttcatgtagcagcagcttggctagcgctagccgccgctgctgtacgtacggtccctggaatctttagtggactgctaccggccgggcgcgttcccgatcaagcaggagagaggggacaagtgggtcttgttgtgtatgtatacgtcgtgccctgtaaatcgtgtgtgcgcgcgcgcgcggctgcgggccgggaatcgtgtccccgtcccgcgccgcacgttggcaaggctctagctagccccccctttttctcatcatttggtgtgagatgcccgtcgctggtccgaccgcgggttctgtgcgttgattgcggccgagagcgaccgcgcgtgcgtctccgtcgcatcctgtacccatcgccgccgccgccggcgaccggcctccggaaagctctcatgtgtgatggatgtgtgcgcccgttgttactcatgagctagtccgtatatgtggaggattgtgcttagtggttgctacccacttgaattgagcagcaagaaaaaaaaaaaaaaaaaaaaaaaagggcggccaccgaatagtgagctc

SEQ ID NO: 180786 - DNA, 169 bp, Zea mays
  Clone ID: MRT4577_96455C.1
ctcaagcctacacacatgcattatctctatttttaccatatcaatggactaattaacattcacgaccatcttaaacttacccgagccctacaaaaccagcctaatccaacttacttatgtactataccatctttactacttatactacaaccagctgtcttaccaacac

SEQ ID NO: 180787 - DNA, 577 bp, Zea mays
  Clone ID: MRT4577_96456C.1
tttttttttttttttttttaactttaataacggaatgacattaaattaaatgagatctcccattacaaacagactaaaatagccaaaaattagtttacacgatgaactttttataacccaaatgccatgtaactgaacccgactagaattcatcaggaaagaacgcacaggccacactacacgaccccagttgtataatatacccaccgcatttgctgcctacttattccaatacaacagctgtattcccactatggtggcatactggacagctgggttgtgaataagatctccaaggggttgcgagattgacttggaactggcagcaactgaatctacgccctgcagcagcttacagtaggcaaaaatttcaggcatagcttcctgttggtatttcgtcattagctttgtgtttgacggtgaatttgctgtatccaatcaacgtaactacttgttccagccatctggtcctcaacaaggttagatagaagcagatagctttctcttggctgttcaccctgtcgcaccacaagggatagctggtgataagaaggatccttctcccgcaggtatctta

SEQ ID NO: 180788 - DNA, 462 bp, Zea mays
  Clone ID: MRT4577_96457C.1
cggccgggagcccctttcgcggacaatctcgtgaaggtcgtcgcagcgcggtcgtactctgcgtccatcatggagatcagcgagcccattttgccggccgcgttgccctcccccgtcgcggcgcccggccgccgcggcaagggtgcaaagcgcaagatcataccatccgtggcaacccatgaggattccgacatgatcccacgcaagcccgatcgaactagtgcgtggtgggtaagggtaaggtggccaaggataccgtgcccgagtcacctgctccaagcccagcacctgtctcggccccttagcagagtgtagggagccgatgtccgccggcccccggtcataatggtgatcgacggagtgcgcaccttcgccttgacggacacaaagaatatcatagcaggccacgaacatggcctttctaatgcgccctagatcatatacactgctgcaccatgacaa

SEQ ID NO: 180789 - DNA, 3163 bp, Zea mays
  Clone ID: MRT4577_96458C.1
ggcccctttgcctccgctccaccgtcgcaggtcccttttgcctccgctcaaccgtctcagagtccttttacgtctcctccacagtctcagggcccattcgctgctggaccgccgcctacgggcccttttgctgctacaccagcaccttttcgctctccgctgtcatcccttgcgcagccacaatctcccacgcaaggcgctttgcctccaccaccaacatatgcgaggccgctgtcacaaccactacaggcgcaagggtattaccctggtgcaccaccttcgaaccctcaatttccgatgtcaaggccagcatttcaacaacctgtgcagaatatgccacctcctccaatagggtcagctgccacatttggtaaccaggcagcttatcaaagtggcgggcctccagttggaggcacacttcagagtttagtggaggacttccagtcgttatcactgagttctgtgcctgggtcacttgaccctggtgttgatgtaaaagggctgccaaggccattggatggtgatgaggagccagttaagcttatagagtcatacccatttaattgccacccaaggtacttcaggctgacaacccatgcgattccggcatctcagtcattggtctccaggtggcatttgcctcttggagctgtggtgcatcctcttgcagaatcacctgacggggaggaagtgccagttatcaactttgggtccgccggtgtcattcgctgtcgaagatgtaggacgtatataaatccttatgcaacatttgcagatgctggaaggaaatggcgctgcaatctttgcacattgctcaatgacgttcctggggagtacttttgtgctcttgatgctagtggcaggaggtacgatactgatcaaagacctgaactctctaagggaactgtagagtttgttgctccaacagaatatatggtgcggccaccgatgccgccgtcctatttctttcttattgacgtgtcagtgtctgcagttcgaagcggattgcttgagattgttgcaaagaccataaaatcatgcctcgatgaacttccaggttttccgcgaacacagattggattcttaacctttgacagtaccttgcattttcataacttcaagtcttctttgtcacaacctcaaatgatggtggttgctgatttggatgatgtttttctgccattgcctgatgacctcttggttaatttggtcgactcaagacatgttgtggaatcatttcttgatagcttgtcaaatatgttccatgacaatgtaaatgtggagtctgctcttggtccagcacttaaagcagctttcatggttatgagtcaaattggggggaagttgcttgtcttccagagtactttgccatctcttggtattggtcgtttgagacttcgaggagatgatgttcgtgcgtatggaacagacaaggagcatactctgagggtacctgaagatcccttctacaaacagatggctgctgaattcacaaaaaatcagatcgcagtggacatattttctttcagtgagaagtactctgatatagcttctttggggtctttggctaagtatactggtggtcaggtgtaccattatccatcattccaggcacctacacatggagacaaacttaaacttgagcttagtagggaccttacacgagagactgcctgggaatctgttatgcgtatcagatgtggaaaaggagtacggttcacaacctatcatggtcatttcatgctacgatccacagacctgttagcccttccagctgttgactctgataaagcttttgcaatgcaattgtcgctagaggagacattaatgaccacccaaactgtatacttccaagtggcattgctatacacatcatcctctggtgaaaggcgtatcagggtccacacagcagctgcacctgtggtcacagatcttagtgaaatgtaccgtcaagcagatacgggtgccattgtgtcattgttgggtagaattgcggttgaaaattcactgtctgataagctggacagtgtccggcagcagttacagttaaagcttgtcagaagtttgaaggaataccgcaatttatatgttgtacaacaccggataggcgggagactgatttttcccgaatccctaaagtttttgccattatacatcctggctatctgcaaaactcttgctcttcgtggaggttatgccgatgtttctcttgatgaacgatgtgctgctggttttagcatgatgatattgcctgtaaaaaggctgctcaattttatctatccttctttgtacagagtcgatgaagtattaacaatggaaccaaacaagattgatggttggttgaaacgcttgccattaacgtttcagtgtttagatacgggaggtttgtacctccttgatgatggcttcactttcttagtgtggttaggaaggatgctcccacctgaacttgtgaacaacattcttggagtgagcttggcaaacttccctgacctatctaagattctattgagagagtgtgacaatgagttatcaagaaatttcatgaaaatactaagatacctgcgggagaaggatccttcttatcaccagctatcccttgtggtgcgacagggtgaacagccaagagaaggctatctgcttctatctaaccttgttgaggaccagatggctggaacaagtagttacgttgattggatacagcaaattcaccgtcaaacacaaagctaatgacgagaaaccaacaggaagctatgcttgaaatttttgcctactgtaagctgctgcagggcgtagattcagttgctgccagttccaagtcaatctcgcaaccccatggcagatcttaggccctgttccaatctcgcgagataaactttagcagcttttttttagctacttttagccatttgtaatctaaacaggagagctaatggtggtaattaaagctaaactttagcacttcaattcatatagctaaagtttagcaggaagctaaagtttatctcgtgagattgaaacggggccttattcacaacccagctgtccagtatgccaccatgtaagcagtatttggctggcaaacaaagcttcttactgttgatatttgcccttgtgattattctatttttgcagagtgggaatacagctgttgtattggaat

SEQ ID NO: 180790 - DNA, 622 bp, Zea mays
  Clone ID: MRT4577_96459C.1
gggtacctcgaggccggccgggactcttctctgcagacgcgtagtttgtcgatgcctctactctccgctgctgtagtagagatgctctcgatggggcgcacgccgcacctccttgtcacgaccgcttgatttggccgagaagtcgtcgtctcggtcgtacgccagccgagccacggatgctagcgccgcggcaccggtgaccgctctgccgccagactgagccatcgtcgagctgaacatgttgcgattctgctaatgactgagctctactgcaacctaggctcgacgtgtgtgatggatacgactgctgagcacgagcagttgatctactctgcatcgtctaactcacagatatcatgaactaaaatctccccagatgggcaacaaatggggcagataggaaccagctatgagatgcttgtctgagtgagttgcatccatggaatgtggaatatcccgttgaggtttacgaacccatggaggcgtggtggaagatgttgcatgtgataatcggaatgcagatttcttatggatgatgatatttggtgccatctcactattgaagctgccgattattcccctattcaattcgttattattacgaatacctatggtcagcatg

SEQ ID NO: 180791 - DNA, 650 bp, Zea mays
  Clone ID: MRT4577_9645C.1
aatgctagccgcactgtgctcgtttctgcatccccctcccgccgcgccgcctcaccgacgacggagaatatgggttgcgtgatccgcgcgcagcgcaaggctgctggtgtctcgtgtgcaagacccacaccacaccaccgtaggaacacgcccgcttacgatccctcaactacacgtgagagcaacgtctacctcaagggggtctgcaccgacgtcatactctatcccattcgttggacgaccgctacgctcaaggctacttaccgccagccagtcatgcacaaataccacaaggagatcgttgtggcagtcggaggattatgtcacacgtgcgcacattcgtctatcgtgcagaggcgacgtgccaccctcatccatagatcaatctggatgcccctccgcgggaatacatgatggtgctcgtgctcataggacgacaagcaccagcgttcggtagacctgagtgtattcgccaagctcgtctgatgactactgcattgtgatgcatgcacaaccctgacaacgtgtacatcgaggattgatatgccctctgacgtcaagaatattgttcccagcatcatgtcgcagtctatgattgatgcaggttcgctcggagaaggcatgactgaggaatctgatgctcaaggtgt

SEQ ID NO: 180792 - DNA, 2875 bp, Zea mays
  Clone ID: MRT4577_96460C.1
cctgcctcctcctccaatgggaccagcttctatttttggtaatcaggcagcttatccaagtgccgggcctccagtcggaggcacacttcagagcttagtggaggacttccagtcactgtcactgagctctacgcctgggtcacttgaccctggtgttgatgtaaaagggctgccaaggccattggatggtgacgaggaaccagttaagcttatggaggcatacccattgaattgccacccgaggtacttccgtctgacaacccatgcgattccggcatctcagtcattggtctccaggtggcatttgcctcttggagctgtggtgcacccacttgcagaatcacctgatggggatgaagtcccagttatcaactttgggtctgccggtgtcattcgctgtcgaagatgcaggacgtatataaatccttatgcgacatttgcagatgctggaaggaaatggcgctgcaatctttgcgcgttgctcaatgacgttcctggagagtacttttgtggtcttgatgctagtggcagaaggtacgatactgatcaaagacctgaactctctaagggaactgtagagtttgttgctccaacagaatatatggtgcggccaccgatgccgccttcctatttctttattattgatgtgtctgtatccgcagtacagagtggattgcttgaggttgttgcaaagaccatcaaatcatgccttgatgaacttccaggctttccacgaacacagattggattcttaacctttgacagcaccttgcattttcataacttcaagtcttctttgtcacagcctcaaatgatggtggttactgatttggatgatgtttttctgccattgcctgatgacctcttggttaatttggtcgactcaagacatgttgtggaatcatttcttgatagcttgccaaatatgtttcatgacaatgtaaatgtggagtctgctcttggtccagcacttaaatcagctttcatggttatgagtcaaattggggggaagttgcttgtcttccagagtactttgccatctcttggtattggtcgtttgaggctacgaggagacgatgtccgtgcatatggaacggataaggagcatactctgagggtaccagaagattccttctacaaacagatggctgctgaattcacaaaatatcagattgcagtggacatattttctttcagcgataagtactcagatatagcatctttaggatctttggcgaagtatactggtggtcaggtgtaccactatgcatctttccaggcacctacacatggtgacaaacttaaacttgagcttagtagggaccttacacgagagactgcatgggaatctgttatgcgtatcagatgtggaaaaggagtacggttcacaacctatcatggtcatttcatgctacggtccacagacctgttagcccttccagctgttgactctgataaagcttttgcaatgcaactgtcgctagaggagacattaatgaccacccagactgtatacttccaagtggcgttgctatatacatcatcctctggtgaaaggcgtatcagggtccacacagcagctgcacctgtggtcacagatcttagtgaaatgtaccgtcaagcagatacgggtgccattgtgtcattgttgggtagaattgcggttgaaaattcactgtctgataagctggacagtgtccggcagcagttacagttaaagcttgtcagaagtttgaaggaataccgcaatttatatgttgtacaacaccggataggcgggagactgatttttcctgaatccctaaagtttttgccattatacatcctggctatctgcaaaactcttgctcttcgtggaggttatgccgatgtttctcttgatgaacgatgtgctgctggttttagcatgatgatattgcctgtaaaaaggctgctcaattttatctatccttctttgtacagagtcgatgaagtattaacaatggaaccaaacaagattgatggttggttgaaacgcttgccattaacgtttcagtgtttagatacgggaggtttgtacctccttgatgatggcttcactttcttagtgtggttaggaaggatgctcccacctgaacttgtgaacaacattcttggagtgagcttggcaaacttccctgacctatctaagattctattgagagagtgtgacaatgagttatcaagaaatttcatgaaaatactaagatacctgcgggagaaggatccttcttatcaccagctatcccttgtggtgcgacagggtgaacagccaagagaaagctatctgcttctatctaaccttgttgaggaccagatggctggaacaagtagttacgttgattggatacagcaaattcaccgtcaaacacaaagctaatgacgaaataccaacaggaagctatgcctgaaatttttgcctactgtaagctgctgcagggcgtagattcagttgctgccagttccaagtcaatctcgcaaccccttggagatcttattcacaacccagctgtccagtatgccaccatgtaagcagtatttggctggcaaacaaagcttcttactgttaatatttgcccttgtgattattctatttttgcagagtgggaatacagctgttgtattggaataagtaggcagcaaatgcggtgggtatattatacaactggggtcgtgtagtgtggcctgtgcgttctttcctgatgaattctagtcgggttcactggttcagttacatggcatttgggttataaaaagttcatcgtgtaaactaatttttggctattttagtctgtttgtaatgggagatctcatttaatttaatgtcattccgttattaaaaaaaaaaaaaaaaaaa

SEQ ID NO: 180793 - DNA, 3190 bp, Zea mays
  Clone ID: MRT4577_96461C.1
cccacgcgtccgggcccctttgcctccgctccaccgtcgcaggtcccttttgcctccgctcaaccgtctcagagtccttttacgtctcctccacagtctcagggcccattcgctgctggaccgtcgcctacgggcccttttgctgctacaccagcaccttttcgctctccgctgtcatcccttgcgcagccacaatctcccacgcaaggcgctttgcctccaccaccaacatatgcgaggccgctgtcacaaccactacaggcgcaagggtattaccctggtgcaccaccttcgaaccctcaatttccgatgtcaaggccagcatttcaacaacctgtgcagaatatgccacctcctccaatagggtcagctgccacatttggtaaccaggcagcttatcaaagtggcgggcctccagttggaggcacacttcagagtttagtggaggacttccagtcgttatcactgagttctgtgcctgggtcacttgaccctggtgttgatgtaaaagggctgccaaggccattggatggtgatgaggagccagttaagcttatagagtcatacccatttaattgccacccaaggtacttcaggctgacaacccatgcgattccggcatctcagtcattggtctccaggtggcatttgcctcttggagctgtggtgcatcctcttgcagaatcacctgacggggaggaagtgccagttatcaactttgggtccgccggtgtcattcgctgtcgaagatgtaggacgtatataaatccttatgcaacatttgcagatgctggaaggaaatggcgctgcaatctttgcacattgctcaatgacgttcctggggagtacttttgtgctcttgatgctagtggcaggaggtacgatactgatcaaagacctgaactctctaagggaactgtagagtttgttgctccaacagaatatatggtgcggccaccgatgccgccgtcctatttctttcttattgacgtgtcagtgtctgcagttcgaagcggattgcttgagattgttgcaaagaccataaaatcatgcctcgatgaacttccaggctttccacgaacacagattggattcttaacatttgacagcaccttgcattttcataacttcaagtcttctttgtcacagcctcaaatgatggtggttactgatttggatgatgtttttctgccattgcctgatgacctcttggttaatttggtcgactcaagacatgttgtggaatcatttcttgatagcttgccaaatatgtttcatgacaatgtaaatgtggagtctgctcttggtccagcacttaaagcagctttcatggttatgagtcaaattggggggaagttgcttgtcttccagagtactttgccatctcttggtattggtcgtttgaggttacgaggagacgatgtccgtgcatatggaacggataaggagcatactctgagggtaccagaagattccttctacaaacagatggctgctgaattcacaaaatatcagattgcagtggacatattttctttcagcgataagtactcagatatagcgtctttaggatctttggcgaagtatactggtggtcaggtgtaccactatgcatcattccagacacctacacatggtgacaaacttaaacttgagcttagtagggaccttacacgagagactgcatgggaatctgttatgcgtatcagatgtggaaaaggagtacggttcacaacctatcatggtcatttcatgctacggtccacagacctgttagcccttccagctgttgactctgataaagcttttgcaatgcaactgtcgctagaggagacattaatgaccacccagactgtatacttccaagtggcgttgctatatacatcatcctctggtgaaaggcgtatcagggtccacacagcagctgcacctgtggtcacagatcttagtgaaatgtatcgtcaagcagatactggtgccattgtgtcattgttgggtagaattgcgattgaaaattcactgtctgataagctggacagtgtccggcagcagttacagttgaagctcgttaaaagtttgaaggaataccgcaatttatatgttgtacaacaccggataggcgggagactgatttttcccgaatctctaaggtttttgccattgtacatcctggctatctgcaaatctcttgctcttcgtggaggttatgcagatgtttctcttgacgaacgatgcgctgctggtttctgcatgatgatattgcctgtaaaaaggctgctcaattttatctatccttctctgtacagagttgatgaagtactcacaatggaaccaaacaaggttgatgatgtttcattgaagcgattgccattaacgtttcagtgtttagatactggaggtttgtacctccttgatgatggcttcactttcctagtgtggttaggtaggatgctcccgcctgaacttgtgaacaacattcttggagtgagcttggcaaacttccctgacctatcaaagattgtattgagagagtgtgacaatgaattgtcaagaaatttcatgaaaatactaagatccctgcgggagaaggatccttcctatcaccagctatgccgtgtggtgcgacagggtgaacagccaagagaaggctatctgcttctatctaaccttgttgaggaccagatggctggaacaagtagttacgttgattggatacagcaaattcaccgtcaaacgcaaagctaatgacgaagaaccaacaggaagtgatgcttggaatttttgccttagtgtaaactgctgcaggatgtagattcagctgctgccggttccaaatcaatctcgcaaccccgtggcagatcttgttcagaagccagcggcccaacatgccggcttgtaagcagcatttgtctggcaaaaaaaatgctgttaatatctgtccatgtgattattctatttttgcacagtgagaatacagctgttgtatcggaataagtaggcaacaataccgtgggtattatacaactgggttcgtgtagtggcctgtgcgtttattaatcgcgttctttcctcatctggattcagttacttgccatttgggttataaatagttcatcgtgtaaactaactttttggctactttagtctgtttgtaatgggatatctcatttaatttaactgacattccatt

SEQ ID NO: 180794 - DNA, 901 bp, Zea mays
  Clone ID: MRT4577_96462C.1
taccgtcgacctcgagaacaatttttgacccagggtgttaacaatctacttacttctcgcccattatccatgctttagactttacaatgtttaaccaatgcattaagggtttgtattccgttaacttattttaaagtcttattactttttatacttatatataaaatccacttttcctattttacatatacaaattgaggatttgtggtaatgtagaaatacttacacttatacatgttagaaccatttacctgcaattcatcttgaattgtaaatgcttcccctttttttacagtcttaatcttatcattccaattagcagaaccatagacccataattcgtttgtatctacaaccactaatttaccaatattactcgtttgtctacgggcaaagtaaatataggaagagtcatatttcacccatgaattacctaggttcagccagccctcacgttcttcccaaacaatataagattcaggtttgttcaatttacgaattacatcactactcgtgctaggtcctctgcgaaggttaatatttacaccttccatgtaagcaattcctaatccttgtgtacccgcatccttgttatgattctctacaaccatatcgtttagactatcttcaatcatcctcttgaaaccctcaaatccacctggtcgattaaatatcggacgtggacagttctttccactccaatgttgatgggaaactacgttcccaatctttaatccaaggtgagccatgagaaacttaacgagacccgcagcatgggttaaggctttttcaaaattaccatcacgattttcacaaatttcaatgccgatagacgagcgattacccgctccattcccgtctccggcatgcggccgatcgggccgatccgtcgacgcggccg

SEQ ID NO: 180795 - DNA, 620 bp, Zea mays
  unsure (1)..(620): unsure at all n locations
  Clone ID: MRT4577_96463C.1
tcgtccgcagcttgatgcccttctctccgtaccggnccctgaacttccacgccatgcccgacccgatcnttgagatgatacacgaggctcagcaggccatggacatccacttccacagcccggccttccagcacccgccaacagaattcatacgagaaggcgacgatgaccggactgtgtgccgggagatccgccacaactccacgggctgcctgcggatgatggaccagtgtgacaagtgccgggagatcttgtctgtggactgttccaccaacaacccctcccaggctaagctgcggcgggctctcgacgaatccctccaggtcgctgagacgttgaccaggacatacaacgagctgctacagtcctaccagtggaagatgctcaacacctcctccttgctggagcagctgcacgagcagtttaactgggtgtcccggctggcaagcctcacgcaaggcgatgaccagtactatctgcgggtcaccacggtggcttcccacacttctgactcggacgttccttccggtgtcactgaggtggtcgtgaagctctttgactctgatcccatcactgtgacggtccctgtagaagtctccaggaagaaccctaaatttatg

SEQ ID NO: 180796 - DNA, 621 bp, Zea mays
  Clone ID: MRT4577_96464C.1
tcacgagcggggtcgcgtacggggtgcgggtcacgcacgccgagcgggagcagttcgagcgccagcagggatggagcatcaagaagatgtactcctccaagaccaagaagcagtcgcagggaccagggaacgctgaggacgccgaggtgcgggagccggcggaggagtatgctcccgtaatcttcgcgcaggacgcatacaagcatgtcatctccttcgacttgctatccggcgccgatgaccgcgacaacgtactccgagctagagaatctgggaagggtgttcttactgctccttttaagctgctcaataatcgccttggagtgatctccacctacgctgtgtacaagtatgagcttcccccaaatgccaggccacaggagcgcattcaggctgctataggctacttaggtggcatatttgacattgaagcgcttgttgacaagttgcttcaccagctcgcgggcaagcaatccatcatggtgaacgtttacgatactactaatgatagacggatcagtatgtatggttcgaatgatacaggcagtggcatgtgccaagtcagcacactgaactttggtgacccgtcaaggaagcatgaaatgcactgcaggttcattc

SEQ ID NO: 180797 - DNA, 404 bp, Zea mays
  Clone ID: MRT4577_96465C.1
atttgcttgacttctgaccagtaataattagcgaaagaaagaaaatccagaaccatgaatgagcttgatagcagtaacaaatttgcttgacttctgacgagtaagaaattggcagcaagttcagcaggggccagactaataaatcagcttgatagcatccttgcagcggtgccttggactttggcggttagaagagttgcggctctggataaactcgaagctgacctatccaagttcgacgacgggcccttcttcctaggccaattcagcttggcggatgtagcgtacattacgattctggaaagggttcagatatactattcccatcttaggaactacgacatcgccgaaggcaggcccaacctccaggaattcatcgaggagatgaacaagatttgagcgta

SEQ ID NO: 180798 - DNA, 1489 bp, Zea mays
  unsure (1)..(1489): unsure at all n locations
  Clone ID: MRT4577_96466C.1
aatttttcaaggaaaaaaaggttttatattaattgtgcancgtgccggtggaatatgagtttgtgtggttgtgcctagaacctgtctagacaatctggagtaatatattaattgtgcagagctgtctagaacctgccgaaacaatctggagtaatatattaattgtgcagcgtgccaatctaatatgagttatgttctttttggtgttcctttcaagggaaacgctcggcggcgaagctaaagcagagcttgcgctacacgcgctgcgagcagtttctgtctaaagggcaaggtctgatctcatgtgagtcatgtctggttggtgtgatacattaatcttaatcaatttttgtgattttggggatttctggtttttggttgacaattcgccagtggtgtacatgacagatttgagctccccgtggcactgctcgcccggccagccaccatcccggtcttgcgctcggcggcgtgcatggtgtcctcgtcgtccgcagtggctagcttctgttttcttaattgatggctagcttctgttttcttaattgatgatttgttttttccttttctgatcgtcaatagggaagagacgacgataacatggacactgttttctaaatggatcagtatttttggtatatacacatgcttttactagtagaggagtatttattttcatttgtagcagccaaggaacttgtgcattccttatgaatcatgagaagaccatgaagatgcacacaaatttgcttgacttctgaccagtaataattagcgaaagaaagaaaatccagaaccatgaatcagcttgatagcagtaacaaatttgcttgacttctgacgagtaagaaattggcagcaagttcagcaggggccagactaataaatcagcttgatagcatccttgcagcggtgccttggactttggcggttagaagaggtttataattttatatgatgaaattatgtgcatcttcagttgtttttgcctcactgctctgtaaggacatataaaattgttgcggctctggataaactcgaagctgacctatccaagttcgacgacgggcccttcttcctaggccaattcagcttggcggatgtagcgtacattacgattctggaaagggttcagatatactattcccatcttaggaactacgacatcgccgaaggcaggcccaacctccaggaattcatcgaggagatgaacaagattgaagcgtatgcgcagaccaagaacgatcctctgttcttgcttgatcttgccaagaaccatcttaagattgcctgaagatgtgacaaagcagcattagtccgttgatcggtggaagaccactcgtcagtgttgagttgaatgtttgatcaataaaatacggcatgttgtaagggttgttttacgctatttataatacaatgtactgttcagttgttgaactctatttcttaaacatgccaagtgcttttcttatttgaatcacattacaac

SEQ ID NO: 180799 - DNA, 1046 bp, Zea mays
  unsure (1)..(1046): unsure at all n locations
  Clone ID: MRT4577_96467C.1
atacagtttgctactttatcaaacgaggaacctgatgcttgtagtataagccttattttgttccaaacaagacaggcttcggatacaatcacctggaaatcaatcagtaaacttttgctattcagttttttaaataaaaaatttaggccttacgactttcctcgcaatgtgttcacatgtagattaccttattgcattgcctacttttgtccgttgtgtaaaccaatcttttatcatttatcaaatgattttgctcttaacattaacaaattatcgtttggtcatatgcaactaatgacatcacattaccaagattctggggacccatcgctaccttgtgtcaacagtagactgaccagatcagggaaacgctcggcggcgaagctaaagcagagcttgcgctacacgcgctgcgagcagtttctgtctaaagggcaaggtctgatctcatatttgagctccccgtggcactgctcgcccggccagccaccatcccggtcttgcgctcggcggcgtgcatggtgtgctcgtccctgacagtggctagcttctgttttcttaattgatggctagcttctgttttcttaattgatgatttgttttttccttttctgatcgtcaatagggaatttttggtatatacacatgcttttactagtagaggagtatttattttcatttgtagcagccaaggaacttgtgcattccttatgaatcatgagaagaccatgaagatgcacacaaatttgcttgacttctgaccagtaataattagcgaaagaaagaaaatccagaaccatgaatcagcttgatagcagtaacaaatttgcttgacttctgacgagtaagaaattggcagcaagttcagcaggggccagactaataaatcagcttgatagcatccttgcagcggtgccttggactttggcggttagaagaggtttataattntatatgatgaaattatgtgcatcttcagttgtttttgcctcactgctctttgcggctctggataaactcgaagctgacctatccaagttcgacga

SEQ ID NO: 180800 - DNA, 748 bp, Zea mays
  Clone ID: MRT4577_96468C.1
cgcgtcggcgtgctcctcgccggcgttccacacggcgcagagcacgccggcggcgtccgtggccagctccgcgcggcgcccagctggcggcgccaagccgctgctggcgacgcggaggatcctgctcaggtacctgcgcttcctcgtgcccctgtgccgcaaggcgagggcgctgcggcggctgccggtgccagcagggcgggtgttcttctccgcgccacgcaccagggcgctggccactgcgaccccagcgcgccggtcgacgtccagcgcctcctcgccgtcgccgtccgccgccgcggagtactggtgccacggcaacgccgacgtcgccgtgcgcgacgccatcctccactgcaagaaatccttgctcaccgcttgcgccgagtgctgaatcgggctctcggcctctcgcaatgcaagaacgctttcggcgaagcgactgacaagggattcgagaggaagatggatataatatttcgtctactctttttttcttctttttcatgtagttttgatttcgcatgtatgtgcatgcagtacagtggtgatgaattgtgcccatgggaatttggtcttgtgaggcgatttagttactgtctctttgtacagtagaggcatggcgttctctgtgttctctttctctgtaactatgcatccgtcgggggcatcgagccagtgcaagtgtgctggaacaaacagaaccaaattgtgccacatattgcccgttaaaaaaaaaaaaaaaaaa

SEQ ID NO: 180801 - DNA, 3189 bp, Zea mays
  Clone ID: MRT4577_96469C.1
aattcggctaaaagaagacactaccttggcacatgcctgttgtcacaatggacaaaagaagattagtgttgtgtgagatttttttcattcctttgatctattgcatgctatttgtaccctaatcgacaaaatagatgagactcaattcaggagcaaatcaccagtcctgttcacagtccaattcactatggctaaaatatcaaacttatgctccttgaggtttgttttttccttatcttcctttaatatctgatgactgatggactggtgagttcatgatctgcttcatgcttttccttttatatatggtcactacctcactggttagttcatggtgctttttgtctacttctttgcccaaaaaaaatcccggggcgaatttcagcatgcttttcctgcttccgctgtgcaaattcacaggatgcgtgggaaatgtgttcttgtttcgtcgggtggtgttcttgccattcgttttagctcaacacaaaacaaatgcttcttgttcttcaggtcgccctgtgtttctttctcgccagtttgggccatggattctggtgtgcatttgttcaatatatcttagtatcttatttaacaatcagtacttctctgatgctcaagagatcaatttactcaaagtagcaaactgtatcatagttgtatactttatcaaacgaggaacctgatgcttgtagtataagcctcattttgttccaaacaagacaggcttcggatacaatcacctggaaatcaatcagtaaacttttgctattcagttttttaaataaaaaatttaggccttacgactttcctcgcaatgtgttcacatgtagattaccttattgcattgcctacttttgtccgttgtgtaaaccaatcttttatcatttatcaaatgattttgctcttaacattaacaaattatcgtttggtcatatgcaactaatgacatcacattaccaagattctggggacccatcgctaccttgtgtcaacagtagactgaccagatcaggtaccattttgaaacctgtgtacaatttcatttctcaataactggccgaacataaatagccaaggcatgggtttatgccaatactcataggttaaatgacactttggtcatatgcatagttgccaccctcaaatgcctatctcatgatagaagtaaatggtggtctaaatcaacaacgactttctataagtaccatgactattattcttgaacaaatgtgtgctcatggttctgagtagatattaccattgccattgttttatatggaagtccagtgccttgtcaatctttggtccacgagtaagtgttttggatattcatgttagtgtacactgtaatcaacagagctggttttctttaacagttttgttatgaaatcatggaactggcaacatgatagaatttttcaaggaaaaaaaggtaatatattaattgtgcagcgtgccaatctaatatgagttatattaattgtgcctagaacctgtctagacaatctggagtaatatattaattgtgcagagctgtctagaacctgccgaaacaatctggagtaatatattaattgtgcagcgtgccaatctaatatgagttatgttctttttggtgttcctttcaagggaaacgctcggcggcgaagctaaagcagagcttgcgctacacgcgctgcgagcagtttctgtctaaagggcaaggtctgatctcatatttgagctccccgtggcactgctcgcccggccagccaccatcccggtcttgcgctcggcggcgtgcatggtgtgctcgtccctgacagtggctagcttctgttttcttaattgatggctagcttctgttttcttaattgatgatttgttttttccttttctgatcgtcaatagggaagagacgacgataacatggacactgttttctaaatggatcagtatttttggtatatacacatgcttttactagtagaggagtatttattttcatttgtagcagccaaggaacttgtgcattccttatgaatcatgagaagaccatgaagatgcacacaaatttgcttgacttctgaccagtaataattagcgaaagaaagaaaatccagaaccatgaatcagcttgatagcagtaacaaatttgcttgacttctgacgagtaagaaattggcagcaagttcagcaggggccagactaataaatcagcttgatagcatccttgcagcggtgccttggactttggcggttagaagaggtttataattttatatgatgaaattatgtgcatcttcagttgtttttgcctcactgctctgtaaggacatataaaattggtatttgtactttctaaggttctccttggaatggtagagttttacagggaaccttccatcatcagttgctgacatagctcgaactcgacgtttcttcttcgccagttgcggctctggataaactcgaagctgacctatccaagttcgacgacgggcccttcttcctaggccaattcagcttggcggatgtagcgtacattacgattctggaaagggttcagatatactattcccatcttaggaactacgacatcgccgaaggcaggcccaacctccaggaattcatcgaggagatgaacaagattgaagcgtatgcgcagaccaagaacgatcctctgttcttgcttgatcttgccaagaaccatcttaagattgcctgaagatgtgacaaagcagcattagtccgttgatcggtggaagaccactcgtcagtgttgagttgaatgtttgatcaataaaatacggcatgttgttgctgactttggacttgcaaagttcactactgataataacacccatgtttcaacaagagtaatgggtacttttgggtatttggcacctgagtatgcagcatctggcaagctcacagaaaaatccgatgtattttctttcggagtcatgcttcttgagcttattactgggcggcgaccaattgacacaacccaattggcactgcttgttataagcacatatgtacttccatttgcatgttgtataatactaataccaattgcaaaattatagttattttttctacccttgttagttaataagcatatttgtggtcaataggttgtattcttattcttgtaaccgtgttaattaatgttatggacttgtagtcttgtattaccttgtgaat

SEQ ID NO: 180802 - DNA, 116 bp, Zea mays
  Clone ID: MRT4577_9646C.1
cccatgcgtccgccgacgcatccggtggacagaatgcatcacgtcgaaaagccgatggactcgctcgattacgacgacaccatatacctaaccacagtgcagacaccgatgaccac

SEQ ID NO: 180803 - DNA, 386 bp, Zea mays
  Clone ID: MRT4577_96470C.1
gggctttgggcttttgggctgtgcttgatgcttgtatctcttgtcggctgtctatctccgtcgtcttatttcctatctagctccagctctccaccagtctcaggtctcagtcagttgtgttatcttcctgcgcagttactagttcctctactgttattaacggttatcgttgaggcttagattttgattgctgcggtggttgaggaagtgtttgcggcggagattttgttgttggttgctgcgtttgaggagctcgtttttgttgaggttgaggttgaggttgaggtcgtcgtcttcgtcgactttgaggagtcctttgtggttgagtagtaggtagttgttgaggtggaggttgtggtcttcgtcggcgttgaggagtttgctgt

SEQ ID NO: 180804 - DNA, 351 bp, Zea mays
  Clone ID: MRT4577_96471C.1
cccactcgacccaacaccaacttctaactacatctatccctatcactccacataatacacctacatgctttcagtaacttttaaaacaacacattccactaccatctaactcaactaactacaccaaaccctactttctactttcaacaccctcaaaatccaaccaactcactacttaaaactcttctacatacctacaacatctacaacatacacttaatccactatccccagctaacacatccctttctaaattactacaacacctacaattacatccataccaccatttctcttcactcaaccctcccttcttattgcaacaacacatcctctaacctacaatctttt

SEQ ID NO: 180805 - DNA, 1429 bp, Zea mays
  Clone ID: MRT4577_96472C.1
cattagacatcttgaagtacgtattccgtatggaacctacttaccctttgagaagcatgctaccagatttcattattagatgttgtgcatagaaacctgagtgatgttctaagctagatagcctgtggttcgaaggaaataacatagccagttttctaaatccggatatattggcttgcaattttgtagatatttcgttatataatggagaaaaatatatcttataagtagcaatgggtaataatccatcttttacccatgtttaaaacacgagacgatccatcattcatctatgtgccaacctttctcacacatggccctgccatattacgttcgcaacattgtcttgtctatcataagcaacaccataacattatcaaatctgaattttaggtctgctcatataaattatcaggtagatatgccgtcaataaaatggatgagtatttttggtttatacacatgcttttactagtagaggagatttgttttcatttgtagcagtcaaggaacttgtgcatttcttatgaatcatgagaagaccatgaagatgtatacaaattttgcttgacttctgaccagtaagaaattagccgcaagttcagcaggggccagactaataaatcagcttgatagcatccttgcagcggtgccttggactttggcggttagaagaggtttataattttatatgatgaaattatgtgcatcttcagttgtttttgcctcactgctctgtaaggacatataaaattggtatttgtactttctaaggttctccttggaatggtagagttttacagggaaccttccatcatcagttgctgacatagctcgaactcgacgtttttttttcgccagttgcggctctggataaactcgaagctgacctatccaagttcgacgacgggcccttcttcctaggccaattcagcttggcggatgtagcgtacattacgattctggaaagggttcagatatactattcccatcttaggaactacgacatcgccgaaggcaggcccaacctccaggaattcatcgaggagatgaacaagattgaagcgtatgcgcagaccaagaacgatcctctgttcttgcttgatcttgccaagaaccatcttaagattgcctgaagatgtgacaaagcagcattagtccgttgatcggtggaagaccactcgtcagtgttgagttgaatgtttgatcaataaaatacggcatgttgtaagggttgttttacgctatttataatacaatgtactgttcagttgttgaactctaaaaaaaaaaaaaaaaaaaaaaaaaaaagaagaccacccgtcagtgttgagttgaatgtttgatcaataaaatacggcatgttgtaagggttgttctacgctatttataatacaatgtactgctcagacgctgaactctatttctt

SEQ ID NO: 180806 - DNA, 220 bp, Zea mays
  Clone ID: MRT4577_96473C.1
gtggggggggtttttttttgtgggtttggggaaggtgaaaccttggaaggaaccaaaacctttcttgatcccatggtgcccacttgtacaatttaaatccctaaccggggattattacaacaaaaggggagtttaaatcagtgttaagcaacagggtaactgattccccccttcatgtcagtttacagtttctcaaactgccgttaaaacatatcttgtt

SEQ ID NO: 180807 - DNA, 569 bp, Zea mays
  Clone ID: MRT4577_96474C.1
aaaaaaaaaaaaacaaaaaaaaaaaaaaaaaaaaaaaaaaattaaaaaaagatcttcgcatctggcacgagcagccaagcaaataaaagtagagcggcgagcgacgaccggcctgggccaccctttcggccgagcgtagccgagcaggtcgtcgtcctcgtcgcagcaccccgccggctagcatggccacgaggaggcagtggtggtggtggtgcctgctgctgctggcggcgtggtgctgcgccgcggccgcgcagtcgccgccggcggcggacccgctgcagagcaagtgccagggggacttcgggaagctgacggactgcatggactacgctcgccgtggtctccgcgatcgcctcgtcactcttctgatggaccgacctcctctcaaaggagcagcggcggtttttttttaccctcctgtggattcgttctcgtgctgcgttccgctagcccatgtctactctgtactatctcataaaaaaaaatagatccagctgagacgttgttccacaacaaacaaatcaaaaacattttacaaagaaattttataaaaaaaaaggccccta

SEQ ID NO: 180808 - DNA, 436 bp, Zea mays
  Clone ID: MRT4577_96475C.1
aaacattagtaattacggtacaagcgagggaccaaagcactagaactctcttattccatattacaatggcagcagtgtagaggctactgctgctgctgctattggtatattatttctaatttgcatcatgcttgaatgcatgcaatattatttcaagctgctatacgattattaattggcggaagaagtagctcaaacagaacgatgccatgatggatcggatttgacagcatcgaccgacatcatgcactgtaagggatcttgacgtatgctttgaagtcgtaggagctgcccttggcattggctgcagaaatagacgagtgggtactactggcgttggtggtgtacccggccttgttgagattggtgtagagcttgtcccactgcgactggaaggagccgacgctgccgatctcgcagtaggccctgttcttgg

SEQ ID NO: 180809 - DNA, 395 bp, Zea mays
  Clone ID: MRT4577_96476C.1
ttcgcatctggcacgagcagccaagcaaataaaagtagagcggcgagcgacgaccggcctgggccactctttcggccgagcgtagccagcaggtcgtcgtcgtcgtcgtcgtcgcagcacccggccggctagcatggccacgaggaggcagtcgctcggactgcgcttcgaccgactcatggcgctccccgccgcctgcaacctccccaactccaacgtctcgctctgcatcaccctgctgaacctgaagccgggctctgcggactacgccctcttcgccaacgcctccaagatcacgccgtcagccggcggcaaccctgcgagcgacagcgccgcgggcagcggcgtcaagctccgggctggggtcagcggcggcgtcgcgctcgccgtggtct

SEQ ID NO: 180810 - DNA, 579 bp, Zea mays
  Clone ID: MRT4577_96477C.1
caatactccacctaccacgacccggcctgctccctctccccccctcccccaaccagatctcgccgcgatggcgcccgccgatgccgcgcgccgcctgctcctcctcctcgcggtggccggggccgtcctccgcccggccgcggcggagatcaagcaggagtccttcaaggacgactcccgcgggaccatcctcttcgagaagttcggcttctcgcaccgcgggtccgtctccatcgcgctcaccggcgccaaggccgtctccaagctcgccaagccggaccctgcgcagcttggcttcttcctcctctccgacgaggacctcttcgaggccatctacgagcagccgccgcccacggatctgaaccccaaccccgaccccaacacgggctgcgtcctcgccagccgctacgtcatcccgctcttcaccttcgccgaactcgacgccagcggcaactgcaacaagaccttccccgtctcccaccccgacgagtacagcctcttcttcgccaactgcgcgcccgagacagcccgtcccatggaggtacgcaccgatatgtacaacaccaactcggacggatc

SEQ ID NO: 180811 - DNA, 1145 bp, Zea mays
  Clone ID: MRT4577_96478C.1
ctcgaggccggccgggccgggctgtgcggccctcgaggccggccgggccgggggctcctctatcttcgcatctggcacgagcagccaagcaaataaaagtagagcggcgagcgacgaccggcctgggccaccctttcggccgagcgtagccgagcaggtcgtcgtcgtcgtcgtcgtccagcacccggccggctagcatggccacgaggaggcagtggtggtggtggtgcctgctgctgctggcggcgtggtgctgcgccgcggccgcgcagtcgccgccggcggcggacccgctgcagagcaagtgccagggggacttcgggaagctgacggactgcatggactacgcgacggggcacgcggcgtcgccctcgtccacctgctgcggcgacgccggcgacacggagaaggcgcgccccgagtgcctctgctacatcatccagcagacgcacacggggcgcaaccaggtgcagtcgctcggactgcgcttcgaccgactcatggcgctccccgccgcctgcaacctccccaactccaacgtctcgctctgcatcaccctgctgaacctgaagccgggctctgcggactacgccctcttcgccaacgcctccaagatcacgccgtcagccggcggcaaccctgcgagcgacagcgccgcgggcagcggcgtcaagctccgggctggggtcagcggcggcgtcgcgctcgccgtggtctccgcgatcgcctcgtcactcttctgatggaccgacctcctctcaaaggagcagcggcggtttttttttaccctcctgtggattcgttctcgtgctgcgttccgctagcccatgtctactctgtactatctcataaaaaaaaatagatccagctgagacgttgttccctccctctttccctgtaccgtgtttcatggtgacttgtgacaatggatggtttctccttgtgcgtcgccatttacaagcttttttgtttgtttgtttgtttgtttgttctggatgaacggagtttcagcgcagtaaacaattcaaataacctagttgttgtgttttcaggtttaaaaagttttaaaaaaaaaaaaaaaaaaaaaaaaaaaaaaaaaaaaaaaaaaaaaaaaaaaaaaacccccacaacccaggggggtgttt

SEQ ID NO: 180812 - DNA, 279 bp, Zea mays
  Clone ID: MRT4577_96479C.1
ccgagcaacatataaagcactttaccgtaccatcattggcttttaaaataaaatgcctccttgggctcctgtgtatttttgcaagtgctgctacacctaccattttcccacaatgctcacaagctcctatatcttcccttctttccccgaaccttttaccaacgttgtcttcacaatgctaaaacccaattcttcaaccctacaagatccaacatgctatctcagctatcatcttacctttatcacccttgctcctccaacaatcatattacctatttc

SEQ ID NO: 180813 - DNA, 173 bp, Zea mays
  Clone ID: MRT4577_9647C.1
cctgcaacgcstgcggcggyggmtaccggatcgtctgcgaggaggacccdtcctabgcctgcgccatcatgtgayycmttgtcccsttacgttatatacasastcatatatacgaggkcgccatatatacacagtcatatatatacatacagcatcatgtataccgtacgtcc

SEQ ID NO: 180814 - DNA, 399 bp, Zea mays
  Clone ID: MRT4577_96480C.1
acgcccgcgcgggccccgccccgatttcccgggggcgccccacgcctgcgtttcattattatcgatagaggacactataggccagttgcatgcacatggcgcgcgtagcccccctaaggagctcctagcacctctacgggtcgcttggtcgcctgggctaacgccgaccgcgcccgctaggtgctacatcgctatgggcacgctacccccctattacaagtgggaggccggaggctaaagactcggcgcgcgtacgcgcgctgaacgcgacgattatgaaaaccctgatctagggagccaatgggctataacttgtacactattaaactaaacgatcagatggaatcacgatcatgctctatctgtattcattgttggactaaatattatttacggccc

SEQ ID NO: 180815 - DNA, 314 bp, Zea mays
  Clone ID: MRT4577_96481C.1
aattttgtatttttttttgtttcatatcatcagtatcagcaatacaacacgcgtattattctatttatgaacgactcacttgccactcatctctgagctagcatatattcagaaaatttcagtgtgtactatatattctattctcatgtttgaatgtgcatgacacgctatatatatacgcaatttaagcttacaagtatacaagtacattatgatgatatgatgtcataggaaatcagtgatgaatggatcatcgttggggaagaactccggccaagggagcgggctgcagctgaagccggacgacgacgcag

SEQ ID NO: 180816 - DNA, 184 bp, Zea mays
  unsure (1)..(184): unsure at all n locations
  Clone ID: MRT4577_96482C.1
aagcccccnggngcgagggggggggggggcttgactgcantgagaatgcagatctatgtgacagggctgagagaatagtttnaggcgagcctagtgtcttacagcttagggctccgagtaagagatttggtgagctgcatggtcaagttggtgagctnaggcgcttagttgatgaagacggggc

SEQ ID NO: 180817 - DNA, 281 bp, Zea mays
  Clone ID: MRT4577_96483C.1
gcaaactgtcaggacggtaccggcggcactgcgggctcggcttcagtgaggtagaagatcatgatggagaaggtgatgtggctggggatgacgatgaggacgactctcctgatgctgagagtccagatgactcggacagcgattctgagtctgagaaggaggagtctgcagaagagctccacgctgctgcgcatcctgacgacacagaagacccgaagagcaaaaaagatgcgaagagcagttataagatgatgttcgtcaagtccagtggctcataacca

SEQ ID NO: 180818 - DNA, 256 bp, Zea mays
  unsure (1)..(256): unsure at all n locations
  Clone ID: MRT4577_96484C.1
ccaccacaagggggccttttacaacagccaacggaacctcaccaccgaacaacaacaaacaagcaanacaaaacagggcaccgccaacgacgcgaggacgccagaaggccgccgggcacgacaaaacaagcggcacaaagggcaacaaccgacgcagacgcacgagggccgcggggccagacacaaacagccgccagaacggaagcactcgcagacgcgccaagaaggaagcggggcccgccgaagatcgcccgcc

SEQ ID NO: 180819 - DNA, 415 bp, Zea mays
  Clone ID: MRT4577_96485C.1
tacgacccacgcgtacgattgagaccaactcccaacataaatatcacatttgttttccaacaacggcaatcaaactacgggggcgacttatactccttggcctcttatcctcctttctttccctacccatgttgctaacgcgactacaatctctcaatgctcacactgcttctcatcatcctcttaccaccccataccttcacatcaatgataactcaattgtgcaaccatcccagatccaccaccctatacgatccaacatcttaccattatcagcctcattccttcatcacccttgattcatatatcaccagccacctcttttgcacttggattcacacaaaatatcagcgcaccaactacgacaactcttgctctccctcctatctacctactctcatcaacatacctttct

SEQ ID NO: 180820 - DNA, 566 bp, Zea mays
  Clone ID: MRT4577_96486C.1
catacacctgtcctagaatggttgtatctgcttctggagctgtcgatcatgatgaggttgttgatcaagtcagaaaattgtttacaggattctctactgatccaactactgcagatcagcttgttgaggcaaatccggctatttttactggctcagaggttcgtgtggagaatgccgagatgcctctagcgcatattgcaattgctttcaagggttcatcatggactgaccctagctctattcctcttatggtgacccaaagcatattgggatcttggaataggagcatcggcgtagggaactgctcagggtctgctttagctcgtggcatcagcaatggtgggctagctgagaacttgatggcattcaacactaactatcgtgatacaggattatttggcatctatactagtgctccgcctgacgcactacatgacctgtcacggttaatgatggaagaatttagaagacttgcattcagagtgtcagagacagaggttgctcgtgctcgtaatcagttgaaatcctctattttgcttcactttgatggatcaactgcagtttct

SEQ ID NO: 180821 - DNA, 331 bp, Zea mays
  unsure (1)..(331): unsure at all n locations
  Clone ID: MRT4577_96487C.1
ggtaccctcgggttcgcgccgcgggnagggcgacggngtagttcgtggcacacagccaatgccagcgctcggtgtttgctgcccatacgcctgcccctgtttgccccctgaccgccttgactcactcacttagccactgttgttgctgctgatcaatccgctctccagcacttgttcggaagaaaaagaaggtagaacacgctaacgagacaacaaggatcatggggcgcgggcgcggccacctcctgctgccggcagcagccggctgcctgtgggcgctgtcgagcgcactggtgctggacgcgaacgctcaccgcgctggcgccgagac

SEQ ID NO: 180822 - DNA, 796 bp, Zea mays
  Clone ID: MRT4577_96488C.1
gcctctttcatttgccgtacgtacgtgtggtacagctgcgatgggctcgggcttcatcgccaagggcctcaccatcgtgaacagcgccgggccagggaaggggcaggccgtggcgctgcgcgtcggcggcgacctctccgtggtgtaccagtgcgccatccaggcgtaccaggacacgctctacgtgcactccggccgccagttctacgccgacgacgacatcgccggcacggtggacttcatcttcggcaacgccgccgtggtgctccagagctgcgacatccaggcccggaggccgagccccgggcagaaggacacggtgacggcgcagggccgcaccgaccccaaccagaactccggcatctccatccaccgctgcaggatcaccggcgcgccggacctcggcggcacgccggtgtacctgggccgtccgtggcagaggtactcgcggacggtcgtcatggagagcttcctcgaccgctcgctctcgccggccgggtggctcgagtggtcgggccagttcgctctgagcacgttgtactacggggagtacggcaataccgggcctggtgccggaacgagtcggcgagtgacgtggactggggtgcacacgtcactgtccaagtcagatgccgcgaggtttaccgtggcggaattcatcctcggagacgaatggttgggtggcactggagtcaactatatttcaggactgtgaggtgaatgtctcgcctccttgtccgtatatgtgtacgtaattcagtgattttaataataactaaataaaagattcctgggt

SEQ ID NO: 180823 - DNA, 294 bp, Zea mays
  unsure (1)..(294): unsure at all n locations
  Clone ID: MRT4577_96489C.1
tctttatcttctcgcctcctcactcttcccgggtcgtgtgcattctcttttttgaggattaaaacaccaaatcnaattcctcacctttctgtcgcgcctgcctcgaagacgtgaagcccggcagcctgtcgatatacacccaccacagcgacttctagctcatcgatacctcaactagcgagaacctaacccggctcaccatgtacataaatcagctcacacttgcaaccctacatgtaagatgaccttagcatttacaagtaccacatcaagtaaaatgcaactgatccttcc

SEQ ID NO: 180824 - DNA, 1624 bp, Zea mays
  Clone ID: MRT4577_9648C.1
cggtactaaagtcctctatatgaactccacatttgaaactggtactgatacttgtaccgggtttgaaacaaccagaacaaatgttgatggatggaagtctttcttctgtgtgtccttggattcgatgtctttagtttaattgtttggatacggtacaagttacatacatacgatcgaaattgcatgctaaaattaatttcctcgcacccaaaaattacagttcgcatgcagtacacaccgcacacgacacagttggcgctgcacacgccgggaacgcgcaagtgcaaaggtgggtcgacgtggacggccggccaaatggcaaatgaaatggtcgtccggacgtcggacgtgcagctagagggagtagagcttcctgaggttcatgggggagatgtacttggagtcgccgtcgacgatgtacttggcgagcagcacgttggcggcctcgcttgggtggtacgggtcccagaacacgtgcttgtcccgggcgtcgcacaggctcgtcgtcggcccgcacggcaccagcccgtcgtacgacccgccgttgccgcagcacgccacgctggccgtctggaacccgtagttggggtagttggtgatgagctccatgacgaggtcgtagacgttggcgaggcagaacctggcgccggggaggccggcgttgaggtcgatgatgagctccctgagccgggagttgtactgcccaaccagctggcggcgcagtacaactcccggctcagggagctcttcttcgccctcaacgccgtcctccccggcgccaggttctgcctcgcctacgtctacgacctcgtcctggagctcatcactaactacctcaactacgggtttctattgagttgtattagttttttgtttatacatggttattaattgtttctttgataatttttttttcttcttatatttttttttttcgttcttttattttatttttttttttttatactatctttatttatattgtttttttattacttctttttttttttcattttattttttttgattttttttcttaattttcttgttttttattgtttctttttgcttctttatgttttatagtccttctatgttattttaatttctcttctccctcttttcttcccatcttttttgcccttttctttcttcctcttcctcttcctctcttttttccctctttctttttttcttcatctttctccccctcttcttccttctctctttctcctccaccctcctctcttcttcttttctttttcttctttctttttcttttctctctttctttttcttttcttctttcttctcctcttcttatttttttctctttttttactttcctgtctctcatcttctttcttgtcctttcactcttctctcctcccctctctcctttattttatcttctctttgtctcccttcctcgtcctcccatctctcacctttcctaacaccggattccacgtcctttatccctctcttcttctccttttatctctttttcacattcgtcctccttccttcttcacccctcttctttttatccttctctcctaactcatgccctgtcttcacctctcctttcatcttctccacttccccttctcccccacttttt

SEQ ID NO: 180825 - DNA, 270 bp, Zea mays
  Clone ID: MRT4577_96490C.1
atgacgcgtcgcctgacgcaagttctctgagtaggcggactacacactgctgatcgcaggggtgggtatctacctaggcaggtgggtgattacgactaacagagatgggccttctctgcaagctgtggtacgacaccgtcgcaggcccatgcccggacacctggctctgtcggctccgcaagcagactgtgcgtgccgtcgccgtcaagatcagtgatccggccgtggacgcttcggcgttcgtgcctgcctcgacggcttttggtagct

SEQ ID NO: 180826 - DNA, 127 bp, Zea mays
  Clone ID: MRT4577_96491C.1
caagtacttcatggacttattaactctgtaagagacgagaattaaaggagtccgaattgtaacgcaacatcatgttgaagccattccatttgaattggaactttctgcatcatgacttctggaatga

SEQ ID NO: 180827 - DNA, 343 bp, Zea mays
  Clone ID: MRT4577_96492C.1
aaaaggaacataagggaacccatttgtaaattgtttgtcaatttcacaacatatattcaggcattgtgaatgctgccccagtgaacctacgacgtttttgaggggttttgagaattttttttgagctaaccccttactgttactggagccatgaactgttgcaagcaagttgctttttgaactggagtatgttgaaaaaaaattggtttgaaaaacattttctgaaaagtttgggtcttcttgaatgaattgaccagggaatgacttttttgcaactgtttcctgccgtatgttaaaaaagttctccatgactgccttgggttttttaatgggagttagggga

SEQ ID NO: 180828 - DNA, 466 bp, Zea mays
  unsure (1)..(466): unsure at all n locations
  Clone ID: MRT4577_96493C.1
aaggtaaccccgtccaaattagcttttgggcggggaattttttantcanctttattaaaaaacaaggggttttagacacccctttttaccggccgacacatgtaacatccccttggggtttggaacaatacaccaacaacactgggggccggtcaagattgaaaaaggggagggagattgcctttttccaacagggtttcggacgggttttaccccacaggggggcaagacctaggggcatcagagggggcaacatttgaaggggggatgaactgccacattgggaatccaggggggccaatcacaggcattaataatttgggcctgggggggggtggtggcccctggggagcagggaacccaaagggtgggaacactggggggggggggacaagggttggccgggcattcaggaacttgatctggtggtccaggcttttctttttggccttaaacctttgctttt

SEQ ID NO: 180829 - DNA, 379 bp, Zea mays
  Clone ID: MRT4577_96494C.1
caaaacccaagtttttcctgttttgaagggggtatttttttttcaaggtttggttttctcaaaggggcttacttttttcaaaagggggggggggggaaccccccaaaggtttttcctaaaccttggttggccccctccaaaacggggaacgcttttccgccttacgaaaaggggggggtctttttattacccgggatggtttcgggacaaggttttttcagggccgcaactccctaaaaagttctggctttgggcggacccctgggtcccccccggaatttcgggccgggtcctgggggggtaccaacttttccttttgggggggggtttaaagcttgggggaatcatgggcatagctggttcctgggggaaaatgttt

SEQ ID NO: 180830 - DNA, 300 bp, Zea mays
  Clone ID: MRT4577_96495C.1
cgcaatcgggaactgcaaaaaattgggaccccattgcccattaaggcaaaagggttttttaggaaataaatatgggtttattgcccggaagcccgcacttttaaaaaaaaagggcaaatcttggggggggcctgcctcacggtttttggaggaaaaccgcattcagttttttttcccaaaaccctttttattatttgcccaaggtacctaaatttttccaaccatccaacggttggttttaaccacatgggtctatttggaagggtaaacccccttttaatacttcccagggaatttgct

SEQ ID NO: 180831 - DNA, 288 bp, Zea mays
  Clone ID: MRT4577_96496C.1
gggttttgctcgtcttgccgcgtcggcgctggagctcggctcgagcatagagtgttcatggatgatgatgcactgctacagtatatggtagaattgacctttgtgatcgccacagcatcatcgggctcactacttggtccataaagacctgacagtaactggcagcggcccgcacgccagcgctgcgatccagttcatgcatgaccatagagtccaggtagggtcttgcagttcatcgtgagggcacatggcattcacatacgccgtagagatgagagagcctctcga

SEQ ID NO: 180832 - DNA, 340 bp, Zea mays
  Clone ID: MRT4577_96497C.1
tatgaggaacagatggcacgcccgcagagcccggatcctgaatttccgggacgagggcgcgtacggctaatcaataggagagatacgtaggaggcgatggagtgacgagcatcaaacagacgggctgcgaaggcggagggcggaaagggagcccgcactgtaaacagacccaaggaaccccgccctaagcaccgccgtgctttctaagaccgggatccacgggcggagcggatacctggacacaaacttccctgggagaagcgcggccatggtaatagctcaagccatacgccgctgacagctgcgaccaaagcatgctccaagcgctgaacttgcgcca

SEQ ID NO: 180833 - DNA, 375 bp, Zea mays
  Clone ID: MRT4577_96498C.1
cgcccaggaggactaccttaacgcgccatgacagacctactcctttttcccttttcgtgacgggaacctacggcttcgactgaggaggcattctagaaggcggaatgcgtcagcccatcaccgacaactaactaacgcagactatcgaggcgacatccactcacgtattaactgctgcttcctgctatgtaatccggcgatctgtccatgctgcacatgatgtcggccacatacaacaacctgtgttacgactacgtatatatacatactactaggtgctcgatgccttcgaccgccaagtgcacaaggagaaagaacgacgcctcaaaaaacacagaggcgcgcgctatacaggacacaaacttacgtactcgt

SEQ ID NO: 180834 - DNA, 1075 bp, Zea mays
  Clone ID: MRT4577_96499C.1
tgaataaatgcatttattcatcactggttcatatattacaaatcaccaaatccgagcggtagctctcctaattaacgagacgtaagcacgacgggttgatcaatcttgtcccataccctctctcccactcaacaactgggccacccaccttagcgacccactccataccaccatctttgacacgggcggaggatcctcttaagcccgccattgcttcactccgtccatcgggggaaaccccggggtgaacccactttaatccctttgagccagaacccccttttccccgttgggcgtccctcagagtgctcggcgtcacctggcaggacgctggcaaggtggagctggtggatgggtcctcctacctgggccagccgctgccgttcaccatctcgacgctcatctggatcgaggtgcttgtgatcggctacatcgagttccagcgcaacgccgagctcgacccggagaagaggctgtaccccggcggctcctactttgacccgctcgccttggcggccgaccccgagaagaaggagcggctgcagctggcggagatcaagcacgcgcgcctcgccatggtcgccttcctcggcttcgccgtgcaggccgccgccaccggcaaggggccactcaacaactgggccacccaccttagcgacccactccataccaccatcttcgacacgttcggaggatcctcttaagcccgccattgatccgctccgtccatcgatcgaaacgtggtcttgaattaactatgatagatctctatgagcctggagatggatcaacccgtcgtgcgttgtttcattttgtgatgaatgggagagagggtatgggacaagattgatcaacccgtcgtgcttacgtctcgttaattaggagagctaccgctcggatttggtgatttgtaatatatgaaccagtgatgaataaatgcattcacttgtacacaaaaaaaaaaaggtgaccgaggatataagacgcaccaaggtgaggatgaaagtttttgagtcaatcgtttatcaaataatacaaagaaatatgtccaaaaaacactgggtttctcctttct

SEQ ID NO: 180835 - DNA, 216 bp, Zea mays
  Clone ID: MRT4577_9649C.1
tcggggtgaaggacgttcgcttccccggttcgtcgtccgggccacggtttaacccctcgcccttggaatccttcggcggaacccctttctccattcggccttcggcgcgcccgggtttttccctttccgaaaaggcaagcttcaatcccggccggggtggctcccccggcgattgggcgggaacgccggccaaccaaaaccttcttggccggcggc

SEQ ID NO: 180836 - DNA, 362 bp, Zea mays
  Clone ID: MRT4577_964C.1
gactctagcaaacgtcggcagaggagcacccccagtgctacgtccactccggtagaagatgaacgattcaggctaggtgatctcgatgggacaaagaaaagaattcgggatgtctctttgccaaggtaggatcacgatcctcttgtcacagtcccctttagatatctgggagagtctagccggcacctacatagcgcttgaggctgccgacgatgagggggtccggctttggtaacgtctgttgcaagcggaacaacgggttattgatctttagtcgattgtttttggccttcataaggtttgttgttataatttgtttttttttattcattttatttgctttctatttttaatattttttt

SEQ ID NO: 180837 - DNA, 541 bp, Zea mays
  Clone ID: MRT4577_96500C.1
cacatacttcattgtcgaatgtattaaagaaggcggcattggaggcacctgctaccgctgcggctaggggaggcatccgaaagatctgcatccactgggctactgattcgagtggcacgaaactgaagccgaatgcgccatagaccgcgctacacgcacgatcaagagtcgctgctgtcaaaactcttgagcacctagtaggggcctatgaagtacacatatacctatctccataggataaggaggcagtccctatgatgaaaactgaaataagaccagcggacctatagcttgacatttgggtcacatcaatgagatcctatgcagagcttggtgtttcgagccgcacatctgccacctgcttgataagctagctacggtaccaaaggcagacacacgagatacccgccgcattcattcaaagaccgggcgcgcttatggatctagctaagtcacattatattgatgagtgcaaagtgcccgatggcgatactgaaaagcctacagaccaggtggcttaatgaacctttcatatcaccat

SEQ ID NO: 180838 - DNA, 1268 bp, Zea mays
  Clone ID: MRT4577_96501C.1
cattgggtacctcgggccgggggccgggaccgcaaacaagctcctgacaacccacgccacgacgacacaacaaagcacaacaccgcagctactaaacccatggccggggtcgtggtggtgttcgacttcgacaagacgatcatcgacgtcgacagcgacaactgggtcgtggacagcctcggcttcaccgagccgttcgagcgcctcctgcccaccatgccctggaacacgctcatggacaccatgatgggggagctgcacgcgcacggcaggaccctggacgacgtcgccgaggcgctccgtgcggcgcccgtcgtcgcgggcgtccccgccgccatcaaggccgcctacgcgctcggctgcgacctgcgcgtcctcagcgacgccaacgccttcttcatcgacaccgtcctggcgcaccacggcctgctgggctgcttctcccagatcaacaccaaccccagccaccccgacgccgacgccgacggccgcctccgcatcgggccctaccacgacctgcacgggtgcggcgtcggcacctgcccgcccaacatgtgcaagggccaggtgctggaccgcatcctccgcgaggcgtcgtcgtcggccgccggcaggaagcgcgtcgtgtacctgggcgacggccgcggcgactactgcccggcgctgcggctggcaagggaggacttcgtcatgccgcgcaggggcttccccgtgtgggacctcatctgcgaggaccccgcgcggctgcaggcggaggtgcacccctgggccgacggcgccgagctggaggagacgctgctgcgcctcgtcgggagggcgcgcgtggaggaggccgcactgctgccgccgctcgactgcaagctcgagtccatgcccgttgccgcgcaggagggcatgggacccatcatgccgctcggcgtcaagcactgacgatacacgcagcagtgcagtctctggtttgctggttaatgctggtttggttcgggttggacgaacgattagtaagtagctcgaataattagtataactgtatcggctaattttatgtgtttgtgtgtgtgctgtgtggtgtatgcctccgcatcgagctgcctgtcactgctgaattggctctgcctcgctgtgtatcttattcttacctacagaaagagtaccacgagcaaataaaaaaaaaaaaaaaaaacgcggtactacacaatctgtagacacagttgcgatcaagcgggcgcgatattgtacccttctgccatacctattctatgccggtt

SEQ ID NO: 180839 - DNA, 383 bp, Zea mays
  unsure (1)..(383): unsure at all n locations
  Clone ID: MRT4577_96502C.1
cggcccggaaggcccgggccgacccacgcggctagctccanggacaagcgaggaacnaagggggggaactgaagaacaaaccgccgcacccgccgccgcggctcgggagccacaacagccagccacgtggcaacagcaagaagaagacgccgcacggcccggagacgagggcgcacacacaggtgacgcagcaagagcgccgcgccccacgcgcccctctgcaagaccacagggcccacgacggcggcgccgaccaggtgccgccgcgagcagcaaaacaaccggccggaggcccaaagaagcaccccacggcgaccatgaggacagcggcctgagcgccgctgcgcggagccgccgagaggaggccgacgcgcacagcgcga

SEQ ID NO: 180840 - DNA, 656 bp, Zea mays
  unsure (1)..(656): unsure at all n locations
  Clone ID: MRT4577_96503C.1
gggagcggcatctatagcaatcggtgcaacactttcacgctcaggcgctcagctctatcaatggctggctcaccatggtgatctcctccacggcgatggccgttacctttatcaaggtgtccttcttcggcgagggccggattaccatgcgcaagatcgtgggcaagcccaaggtggtggtgtccggcagcccctggtacgggcccgaccgtgtcaagtacctccagccacttctccggcgagcccacgagctacctcaccggggagttccccggcgactacggctgggacaccgtcgagctgtccgacgaccacgagaccttcgtcaagaactgctagctggaggtgatccactcctgctgcgccatgctcggcgcgctcggctgcgtgttccccgagctgctctgctgcatcggcgacaagctcagcgaggccgtctggttcaaggccggctcccagatcttcagcgagggcgggctgtactaccttggcaaccccaggctgatccacgcgcagagcatactcggcatctgggcctgccaggtcatgctcatgggcgccgtcgagggctaccgtattgccggcggaccgctggncgaggtcgtcgacccgctgtacgctgtcggcaggttagagcccctcggcctggccgacga

SEQ ID NO: 180841 - DNA, 574 bp, Zea mays
  Clone ID: MRT4577_96504C.1
atccatctccggctacctcccagctaccgacgaatcccaaccatctcacccgccgccgccgccgccgaagccgaagccgccacgagttcatcatctaccgagcgtcgtcatcccgtcttctttgggggtctccgcgagccgcccgcgctcttggaagccgaggaggtcctgggttcgccatcctgcgtgtttgtgttcgctgaaatatggagatacagacttcagggaagcccattgatatgctgatggagaaggttctctgtatgaatattctttcttctgattacttcaaggagctctaccagatgaagacctatcatgaggtcattgacgagatctacaaccaagttgatcatgtggagccttggatgactggcaattgcaggggtccttccactgcattttgtctcctctacaagttcttcacaatgaagcttactgtgaaacagatgcatggtttgttgaagcatcctgactccccatacattagagctatccaaagatcctatggacatggtatgagccctacttgaaggatgatgaggaattctcccctggatctaatggtcgcatg

SEQ ID NO: 180842 - DNA, 229 bp, Zea mays
  Clone ID: MRT4577_96505C.1
atttaaacccctccaatccccctctggattggtctaagcgaacatgccctaatgtgttgtctctttgggaatcttcatatgttctgcatatgattgtgctattttcatatattttgcatctgggtgtgctattgattgtggtagacaagcatcatgaactggatagatgactgattgaagagtctaaaacaaaaacaccctcctcttatgcaaaaaaaagaacacaaag

SEQ ID NO: 180843 - DNA, 812 bp, Zea mays
  unsure (1)..(812): unsure at all n locations
  Clone ID: MRT4577_96506C.1
acaaatccacagcctcccctcccctcccctccctcaccatctccggcgacctcccagctacgccgaatcccaaccatctcaccggccgcgccgccgaagccgaaacgcatcctctaccgaacgtcgtcatcccgtctgctttgggctctccgtgagccgcacgcgctctttgaagccgaggaggtcctagggttcgccatcctgcgtatttgtgttcgctgaaatatggagatacagacttcagggaagcccattgatatgctgatggagaaggttctctgtatgaatattctctcttctgattacttcaaggagctctacaggatgaagacctatcatgaggtcattgacgagatctacaaccaagttgatcatgtggagccttggatgactggcaattgcaggggtccttccactgcattttgtctcctctacaagttcttcacaatgaagcttactgtgaaacagatgcatggtttgttgaagcatcctgactccccgtacattagagctataggatttttgtatcttcgatatgttgcagatccaaagatcctatggacatggtatgagccctacctgaaggatgatgaggaattctcccctggatctaatggtcgcatgacaaccatgggtgtatatgtgcgtgatcttatacttggacagtactactttgatagtatccttccaagagttcctgttccagtagttcgtcaagtaacaaccaatcttgagaagatgaaactgcctaccaangctttctggnggtgactgggagacagcccgccacggatcagaggatactggccgtc

SEQ ID NO: 180844 - DNA, 290 bp, Zea mays
  Clone ID: MRT4577_96507C.1
gaaatggagcggccagtcccatctgtagaaattgttgtaatatgcggtctaaagtcccggtgttctttatcatgtattagggccagtacatgaacaacaaataaacacggtcgggttagattgtcaacaagcggcccgcattggaccatactatacgaatgagcccacatgtcaattatgtggccatgcatgcgactggcattacgggtatgttacttaaatatggtcgactgaaattacaaaatgggttgcacacgagagtagaacccgctgagagccgtatatcgatg

SEQ ID NO: 180845 - DNA, 368 bp, Zea mays
  unsure (1)..(368): unsure at all n locations
  Clone ID: MRT4577_96508C.1
cacccgtccgggcactcgttcgnccacgcatcccggttgcctcttctttatttttatcttatggatgatgaacttgggggaatggagaataacaagctcactactgaaattctccactcacgccaattattgaatccctgcatatagttttgtgaccatcccacccacctatgtgtgtcactcgatactttgagcactctgccatctataaactcattatcactgtggttatcagagcctcgaaagcctcctatctttcaaacccgtgctttttcttacacatgcaaaagcatatccttgtctatcaaatcgccgtcatagtcctgctaactctactttttaaacattgtgtccaccagacaataata

SEQ ID NO: 180846 - DNA, 144 bp, Zea mays
  Clone ID: MRT4577_96509C.1
ctcacgcaacattgcgatctttcattcatttgtaaaacctaaaagcggggggagggggatctttctcttctcacaatcagacctggttcgggtgcccctactattaacaatgaccacctcctattctatgaccatgctaaagct

SEQ ID NO: 180847 - DNA, 480 bp, Zea mays
  Clone ID: MRT4577_9650C.1
gctccggataaatttacccgttccggcggtcgaccgtgcacgacctggccgcctgggcgcctggcgagtggcgaccgtctgcctgccctgcacgcccacttgccgccgccccggcttcgccactaccgccatcccgaccggctcgcgcgccaccgccatctcctcctgcgctcgccttgctgccgcggccgcccccaccacaaggacccagaggggctgccctcgatctgactgaccccacgggacaggatggacaaggggaaatcggtggtagccgagctgtcggcatcgtccagctcgctcccgtcgccctccttctatcctttctcaaagaaggctaaacctcggaaattggacagattgtgcctgggcacccttggtcagtatcttgatgatatcatcactgatatttcacaatttgctgctttatctccaccccacatcaacgatgcccaaatatgtctattgaaaggaataaaa

SEQ ID NO: 180848 - DNA, 153 bp, Zea mays
  Clone ID: MRT4577_96510C.1
ggctgccgtcttctcgtccagtgctagctcgttcccacatccagctccggcctgctgctccatccgctcgtcgggaccttctgtcttggcctcgacggtggtgtgtaagaaccccctttcgtccagcgctggtgcgttaccgaagcttggagg

SEQ ID NO: 180849 - DNA, 258 bp, Zea mays
  Clone ID: MRT4577_96511C.1
cgtgaacttatctggttcctgctgagtccggttgccaacttctctgctgttcgcatcggttcttaaaacacagatgctgatcccatggaaagatcccgctaccagctgtcgcggatcatggccgctgggattgccgtctgactcaacggacagtgccatattactatgtctgtcgaccatgcctggctctttccattgtagtactcggcttagggacacattcatctgcaccatgattcgttgggcctggaactatgt

SEQ ID NO: 180850 - DNA, 350 bp, Zea mays
  Clone ID: MRT4577_96512C.1
atcccaatccccaatactgattcgtattaccagcacagactgaattctctttagctagctaagacagggtaaccacaccaaaacaggatgcagtcagcgaaggtgaaggcaaatgacatggtgagctcggcaacggaaaaggtgaacgaggggtcggcaaaaatgcatggcaagacgggcgacgcgaccgcggccacgcacggcgagaacgaaattgccaatgatgctgcccgcgccaagaacgaccagttcaacgccgacatgcaccacgacaacgtcgaccaccgaacggtcaccgccattggccactacagcacgcgcgtgcccctcaatcgcccgcacgggcatca

SEQ ID NO: 180851 - DNA, 481 bp, Zea mays
  Clone ID: MRT4577_96513C.1
cattgggtacctcgaggccggccgggcccgaacgaaatcgctaggccgttgcgccacccttccgccgccgcgtgcgcgccatttaagcaggcaggcgatcagctctccaccacgccactgtcccgacgagagcaggagcgagctcgcgtcgagtcatattttctgcctaaggtcggggtcgcgccgtacgacgcaggcgctgcttggagatggagctggtgctggtgatctcgctgccgctcgtggccctcgtcgtcatcgtcgccatcatcctctgcatcatctgccgctgatcgcagacgatggcctcttcagcctgcacggccgtatgcgttgcgacgccggcgtcgccttcctgcttgctcatcagtacctcaattgttttgtaaccacaaattaaacacataaagaaaccagcagcttgtcttcgtaaccaagcgactagagatttctcgagaaaaaaaaaaaaaaaaaagcggcc

SEQ ID NO: 180852 - DNA, 246 bp, Zea mays
  unsure (1)..(246): unsure at all n locations
  Clone ID: MRT4577_96514C.1
acaagccacgcgcgcgccggcttccgccagccgcagtgcngagtggcggcccagtccgctataggcgccggtgaccagcgcggtcttggatttcaggtcttcaaacatcggtgcgtctcctttgtttgtctgccggcggcattacgccgcctcacgggtcgcggcctggctggcgggatgaagttccaccagcgcatccaccgccaccgcgccctgccccaccgcgccgaccatcaccgggttgat

SEQ ID NO: 180853 - DNA, 491 bp, Zea mays
  Clone ID: MRT4577_96515C.1
ggccgccccttttttttttttttttttggtgcagacacagcaagatggttctttatgtgtttaatttgtggttacaaaacaattgaggtactggtgagcaagcaggraggcgacgccggcgtcgcaacgcataaggccgttcatgcaggctgaagaggccatcgtctgcgatcagcggcagatgatgcagaggatgatggcgacgatgacgacgagggccaccagcggcagcaggatcaccagcaccagctccatctccaagcagcgcctgcgtcgtacgcggcgcgaccccgacccgccgacctgaggccgaaattatgactcgacgcggcggcgctcctgctctcgtcgggaccgtggcgtggtggagagctgatcgcctgcctgcttaaatggcgcgcacgcggcggcggaagggtggcgcaacggcctagcgatttcgttcgggaccgaagccgcctgccgtcggtgaagttaaatactactactac

SEQ ID NO: 180854 - DNA, 439 bp, Zea mays
  Clone ID: MRT4577_96516C.1
agtgaaaggctgtataattacagtttaaaagtttacattttagtatctcttcccgtaaattctgacgacaaattcgagtccatgattcctctgggatttaagaagtaatttaacgttgctagatcctgcgccaccgttctgcaaaatggcgcatccgccgtttttgtcggagtactggtctaaagcttcgatgtaggtgatggtccctttgatatctccgggctgaggatagttgatatcataggtgacaaccctcaaaagtttcgtgctcaattttgggtgctccacatgcaacaactggtctccccactgtctagatccgaagaacgcattgaggcttttattcgtgccacaagaaacggccaacgctggctgcggagcgcagatgttcaaagccaaagccaaaaaaaggcccaaacttaaacttggcacaatttca

SEQ ID NO: 180855 - DNA, 315 bp, Zea mays
  Clone ID: MRT4577_96517C.1
ggttcaagggacaaaccatttcatggggctaaaaaatcgggaacccacatgagcggggctcatctgcaaaaacgagaacccccctcgcccttttcctccggaccggttgcccacccccatgcaaaatacacaccgccccggtgggccaaagaacaatgcgaggggccaccaaaggcgtgggcaccagggggttcataagggaagccagctggaggcgccctttgggaatcacccgcccaccgcgggaaccctatctaaaggggcccccaccccctgggccccctgtggggctggtcccccaccctaatccacggg

SEQ ID NO: 180856 - DNA, 310 bp, Zea mays
  Clone ID: MRT4577_96518C.1
tcctacccgtgggcggacgcgtgggtggggatgctcttgcgctatggaacacgaaagcacacgtgttactacacctactaggcgccactcgttgtaaagacagactggttcatgcacgagtacaggctcgctgacaccggccgccgaaccaagaaggggtcgctcatgttggagagactgggagctgtgcctgctgcacaacaagaagaacgagtgtgagaagatgcggtttgagaagggggcagacggcggcgcagctaaagaggaggaggccatggacatgtgcacctgccactcgcaaatcacccac

SEQ ID NO: 180857 - DNA, 454 bp, Zea mays
  Clone ID: MRT4577_96519C.1
attgggtccctcgaggccggccgggatccattaattgagcgatattcgagcatattaaacgtgtgagcgtcttcgccaatccttcatcaatcgccgatggcggtgggacgcatgaaataagcgagcgatgaacgtggcatcatcctagggcgttctcttcgtgctagccctgacgatcatttgcagccccgatgatagcacgcggcaactaagaagagagtcaccgcctccgccggctaggagaatgaaggttgaggataacttcggctctgcgctgtgcaacgagagcaagggaatgcacctcgtaggtgtgcaagaagtcctgcgacctctcacagcgctccaacctggggctgtacagccgaacccgctacaaggggaactgcacggacaagaatgagagcaccgcgactcaaatcaaggtgtaccaagatgcctgcgacaacgactacat

SEQ ID NO: 180858 - DNA, 371 bp, Zea mays
  Clone ID: MRT4577_9651C.1
acgggggcttttttaatgggcttgggcccagaccacgggtgcctgatggggggccacattagtggccggcatgggcagcggatcaagctcatgatcgcccccggctacaccgccgcggcggggcccaccttgaaacgcggctaactaacctccttcccggaggagaacaacaactggagaaacctcctcgagtacgcatccaatttggccttcgagcgcctacccgtccacctcatctggtgggccatgttcctggtcggaaccaagcccaccatctaactgggcgtcaccgagctcaccatggcagagtcggcccggtggctcgtcatgccctgccgaatcgacaaccctcgctcaatgctgcagaagac

SEQ ID NO: 180859 - DNA, 306 bp, Zea mays
  Clone ID: MRT4577_96520C.1
tgcaccttgccatcctatgtgagagagagacgcagagcgagcgacctataaatcggtgggcattgcatcactgtctgtcgccatcgcgccggccaccatagctatgccaaacatcacccttgaaagagggcacaccctcatagtcacgtacatagccacccataatggccataatcccacccccaagaccgtctccgacacgagaagatcgggcacaacgacggttttacctgttgccgacccgtacccccgggcggctacgactatcgacaaagcgccacctaatctcctgactaacgtggagaa

SEQ ID NO: 180860 - DNA, 177 bp, Zea mays
  Clone ID: MRT4577_96521C.1
acccacctcgtcaccacaccacagcaccgcaccgcaccgctctctgctctgcacggcggggccagcacacaacatggcgcacgcccatcgtgagagcaccctgactggcgcgcgcgcgactgcggaccactgacaggaacgcatgtgccagccgcagcgtgtaagatcagctcacct

SEQ ID NO: 180861 - DNA, 417 bp, Zea mays
  Clone ID: MRT4577_96522C.1
gaaaaaaattggtcccaaagggaaacattattatcccttcgccccgggcaattttcatcacatgtaaaaggaaccgggctgataagggcccaaagtataacccccaccattttgccttatggaaagcaaatcccgggagcagcatttggccccaccaaacaaaatccaccggatccccccggggaaaaaccccccctttatgcaggctttggaaaccccccgccaaacacggaaaagggagggccttccaccccctgaaaacccaccctgagcccctgtttgggttggggcggtttcgggcccccaaggggggggacaatgttcacgccgccgttaaggggaaacacttatctgggttcaccaaacccgtagcccacctcgtgaaaccccactgggttccagtcagccacaaagagg

SEQ ID NO: 180862 - DNA, 752 bp, Zea mays
  unsure (1)..(752): unsure at all n locations
  Clone ID: MRT4577_96523C.1
gcgttcgcaggagnaggaggaanaggaactcgggggcgggccgaccgactccgatatttcaggcgcagccattgcggtaggcgacgaccacgccgagggggcgcgcaggccggtgtgctacgagtcgagccggcggtcggacacctgcgaggcggccggcgacgtgcgcgtggtggggcgcgcgcagacggtgctcgtgggcgcgctggaccgggagtggaaggtgaagccctactgccggaagcacgacgcgttcgcgctgtcccacgtcaaggagtggacgctccgtccgcttgtcggcggcagcgacggtgacgaggcgccgcggtgcacggtgaacagctcggccacggcgttcgtgctgtccacgggggggttcacggggaacctgttccacgactacacggacgtgctgatcccagcgttcatcacggcgcggcggtacggcggcgacgtgcagctgctggtgagcagccacaagccgtggtgggccgccaagtacatgccggtactgcagcagttgagccggcacgagctggtggacgcggacgccgacggcgaggtccggtgctacccgcgcgtggtggtggggccgacgttccaccgggagctgggcgtgggcgcggagacgaaggcgcccggtggcgaggaggagggggtgtcgatgccggagttccgcgcgatgctgcggcgcgcgctggggctggagcgcgcggcggcggcgccgagcggggaccggtgggacgnccggc

SEQ ID NO: 180863 - DNA, 564 bp, Zea mays
  Clone ID: MRT4577_96524C.1
catttctattaaatacaggatgcattctagcacaaaaataaatacacgagcggcccaacatttctattaaatacaggatgcattctagcacaaaaaaaaattacacgagcggcccaacatttctattaaatacaggatgcattctagcacaaaaaaaaattacacgagcggcccaacatttctattaaatacaggatgcattctagcacaaaaaaaaattacacgagcggcccaacatttctattaaatacaggatgcattctagcacaaaaaaaaattacacgagcggcccaacatttctattaaatacaggatgcattctagcacaaaaaaaaaattacacgagcggcccaccatttttactaaatacaggatgcattctagcacaaaaaaaaattacacgagcggcccaacatttctattaaatacaggatgcattctagcccaaaaaaaaattacacgagcggcccaacatttctattaaatacaggatgcattctagcacaaaaaaaaattacacgagcggcccaacatttctattaaatacaggatgcattctagcac

SEQ ID NO: 180864 - DNA, 325 bp, Zea mays
  unsure (1)..(325): unsure at all n locations
  Clone ID: MRT4577_96525C.1
cgtccttttttttttttttttttttttattacaaagctacggggtttctttaagatctgtggtcttccttttttttttatccaaaggcacactgaagaggttttctatcggacattctcaactttcaggttcctactaacctataccattgtgttaaacctggcgtnaaagccttactcgagaacctaccacaacttttatcagacccctataacgccattaaggagcccgaatgtcnnaaaaaaaacctgaagctcccctataatctgctccatgacactaaccgggaacacaccatcgatatgcttctaatccaactccttta

SEQ ID NO: 180865 - DNA, 679 bp, Zea mays
  unsure (1)..(679): unsure at all n locations
  Clone ID: MRT4577_96526C.1
tttagtcggcgttctctgcgtggggttctcttggcgcggttagttctaagatgagatgtgggttggaagcgattgcttcgtctatctgtcattgatagaggaaggactgaggatccaggatggggacagcaatggggaaaggggcaggagaatgtgtactgagccggctccacggcgtcggggggcgcattggcgactcactctctgcccaccccaatatgcttgatgccggcttagccaagctgcaaaacctacgaaagggactcctgcagtcatgccaagtcgttgcaccgtacaaagatgtcagtcgcctcggctgtgcagagagagcttaaggatggtgccttttagggttatcctgatggccgggtgagaggccaatgattttcggccctgcataagggctgaggcatacgcccttnngcagctggnagagatactcctcttatggttcattatcaaggatgcgtgnagtattgctggaagctttaccttgggtagcacgcatcaagnaatggctgtgggngcacaggtcccctggcctacttctcaatgcactttacagtagggcagggccacactaggatgcctgggggtggattgcttggcctctaatgctgctggcgttatcatccaacgaggccaacagcttggcagctatcgccctatgggccttgac

SEQ ID NO: 180866 - DNA, 368 bp, Zea mays
  Clone ID: MRT4577_96527C.1
aaaacgaaggacaagcaggaaaaggtggcattataaaggggatagttggaaacccgagcccttgggagattagacccggttttaaaaagccaagggcgggttgacacgattacgggggaacccaccaatcagcaaaaacatcaccaaatcctttattttagccactcaggggaaatgcagcctactggtagcaggggactgaaaatcaccctcccgtcgtatggattttgggaagggaacaatatccctttatttaatcttggcggaaaaaatggcgggggtgatgttgtaagaaaaggagaggccgcagttcccgggcattttctgggccggggagagcacaggggggaccttaacgtaagccccct

SEQ ID NO: 180867 - DNA, 309 bp, Zea mays
  Clone ID: MRT4577_96528C.1
caattgttgccctttgtccaacttgctttgacagacccagcggcctcctaccaacaacacatcattggtggtgccctcttttagattgcttatgagctggaattcaagacctaagacttttggatcatgaatgatttgcacgcagggggccgaggatgcctttgcagtgattgaagctatgtgcaatgaaactttgggctcctacgctaagaaaggagatcaattggggacagcggccttaaagaccctacctaaacagaaggctttacccaggaatggatgccctaaaatttgaataccctgactatg

SEQ ID NO: 180868 - DNA, 159 bp, Zea mays
  Clone ID: MRT4577_96529C.1
ttttaactttgaacaggctggtagtactgctagtgcatgggaagagcaggcaccattttgcactccatctccagagtgccgatgctatgcacgcataatttccaaacttcccgcgttacaacatcaaccattgtagtaaccacggtattagagggcggc

SEQ ID NO: 180869 - DNA, 353 bp, Zea mays
  Clone ID: MRT4577_9652C.1
cttcctttttcacttctcttttttttattaacaaaaaaataaaaaggggggggggtttttttaaaaaaggaaaaatttccaaacccatcgaaaggacttaataaaccttgtttggaaaagcaaaaaaaaaaagttccacaaaaaatggttggaccctaaaaacccaacatggccaaaaagggtaagcaccggttttcctcttcaaaccccccaggaaactttcctagggaccatcgttcggtctcggcacgaaccaaccggaacgaacaaggcaaaaaaattccccgggctgaacatgccccccagagagggccctacttgaggtactggaaaacccacttgaaaccataacc

SEQ ID NO: 180870 - DNA, 432 bp, Zea mays
  Clone ID: MRT4577_96530C.1
gggttccaaaagataccccaaaaaaaatttttgcccgaattttgaaaaagaaaggggggaaaaaacccctttataaaaaaaaaaaggcccggcgggtttataacaacaaaaaatttaaaaaaagaaccggggggggaaaaaaacccctttccctttaaaaaaagagctttttttaggggggggcctaggggggacccaaaaaaacttttttttaacttaaggggggaagggaatgcccccccagggacccccatttactgggccttgtttttcccaaccggggggccagccgggttaaattaatcccaggccttgatccaggggaccatggggtcaccaaacttggaaaaaaagggggtgaattttgcaaaatttttttttaacctgtccaaaaagggaaatgtacccctttgggacgggggggaaatcctt

SEQ ID NO: 180871 - DNA, 397 bp, Zea mays
  Clone ID: MRT4577_96531C.1
gcccgccgttgagggcttccagaaggaacactttccaggcggaagcggcggaaacggccaaaagggccgaccaaaaccagaaccagggaggcctgtccttaaaggtaagcatggccggccccccttacttaaggaggggggacctccggttgtccaagggttccagggagttaaggggggttttggacccccttttaacaaactctttttccgggggggaaaagggcggggggaacaacaaccagaacgccttggtttacaaggccaaggacgggaacttaatgctcgccgaaaacgtgccctgggatatgttaattttttcgtgcagaaagttaaggataatgaagggttttgcctttgaggccaggggatcgttgatccatacataaacagaggt

SEQ ID NO: 180872 - DNA, 1143 bp, Zea mays
  Clone ID: MRT4577_96532C.1
atgaggagctttgagatttaagaaccgaaagtaaacactgccaactactctggacctcgagccggccgggccgggtccgtcttcaacccctttggcaaccagcaaacaaataccagtaccgctccactacttgattgccgcctcactggcaccgctggtccgctccacggctccagttccagtgacactgcaccagaccacccggctccagcgagatccagacccaaaacctcacctcgcagccaacctctgctcggaggggaagggaagggaagggaagcaatggcggccaacggaggcgggtaccgggcggaggacgactacgactacctcttcaaggtggtgctcatcggcgactccggcgtcggcaagtccaacctcctctcccgcttcaccaagaacgagttcagcctcgagtccaagtccaccatcggcgtcgagttcgccacccgcagtctccaggtcgacggcaaggtcatcaaggcccagatttgggacaccgccggccaggagaggtaccgtgcaatcacaagtgcctattaccgaggagccgtaggggcactgctggtctacgatgtcacccgtcgcgccacgttcgacaacgtgggccgttggctgagggagctcagagaccacaccgaccagagcatcgtggtgatgctggtcggcaacaagtccgatctccggcacctggtggccgtctcgaccgacgacgccaaggagttcgccgaggccgagtccatgtacttcatggagacgtccgccctcgacgccaccaacgtggacagctccttctcggaggtgctgacccagatataccagatcgtgagcaagaagacggtggaggcctccgaggagggggcggtcgcccctggcaagggggagaagataaacgtcaaggatgacgtttctgcgatgaagagggttgggtgctgctcaaactaaggcgaatagccggatacgaactgtttgttcgattgtctttctgtggatgctgagggttagaggaccgttgagagagactatcagcttaaattatttattatcagctctgaattcgtggttctgtcaaattcaatcatttttttgtgttcttgcctcctactgctatattttttttatgaactgaagaatttgccaacc

SEQ ID NO: 180873 - DNA, 358 bp, Zea mays
  Clone ID: MRT4577_96533C.1
tttttcctcctttgaacagaataggcagctcataactgccagttttgttacacgcagtacggcaatgatagaccagacactgccaaatagctatcaaaatataaattatgtttcaggaaaaagttcccaagacctacaccaaatgctaaatgctctatgaacaactacagatatgtacgcaagaccacgcatattagagatggttcacaagcgaagtgcacattctcataaacaactctttcctgctgacctggccatacacaccttgatatttatgcatcaaaggccattcaagatcaccccctgtgctcctctgcactccagggacagggcagatgaccactcgtgaggcactaat

SEQ ID NO: 180874 - DNA, 486 bp, Zea mays
  unsure (1)..(486): unsure at all n locations
  Clone ID: MRT4577_96534C.1
ctttaacggccgcctttttttttttttttgcaatacagctcaattttttccagattatgaatatgtcacattttctgtagtggcggggttcccccaccagaccagacatgcatgcaaatgacccccagctcattttcttccgtcagcagctggtgtcgagcatggcctctggaagcgggaccggccggggtgaccactgctgatgagcccgcccctggcttgtgggcccaggcttacgaggatcactggcgattatccagtttgtcagcggcacgactgcgcggcgggccccatccgtagtccacctcccgaaccgagcgcgtccagtcgcaccagcagctgcggtagtcggactgatctgaggggtcgagccgccgcgcccagctcccgccgcccacgcgcgaatccggggcatccggcgcttccctccttgatcatccttaccacctncgcgaccgaggcgcccgccaccttccccgcgggcgc

SEQ ID NO: 180875 - DNA, 310 bp, Zea mays
  Clone ID: MRT4577_96535C.1
tcggtcccgaccccgtcctggtcggttcggcgttcttcggccggcaaccggcggactggcaaagcccggaggcctgaggcccgagttacccgaggagcagcagaaccagggggccggggccttattccttaacgggcacgccagtgcgccgtcggcgcggagtgagcaagaacaacccgtggctggcgggcaatcgctggctagctggagcctggaggtgcgacttgggagccgcggtaggactcggcctacctataaattttggctggcttccgcactgattccaaccgttctggtggcggcgacagaa

SEQ ID NO: 180876 - DNA, 288 bp, Zea mays
  Clone ID: MRT4577_96536C.1
ccctgggatttttcccacattaattaggggttaacccccaataaaggggaaaaaccataacatcccggggcaaaaaacttttttttggtgtaaaacacaggggacgaacacacaggggagactttaaataaaacggccgggacggaaaaaaacaaaggccgggaccacaaagctttgggttattctctcctcaaccgttaaggggggacggagggagggcaccacaaaaagggggtagtagaaggactagggcgaaggactcccctttaataataataataagaaggt

SEQ ID NO: 180877 - DNA, 449 bp, Zea mays
  Clone ID: MRT4577_96537C.1
gggtcccgaaatcttttcgtggtcacaaaaaattaaacagtaattttggaaaaaaaccctgtttctaagggaaaggggcgctgggaacctaacaggcggccccaaaaacgacggggggggggggtaaattttaaaaaaacagccccttacccctcccagggggcccaaaaaattacattacgggccctggccccgaaactttgggtaaaccctttaagtttcaatttcacaatttacctgaagcaaaaaaaaaactgggggaatctcctgggccaaaagaaaaaaaaaatggcaaatcaaccccccgggtaacgggaaaataccttcaacaagttgttaaaaaattcgggggaaaattttttaacaaaaagggagcagggtctttttgttccattccacaaacaggggacccggggcacaacttttttatcatcacttggaagggggaa

SEQ ID NO: 180878 - DNA, 285 bp, Zea mays
  Clone ID: MRT4577_96539C.1
atgacgacgcacgaggcaacgcgaggcaatggcggcgtcaatggacagagagggacggaggcggccgcgtctacagagggcgaccgagcgatgcgccgtggatctggcccatccgctcccaccatctccgccgtctcggtaggatggagcaccaaaggaagaggaaaagttggctacacgtggggtccacaaaagacgcgtcacatgtgggcgaagcaggccacgaagacttggctgcacgtggggtccacgtatgacgcgtgcgttcacatatgggcgaagtag

SEQ ID NO: 180879 - DNA, 627 bp, Zea mays
  unsure (1)..(627): unsure at all n locations
  Clone ID: MRT4577_9653C.1
cggcgcgcgctggttttttttttttttttttttttttttttttttttgcatgaactgtttgaattattgttaccggttcgaattgaagcatgtggccctgagccaagttatttactgtgtacacaaaacgtggaacgggggccctcgaatgcatatcctactggggggggttagaaacttaatcgatttccatgcccatgcttgcccttcagtttgggtgggcctcttacactttggaaaantgaaacttatctattcaccaacatgttcccttattcatttgccacccgctgggaaaatacggtcttggggtttttgtgttcctttttgaccggtacctacgtgcccctgggggcccttgcgcttcatgtccatgggttttaattttgcaacgttctgcccgtttgagtggtctctcccacaacggccttgccaacccttttgccngggtgggtgttttcgcccggctttccgcctggggcccccccccccatttgcttgggggtcttgggggaaccttttggctttccgggggctttccggtcctaaacgtgtccgcctgcggtttctttgccccacgtgggcttgtttggccccgggggccttgtccgccccggttttgacaat

SEQ ID NO: 180880 - DNA, 101 bp, Zea mays
  Clone ID: MRT4577_96540C.1
tcctacggtggcgcggacttgaagtcatccgacggtggatgagactcatattacgtacacggtgacgaatcagactacgaccgatcatgaaaccgcgacgg

SEQ ID NO: 180881 - DNA, 566 bp, Zea mays
  unsure (1)..(566): unsure at all n locations
  Clone ID: MRT4577_96541C.1
gtcctccgagagcctctgaaaggtcggngtccgacgcgcccgctcgtgtggctgtggcctgcggagacgaacgccaataggtactaagtggtattgggggcaccaggttaaccaacccgctggccttcataagctggaaggccaggaccatctgcactagatcatatgtcaaggggtaccgaccccaagcatgtgcccaactaattaatattatgaaaggcgatgtgcaatgaggaactacatgaccgacagcttggtgtgcctacattgaatgcatagctgcggaatcaatgatctagtggagcaaacccccctttgtgctgatgctcgtgctgatagaggcatgccagaacttcatgatacgatgaactagactatgcggactgttcatcatgctgtagtactagactgctggtcatctcatggaccgttctaaggtgactattcagaaccaagatgcgatgattaagtctgcgtggctatcagagccgtacaagggtattgttgactgcttcaaacgtaccatcaaggatgaaggctcctcttgcttgtggaggggtaacact

SEQ ID NO: 180882 - DNA, 548 bp, Zea mays
  Clone ID: MRT4577_96542C.1
gcgactcctatgacgcgcgagcccatgggctcgttacaaaagctgaggcctgctgcacgcgtgacatacacagaaacacctgcagctcatgattcatgaatacggagctgccggacaggctgatccatacggcgtgaacagctacgacgacgagcttcaggtcacaggtactgtgggactacatggagggcacgcttcactccatcacgaacggatcgaacgtgctaggctcacttcgtgtgaggccttcctggacgtgttcgagtacctgtttggataccgccttcggttcggcgtctacggggtcaagtgcaactcgacgggagggacatggtaccacaggcactcggccaaatggtacgccagcttcctccggcgcgcacagctgacgccactcgctctgcctgacggggcatattcacagcgaccactgacacgtgtacgctgcggctccagtggaatatctggccatcagcgctctcggtgaggtggagagaaaatacacagtccgtaagcaaggatagttggggtggtatatatagcagtgc

SEQ ID NO: 180883 - DNA, 349 bp, Zea mays
  Clone ID: MRT4577_96543C.1
cccacgtgttcggtctgtaataatgcctctagcgatccaggaggacgatgggggggcgtctggtgcacgttcggcgacgaaggtgatgtctgcttccgggagcgggaaagcgcggcggttcatgcggcaggtgacggggcggaacatcgacaccgaccttcacgtggccgtgcggcgcggggacgccgcggcgctgcggcgcgcgctgttggacgcctctggggccgaggctgccacggaggaggcgccagatgacctagaggcggggccaattgccgtggcacaggcagcccaactaggccgctgagaccccgttcgttgccatggcacataggggccacctcgggct

SEQ ID NO: 180884 - DNA, 298 bp, Zea mays
  Clone ID: MRT4577_96544C.1
acggagaccaactagcaacatagaaagcacaatagcgtaccaacaatggcagccaaaagatcttgctgccttatgctcctgggcctctctgcaagtgatgctaccgcaacgattattcgacaatgctcacatgctcatatagcttctcttattacccaatacctctcaccagcagcgtctacaatgtctgaaacctcaattgctcaacgctacaggatccagcatgcaatagcaacaggcatcttaccagcatcacccttgctcgtccaacatccgacagccctattacagcacttac

SEQ ID NO: 180885 - DNA, 262 bp, Zea mays
  unsure (1)..(262): unsure at all n locations
  Clone ID: MRT4577_96545C.1
gcacgcaacntaaactccgaatccagcgcttgctcttttaagacggcccaactctcagagggggtggcatggattgggttttccattccccaacaaactctgacagccttcactatgatgaaaagctaacaaactaccacctaacattgtacagacaccctcactgacgacaaaccccaaagcagtcaccagtaaaacaagaccagcggttagatatacctccaggacaagatccaagatttcaccccctacaatctaaaaa

SEQ ID NO: 180886 - DNA, 359 bp, Zea mays
  Clone ID: MRT4577_96546C.1
ggcaaaaccaaacccatgcccaaatttatgtaatggaaaattataacccttttagcattctggaaaacccgttaacaatgacattacaaaatgggccgtggttacataatatagggggccaggcttttttccgttctttaacaaacatttatttccctttttaaaaactccgtttaaagcccagggccaaaactggtttaaggtatataccatacaaacgggttactttaacaagttttgagcccttaaaaaagggcccccgcttgtcttgggggacccttcctggcccccgaaaaaccctttggggaaataagggcccctgcggggaaggccctcacggaggggaaccttgggctccc

SEQ ID NO: 180887 - DNA, 210 bp, Zea mays
  Clone ID: MRT4577_96547C.1
cccacgcgtccgggaacaaactcgtaggccgagacgatggccgcgtccagaagagcggcggcggctatgctgtgcctggccgtggcggttgccgcggtcctggcggcggagaagagcggggcggaagcggaacggccgggatgcttctgcgactgcatgaagaaccggtgcatgaccctcggcgcgagcgcggcggacaagttcgactgc

SEQ ID NO: 180888 - DNA, 301 bp, Zea mays
  Clone ID: MRT4577_96548C.1
cgcgcttaccgtttgcctcgtgtacctcgtcgggtccatggtcgccggcgcctgtcgcggcatttcccgaacgacgagctctatgaggacgaggactagtcgtttgacacctagagccctaagaaggttggatacgtcattatacaagagctctaggtgcatgaaggctgtaagaagtttgatcagatctatctgcgatttttgcttttggcatttcgtgtgcctatggctaagctttatttatttttgaattacttcatctgctcatattttatttatttttttttatttgtggtttttt

SEQ ID NO: 180889 - DNA, 178 bp, Zea mays
  Clone ID: MRT4577_96549C.1
gtcccggcccggcgacgcgaccgcaaatatctacctagatccatatctaccttaccaaccatgcaaggaaccatacagggcggggtaaatctccgagcaggatgcccaagtgctactaccggaaccatcctcccatattgcacagacactgctatagattactgtcttgcaccatacc

SEQ ID NO: 180890 - DNA, 236 bp, Zea mays
  Clone ID: MRT4577_9654C.1
atagggatcaaggcaaaatgggggccaatataaatagattgctactatattacattgacatgaatgtattcaattatatacatggagagctacctacaaattgacacgtgcatacgattggattcactacgggtcaattatggcagctctgtatccacctgtatgttactttgctggataggaacaccacaagcagctatttgcattgcttggctttaggataacacaaagatttg

SEQ ID NO: 180891 - DNA, 728 bp, Zea mays
  Clone ID: MRT4577_96550C.1
ctcgaggtccggccgggatatttacgtgatacaaatctctattctctatatctctatatctattacgtttctcatgtctctatttttattataatggtttggaaaaatgtcgctcatcttctgctctaatctttcgaaattaggtgtagtggaatattattgccagatattgctacactacaatagtgaaattattgtccaaaattgaagattgccgtatgccttatgtcactataaaatcgagttattttataataatagttttttgttttacataagccccactcttttatctaaaagcccataaattattgtccaaaatggaagattaagagtttgtttattacttctaaattatcctttctatatctaccatatgtaccatcagcgacaagattaccccacatgttgtatcatggtttactagctagagaggctactcaagatgaggaatttgaagttatgtatggtgaggacgatgatgaagacaaagatgacgaggatgatgatgattatgatacaaagaccaagggggctactggagggggaagggcagcagcgaacgacctgttgagtgcaagcaggagtgagtgctgcacattgaatattggcatgcattggttgtggagcaattagtctggttctacttgatgcaaggtcattgagttattgaagtgatattttgtcgaatattttatatgccattgcaaagcacgggcatctaacta

SEQ ID NO: 180892 - DNA, 220 bp, Zea mays
  Clone ID: MRT4577_96551C.1
aactaacacccccgatcgccgacgagctccgagcgcgcttaattatccccatcacggcgggagcgggggcgggggcgggggcgggggcgacgggcccagctaccggagctacctaccggctcctacatctgaatcgggcaaaaggccgcagctgaacttggcccagctgctctgctctagttgagggatggtccagaactcatacaacaagttattgttg

SEQ ID NO: 180893 - DNA, 182 bp, Zea mays
  unsure (1)..(182): unsure at all n locations
  Clone ID: MRT4577_96552C.1
cctcnctttaggaagaacacgacaacacagatggtgcgaatctgcaaacacccacaagggggccaaagccagggaaagagggacacacacacaggcacagacaagaccaccggcgcaagcgggccacaaaacaacccaaaacacagagnttgatcgcagagacacgcaaccacaggcgcacc

SEQ ID NO: 180894 - DNA, 419 bp, Zea mays
  Clone ID: MRT4577_96553C.1
agaatgtgttctcaaggatgaagaatactgtaaaccctccatcagtgggagtaattttgtgtgggcataaacagatgagtgaggtatgttcattttgcttattttccgagtcatttgtatcttgacactctaactattagacaggttgatagcaccttctacaattagtggaatttccctctattacaagctttggttctgttcattgctattgttaggcacatcttcgcataaatcataatgctgcacaccattgtcatttttgaaaccatgttttttgtgctgttgctgatctatagttcgtagtgtatttttgacagcataaaatgactagaagtgcgagtctcgcagcatgtacatcttctacgattatgtatgcctcataccatatttccacatttgatgatgggtgggtcatt

SEQ ID NO: 180895 - DNA, 680 bp, Zea mays
  unsure (1)..(680): unsure at all n locations
  Clone ID: MRT4577_96554C.1
cccgggttaaattttttgcaacatactaacagttacaaagtgtcctttttttcatggatttgacccagtttgcaatgcatcatattggttggtcctttccataacttcgtttcgtgtgatagatctcctatttgatctgaaactggctaacatgttacaaatatgttacattcagaacacgcttgataaatgtgctgccgatagttttagaggtcttagtgatgctacgctgactattgcctaggagtacaagtacacaaaattacaaagacaaggtgagctcccctattctctacttttttttttttgaacaagcaggcactttcttgccgtttttttgctttttgactttttttgaaaaattttcacaactacacactttctagtttgaattcacgaaatgaacctttactcggcgccattatcattgacgtcaaggtcacacgtctcaacgtcaatataaataacgtccagatctagctctggtaagtcgatctggcgcctatatggcaggatgtcagcgccgtggttattggtgccgacctccttttcaagaaacggcggctcggctcatatctcaacaagtggtgcgcgtggctcgnatgtgttatatatatatattagtatatctatgtatttatattaatataacatataatttattaatattataatatata

SEQ ID NO: 180896 - DNA, 567 bp, Zea mays
  Clone ID: MRT4577_96555C.1
cccccccccccccctctccagcggcaaaagtgttgcactgcagcactgctagctaggagtatactatgagcttgctagctagcctggctgatggatggtcactactcatgtgcataaacgtgcatgtgaagtggctgggcatccaaccaaatatataagctactggcaaccggctgccggctgctggcaggtcgttcttcgtgttgtatgtagcttgaggctgaggccgggagatgaccactgcttcgtccacgccatccacaagctcggaggccaggacaaggctacgccgaagcgagtcctgcagctgatgggtgtgggaggactcaccatatctcatgtcaaaagccatctgcagatgtacaggaacatgagaaatgatattggaatgcaagggacgacgatgcagctggtgcaccgggcggaggagcacgtatacggccgaggcggcatgcatatggaactctgcgccgatacacagcgacgacgacagccgcagccgcagccgcagtgcggtcatgatgagtgcgatggcccggcctgctgctgcatcgtcgtctgccgctc

SEQ ID NO: 180897 - DNA, 328 bp, Zea mays
  Clone ID: MRT4577_96556C.1
ggcaaaaaacacaacccccaattttttgggggggttataaaaaaaaaatttgggttttcggggggaaacaaaaacttggtaaacaaaaaattttcttgctcaaggcccaagggggggggggccccccttaaacattggtttttggtttttttacaaaaaccaacccccgaacaggccctccagggggttttcccaaatacatttttacctgggcggggccccattttatgggggttacccgggccgggaaaagtgtttacaaaaaggcccctttcaatggacaaaatggggaacctttgcttttgctaccccttttagcccggggggg

SEQ ID NO: 180898 - DNA, 598 bp, Zea mays
  Clone ID: MRT4577_96557C.1
ccggccgggggttttttctgtgccggctgttgtgggcgaaggtctccttgtgtgccgtacaggggaaaggtacgcgccgccgttgccgtgcgagcctctccttccccatcgacgagcacatggatccgtcgacgtggcccctgtacacgcacagccgagccgtactactccaggatgctcatggactgcgatgtcctcaccatctactacgatgatgcacgagaacccgcaggtccatagcattggtgtttctccacggcgcactgggagcctgcacgtcacccgacaacaggaggctctttgacccgctgatctacaggatcgtacagtttgacctaaggtctgcaagcagaatgactccccatgtgtgattaaatgagatcactagttgagactcggtaattgtacattgagaaactcaggtagcatcttgcccatcactgaatgctaggtgtgcgcacggatcactccttaagcacccatgggacttgactacagaagatgagcacccatgatgagggcgatgtttctaggtctcgagacgtgtatgcttgcttacgaaaaaggatctcgatcgatgctaatggggcggacgact

SEQ ID NO: 180899 - DNA, 411 bp, Zea mays
  unsure (1)..(411): unsure at all n locations
  Clone ID: MRT4577_96558C.1
ctggccaccaccttctcaccagttttcccagccgccattctgcgatcacgcctgttgggtggttcctgctgcgatctgcgcttgtgcgatcggccgtcatgttacggcacacaacgacgccggcgtctgtcgtcgtccgcttgatcggcaactgggtagcgtcgcatcgaacgagcgatcttgtcgcctgatccattgatccaactgtgttggaagaacggcgtcgtctgcaaacagcgaggcagagaagcttcgggcgcggcaaagcagcggcgtcttgcgcatagctacggcgggcgtggacagaacagcggcagggcggngagaaaagacaaggtttgatgtgatgtgtatttgacaataaggttctatgtgcgtncgaattgtatgtcatatatgcatgtgtttgat

SEQ ID NO: 180900 - DNA, 153 bp, Zea mays
  Clone ID: MRT4577_96559C.1
ggcacgcgccgatgacgtatgttattgttatgccgtaatatcacgagtgtccagcgatttctgtgatacaagctcgaattttataacataagaactgataagcgtgtcgactaagctcagataatatagaggcccttggatggattggttctg

SEQ ID NO: 180901 - DNA, 498 bp, Zea mays
  Clone ID: MRT4577_9655C.1
cttagcgggggattaaagttttacaacgtaaggtgtgaaccacacaacgccagatcgattagaaccgaccgaaacttaacacggaagagaaacaaacagggcagaacaaaaaaaaccaggggaacagaggggaaaaaacaccccgccaggcgaggggggagcccccgccccccccgccgccgaacccaccccaaacaaacccaacgggggcccccccgggggccaaaacaagagcagggggacccaaacccccccccccccccccccccaaaagcataccaaaaccgaccccccacggccccaacccacccctggaaaaaaaaaaaccaaacccgaggggaatgctggggaggaccaccacaaccccgggggggggggaaagaaggccccccccacccccccccccggccagaaaaacgaaaaggacgaccctgggaagaaaggagggaaatccgggcctgaagggaggaaaaaccacaccaccaccgggaggggggg

SEQ ID NO: 180902 - DNA, 653 bp, Zea mays
  Clone ID: MRT4577_96560C.1
gatccgcgctgacccctgtcgtcgggtgtactcaacttcctccactagctaagctccatctgcatccatccatggcgtccgtgaagatcgccgtcgtcctcttggcgtgcgccacgctcatggcgacggcggcggcgtacgcgccgtaccggcccgagcccgagccctgcaagacgcaggccatgtacttcaagaactgcctcctcctcgtcagtgagtgcgagaagtgctgcacaggcgtggtggcggaccccgcgtgcttctgcgaggtggagcgagaggccgagatccagtgcgcgcccggccaccactgcagccgcgccgacaagaagatcaagatccacgagatgaacctctcctgcatgaagaacctcaagtgcaagcgtgcgtgaaggccggtaccttagctgcttcctactacaagtatatctcgtctctcgtttgtgtatcgactttgtggtctggctttcttccgactatgatgtttatgttgtgtcgtcgtcctcatgtaaactttggtataacatggtgctcgatctaaaactatccacatcgtcgctgtacgcttctatcatgtactttgtctgtcgagatcacttgatgcatgcatatgcatctctactattcttcttcagggatcaagacatttaaaa

SEQ ID NO: 180903 - DNA, 706 bp, Zea mays
  Clone ID: MRT4577_96561C.1
gttaacacaaatcacacaccaacatcttgcagcggaatcttattacaaggagtatacaagttacaaaagaaatcagagtagttacaaaagaatttcactttgaaatattgcaaaacattttgtaagctttaaaatatatgctagcttaagggaccatcctcaataagaagtatagaagagttacttagacttataagaaggccgagcccacatgcacttaacaccatcaatagcagtacaaaattataacctggaagaacactaggttagtgtttgttaggtgacgaccacttggcgatcggcttttgttccgatacttgttcaatttatctatcttcaggtttgtccaataacatcctcttgcggagtagtccacccgttacgtcatcttaaggtcgacttggctttggttctccgcgtcacgtgattaattatcgtaccatactaaatctgacaagctatctgcgaatacggcaaggattctggttcagcccttgcgtcgagtacttggtgaacatcacgctgctagcttcgtcttcacccgactcttgagttttcttgatgacgcacggaatgacgacgagatcgagtctgcagcgagctggtgagggtgtggtcgagcaggttagcgcgagctcttacgaggacacgaatccagtgaggactccgacgacggcgaggtcacgagctctagcgacacagcgac

SEQ ID NO: 180904 - DNA, 552 bp, Zea mays
  Clone ID: MRT4577_96562C.1
cctcgatgtatttcactattgtcttcgtgatcagccatatatacctgtcctacgtcacagcatgtaatccacgcaccgtcgggttgccggcagggagatacccaactacgcgcatggaagctgcccgattaatcgtgtcgtatcgcctcaaccggacgctaaggtgacaacactgtcgctgcctgcagttgtggtcctttttctactatggtgatcttgtattcactgcccaatgcgtgatgtttattgtgataacaatttccacagaggagatacattttaaaatgatatgagataatctttttttgagtacttttacttgtcttgaaaactaaaaaaaaaatatataaggtccctaagcgcgcggatgctctaaaactaaaaggatcaccccggccctacaggcaattcgcatattctacattatacgataacgccgcacctctgaggggaatgtccatataccacaattactccactatagtcgaagtctgcgattgacggcggcgcctcacatgccacgttcgtttctactacggacgtgacatgtac

SEQ ID NO: 180905 - DNA, 239 bp, Zea mays
  unsure (1)..(239): unsure at all n locations
  Clone ID: MRT4577_96563C.1
ttcagggccgtggagctcagcngngtgcncnacgctcannaanggcgtctacgcgtaagnnttcggcgacatggcgngctcatgcagctgatgaagatgnacanctnggntaagggttcgtncaggancgatcnatgcaggtgggcttcggtaccatggaatggcngtctgatntcgnagtgtagantcggttatggangcagntgttatacgcanatgaatnttcnatcngctnccaa

SEQ ID NO: 180906 - DNA, 244 bp, Zea mays
  Clone ID: MRT4577_96564C.1
ggctgagggggaagaggctggtgtttgtcggtgattcgctcaacaagaacatgtgggaatccctgatttgtatattgaggaattctgttaaagacaagagtaaggtttttgaggtattcggtaggagccaattcagggctgagggctcctactctttcttgttccaagactacaactgcagtgtggagttcttccgctccccttttcttgttcaagaatgggagatgccagtcagcaatgggaa

SEQ ID NO: 180907 - DNA, 119 bp, Zea mays
  Clone ID: MRT4577_96565C.1
aaataaggaccatgcaatatatcatagatgagcattgtcaaacaactcatacataactggactctaaatctaaactaaatcaattgtgtgaccatgggagcctaacctaatgaataaag

SEQ ID NO: 180908 - DNA, 2509 bp, Zea mays
  Clone ID: MRT4577_96566C.1
tgaactgttaaataatttaattcgacacaatgcgtcaaatcagatgcttttgaaagaccaatgggctttgacccattgatatcaatactacgcgtccgcccacgcctaagattaggagaggcagtgcatttaattttacccaacagaagacagtaaatctcctcgctgctttaaatactgtggaattgcttttgatggtgggcccatccggtgaagcaggtaaagatgctaacaagaatgcaaatcaaactgcattggctcagaaaaacattctggaccatcttcttttgttgggtgttgagagtcagtgggcccctgtcgctctccgctgtatggcactgcgttgtattggcaatttggtgttaaggaatcctcagaatcttgattctcttgcaagaaagcaagttggagaagagcctcatgttcaacctgcactgaatgccatcttatctataatcttacggacatctatagcgcaggaatttgttgctgctgattatgtattcaagtgtttctgcgagagaaatcctaatggccaggcattattagcatcaactattgctccacatccaaaccaaggagatattcatgaacctgctagtgacatgccttttggaagtgtacttctgcaagctctggtttctagtgatgtcaatggagatatggaggcatgctgcagagcatctagcgttctttctcacattatcaaggacaacttgcaaagcaaggatcgtgtattgcaaattcagcttgagacatctacagcatccttggggcgtactgagccggtattgcatcgtattgttacatgtttgtccatcgcagcttcaatggagggagaaaatgaccaaaacaaccaactagaggaaccgtacattcaaccttttattcttcggctactcatcatatggcttgttgattgttcaaatgctgtcaactgccttttggaatcagcggtgcatctgaacttcataatagagcttgcttcgaataaacgttacgccgcttgtgtccgtggattggctgctgttgttctaggtgcttgcatcctgtacaatgctagccatgagaagggccgtgatgcttttgctgttgcagatgctataagtcaaaagattggcctcacaacgtacttcttgaggtttgatgaactgaggagaagcttggcacatccgttgccagagcagcatcatcgcaaggagctttcccgatcaagtgcgaatagcatgtcagatttccaagaaattgaagaggatgaaacaaataaagacgatcaacaccctgtcctctcagaaatatttgattcacagtttgttaatttacttagtaagctcgaggctgatattagagaaaacataatggatatatttagtcggacaaaaactgcaacagcagtccttcctactgaattggagcagaagaacggggaggtcgatggagagtatatcaagcgactaaagtcatttgtagaaaaacagtgcaatgagatgcaggacttgctggcacggaatgcaatgttagcagaagagttactgagaactggtggtggtacgaccacagatacttcacagaaaccgagcagtggccgagaaagggtccagattgaagctctcagacaagaactggagggggcaaaacgacagataggggcactcaaaactgagaagtcccagattgaagctgaagctaacaaccaaagaaacctttcagtaaaactggagtctgatctcaagagcttgtcagaagcttacaacagcatagagcaggccaactaccgcttggatgccgaggtaaaagccttgcggcagggaggcagcgtgccatatcctgacgtggaagcaataaaagcgcaagctaaggaagaggctgagaaggacagtgaggcagaactgaatgatctactcgtctgccttgggcaggagcaaacgaaggtcgagaagctgagcacaaggctggcagagctcggggaagatgtggatacccttctgcagggtattggcgatgacactgccattccggatgatgacgatgaagatgatgaagagtgattggtttatgtaacctgcaggtctgctggtgtaatctaccttcatgttgggtcatgatattgcgatggtaactggaaaatgtacagtggatgacaaatgcaccgttccaagtttaagttatttctagagaatgtgactaaatagcctcttgttaaatttgattgtctgaataactttttatattacctttgataaatagccccttgttgaatgggcctcagattcatcaaaaaaaaaaaaaaaaaggtcacctttgttgctttccgaatcaatttcctattgatataccacctgaattcatgattaaaaaacatgttttgtgcattaaaaagatttacaacaactttaaagggggtgtttggtttatagggacttttttaatagggaaaattaagtgggggaccgtccggtcccggacggtccccccctcgcgatcagattaactcgaacgattatccttt

SEQ ID NO: 180909 - DNA, 1696 bp, Zea mays
  unsure (1)..(1696): unsure at all n locations
  Clone ID: MRT4577_96567C.1
ttattcggcacgagggttaccctaaatgaagaggactgctgtttaccccctcgcagttgcttctagagaacgcaaccatgcgcgctctagaagaaacgaccggatccatctccctcgactgcgttgtgtcgcgccgcagctatccaatccaacaccgatgttgtgccgtgccgccgccattgggagtcaggaccacgtccgccgagtggctatggcaaggcgacgacccagcgcatgacgagcagaggagcagccgccgaccgccgtccgccgaggcaatcgccgccatcgggagtcgggaccgtgtccgccgagtggctgtggcaacgacccagcgcaggacgagcagaggagcagccgccgaccggcgttcaccgaggtaacgacacaaccatgcagtaagccttcttgtgtctggacagtaaacgcttggaggaagaatttggatccatgtcccatgcgtgcaaagtgaaattcttaattattggttaacggaaatgttgactcaaattactagaaattaaaaataaattgctaaacgcattgttttttacagtcatacgttaaaaataaaataaatgaaaaaagaggtagttgaagttagttggaatgaaatgtgtattttatatttaaggtaggagataggggaatatgtagaggtaactgttgtgggatgagtgttgtgggatgagtgaatatagagaagaaaattttgctaacgtgacatatagagggaaaaatttagaaggaaccgctgcagacagcctaagcaagcaataccttcctctatatttgcatgcccaagagtcacctgcacgtgtcacacggacccatcgccatttggataatgggtgccacgtgtgcaaagcccggccaatgggatggaagtagagcctcgccctcacgccctatccatacggcaaccacaacccccctcccgcctcagtttcctccaccggacacctgctgccacccacacgatcaaaaacaaaaccaagctccaagcacccatagccacacaccacaccaagtcaagcaaggagctcgatcgacagcaacagcggccttcatgaactccagcttcatcgggctcaagcccgctgcggcagcagcccaggccaccgcggctgcctcatcgccgatgaagcagcaggtgcaggtcgcgcccgagggccgccgcgccgcgctgctcggcctggcggccgtcttcgccgtcaccgccaccacggccggatcagccaaggctggggttttcgacgagtacctcgagaagagcaaggctaacaaggagctgaacgacaagaagaggcttgccaccagcgctgccaactttgcgcgcgcctacacagtcgagttcggcagctgccagttcccctacaacttcactgggtgccaggacctcgccaagcagaagaaagtccccttcctcagcgacgacctcgagatcgagtgcgaggggaaggagaagttcaagtgcggctccaacgtcttctggaagtggtgaagcagcgcgcgtctgatatgatggaggagacctggtgtacatgtacgtgtgtatctagatgcatgtgcccagactgcaggaaacatgatatcaaatttgactgctattctgttaaaaaaaaaaaaaaaaaagccccctaaaagtctcatgtgnaantgngctcanntctgttcaatcatctcaacatccgac

SEQ ID NO: 180910 - DNA, 329 bp, Zea mays
  unsure (1)..(329): unsure at all n locations
  Clone ID: MRT4577_96568C.1
gcgcaccccagctcgcgctgcctgctccgcctccgcctccgccgcttnctcctccatcgccaccgaagccgcccatcgtccagccccgcgctccgcctcctccgctgccgcttccggcggccggggcggagccggagccgaagcggcggcggctgaaccggctggggtccagcgtggtgcgcagcgcgacggtgctggcgcgcaccctggtggcgtgcgaggagaagcgggagcggcggcaccgggaggtcctggagctggaggagcggcggctgcggctggaggaggagcgcacggaggtgcggcgccagggcttcgcgggcctcgtc

SEQ ID NO: 180911 - DNA, 548 bp, Zea mays
  unsure (1)..(548): unsure at all n locations
  Clone ID: MRT4577_96569C.1
agaaccaaatcgtttaaattgaattgaatcgatgaagatttgattagccaaccttctcttagaagttaggacatgcatgcacccgttgaagctttttaattttttatctatataattattttttaatttcccaaggttcttggatccaacatcgaagctggggatgcacatggtcactccatattgctgccaagcataaacacacaaccgtgtgtgagtcgtcctagcttttagtccacttgcatggtagatggtaggtgtagacaagtgaccaaccgacttgttcttccatctccgggacatccacagagcaactccgagatccttttgtatcctttccaaaccatgccgcgacacaaattacacaagnggcggtccatcctctccacaggcaccaagctttcctgccccacaatctcaacatagtcaacctgaccgccagcttctgtaattgtacgcactaatttgatcttttatctcttggctacggttgcttccactgaggtggcggttctagctccaccagtgatctactgatcgtaacgcct

SEQ ID NO: 180912 - DNA, 246 bp, Zea mays
  Clone ID: MRT4577_9656C.1
cgagcagcttccgctggttcgatcagcttctcggcgtgacccactcattcgccagtggagtgtcctgcgcgagccaggtctcgcctgccgccagcggtgagatgtggaagggagagggtagaaataaactaggcccaagatcgatgaggtacagcgacgaaaaatgagagtgcaagagagataggggactcggaggtcgtgtgggccggggctccaagacctgaggggcttcgttgcgcatgaagc

SEQ ID NO: 180913 - DNA, 364 bp, Zea mays
  unsure (1)..(364): unsure at all n locations
  Clone ID: MRT4577_96570C.1
acgcggccttagcgtgaaaaaaaacgaggaacaaagctttttttatttaaagataaaaaaacatgaatgatttctttgaatgtaattatttgaaaatatggtttttccttgtttgggacatggcatggttttcccttctggtcctgcccggggggggggggggctttggccggctttacatgggtcacttgcctttttactttgtgccgttgcccactgaatggcttaatctatactggaggcactggtacaatatgcctgtcatccaatttggattcatggactcccgaacacctgataatgatggtctatgggggaggtagccgtcctcnggctttctttacgcagcatggttgggccgatg

SEQ ID NO: 180914 - DNA, 369 bp, Zea mays
  Clone ID: MRT4577_96571C.1
gatccagatttctttttcaatatcaacatcaaacacagcattatgtccttattcgtttacacaaggattggcgggttcgaggggactaaatctgtttatattcaattttaactaccaaagtatgcaatacacgacgattcctgcgaacagccttaaggactcagacatttgcgatgcacgacacagtccattaaagtctgaacttgatcgccaagtcattttggtctcaaaaaaaaaattgatccctagggcggacataacaaaggcacggccaagaaaaatcgccgagcggcgtgcctgctttacgaagaaaccccagcacatgcccggattacaggtacctcctcccgagcgccttcaccttggtat

SEQ ID NO: 180915 - DNA, 713 bp, Zea mays
  Clone ID: MRT4577_96572C.1
cccacgcgtccgcgcacttccgcccgagggccgtgcgggccgctatccgggcgcaggcgtccgccgtcgaggcgcccgccacggccaaggccaagaaggagtccaagaagcaggaggagggcgtcgtcaccaacctatacaagcccaaggagccgtacgtcggcaggtgcctcctcaacaccaagatcaccggcgacgacgcgccgggggagacgtggcacatggtcttcagcaccgaaggcccttctttgcctgcgcgaggtctcagaatccggggggaaaagaaaagaaaagaaaagatgatgactgtctctacctcttgctacatgtgccgcttcctcgtccgggctcctccgctcaagtccaggagtgcagtgcgctgtccaagcgccgccccaccaggtgctagcggtgccacctccacctccaagcttgtcctagaggtgaaagaacggctagcaagggagcacccaggcctccccacgggcaggtacgggagggacgatgacgacatggtcctctggttcctaaaggaccgcaagttctccgtcgatgaagccgtctccaagctcaccaaggcgattaaatggcgtcaggactttggtgttgcagagttatcagaggaatcagtgaaaagcctgtaccaaactggcaaggcatatgtacatgattccttggacatttatggccgacctgtgctgattgtagtggca

SEQ ID NO: 180916 - DNA, 723 bp, Zea mays
  Clone ID: MRT4577_96573C.1
gcgttcggtttccctccacatctcacttgctccttatctacttttctcctccgccttaaacggatcctggctactttctgccgtcttgcatcatcatctccggccagggccagggcattcgtctccgcctcctcaacaccaagatcaccggcgacgacgcgccgggggagacgtggcacatggtcttcagcaccgaagggtctcagaatcccgtggggaaaaagaaaagaaaagaaaagatgatgactgtctctacctcttgctacatgtgccgcttcctcgtccgggctcctccgctcaagtccaggagtgcagtgcgctttccaagctccgccccaacaggtgctagcggtgccacctccacctccaagcttgtcctagaggtgaaagaacggctagcaagggagcacccaagcctccccacgggcaggaacgggagggacgatgacgacatggtcctctggttcctaaaggaccgcaagttctccgtcgatgaagccgtctccaagctcaccaaggcgatcgtatcctctaattcactcataccagtgaagctcacacctaatagcttctttactcgctcaataatttcctggtatggtaaccgagttcatataagcacctctaatcttcagttttcctttcaactgcattagaaatggcgtcaggactttgggtgttgcagagttatcagaggaatcagtgaaactcctgtaccaaact

SEQ ID NO: 180917 - DNA, 368 bp, Zea mays
  Clone ID: MRT4577_96574C.1
ttttgtttaatgttatccaatggcagggagggtttatacttcaagataattaggaaatgaagaagtgatatcgacatcacacaggctaggcagttgagctacctgctcatgtagtcacatacagggaaaagcacggatggtccggtccttgcattttgccgagatcgagaagcgagaacgaataaacagacacaatgcaccacagttgacgaggaatggccgttgttattattacagacctatccgtcaatgctgctacagagataatgggtgtcgctcttgtccatcctgaacctaatctatgggtgtgggggccatacctgccagatgaactactccatgagcacactacataaaatcccaggccc

SEQ ID NO: 180918 - DNA, 330 bp, Zea mays
  unsure (1)..(330): unsure at all n locations
  Clone ID: MRT4577_96575C.1
cgtgagtaacagcagagcagaacaccgataaatcctatgactgctcagactcaagaggagcttcttgcggccgaccttgagcaacaagagatccatgatgatgangctgtagttgaggatgatgatgaggatgacgaagatgacgacgataaagatgacgacaatgttgaaggtgatgcatctggtaggtccaagcagaccagaagcgaaaagaagagtcgcaaggcaatgctcaaacttggaatgaaacctgtcacaggtgtcagtcgtgtgactgttaagaagagcaaaaatatccttgttgttatatcgaaaccagatgtttcagag

SEQ ID NO: 180919 - DNA, 336 bp, Zea mays
  Clone ID: MRT4577_96576C.1
ggggaaaatttgaactggtttgttttaaacattattggagaatatcccctttttaaggtttggtttttttgttttagcggggggggaattccaaagggcgttcccccttggtattttctgttcccacggtttttttttgcaaatggggaacaaataatttattttaggggattcatttatcctatcaaggaagtttttggtttgtttttttgggaggggggaaaactttttttgtgggggggggattcttcccccgatcttgggggaaaaaacagtttgaaccagttggtccaaaaagcccaagtttaaaggatgacaatgtttatgaactttttt

SEQ ID NO: 180920 - DNA, 155 bp, Zea mays
  Clone ID: MRT4577_96577C.1
gccagggactttattactgggctgctatgagggtggagttggcgataccatggggatcgctactccagacagcgcggttccgatgcttggggcagatatctccggctgtcccagagagaaggctcctgggcacttacacaacagctgacgggcag

SEQ ID NO: 180921 - DNA, 436 bp, Zea mays
  Clone ID: MRT4577_96578C.1
gtttttctcaataaaaaagctaattgtttttcaaacttgtgcatagttaccttacttcgggggggtatacacattacaagactcattgttttcgccctttggaaggtaattgcactgctggggtatgtagcttgcgcacacaggatttctcattgctgtcctgtgctttgaacacactattccttaaatgagatgtcacagaatgacaataacgtcggttccttatttaaaatggagtatgctgaagacgaggatgcactgtctattactaaacgcggatgcatctgtttgtgttctgattgattccatatctgcttcacagacaggaggtgatgggttctgcgtcaatttgtatgactacgaacgcaattccaatggttggataaacaaactattgttcctggacggggacaaaaatatgagaaaaagatatgga

SEQ ID NO: 180922 - DNA, 166 bp, Zea mays
  Clone ID: MRT4577_96579C.1
tcgacacctactaccactcgacttagattaagtacatgtacaccccttagccgctactgtccgaccaatatgctacaactattgaaggctaccaaagctattcctctgaagaaggaccacatcgatgcccaggccacacaacgctccaagtactcataatttccgg

SEQ ID NO: 180923 - DNA, 1490 bp, Zea mays
  unsure (1)..(1490): unsure at all n locations
  Clone ID: MRT4577_9657C.1
gcacgagattttgacttgaaagattttgacttgtttgggattaaaacgcacccaattccactcaatctacatggattgagagcaaaaccaacaagccctaatttggaaaaaaaaaaaaactagaggtgatggatcaggtttgacctttctattcctgcctaggactctaggagtcagtgnccacctgaataaaggtgaaaagggaagggattcaatgtggtgaagtgacatctaccatctatgtaccaatttagtggaacgggttctctacataatcattcctttttttccttccatggatatttgcagctcccgattgatttatctgaaccatgtaaattaggtcagatgcccctgaatcgacctgatgtttcactatggatccctcaggaaatcatatgcccaaggctggggtcttacccaagccaagataaacttcccgaaccaagttctggcgaccccctaagttcttgatacaaatgaaaaagaaaacttatttttcttataacanaaagaggaatgccactgggaacacccttttttaaacgccactgcaactgacggcataactgctggcacaaatgttcagcagaatcctgtaaatgagggatggcagctagcgtcgactagtgctcccgaaactttctcttatggagtggagaacatttcgtttgatttgtcacaatacaacaatgccccatacttccacgccccaagcatccaccagcaggtctcgcatccacaggtctggcagcaatgcaatcgtgagcaccttccaaatggactactttctgacagtcttggttctgccttttcgggttctcctatcctctgggcctccctttttttttttttttcaaagtatcaagaacagttggggtcgccagcttcttctttcgggaacgtttagattggccttgggtaagatcccaaccctttgtactaagagagataggcaaagcatcatcagtaaaatcctcattcacaggattgtatgcaaagttgcctgtggaagatcaagcagcaaaggtgtacactgcagaaatctttcagaagttcttcaatgaaataggacattcatttcattgcaattataatatacttgaacggaatgagtcagtggttacatacatagtttcggagcatgtcgatcaaacaaacaaggtagactacaaagttgcttatgataatgttcaaggtgacatatggtgcctctgccgtttgtaccaatccaaaggaatattgtgcaggcatgcactcactgtactgagacaggagcttgtgctgatgattccacaaaaatacatcattcatcgctggtgcaaggactgtaaacaaacttgtgcttccatatcccagcctgtctcagcaggtaatcaggaactgggaagctacgatgatctgtacaaacttggccacctatactttgcagaagttgtggaatttggttccatgaactcagaatcaaaagaatatgctttgtcaatcat

SEQ ID NO: 180924 - DNA, 343 bp, Zea mays
  Clone ID: MRT4577_96580C.1
tcgtttcggacccgagcgggttcgccgtgaagtggtacacccgcaagggcaactggaacctggtgggcaacaacttccccgtcttcttcatccgtgacggcatcaagttccccgacgtgatccacccgtttaagcccaacccgcggacggacgtgcaggaggaccggcgggtgttccacttcctgtggggccccccccggagcctgaacaccttcttttttctcttggacgaaccgggggtgtccttgcactacccccccaaggaagggttcggggtgaacaccttcaccatccatgagcgcggagaggaaggcgcagccccttaagttaaccctgtaagcca

SEQ ID NO: 180925 - DNA, 293 bp, Zea mays
  Clone ID: MRT4577_96582C.1
cttattccaaaccccacttaatattaggggggcgtgaatttaatggccaaccccctgaccaactttggtagaacaaaattaaaaaacaaaaaaaagaaggggaggaggatcctattgaacgtaactgacgacccttcaccatcagaatcacctccaaccccgaaacaggcaattgctacagtagtaaaataaataacaaaccaatcatcactgaggaaataagtcagcgctactacgaacgtacgtagataggaaccaacagatgggtggatggagggggggggggggggggg

SEQ ID NO: 180926 - DNA, 777 bp, Zea mays
  Clone ID: MRT4577_96583C.1
agtcaaaatagctgatggtatagcccagggactcctgtaccttcacaacctctcctgaatacgcatcgtccatagggtcttgaaagcaagtaaaatcctgttagatttctgatctaaaccctaagatttctgatgttgggatggcaaggatatttccatcggatgccactcaagcaacagccagcagacttgtgggcacatagtaaggtggatacatggctaatgaattgcatctgatggccttctctcgatcaagtcagatgttttcagtttagtattaatggtgtatctgtatggtgttctacattatttccttccataaaacctgggaactgtggaaagacaggagatggaataagttcaatgatcaatcatttggtgatgactacgaactggaagagctgatgaaataccttgctgagttgctgtggtattgttgtgtgttatgagaaaaaaaacaatagatcatcctacaatgcctgatgttgttgcaactcttagcagtgatggcatcacattgccagaaccaaagcagccagcttactcctatgcgaaattaaatgtgtcagtcactgtattgagtagcaaaaatgatgtcaccatcccttctccaaatggcagataatagaatgtgaatatactgttaaaagtgtgagctacaggtcttggtcatccttcttgcgttaactaattgcattgtgttttgctaaaaaaaaaaaaaaaaaaaaaaaaaaaaaaaaaaaaaaaaaaaaaaaaaccgagaaggggcccggtacc

SEQ ID NO: 180927 - DNA, 138 bp, Zea mays
  Clone ID: MRT4577_96584C.1
ctctgctcctgctctctctctctctgggcgtcgattggtgaccgcgcggctccccggggcttgttggccctcgcggagcgagcaccacagagacctacatcataaccatagcagtgttgagagctgaagctgtatctg

SEQ ID NO: 180928 - DNA, 821 bp, Zea mays
  unsure (1)..(821): unsure at all n locations
  Clone ID: MRT4577_96585C.1
cggccgggnaaaaaaaaaaaaaagctctcgcacaaccgctcgtctccctgtgcgctcgctccagcttggtgcccagccgctcatctctcctccctccactctctcccctctgctcgcgacgcacgcctggcctgctcccatggcgcgactgctccctgccgcgcgctcttttctgcaccgcgtccctggcctctctgcccgagctcatccatagtaagcttcgagctcgctggtgttcggaccgcgactccctcctccggcgcgctcaactccctcaagccgcgtctgctgccgcgctcggactgaagctcccctgcatcacgccctgctcgcccagccgcgccgagctctgcctttgctcctcccctgctcctatggaggcgccgatcggatctccctatcgcctcaccctgctctttgtccgcccatggagtcacccagcccagccgcgtctgctccgtcgcgcccagctcctgtgcgccgcagttcaccccagctcggcgtctgcttctctgctccctgctctacgcgtcggtcgcttctcccttgcacgtcttcttccttgctgctcgccgcgatgctccttctctctcccctcattgcggtcctcttcaagctcgcctgcgcgcgccttctgccccaccgtcttcagctcgcccaggacggntgttccggtccctgctcgaccacggccctggtttcagcacagctctgcgcacccaagaatttcctgctcggactgtgcctctccagcgcggcgcccatgccgagnctcttgcgcacaaccgcacttncttcctgctcggcctcctctccatttt

SEQ ID NO: 180929 - DNA, 370 bp, Zea mays
  Clone ID: MRT4577_96586C.1
cacccatcagctctcgtatccgcagcgcccggaatggcggaaccctcccacgtcctccagttcctgtaccccgccggcgggtagtgccgcctactccgtccgcgcccactctggctaccgagctggtctcctgcagctgctcggccgaggacgggcaagcgggcttcttcactcgcctcagacgcctcataaaggagaaggccaagagcgacgtggagaaactcttctccggcttctacaagacccgagagaacctctctgtcgtcgacgagactccttacttactggaaccttgccgacaccgaccgcgttctcaacaaccttaaagaggcgctgatagtctcagacttagggcccaaaatctcattcc

SEQ ID NO: 180930 - DNA, 523 bp, Zea mays
  Clone ID: MRT4577_96587C.1
aaaaaaaaaaaaaaactttgacacatcgacgtccgggcagccgcctcctgtcgccagttcgccactctctggttgctgcacgcctctagtcggcggggccaagaggtggaaaagggcaggatgaagtccggcgagcggccgaagcagatgcggggcgtccggcaggaatctcggcggttccggcttctggtcatcgtcgccggcttcttcctcgtctccctgaccttcgtcgtcatctccaagcccgattccatcctgtccagcctgaacctcagtatcagcagagcagagggaggagctagtgcttggcggcttgcctgcgacgacgcacgcacccaccctttgccaaacacagcatctcgcgcccccttttttttacgcctccaccccctctgcaaccacatgcacagtccctgcaaacgacgacgcagcgtgacgcgcatcgaagcaaccggttggctgttggccgcgcccgcgcgcgcaaaccgacggcggcgggcgggcgggcggggacacagcgtgg

SEQ ID NO: 180931 - DNA, 286 bp, Zea mays
  Clone ID: MRT4577_96588C.1
taacccttttttttttttttttttttttttggtcaaaccattactggaaattggttacttgaagattgcaagatacaggcatgtacgttaactcggaataacaatggtaacgccaaaagaaacaaacgaaaaaaaaaaaaaagtgccgggttcaattacaatgcatagaggagaaatcaatcgataacgctggacacgccttatgcgcttttttgtgtgtggaaaaaacaacttcctttgacgaaaaaaaaaaaggagaaaaaagcttggaatttgctggaacgcc

SEQ ID NO: 180932 - DNA, 157 bp, Zea mays
  unsure (1)..(157): unsure at all n locations
  Clone ID: MRT4577_96589C.1
atcaattgtagattcttacactggatttccaggagcttgggccacatttaccattcgaatcgattggagattcttagaaattcttgacatcattggattatgcctgaaatntttaattaaataacgtcactgaaatgacatttgcgttaagaattgc

SEQ ID NO: 180933 - DNA, 1262 bp, Zea mays
  Clone ID: MRT4577_9658C.1
tcttacgaagatttacgatcagctcagatgaggccaccaatggtgacggggttgcctgtggaagatcaagcagcaaaggtgtacactgcagaaatctttcagaagttcttcaatgaaataggacattcatttcattgcaattataatatacttgaacggaatgagtcagtggttacatacatagtttcggagcatgtcgatcaaacaaacaaggtagactacaaagttgcttatgataatgttcaaggtgacatatggtgcctctgccgtttgtaccaatccaaaggaatattgtgcaggcatgcactcactgtactgagacaggagcttgtgctgatgattccacaaaaatacatcattcatcgctggtgcaaggactgtaaacaaacttgtgcttccatatcccagcctgtctcagcaggtaatcaggaactgggaagctacgatgatctgtacaaacttggccacctatactttgcagaagttgtggaatttggttccatgaactcagaatcaaaagaatatgctttgtcaatcatgagggaagtcagggataaagtgatttcatatgagaaatcactaagagatcaaagggttgacagccatgtttcaacagccaactttgcatacaatcctgtgaatgaggattttactgatgatgctttgcctatctctcttagtacaaagggctgggatcttacccaaggccaatctaaacgttcccgaaagaagaagctggcgaccccaactgttcttgatactttgaaaaagaaaactaaaagggcatataacaaaaggaggaatgccactgcaaacaccctgaacacatctgccactgcaactgacggcataactgatggcacaaatgttcagcagaatcctgtaaatgagggatggcagctagcgtcgactagtgctcccgaaactttctcttatggagtaatcccggatataacctttccattttttacatctctttgctctttcaggagttggtgaaatttacacatatactaactaacgttcatttttgcaggtggagaacatttcgtttgatttgtcacaatacaacaatgccccaagcttccactggcctgaaagcagcagcaggtctcagctccactgagtaggcagcaatgcaattgtggatgccttccaaatagactaagttctgacagtcttgtaagggcttgttcggttattcctatcttctgtggattagatgagattggaaaaaaatatgaaagattttgacttgaaag

SEQ ID NO: 180934 - DNA, 468 bp, Zea mays
  Clone ID: MRT4577_96590C.1
acgcgttgcaattcgtaattgggatgtccttttggatagttggactcaaacgtcagggggaagaagaagctttttgaagaggtccgccacttgcccaatagtggaaatatgtttactaaaaatgagtttatcttgaacagtgtcacgcacttgatgacaatccttctcaatgtgtttagtccgctcttggaagacgggattagtcgatatgtgaatggctgattgactatcgcaaaatagaggaatatgagcagggtgatcaactccaagtgtcgttataagacctttcaaccatgtaatctctttgaatgtataagccatggcacgatactcaacctcagcggaagaagaaaatacagttttctacttctttgttttccatgaatgttaagaatcccaaccataaataatataggtagagagaacactgtgttagccgtcacgccccataatcacagtcacagtacg

SEQ ID NO: 180935 - DNA, 232 bp, Zea mays
  Clone ID: MRT4577_96591C.1
cggaattcccgggtcgacccacgccttcggtggtgccaaatctgggtgtatttggtattattaaccagaaaaccattggtggattagcgagggtatcaagaaaaggcctgaatcttctggcactaatcctgcattgcattcaaaccatttatatcttgcaacaacctctaccgattgtaaattccaaatggtctctacctttattaaaggtgtaaaccccaagggatcacca

SEQ ID NO: 180936 - DNA, 375 bp, Zea mays
  Clone ID: MRT4577_96592C.1
gtgcatttccgcttaaaagcttgttaataagtgattacatatttagctaaagttaatttttgttaaatttgtttttaagttatttatcagcttgacaaagaaaaatgtctgctaaaattggtcgtgtattacaaactcgtcagtttgcccaagctgctactaaacatgcagaaggaaatgcttatgtgcgtcctgagagtacgcgcactacaaaattaccgaacggtctttctatcgtatcaatagaaaactactctccaatttctcgctttagtgttcttattcgtgctggtgctcgtttcgaaccttttgatcaacaaggaattactcatgctttacgtttagctgctggtcattctacaaaaagttcttcta

SEQ ID NO: 180937 - DNA, 818 bp, Zea mays
  Clone ID: MRT4577_96593C.1
ggagtactccacagcgagctggaaggaagtagtggacagctagaggcgtagagccagccaccaccgtcgaccggcaccaatccacggtttagcctggcaggtgcttctcaggttccatggcttccagcagcaagggagcggcggcgtcctcgctctgcatcaagctcgtggcctgcctctgcttcctcggattatcccaaggcaggggcacggcaaagccgccattcacgctgaggaacctccctcccctcgagaaggcgagcagcttccccgcgatgcgccacgacagctacgactacattgtcgtcggcgggggcaccgccggctgccccctggcggcgacattgtcgctcaagtacaaggtgctcgtgctggagaggggcgggtccccttacggcaaccgcaacgtctcctacatggagaacttccacattggcctgagcaacacggcgccggactcttcgtcgcaggccttcgtctccaccgacggcgtcatcaacgcccgggcaagggtgctcggcggcggcacctgcatcaatgctggcttctacagccgagccagctcaagcttcgtgcaggatgttggctgggaagaagacctggtgaatgagtcctacccttgggtagaggataaggttgtccagtggcctaagatcgcgccttggcaggctgcactgcgggatgggcttgttgaagcaggtgtatcccctttcaatgggtacacctatgaccatgtttctgggaccaaggttggcggcaccatcttcgacgcaaatggccaccgccacacagcagccgacttgctcgcagctggagac

SEQ ID NO: 180938 - DNA, 160 bp, Zea mays
  Clone ID: MRT4577_96594C.1
acaagctttttttttttttttttttttatctctttgcaacaaggtttggttcctcctccttttactgagggggacctcctgcatttcataaatctgggtggagctgttgctcacccatctgtgctagccctatagcgttggaggcggggagggcgatcta

SEQ ID NO: 180939 - DNA, 536 bp, Zea mays
  Clone ID: MRT4577_96595C.1
ccggccgggattcgagagtttattacaagacattaaaataagtgctgactaaacatgggcagacggatcgccggcggacgattctagactccaagggccggtcaggagcaacttcacgtagacctggctcgcgatcgaccgagcatgaggacggacgtgctcttcaatgttgtctagctcctcatcgcttcggtcggcgtcaaagtcttcagcgattacgcggcgtcgatctcgtcaaaatgggagaccatctgctctagcaggatcatgttgctcccatgatatgcgccctccacgaccacgcgctctaggtatttgggccatgtgacaatgtcgctctagttatgtgatttgctttctgaaacatcaatccactgcactattattgtaatcttttttttcctcctaatgtcttgttcggttattactatcctatatagattggatgaacttgaaaaaaatataaaagattttgacttgttaaaaaaaaaaactcactcaatccatatggattgagagcaaaacaaacaaggcct

SEQ ID NO: 180940 - DNA, 443 bp, Zea mays
  Clone ID: MRT4577_96596C.1
ccaaaatgtggttattcaactgcctaaatgtgggaaaataatcctttgttacaaaatataatatccatcaacatcaagctatctactgtgctgcgaaaacacaggtccagttctggcggttcaaaactacttcaaaatttcagcttcagcctccctggagaatgtcaaaaaacagtttgagaaaatttgcatttcgacaaactaatgttttcatgtcacttgtatggggcaattatcctccttcggcgttttggagtctcccgcttaacatgcatcttctccatatcatttagcggacggcttgatccatcaggcaagctgatgaacttccagcccccttcagcaccacgctttccctgatgaccgaacttttcgaccatgtagctccatccattgtctggctggtcggcgccgactgtacttgtggcacttaacctcccctg

SEQ ID NO: 180941 - DNA, 884 bp, Zea mays
  unsure (1)..(884): unsure at all n locations
  Clone ID: MRT4577_96597C.1
gcgaaaatcgcaacatggcggtgccacccacactaatcacccccccaaatcgaccacccctccctctccctctcttaagatcgccggcgaggggagagccgagaggcgcagggcagcccccgccgacgcttccgctcccgctcccgccgctgccgcagccgcagccgcagccgcagccgtagcggcattttgtcgagcatatggcgctcgtgcccagcggcggcgcgggcgcttgcaaggacgaggccgcccttgggctcccgtggtccgaaatgttccgctccgcctcgcgccgccggcccaagcaggagtccgacgatgcgccgcccaagaagcccgcgctgaagacggcgggtgccaaggagatgaaggccaagccgtcgtcggtagggactggagctggggcaggagccgacatcgcagggctgtcgctggagcccgacgcgcgcctggcgctctacatcgccatggcgcacgcgggcctcgccaccgcgctgctcgtgctctacggcctttacctgctgctcgccgacttcctccgcccgctgcagtgggcgttgctctgctccgtcccgctccgcgagacgcagcgcgcgctcgtcgccttctgggagcccccgctccgtggcggactcagcgccgcactgctcgcgctgccactcgctgtgctccggtcctcgaccgcaacgctcgccgacgcgcgcgccgcgctcctgcgccgcccgctcccgtcatcgccggcgttcccgcgcctcctccgctggctcgtctccttctttttcttcctcatcctcttcgagcgcctcggngccgccaccgcgctgctgctcctcgntttcgcgctcgcattcttcgccgcgtcccccagctcaacgcgctgcctc

SEQ ID NO: 180942 - DNA, 306 bp, Zea mays
  Clone ID: MRT4577_96598C.1
gcatgaagcgggagacgagtgcctgattggtccatgtcaaccacaagtcccactctctgagcgtgagcccgaagcgggacacctaagagcacggcactatcttggatagggtgattatgaagactatcgtgtaccgctaaggcttgtcactgcctgtaaatgcagccagtgtgcaacggaccgaagatttgttcagggagaacacttgacgggtgtgcatgcatacgatgacacaaaactgattgagactgactggagcatgatgcgtaatcaggctgctgcaaacatgaagagacatgcatagtg

SEQ ID NO: 180943 - DNA, 384 bp, Zea mays
  Clone ID: MRT4577_96599C.1
gaaggatatcaagaagctgcttgggagctcttaaacgatatctggctgcaaaactgtagaaaaaactgtatgaacattgctctgagagctgaagtataaaactactttattaagacaagattgttaccgccctttttttttttttttttttttttttttttttttttttttttttttttttaccttaaaattctctctggttataaatactcaaaagctatgtacaggttacaccactttttttttgcactggtgagtggagagccttgcgccacaaagaaacccccccgcccggctgatttggtcaggtgaccgaccccacgcctggcttcaaacaacttgttggacttggagggcagtggcacgccacgccacgccatgcca

SEQ ID NO: 180944 - DNA, 268 bp, Zea mays
  Clone ID: MRT4577_9659C.1
cgcgcttgtgtgttaaggtttggtccatgtgagctactataataacctatccttggtgtgcgtttcgtgagtacgctctgttggcaagatattgaggctgctgatcatgaggtgttagctggaattcatggcgctgtctgactgatcttgtgcttatgccgcggtgcgatgctggacttcgacggagtgctgacagtgtagctgaccactgtgagagtcgtgcttaagaatgtatgtattgaccgcagccgagcttatgcatgctctg

SEQ ID NO: 180945 - DNA, 340 bp, Zea mays
  Clone ID: MRT4577_965C.1
aagggacacaagtgcagagctggtggtggtccatacaatagtttgatacaaaagttcatggttcatcacaccccgggcacaagattttttaagggtcatggggcaaaactgttgctgctccatacaatagtttgatacaaaagctcatggttcattccacccagcccacaagattttttaaggtttatgggacaaaactggtggtgctctttacaatggatttaaaggttacaaacattttgccaagggttaaaccccctaacttgggggagactcgcagttaaaggtcaccattatcttttatgacatcgggatcacttttagcattttttttcttaaa

SEQ ID NO: 180946 - DNA, 365 bp, Zea mays
  Clone ID: MRT4577_96600C.1
aaaacaaccaaaattttttattcattcaaatttacctttaacatttgggtccaaattgatagggcctactagcttatatcaaatgtaaactttattactcggacggaaaaacacaaccttacaaattattttttgtttctttacaaaaaacacgtgcgtgggcttgagggaaaatgtgcaaataacccatttttggactttacctccccttatggtttcccctcccgctccggggaggggccctccctctttgggggcgaatttaacttttggtagaggccgcaacttctggtttgtgaccttccaaaccttttggttcggcatcttttgcaccggcgggtgaggagggattttaagcttttgca

SEQ ID NO: 180947 - DNA, 672 bp, Zea mays
  Clone ID: MRT4577_96601C.1
atcaaccataattattgagaccatcaagcaacatacaaagcggaatgcactagcaacaatatagcaacaatggataccaagatattttccctccttatgctccttgctctttctacatgcgctgctaacgcgacaattatccctcaatgctcacaagctcctatagctatcctttatccccataccttccataacttagcttagtatgagacaacccatctcttgaaccatataggcttcaacaagcaagtcgcaggaagcaacataccttcatcggccttgttgcgtcaacaatcgccagccctatcttcggtgcagtcattggcacaacaccatcagcgcacaacagctaccagcaactggcgctacctgcgatgcaaccaagctgctgtgtactaccttgatccctactctgcgtaccaacaatttgttccattcaaccaactgtctacactgaaccctgctgcttatctgcagcaacagctatcaccatttagccaggtagctactgactactctgaacaccaacaacttcttccattgaaccaattgagcgcactgaaccccgctgcttatttgccgtacctgatactactaccattgagccagatagctacagctagccgtgcttacttgttgacacaacatcaggtgctgtcgctctaccagcag

SEQ ID NO: 180948 - DNA, 1949 bp, Zea mays
  Clone ID: MRT4577_96602C.1
aattcggcacgaggcgccccttcaacccctgcccgagcccaccgcctcctctctcctctccagctcctccaccaaatccacggcacccccattgatttgtgagggaaaacctagggagatctcagatctgctctccaggcttctctctcttgcgtggattcgattcaagccaatttctttgtgcaatggagacataaccttattttcttgctcgggcatagctatagcacacaagggataccaccttacaatgtgtctgacttctgcaagtttggttagggcttttgatggcaaaacaaacgaacaatattatgaattaaagattaaagtgcgctgtgaaggcaatgaagtgtacaagggttttttggctgaatatgatttagatcataacttcgctgttgtcaacattgatgccttccttggtgttcatgttggaagttcccaatgtgtgctggaatctgtgctccgtggtgaggcatatgtagttgggcgtggtgtctctggtgacctaatatccaggagtgtcgaattgggctgtgatctaagcgtatctaagcatggccaagatcttgagagtaaaacctcagaggcttgggaaggtggaatagttttttctttaaatggggaatctgttggcatgaacctttttctggttatgggaaggaccattttcctaccatggggcacaatcttcgagcatctgcagcattttgggaaatcctggcaaaggtttggagcacatgtagttggtcaatctaatagccgtccagaaggtcaagaacaattagatttagattctatgggttacccgttaccatcaaccaagggtattgatggtatgattttggtcaatacctttgaagaattttttggtgatattcatggtaaaggtgtctggagcaaatttagtggacaagcttcttctagcctatccagcaatgtcgttgcactggcgtcatacaatggagggaaaaggttttttgcatgcacggggttttttattccatggaatgagtctacaattattttgacatcagcgagcttgattagaagttctggtgatgggagtgatattgttgaaaacttgaggattgtagtgtcgccatgcgatggcaaaatcagagaagggacattagagctttataatctacactacaatgttgctcttgtcagtgtcaaggatttctatgttcgttctccagcaaatactgtctgtattaggtacagttctcaagtagcagctgtagggcgttgcttcgaatcaggtgcgttaatggctacgagtggcaagctggttccctggacaggcacacttgattgtgactgcctcgtacgttcctcgtgcaaaatcactaaggctgggatcggaggcccccttgttactctagatgggaatgttctcggcatgaacttctatgataagaaaataggaacccctttcctgtcaatgccggacattttcttgattttaaaatcgtctaagagtcacccctctgctgggcctttctggaaaatggatggggatgacgcagctaggttaaacaggtggcctgtgcccatgccatgttggcgactccctaattatgtggatgaggataaatctgatgatgatgattctgatgattctgtggagtactcttacgtaaggggagtgaaagttattctcttatagatgcagtcataacctcggtccgtctcaatgatcacatattgttgctggtttgtagtagtttaataacctgttgcacttgccatactccttttcttgtggaagtcttgtaatatgtgttgcttatatatcttaaaattacctactaatcaattagctgcttgggtgttgacggactagtgttttgggcgcaaaaaagtatttctcgtttggaccttttgggcatgtttggacttaaggaatccttgattgaaagcaagctgtttagttctttgccatc

SEQ ID NO: 180949 - DNA, 249 bp, Zea mays
  Clone ID: MRT4577_96603C.1
catacgggcaactttactagacccaacaggcatgctaagcaggcatctatccttgatcacattagggcctacatcaaccggcaccactattacataagttacattcaggccatgtgaggacaaaaaacatgtgggcacagacagctaccacagcttgtgctagcacaccttgctggatacgtctgagcagcatcgagtttattacatataaccaactgtctggattgtactgtactgtttatttgcatc

SEQ ID NO: 180950 - DNA, 312 bp, Zea mays
  Clone ID: MRT4577_96604C.1
tttttttttttttttttttttttttttttttttggggtgggtttttttacaaatcgaaaataaacaaaccttattcatggtgacaggaggaaaaccgtaaaaagtaaaaaccaacttgggcccttggtgcttaaacctttaaagccttaaaccaaaacacaagagacgcaacgggcctcgtgcgtgtgagaactcacagggcagggtgcatataaaaatcttgagaggggagagagaggacactgaggtgggtgaatccgtaaaaaagaaaaccctttataaactggaggctatccccaatgggggtagaac

SEQ ID NO: 180951 - DNA, 738 bp, Zea mays
  Clone ID: MRT4577_96605C.1
aatactgtctgtattaggtacagttctcaagtagcagctgtagggcgttgcttcgaatcaggtgcgttaatggctacgagtggcaagctggttccctggacaggcacacttgattgtgactgcctcgtacgttcctcgtgcaaaatcactaaggctgggatcggaggcccccttgttactctagatgggaatgttctcggcatgaacttctatgataagaaaataggaacccctttcctgtcaatgccggacattttcttgattttaaaatcgtctaagagtcacccctctgctgggcctttctggaaaatggatggggatgacgcagctaggttaaacaggtggcctgtgcccatgccatgttggcgactccctaattatgtggatgaggataaatctgatgatgatgattctgatgattctatggagtactcttacgtaaggggagtgaaagttattctcctatagatcacatattgttgctggtttgaagtagttgaataacctgctgcacttgccatactccttttcttgtggaagtcttgtaatatgtgttgcttatatatcttaaaattacctactaatcaattagctgcttgggtgttgacggaatagtgttttgggcgcaaaaaagtatttccccgtttggaccttttgggcatgtttggacttaggaatccttgattgaaagcaagctgtttggctcttaaaaaaaaaaaaaaaaaacccccccccccc

SEQ ID NO: 180952 - DNA, 354 bp, Zea mays
  Clone ID: MRT4577_96606C.1
ggacaaaccaaacacccctccaaactagccctgtttatttttttgggcagggtaaactgaaaacagatttttctgggggtccatttattttagagtcctccaacaggggccgtgcagccgtgcaggcaatggtccacaaagctagactgctttactagtagtggtagcaagcatgcttttttgtcctggtaaaatagctaatgcttgttttaacaacctagcttgccagattttttcccaaaacacacccgtttgctgttgcagggcagtactgccctgcccccacagtcatgacttatgagccgtaaatgagatcacagcatgagcgtccactgttgggtgggactcccaggg

SEQ ID NO: 180953 - DNA, 448 bp, Zea mays
  Clone ID: MRT4577_96607C.1
gggggaaaaaccccaaccaaaaaatggagaattccaaggaaacacaacgccgggaggggggcccccttggcgggccccccccaaagggaaccaaaaaaagggcccccccaacaaggggttgcggcaaggcagggtccaagggaaacagggggttgaagggaaaaaattggtgtccctgaaagtagggaaaaaggttccccaaacccaccgggcggtcccaagggaccccgagttgccccccgcaccccggccgggaccccccttagggcgaggccccccccccgggcggccgcgcctaggggccccgggcccggacccaacccggcgcggttccggggcgagccgggcccctcgggggaacctcggtaccggggccctggccggcgccgtgccgccgcccgggcttaaggcggcaacgcgggggggccccccggcggccccccccccc

SEQ ID NO: 180954 - DNA, 533 bp, Zea mays
  Clone ID: MRT4577_96608C.1
cggacgcgtgggcgccgagcggctctgtgtctgggcggcggcgtatgggcgtctgctgagtgcccgcgcaggcacaaccacggtgggtcggtggctagggttccgatggacggcggctagtagatcaagattcgcggatgctcccatcgttctcagatcgtgtgtcggcgtcgtgccctcaccctcccctctcggcctcccaaaacgctgcagcgccgtgacctttggcctcccagatcggtgacccaaaacactgcagtgcccatttgctttgctttctatctgtaccaatatgctacttactagcaccggtgatctctcaggtggcctcaacgtattacgtatgaatgtgctagttgctagtacgatacagtcatacagttagtgttctagtaaatctctcttgttgacaagtataatacagttagtgacttagtgttctggtgaatgtaaattgcagagtgaatttagtgatctttgtgaatttgtgacattgttaacttttgataattgttaacttgttgtattgggat

SEQ ID NO: 180955 - DNA, 964 bp, Zea mays
  Clone ID: MRT4577_96609C.1
actcctcatggcgattggcgccctcggggccggccggccggctgggagccttcaccaaccctgccccctcgtccctcgacgttgccgacgccgacgccggcgccggcgcctctccgaaccgacgccatgccccccgtcaaatggttgatgcactggcatccgagtcccggggcgacgctcaacagccagatcctggcggaggcgtgtggctgcgccgagtccctaggcggctccaaggacgggcggtggaagacctccatcttcttctaccgcgccatgacccgggacggcgcgggaggccccgcggtgcagcagcaccccgacttgcctagggagctcctcggcgtcgcgctccacgagcgcccgggtctctacttctccatcgtccgcgcccagcgcctcgttctccaggccgatgcggcgttcccccaggtcatggagaagctccagtcatacagaatccgcgtcgccctcaacttcgaggggtttcagtatcaactgggtgatttctgcctgaggataggaaaatgtgttcccaataattctgaagcactgagaggaatcatgatggaggtagagtattatcccctaacttccattgaaaaatccaaggcagtcatggaggacttctttgacatatggcaggaaacagttgcgaagaagtcattacctggtcaattcattcatgtagactcaaacttttcagaatatggtctttcagatcaatattcttttcaacatactgcagttcaatatgcaacttgcttgcagcagctcatggctgcagtaacagtaaggggttagctctagagagattctcaaaaccactctataacgtcgtaggttgattgtggcagcattcacaatgcctggatatatgttgtgtaattgacatacaatttacaaatgggttcccttcctcatgttcttttaagatgcccactacaggtaattggcaaaaaaa

SEQ ID NO: 180956 - DNA, 346 bp, Zea mays
  Clone ID: MRT4577_9660C.1
gaggtgatggatcaggtttgacctttctattcctgcctaggactctaggagtcagtgaccacctgaataaaggtgaaaagggaagggattcaatgtggtgaagtgacatctaccatctatgtaccaatttagtggaacgggttctctacataatcattcctttttttccttccatggatatttgcagctcccgattgatttatctgaaccatgtaaattaggtcagatgcccctgaatcgacctgatgtttcactatggatccctcaggaaatcatatgccccttctctgatgaagctgtttgtaacaagatgtttattgcttcaccaagttcatctgttttcgct

SEQ ID NO: 180957 - DNA, 346 bp, Zea mays
  Clone ID: MRT4577_96610C.1
cacttaaaataaaaactcaattttatttggatccaattgggcatatttggaccatccttggccaccattgggttggttttggcaattcaacctcaaatccctatttctaagccaattccacttgttgagccataaagaggggttttccaaagaactttgatttaagatcccaaaacctccccctttgtcctttaataaacacttccccctacaagaggccatctttggacaaaagagacattgcaagatttttgacaaaccaaaagctttttcctactgtttccaacgtttctcaaggggttgctgacccatttatcgctttggccttatatttccccccctttgg

SEQ ID NO: 180958 - DNA, 200 bp, Zea mays
  Clone ID: MRT4577_96611C.1
caggggcacgcaccaacactggggggggttttttatacgtgcggcagagtttaccccagataattaaataaatggggggtctgattaaaacaactaggggcacattcggacctacgtaaaaaacatgttgttcaatatgctccttgaagggatagcccaacccccaaagttttttaaatgggggcggcagcaccgctctt

SEQ ID NO: 180959 - DNA, 538 bp, Zea mays
  Clone ID: MRT4577_96612C.1
ccatcacccgcctccactcccccctcccaggtgctgcccagataaccggccggggtctctggtgcaacctagctcgctcgtgggagtcgcgacgatcgacctctccgtcgccgatggatctgcttgcattgcagctcatcactccaatgatcggggcaatttttgctgctggcctttccgggctccaatgatttattccctgcgactgcgacgacgacgggccggcgggggcgggggatctttgcttgcaaccaaaggagcaggccacgatcgagggagtactgccgggcgaagccgctgcacgcaccgccggctgcgacgcaacgccaacgcaacgcgactagggtgtgggcatgcatgcagatgcaggccatggatcgatgagcgtggatatatacgccacggcacggcgacaacgtagggccctgtgtgcgtgatgagccgactgccacaccggtgtacgccgtgctgctgccatgaagaagaaaaaaatggtcccgatcgatcgccaaaaaaaaaaaaaaaaaaatttgcggcc

SEQ ID NO: 180960 - DNA, 161 bp, Zea mays
  Clone ID: MRT4577_96613C.1
ttttcctcttttgtttgggagaacacacgggacactcgtcagattttgggatggcccgccaatagagatcgaaaaacgaggcatgaaaaattcttcctacgatacctcattgagatcagaatacaacgcagggccgcataactgattaaagaaaaccggct

SEQ ID NO: 180961 - DNA, 339 bp, Zea mays
  Clone ID: MRT4577_96614C.1
cttgcaccagcactcctgacaacctcagtttcccactaccctgcacctccgacgcgtgagtggaagccgcacgaacccatggcctccggcgagcttgcctgcacctacgccgctctcatcctcagcgacgatggcatcgccatcaccgccgagaaggtcgccacgatcgtgaaggcggccaacatcaaggtcgagtcctactgaccggcgctgtggggggagctcctggagaagcgcaacgacgaggacctcatcctctccgttggatctgatggcggatctgctccagttgctgctgaagaacctggtgaaggagctgttactgcaactgccccatct

SEQ ID NO: 180962 - DNA, 181 bp, Zea mays
  Clone ID: MRT4577_96615C.1
ttcactcgtccgccaaatctagcctctgaccgagggttgttcccgccgtccgagttgtctaggtctccactgcagtgccctaccggccgagagcgcggtccaatgaacccaacgctgtcacctgctgactctaggcgaccagaactagctcctagcgcccccctacgtgatataggccttt

SEQ ID NO: 180963 - DNA, 129 bp, Zea mays
  Clone ID: MRT4577_96616C.1
ttcgcttcttcagcgaaaggttggagctttgaggtggtgcaggtgctcagccgaggacttcgggcgatgacacacgcagtagcgcgcgtatacacggacaatactgggttcaggtagcgagttcctcga

SEQ ID NO: 180964 - DNA, 929 bp, Zea mays
  unsure (1)..(929): unsure at all n locations
  Clone ID: MRT4577_96617C.1
tcgtaccgattggctcgacgccggtcggggccggatagaccaccacgacacccttccccacaccagcagtcgagctgagcacgacacaaagccggctggggccgcctcgccatggcgatccggatgagcaacaacgtgatcggcgcgctgaacctggtgacactcctgctctcggtccccatcctcgtctcgggaatctggctgcggtcgcgcgccgacggcaccgagtgcgaccacctcctgtccaccccggccatcgcgctgggcgcggtgctcatggccatcgctgtcgcgggcctcgccggcgcctgcttccgcgccacctggctgctatggctctacctcctcgccatgctcgtgttcatcgtcgcgctgctctgcttcaccgtcttcgccttcgccgtcaccaacaggggcgccggggaagccgtgtcgggggtaggctacagggagtaccgcctcggggactactccacctggctgcggcgccacgtcgaaagccgcaaggactgggcccggatccggagctgcctcgccgacgcgcacgtctgcaggcgcctggaggagagggagagcaaggacgcggcgggtctggctcggctcggcctgtccccggtcgagtccgggtgctgcaagccgcccacgagctgcaacttcacgtacaccggcggcacggagtggaccaggacagcggcgggctccgcgcccgccggccgggactgcagcgcgtggggcaacgacgaggacgacctctgctacgggtgccagtcgtgcaaggccggcgtggtggacgcgctcaagcgggactggaagcgggccgccatcgtcaacgtcgtcatcctctccttcatcgtcgtcgtttactccgtcggctgctgcgccttcaagaacagccgccgggacaactacgcctaccacnnnnnnaaaaa

SEQ ID NO: 180965 - DNA, 397 bp, Zea mays
  Clone ID: MRT4577_96618C.1
ctatacaatctcttagacgtattaagcacgcgggcggaagctaggaacctctacagcaggcgccgcccccagggtttttttttttttttttttttttggggggggcccgcggggcggaaacccccgtcattaaaaacccctggggcaaaaagggggggggcataacccggaaacccccaaccatcacgggggacaaaaaaaattgggaccaaaaaaacccaaaaccccccaaataacgtttaaagggacacaccggacccaccaaccacaataactttctgaaactagtggaacaagcagcaacaccattagggttaaaattgaacacaaaccgaaacatacgggcctcaagagaactcgccctcctccatacccttaccgacataccagtgcacga

SEQ ID NO: 180966 - DNA, 658 bp, Zea mays
  unsure (1)..(658): unsure at all n locations
  Clone ID: MRT4577_96619C.1
ctcgaggccggccggggtgctttcttagaggtgggctggcttctcctccccctccgagtcgggttcgggttcgtgaggttctccggaagtcggtttcttggttgagcgcatcgagatggcatcggccgatgttgagtaccgctgcttcggcgtggggctcgcctgagccacggacgaccactccctccacaacgtccttcaacacctacgtggaggtcctcgggtccaaggatcatcctctatcgcgagacgcagaggtcccgcggcttcggcttcggcaccttctccacgggggaggcgatgctaaacgccatcgaggacatgaacggcaaggaggtggacggccgcaacatcaccgtcaacgaggcccagtcccgcgacggccgtgataggcggcgccgtcgtcggttacggtggtgatccgtgggaggcgtcgtctacgacgatgtggtccgccgtgatgtcgacgagcgactacggagangtgcgtagtctactatgatggcgcggggtctacgtttgctggtgacggcgtgtacggtgtggtcatccgcgtggtagagtacgaccactccgtagttaactggagaagctgcatcgggactggccgactgagctgtttatcctgaacgtctatcgtgtagactatcctacagga

SEQ ID NO: 180967 - DNA, 384 bp, Zea mays
  Clone ID: MRT4577_9661C.1
ccggccgggccagccgacgccgacgggccgtgggtcgacaccatccaccgctacccggtgcagcacccagaaattgtcaacaaataaaaacaaatctgatgactcctagggcatgcaactaccattttcaggcgtatatttgtacgtacccagcagtatacgtatacacgcatattgattgagttcgctgatgaagaagtatgcgcgcgcgcgtgcgtctctgtctatatatatatatatggcgtatacttatgggcggatatgatatgcccacgtctcagatagggccttcttgctagatcgatgtcactgattgtagcccaaattaatgcaagcgtacttgatttgtttggtgggaaaaaaaaaaaaaaaaaaggggcggcc

SEQ ID NO: 180968 - DNA, 288 bp, Zea mays
  Clone ID: MRT4577_96620C.1
gagagacgcacatctatctgtcaagcgacgccatggcctcgatcagagtcgaaggctaacacctggatggcggcggctgcctgaacggcatgatggaaggcatacttcaagatcatcctcacctccgaccccaagctgccttccatagtgttcagcgtgcacgacgcgagcaccctttaccgcggtgctcaatggcgccgcgaaggatgtcaatgactcgacccataccagcgccatgatcaccaacgatggaattgccatcaacccctgacaaagagtacgcaacgt

SEQ ID NO: 180969 - DNA, 402 bp, Zea mays
  Clone ID: MRT4577_96621C.1
tatttttttattttttttttatttttttttttttttttttttttttttttttttttttttaattcggtaaatatataggtttctggtttccgaaaaaaaaaaaaaaaacaaaagggccacagaagcaacacataccaaagggccaaagggaaaaaggggaccaacgggctaaccatgggccggatcgaaagaaaaaaagcacccgaggacccggacaaacggggaacacaggggcacagtggggaccaaacaccccaggaggggccaagaccggggggcccggctcgtcctgggccttggggggggggagggccaccaggcccggaaaaggggtaaccgggccaacctggcccctgggggcccaggaaagcaagatcttaaccgggaacccgggaacaccca

SEQ ID NO: 180970 - DNA, 576 bp, Zea mays
  unsure (1)..(576): unsure at all n locations
  Clone ID: MRT4577_96622C.1
ggtaccctcgggctcgccgggaagatttccattccctcccgcccctctaaacccagagcctaaaaccccggaaaccctaaccctagagaaaaaagggcgccgccacccaccctggccaccggggcgcgctcatttgttccccgccccttttgcaggtggtttcgttcaaacccaatctattttttcgcgagcgcgcgcgtgcggcgttgtgagaggaggcgaagaagatggctccattcggcgacggcggtgtcggctgtggcgatggaggggaggcgctgcgtgggtgggaccctctgcgcagtggcagcgcgccgccaacgatggagggcgcggcggcggcagcggcggcggcggagaggagggtatttggcggcggcggtgacggcgcgtcgttcttctccgggatcgacgggctcatgtttggcgcgaggatggancgaggtcagcaggtgccgcggtgccgccggagctcaggaacattttggcaattctacatctttatctgttggaccatctggccaactgtttaatggtgcaggagactgtgatgaatggcagtttggaccgaccaca

SEQ ID NO: 180971 - DNA, 317 bp, Zea mays
  Clone ID: MRT4577_96623C.1
gcccaacccaacccaaccaccgggggggctaattaaactaggggggggagcacaaaacaaaggcgaccgagacggagaccgcaccaccggccgcaaggaaggccgacagcatgcacgcggcggacgccgagggccagctgagcgcgctgctctcgctgatcacgctgagcccgatactcaacgagcaccacccactggccctgctcctgctcctgaccaccccatggctcgcgcggccagccagggccttggccccggacatgacgtccaatgccaccacggacttaccgccgaacgccatcgggagaaaagggaag

SEQ ID NO: 180972 - DNA, 342 bp, Zea mays
  Clone ID: MRT4577_96624C.1
ggggggttttttttaagagttttttgggtcttccctccaaaccaaggggcaagaattcacaggtaaaaatacacggagtaccgctcgaaattgaacaaatatgtactaacaaagcatttcgaacaaatatatctgggaataaaagatacccagcattgtaccatagacgaccgataatcttttgtcaggcaaagggcataagaatcacactctcttaaacgcaactgtctgggaggccaccacccacccaacgcgtatggctgctggtcgttgaactcagggccaagatccaggaggtcgttggatgtaagctatgggagcttgtcgcctgcaaagaaaact

SEQ ID NO: 180973 - DNA, 684 bp, Zea mays
  unsure (1)..(684): unsure at all n locations
  Clone ID: MRT4577_96625C.1
agctgcttcagacgagcgagcgagcgagcgagccaccgcccgagagagagagagggagagggagagtggggattcaagtttcaaactcactatcgaggggggataggaaggtggtcactcatcggtccacagctagctcgtcgccccccatggctgactggggccccgtggtgatcgcgacggtgctgttcgtgctgctcacgccgggcctgctgttccagctgccggcgcacggccgaatcgtcggcttcggcaccatgcacaccagcggcctcgccatcctcgtccacgccgtcctctacttcgcgctcatcaccatcttcctcatcgccatcggcgtccacatctacgccggctagctagagtgtcttctagtccacaccccccttcgtctcttcctctcatcatcggcccctgctagcttcctcgtcatgtactactagtctactactactactggtcttcgtttcgtggataccccgcagtatgttggtatttatgggattgttatgngtgttttatgttccagctccttccttccatttcattgaagatggtccggccgggctcttgattcagtctgaacagntgtgtgggatggtgtttgtttatacaagactcagaacgaacacttactggggctattggtttgattatatcccctggggggttcgtttcgttccg

SEQ ID NO: 180974 - DNA, 682 bp, Zea mays
  Clone ID: MRT4577_96626C.1
cattgggaccctcgaggccggccgggaaatcgtcccgagaatgcctagggacgacgccgataatcccacacaaccacagccatgaacgggctgtttcttcctaacccgaggacggacaagtgatacggggggaacaataccctgggcgagggcgaggacacatattccacagcgcggcctgatccaccggaaaggcgtaccgattgatctgatacgaccggtaatgctccgcctccataccttccagcccatcctgttgaatatatgatcccttgtcaaggacatgatacatgatcatcactatctcgtgaaggcggtaatacatggtatatctactgcatccgacattactgcaccaaggagttctgcaactactaccacagatacggctacgattgccaccttaatgagatcacggatatctttaccctctactgtcggaccctcctgcaaactgacaccccggagctgatggcctaataacgtcttcgcttgttgtgcccgcacctggatctataaggaataacattcatcgtttgcctgatctcatctcaacttgttggatacaagagtctggtgttccctgtatctgccatcaatgtaactgatgatctggcactagatgtaaatgatgttgtaacgtaatggttaaagattctcgcctatgctgactccttgtttg

SEQ ID NO: 180975 - DNA, 732 bp, Zea mays
  Clone ID: MRT4577_96627C.1
cccacgcgtccggagcgagcgagcgagccaccgcccgagagagagagagagagagagagagagagagggagagtgagagtggggattcaagtttcaaactcactatcgaggggggataggaaggtggtcactcatcggtccacagctagctcgtcgccccccatggctgactggggccccgtggtgatcgcgacggtgctgttcgtgctgctcacgccgggcctgctgttccagctgccggcgcacggccgcatcgtcggattcggcaccatgcacaccagcggcgtcgccatcctcgtccacgccgtcctctacttcgcgctcatcaccatcttcctcatcgccatcggcgtccacatctacgccggctagctagggccgggtgtcttctagtccacacccccttcgtctcttcctctcatcatcggcccctgctagcttcctagtcatgtactactactagtcttcgtttggcggatgatgcgcgcatgctagcttagctgcggcgaacaattaatccggacgccggataccccgcagtatgttggtatttattatgggattgttatggtgttttatattgttccagctccttccgtcgtcttaacgcttggttgcgcatccatttcactgaagatggtccggccgggctcttgattcagtctgaacagttgtgtgtgtgtgtatgtgtttatacaagactcagaatgaacacttactggctgttggttt

SEQ ID NO: 180976 - DNA, 385 bp, Zea mays
  Clone ID: MRT4577_96628C.1
tttggttttttttaaatttccatggggttatcagttctaattattttttgtacatatgttcacacttcacaatctaactaggcagcgcaaaaagggccggctgtaattcaaaaaaaacaacagggcccaacttcccgaaaggatgggcccaccacccaaagcaccaccctctgggacccccaccaaaggcttaacacaatagacccccccacccccaaaccgggaacagttaaaacaaggagctcgccttaagcccaatcagggaccccaatgtacacccaccccaagccccctatgaaggcatggctgagcgaacgcctgcttttcaaacctccacaaaaccagaccaaagggtccaacaagagccactgctctctttacccgt

SEQ ID NO: 180977 - DNA, 772 bp, Zea mays
  Clone ID: MRT4577_96629C.1
acctcattccaatttccaagagagacagagagagcgtgtggaagcccattaattactccccttccccccatcccccagctgcttcagacgagcgagcgagcgagccaccgcccgagagagagagagagggagagtgagagtggggattcaagtttcaaactcactatcgaggggggataggaaggtggtcactcatcggtccacagctagctcgtcgccccccatggctgactggggccccgtggtgatcgcgacggtgctgttcgtgctgctcacgccgggcctgctgttccagctgccggcgcacggccgaatcgtcggcttcggcaccatgcacaccagcggcctcgccatcctcgtccacgccgtcctctacttcgcgctcatcaccatcttcctcatcgccatcggcgtccacatctacgccggctagctagggtgtcttctagtccacacccccttcgtctcttcctctcatcatcggcctcttgcttcctcgtcatgtactactagtctactactactcctagtctactactactactagtagtcttcgtttcgcggataccccgcagtatgttggtatttattatgggattgttatggtgttttatgttccttccagctccttccgtcgtcttaacgcttggttgcgttgcgcatccatttcattgaagatgatccggccgggctcttgattcagtctgaacagttgtgtgtttatacaagactcagaatgaacacttactggctattggtttgattaaaaaag

SEQ ID NO: 180978 - DNA, 346 bp, Zea mays
  Clone ID: MRT4577_9662C.1
gttaccctacaccccatataaccctgccgggggacatttaactgcttttcgggtcatatacaagctcacaaatctcacctagctatactatacatacaaaaccaaacatacttagccgttaactatattcattcattattaaccctcgctttctataatacaaacacatcaaaatatgttgccaacctacaacagcatggtatataaaatgcatgcccagacccagactatatacactgacataaccatactacctaacgcgagcgattaacctaaacttctaaaataaaagctagagaacaaactcaaacacatgggcctacttaacaaggactcaaagctatct

SEQ ID NO: 180979 - DNA, 526 bp, Zea mays
  Clone ID: MRT4577_96630C.1
gactgaggaactcccactagccatggacgagtacggagatccgaacgggagggaacatcactgagatcggggggctgatctgtggagagaactaggtatgggctactggtgacgttctcgacacatgcgaagtgcaccggggcctgatgcaccgtaagctgagggctgaaacaggtatctgagatcctactgtggagaaccagatgtatacacagctgatgggactgataatagaaaggacccgcgctttacaggattcaccgttggggacaacatgctgcaatgggtgggctctattatcgggtccgccaggacggactaactgggcaccttctaccaacttgcgtagtgctaaaacaccgagtacccgtacaattacgtccaatggtgcggacatgacaccttttgcttccaccctaactagcgaatacgccggaacatatggctgtacataactacatgaaagtgggactggcgactaggaactgcgcatgatgctgctctttatgcacagcctgcttggaga

SEQ ID NO: 180980 - DNA, 505 bp, Zea mays
  Clone ID: MRT4577_96631C.1
cattacacatttaagatagctccataacacttgcgtccagcctatgcgtaccgaagagagacgctattgtgtattgctgtcgtgcacagatagatagcaggaaggcacaggcatactagggaactgacagggtcgtagccactacactgcaacttcacgcgcaagggatagacactcgccacggctggagcgtacaccacatgaagctgcgatgccacgacgacggtggatacttgcctgcgcgcgctggttcctccttccccagagcgtctgccgctgcctctaaaagccctcctggggactggtactgctcctgctgcacatacaacttctccaccccctccaactggttgcaggtgctgctgcctacaacgaggtaggctgccggccaccttttatacagatatgtcactctcacagcactacaacctcgttcagtactcgagctggcgcccgtatcaaacggcccaaaaggaaccctggacactgaatacgcaccaggtcc

SEQ ID NO: 180981 - DNA, 226 bp, Zea mays
  Clone ID: MRT4577_96632C.1
gaggaaacaccccggaattttgtaaagggctttttaatttttcagaaaaaaacaaaatgggggccggaaaaataaaaactcccgcatttcaaaaaggccctgaaattatgagactggaaactggctgttttttttatttgccacaggggggttactcagcagcccccatagtttgccgaaacaataaaccacaggggtgcaaaaaaaaaaaagcatatttgccttg

SEQ ID NO: 180982 - DNA, 417 bp, Zea mays
  Clone ID: MRT4577_96633C.1
tccacgcgttcgcagaaacacacctatcgattctcactatcaacgacctaacaacggtggggtgcaatacattatccctgcttgcgcttcttgccctttttgtgagtgcaacaaatgcgttcattattccacaatgctcacttgctccgagtgccattattccacagttccttcctccagttacttcaatgggcttcgaacacccagctgtgcaagcctataggctacaacaagctcttgctgctagcgttttataacaaccaattgcccaattacaacaacaatccttggcacatctaaccatacaaaccatcgtaacgcaacatcttccagcactgagccacctattcgtggtgaaccctatcgcctacttgctacaacagcttcttgcattcaacccactttctttggcaaact

SEQ ID NO: 180983 - DNA, 347 bp, Zea mays
  unsure (1)..(347): unsure at all n locations
  Clone ID: MRT4577_96634C.1
cccacgcgtccttccactcatcctttcactcttccgcggacgcttggacacacgggccgggtgcattttagaggggggccggcaccacacctccaanaatccacctccacgactgagttgaccgctcggcggcgccatggcagttcaccggctccaaccttcccccttcggactacagtgctccaccgaccggacgccagtgctccttcatgagccacagctgaccggtgcacgcaccgatggatggtgcatgcatgataggtggatttggttgacctagattcgatgttctaaaagcgacttggaggtggctgacatcttcaacactgcaaccattcagttacaac

SEQ ID NO: 180984 - DNA, 309 bp, Zea mays
  Clone ID: MRT4577_96635C.1
aacggaaagggcccacaagggggggacggccattatggggtgaaaaaaaaaaaaccccacacgggtgggtttttttttcttctccccctttcgggggtcgggttgggcaaaccaagacgacctggccccggggggatctagctgggtaataacaatagtagggcaaccgaccggggggaacagggcctttacaacagcttgggggcccctgaaacaaaaaggtcccagagcatagggtttacaaaaaatgggggtttcgggaaacattgaggttaacatagaaggccccatgatggaccccgggcgggg

SEQ ID NO: 180985 - DNA, 426 bp, Zea mays
  Clone ID: MRT4577_96636C.1
agcttggatcctcttgagcgtccgccctcgccttttttttttttttctaaacaacaaccttttgggaagggcaaattaatggtaggttcggtataaccatcattgttgtaatgcccacccaaaaacaccatccgaggggatctacaaataaaggctggcccacgttacggggaacaggaaagaaagcctggggtcccaagggattaggtcttccatggatccgtacatgcatgagggcaactaacttattctacctctggaggggcggggaaaaaggaactgatggaggccgggatctctggcttcttaccgtgggcgaacttcctgaggccgcgcatagcggtcctctcgccctcgtggttgttgtacaggaccccggccgtcctcttatgcttggtcacccgcaccttagggttgcccgggatg

SEQ ID NO: 180986 - DNA, 514 bp, Zea mays
  unsure (1)..(514): unsure at all n locations
  Clone ID: MRT4577_96637C.1
ccgccctttttttttttttttttttttttttttttttttttttttttagaagaacacaaatttactgaacagctatgatacatcacacatgcctttatggccaccgtttaggggttggaccgcctggctgataactgaacctcaaaaatactctaccttcgnatcgaggggggggagggttgtttaattacattgncccccggaggcttcanatccttcttattctccacttgggtctcagacctcnccccgatgctttttctcgttcagattcgccccagacccttcccntagctccctttgctcattccgtncccctgncnngtccctgacnggncccantgtcnntgcctccctggtcagtccggctgcttgnngnnactgnnacangatcccagcnncttgggcnnntaccangccattcccttaacctgttaccccttccgcccttttttcccccgttttgggggacacccctcnggnggcannttcccctccttgaccttccgttttt

SEQ ID NO: 180987 - DNA, 307 bp, Zea mays
  unsure (1)..(307): unsure at all n locations
  Clone ID: MRT4577_96638C.1
ccggggccgaccgcacgcgtccggaccatctcattcatctgatcgtcagcacctttttttatgataatgagcanngcctgtcctccggcggtcgcgtgccttgccatactgcagcggggcagcacacgctcggcgcccgccatgtgcgcagcgccgcagcatgctgagcggtgaatggcggcggcgcggccaccagctgctgcactgccggcccgccggctgttcgagtgtcgggaggaggccgggcggtggcgcggtggtggtgagggccgggcctgggccacttgtctgagatcgagccggacct

SEQ ID NO: 180988 - DNA, 3265 bp, Zea mays
  Clone ID: MRT4577_96639C.1
gccggccgggcctgtgcggagatcaaaaaaaaaaatctccacctcccccgtggtaatcaaatcgaacgcacatgcggtgcgcctccctttcccggcctccccctgtctcggcctccacctaatcccgggcaccccaatccgaggagactgccgtgcgctttaagtgagcgcatcacacgaaaagcagcaggtagccagccgagaccgggagagaaggagaagcagcagcagggccgccaacgccatggcggtaggcgcgaccgccgcgaagctgcacctctcgtcggcggcagcggccgcgcgccgcccgtcgctgctccacctcgcggccgtggccgtcctctgctcgctgtcctacctcttcggcatctggcaccacggcggcttctccgctggccccgccgccggcggcgccacctcctcctcctcggtctccatcgccaccgccgtgtcctgctcctcccccgccctgacgaccgccccctcgtcaccccccgcggggccgctcgacttcgccgcgcaccacacggcggaggggatggagtccgaggccgcgctccgccagcgcagctacgaggcgtgccccgccaagtactccgagtacacgccctgcgaggacgtggagcgctccctgcggttcccgcgggaccgcctcgtctaccgcgagcgccactgccccgcggacggcgagcgcctgcgctgcctcgtgccggcgcccaggggctaccgcaacccgttcccctggccggccagccgcgacgtcgcctggttcgccaacgtgccgcacaaggagctcagcgtcgagaaggcggtgcagaactggatccgcgtcgacggcgacaggttccgcttccccgggggcggcaccatgttccctcgcggcgccggcgcttacatcgacgacatcgccaagcttatccccctccacgacggatccatccgcaccgcgcttgacaccggctgcggggtggcgagctggggggcctacttgctgtcacgcgacattcttgccatgtccttcgccccgcgagactcccacgaggcgcaggttcagtttgcactagagcgtggtgtgccggcgatgattggtgtcctcgcctccaatcggctcacctatccggcacgttcctttgacatggcgcactgctctcgttgcctcatcccgtggcaactttacgatggcctgtacttgatagaggttgatcgtatcctgcggcctggaggctattggattttgtctgggccaccaatcaactggaagaaacactggaaggggtgggacaggactaaagaagacctggatgcagagcagaaagccattgaggcagttgccaggagcctctgctggaagaagatcaaggaggcgggcgacattgctatctggcagaagcctactaaccacattcattgcaaggccatccacaaagttagcaagtccatacccttctgctctaaccaaaacccagatgctgcctggtatgacaagatggaggcttgtataactcgactcccagaggtcagtgacttaaaggaggttgccggcggatcgttgaagaaatggccggaggggctcactgcagtgccgcccaggattgccagtggcagcatcgagggggtcacggaagagatgtttgtggaaggtactgagtaacgtaagaagagagtagggtaccacaattcagtaattactcaactccgccaggatggtcggtaccgcaacctactcgatatgaatgcaaagtttggcggcatcgctgcggcattggtgaatgatcccttgtgggtcatgaacatggtccctactgtggggaactcaacaacccttggggcaatatacgagcggggcctcattggaagctaccaggactggtgtgagggcatgtccacttatccccggacctacgacctcattcatgcggattcactgtttacactgtacaatggcagatgtgaggcggacaacattctgctcgaaatggacagaattctgaggccagagggcacggtcatcatcagagatgacgtggacatgttagtgaagataaagagcatcacggacgggatgagatggaatagccagatcgtggatcacgaagatggtccgctcgtccgggagaagctcctccttgctgtgaagacatactggactctggacgacagcaaacaatagcaataacgtggaatagagagttagaatgattattgacgtgatcggcaaatcttgcgactgccttaccgtttgccctgtgaatctggtggactttgggttccattttctttttgggtattcattggggggagatagttcacataatggagatataatctccttgttaagatataagactgaacccagcacagattttgacataaaaaacatacattgtgcaaagtgggtaaatagaaagtacaatattgggactacatatttctccagaaaaacaccgtgattgcacgactaggtcagaaaggccggtaccgcaacctactcgatatgaatgcaaagtttggcggcttcgctgcggcattggtgaatgatcccttgtgggtcatgaacatggtccctactgtggggaactcaacaacccttggggcaatatacgagcggggcctcattggaagctaccaggactggtgtgagggcatgtccacttatccccggacctacgacctcattcatgcggattcactgtttacactgtacaatggcagatgtgaggcggacaacattctgctcgaaatggacagaattctgaggccagagggcacggtcatcatcagagatgacgtggacatgttagtgaagataaagagcatcacggacgggatgagatggaatagccagatcgtggatcacgaagatggtccgctcgtccgggagaagctcctccttgctgtgaagacatactggactctcgacgacagcgaacaatagcaataacgtcaaatagagagttttagaatgattatatggcatgatcggcaaatcttgcgactgccttaccgtttgccctgtgaatctggtggagtttgggttccattttttttttgggtattcattggggggagatagttcacataatggagatataatctccttgttaagatataagagggaacccagcacagattttgacataaaaaacatacattgtgcaaagtgggtaaatagaaagtacaatattgggggatcagttctgtctccgggtgcacattgttttgttgtacttatgatgttctgtgatcccttttatatgaatgtcat

SEQ ID NO: 180989 - DNA, 490 bp, Zea mays
  Clone ID: MRT4577_9663C.1
cattactactgtgtgtttgtggtctactaccgaaacaccaaccgggggggcatagtatacaactgcggcaacccttgggctcaaaaccaaaatccatcccccatgactcgtggctttttgcccccttcctcgaaaaaaacacgtgcccactggtggacgcacccccttattaaccaaccttgggaacataacattcaacaccattggcgggtgacgaatgacatggactgacttaaaggctacaacaaagtgatttacacatggtgccaaaaactaaaactgcatcgtttacacctccaccacacaagactaattgcattcctaaaggtcgacccactacaacaaaaccgacttgtgcgagggcctgaaacatcttcgcgcattaccacacaaaaaatcctctggcacggggtaccccgcctaccccttaccggcgcaatccacccagcgggccttaaaagccgccatgaacaatcctttgaacctgcta

SEQ ID NO: 180990 - DNA, 455 bp, Zea mays
  Clone ID: MRT4577_96640C.1
acttgaggataggttttaaccaacaacgaggccgcttgccgcgtgcctgaggagcggagctgcatgggctggatgggggacgctccgcggcgggagaactctgcccagctgatccccacaatacacaactaattgggcaacgtcacggcctaagcactgggcggcgcggtcgtggaggaaataccacggaagccgctggccaaagagcggccatggggcggaataccatcacgagcatatactacaacgagtgcctgcacgagctgtcggaatgaatggaggggcacaccacgaagcacgggaagaacaacggcgcactcgggctgggctaagccacagtgaaccaaaccgtgtaagcgaggctactgctcgacacgaacttctgctggagcgaccccgcgctcgcgctgaccatctgaaaatataggaggctttgatcggactacctgtccgac

SEQ ID NO: 180991 - DNA, 288 bp, Zea mays
  Clone ID: MRT4577_96641C.1
catctcttatcgatgggacttataacgaggtgacaactccttatacaaaacatgtagaatgccaaactgcccctttcctaatgggctcttgttgcaacttgtcctaatctcgtagcaagcccacgtcgcatgcttcatgttaagcccaactccaaatgcaaagcctgactgcacccagtgacttttagtgggacccgtcttccttgcgcactatgttgaggccctaagacattaaccggagggcgttgtcaacaacacatgaccagcctacaaccttgcttgccttgc

SEQ ID NO: 180992 - DNA, 180 bp, Zea mays
  Clone ID: MRT4577_96642C.1
cctggcttgcgctctcttgcccttttgtgttgtgtgcctcgggatgcgttcatttgttccccagctgctgcagttcgctctcgcgttgcccatgttcttccacgggttccgtcctttccgtgttgctccgagtgggcgttcggtacaccctgcttgtgccatgtcctgtaggctgcgacc

SEQ ID NO: 180993 - DNA, 153 bp, Zea mays
  Clone ID: MRT4577_96643C.1
gcgcgcacgcgtggactgcgacgccacaccagtgcccaattgcattgattcctactcggtccctacatggtgcctacaatggatgtcgtcgggcccgatcactccgacttctgtgccaagcctgccaccaacgggtaggcccagtccggcgcc

SEQ ID NO: 180994 - DNA, 355 bp, Zea mays
  Clone ID: MRT4577_96644C.1
ccctttgataattcctccttctctgcattacggttctggcggtcctttccaagcgtgagtgacaaccccaccacccgagcggaggaccggcaaaaagggtgacaaacacaaaggccacaacctgggaacgtacccccgcagccgagtgggacccaggaagccataacgggccagagcacagcaaactggaacccacgcctacaaccaagttaggagctacagctaaacaggtgatcaccgcccagcccaagctgggcaggaaaaactcgaggaccgcatgcttggtcactggtatcacccccagcacatacaccttgggcagcgcttaggggcccacctttcactcaaatggacc

SEQ ID NO: 180995 - DNA, 499 bp, Zea mays
  unsure (1)..(499): unsure at all n locations
  Clone ID: MRT4577_96645C.1
aaacaaatcagactataatgagatgatttaggggggggcaaatcgaccttttttcccctctagggacacacgtttctatatattgggggagtctatacatgaaacaaataaacacacgccatcanatgagccagcccaactagtgaaacaccgggtcattcttacggtggggcttctttatcgggtcgggaggccaaaacctcccagagggggaagaatattgcgcgggcatatgtggagtatgatcctaggaagcgtgggagggagacgaaaaaataatcccctactataaaaagcgtattaaaggcgagaattggtgccatataaaatgaggaatttaagaaagagtcaaagcatggggagcttgcggggggaaaattgggcaacttaagggctttgggagcactcaaatcaacatgagtgtggaatcctctgaggcagggccctgaggagacgaatccgccacctcctaaattctaaaccgggcccttcatcttcc

SEQ ID NO: 180996 - DNA, 389 bp, Zea mays
  Clone ID: MRT4577_96646C.1
tgggagtcgaaggaagtatttagccgagatggccacttgaagctttctacacaggtgttctttgcatcgatagaccagagaagcgaacgggctgcaggggagagtgcatgcacagcacttgtggctgttgttgcagactggttccaaacaaaccaggacctgatgccaatcaggtcacagtttgacaacctgatccgagaaggatctctggaatggaggagactctgtgagaacgagacctacagagagcgctttcctgataagcactttgatcttgaaactgtccttcatgcaaagatccgtccactcacagttgctcacagtaagtcattcattgggtttttccatcctcaaggcactgaggatgtaactggattcgacttcctcga

SEQ ID NO: 180997 - DNA, 267 bp, Zea mays
  Clone ID: MRT4577_96647C.1
gcgcgcacgcgtacgatcactgtgctttagtacaagcaagccaaatatgcacacgagtgggagtcgacaagctcactccgagaggaaaggatgaagtggtggcgtatgaggccactgcagaagcgaaacatctaatatgtgagcggagatccctgaattgcatggatcgagtgaactagtctctgagaaactatggggagtgaacttgatggctctgtgaaactgtgctatgcgaactagatggctatatgaaacgaccatgtgaag

SEQ ID NO: 180998 - DNA, 440 bp, Zea mays
  Clone ID: MRT4577_96648C.1
tcgggctcgcgcgcgtgcgcgcagcacggcttcttccgggccgtgaaccacggcgtggcgccaggccgcgccgcacggctggacgccgccgccaggacgttcttcgcgctggcgccgcacaacaagcagcgcgccggcccgcccagcccactcggatacggctgccgcagcatcggcttcaacggcgacgccggggagctcgagtacctgctgctccacgccaacccggccgccgtcgcgcacagggccagatccatcgacactgatgacccctcgcgcttcagcaatgtggtgaacgagtatgtgggagcgatgaggcagctcgcatgtgagatcctggacctgctcggataggggctagggctcaaggaccccagatccttcagcaggctcatcgctgacacagacagcgacttactcctgcggataaaccactaccc

SEQ ID NO: 180999 - DNA, 303 bp, Zea mays
  Clone ID: MRT4577_96649C.1
cttagcacgtccaaggaatacttcggtggagggagttcctattactattctactcatatcgttacaccccaaatatgcactatgacgcgtgtagtttttcacaatgatgccagctcattgataacagtcacgcaccaaaaaagtttggggggaaggggggaccctcatgcacacgggatttcacacgctgtgctcctagctggaacatgtacttcatgatctcgcggcccgtgtggtaaaagaagcccggcatcattgtccttcacggcgtagaaggtcacgaacacctacagggcggtgagg

SEQ ID NO: 181000 - DNA, 366 bp, Zea mays
  Clone ID: MRT4577_9664C.1
gtacgtaagctcggaattcggctcgagcactgaactgcccgcattattgtgattcgccgagccaactgaaatgggagctttttatgagatgtcttcgccagacagctttgcagaactgcgtgtcctagctacagacgcacacactttgccacaaccagcttgcattcgccatgtgaaaacttttgttgtgacatagacaggattgcaagaggtgttagcattgattgagaggaaactgactgaacaacaaactgtcgtgcgaagaagctatggtcctttaaacagatactggagacctacctttgtggattgagaaaaggctgcataggcgtaggtatggctttcctgcttcccctcctctatatt

SEQ ID NO: 181001 - DNA, 577 bp, Zea mays
  Clone ID: MRT4577_96650C.1
aaatagctaaactttgagataattaatacatcagatcctcaaaatgtatagtgttcaaggctaactttgagataattaatacatcagatccacaaaattaagcaggcaatagatgacttacaattctatgcatgagcataaaatgtcattgttctgcaatacacgtgcttttgcaaaataatgtaacaagttttctccaattggccactgaccaggtaacctctaagatggaccaaaagcaatactggactggtgaccaaaataagtatcagtaccatacaattgaaaattttgcagaatccttccgcacgtcatatcttcctcttctagtagaagacaaactgtgcagtccacacaatactggaaagaataaggaggtaaaagtgaatgcaggtcgccgagtatccagatggaatattttcaaagcatgcttttcaagggaactgctgctgctgaaaagaaactctccggtccatatattcaagaccattcagataactgttatggctttggtgatctccacacttttccatgttggtgcaagtgatgatcttctcatcaatcgtgtacccaatga

SEQ ID NO: 181002 - DNA, 312 bp, Zea mays
  Clone ID: MRT4577_96651C.1
cccacgcgtccgcccacgcgtccgcccgttccgccttcataccttgctcgtcagcccggataagataacgcccatctgcacgggcaacccaaacctttcaacctcttccaacggaagcaatggcaacggcaacaacttcccggtccttctcctttccttccttcggggcttccttcctttccccaaccgattttaaaagtctctctcggtccgagccctctccccaagtgctcgtctctctggcggcctccctttcggctccccaatcgcttcaagcgggtacgggaactgtgcggcgacttcaatctcgtc

SEQ ID NO: 181003 - DNA, 216 bp, Zea mays
  Clone ID: MRT4577_96652C.1
tgccagcgctccctcttggcggtcggttttccacctactggcgatctccctccaccccccggaacctccgcgacctggcagtgcttctttcctttgtgacctgattgcccgtgtgccgtcttttgtactgcctggatcgtcacctctcgtgtgagctttttagacattacttcaggatgccgcgcacgaagaatgggtcggcgccagggggaggcc

SEQ ID NO: 181004 - DNA, 130 bp, Zea mays
  Clone ID: MRT4577_96653C.1
ctcctcatctttatctcactcgaacttattacccctcttctaacgcactttcacttccggtggatacttcgtgccataggtaacactgccccccctggtatatggggacactacaatcattcatccaaag

SEQ ID NO: 181005 - DNA, 273 bp, Zea mays
  Clone ID: MRT4577_96654C.1
ggcttgttctttgccgattcgcgcatgaagtaactctttcgtaggtcgtgtcatgctcgtggccattttctcgctccagagcgagtgcgtcgagctcgtcgccgtcatctaccccttcatcacctcggactacatgacctacatgttctagttcgactccttgctcgtggtctggtagctcagcgtcatcacactcatggactccaagacccttctcttcggtgacaagcgcgtcaccgtctttggcatcaggagccctgaggtaatcccggt

SEQ ID NO: 181006 - DNA, 538 bp, Zea mays
  Clone ID: MRT4577_96655C.1
tattggatagaaggatgtagcctggaactgaatctgcatactatgatgctctgactcactaaaactattttctttgatccgaaggggtggagcagtgggcaaatgacccacagcagggcaaaaactatcttacaggtcacaatcattaatttcttggactcatgattcattgtagagaagaaaatgtgtttctcctggtggacaagggagttatatagtctgaagctgcaaggagaggggttacattctggtagctacaatagcctcgttcctcggttggttactgcatttcaatgggttggctgcaagaagactcatatgtgcatagctgatctttcgtgctcccatgtttctcttgtgttctccgtgatatggagaatattggcgttaaacctggggaaaggacaactgttgcagcttgtctgtcggcttgattaacaaaaagattgtagtcaagaaacctagtttttcttttcttgtaatgttgcgcaggtgtctgaatatcaaggatgagattcaaatgataatttgacagagg

SEQ ID NO: 181007 - DNA, 605 bp, Zea mays
  Clone ID: MRT4577_96656C.1
cgaattgcggccgcgtcgacgatgaacatggcggtgatgatctcatcggtgctattcctagtgatgtagtcgaagtagcccacgcgccttgccttcgtcccgtccaactcctacggcatggcctcgaggaaggtgaggatggttcccgagatgagaccccagatggcgcctctgtccaccgttatcactgtcaccctcggttcaacacgacgggctcatcgaccatgctcccggccatcgccttcgtgctgcatgtgttgcatggacgccttgatgagtagctcaccgttgccgcctttgaccaagcacacacccaattgatcgattaatgaactagatactcattgaggccacgaatgaaagaattatcatcaaaccaacaaatgacggacacaattttcaatcgattatggatgagtgtgagtagtgatgagctgaggaagatgcaatgatagatcgattgtgtacatatataggcactgcgtacgtgctgcccctttttggagtgacaaataggaactagcgcgcgtatttttgcatacaaccactactaaataagagatatatgtaaaatttaacgcagggatatagggaagagatatttg

SEQ ID NO: 181008 - DNA, 215 bp, Zea mays
  Clone ID: MRT4577_96657C.1
gttctatatggaacaatgatgcagaatcagttaaaagccgtgccaggataatacagaaaatcaaaaagtggatataagccgtatagacagtggggacaacaattaaggctgaaagaaccgtaacatacagactgcgcttttgacacactacacagacttagaccgattaaaacaccatctccatattggagacggggtcagaggttctagccggt

SEQ ID NO: 181009 - DNA, 765 bp, Zea mays
  Clone ID: MRT4577_96658C.1
ccggccgggatccgccaagggcgtaaaccctttttttctctctgctgtaactctcctctgcagcatgaatcctcgggttgtcgtgtcccagacacctccgcatctggattcggagagtgtaacatcatcagctcaaacctcgacttcacacatgccgctgcatcactacccagaagaccagcagtatcagccctacacagaccgcgtagaggacgatgacccgcctcctagctataccgtagtcgataatgagggtcctcacgccaacccctttgacctcttgcccgtgagcacctcatcccttgggctgcatcccttcaagggcacgtcaaacgacaagacggtctactatctcgacaagcgtcttgatacggatcccgagtttctagagcagcacgtcaacgacctcgccaaggagccgcccagaccgtatgttcgcgtccagggcgttgaccgcaagtctggtgagagcaagaacggcattgactttgacatccacatcgaactcaccccacttctgtaccaggagatggctacgcgtcgctcgtggagacgtatacgcgctgtcaacaactttgacaaagtgcgacgtggaaccgccaaaatgacccgggcacctggattcggcggcagtggaccacctgaggagggtacaccaggagtatcgcagtggtgttatcggtactgtactaaaaaggctggtcttaaagcgtttgtgctggagcgacgcatcacggggtggggattttgcactcgtgggggtca

SEQ ID NO: 181010 - DNA, 437 bp, Zea mays
  unsure (1)..(437): unsure at all n locations
  Clone ID: MRT4577_96659C.1
ccggccggggagcgagagcagcacacacgcagctagctaggagcagcagaagcggacggcggcgatgacggcctccatgatgtccgcgtcagctctgggggcggcctgctcaggatctgcgctgcccacggccgccgggcctcctcgttctgcacggtgtgctccaaaaagaaatgcaataccgacaatgcctcacgaggagtcggggcggatgctgaccgctcaaatcccgaccccggctcagaancagaagcgcaagcgcaggtaccctcccgtcgaagaatcactccgactaaaggcaaaaacacacttccttatctgcaacaactaatgctggtattcccagcgccgaggtgttatacaaagatggacgngggtcactgaatcgtgaatgcgagtggcacaccggtgtgatgggcttgcctatcattcgcgat

SEQ ID NO: 181011 - DNA, 304 bp, Zea mays
  Clone ID: MRT4577_9665C.1
cccacacttccgtcgacccttattgttatttccagccaatctaacgcatctgattccatggtagcagcgccaagccctgagcaagacttacatgtcaagcatgaaggcggtgatccaggttaactaaaagacatacttggttacactttccgtcacgttgtacaatttatcatctctcgcgcacgcatgctttgcaagcgcaataactccgacaaccatgcccacgacaacttgatccactgtaagttccatacctacatgattaacgagttctagctcttactcccctgcacaagcatttcgc

SEQ ID NO: 181012 - DNA, 354 bp, Zea mays
  Clone ID: MRT4577_96660C.1
gtaaaaaaaaaagattgatttcatactgttttataacatgtgtaactaactgcacccttaaatattattggtcagcaaaaatattggatatttaacgagtaccgttgaatagcccttggcggtcaggacctcgttagatgggaaaaatatattacaggtcgcaatacattatggattgagaggaattgaaggggtttcaatcactagcaagtcaaaatctcctccaatctgtatcaatcccctccaatccatatgtattgaaaataaccgaacaagcccttagtgaattgataattgttccatgggacgcttggagtactgagagagcacaaagtcttcgccattcaaacacta

SEQ ID NO: 181013 - DNA, 388 bp, Zea mays
  unsure (1)..(388): unsure at all n locations
  Clone ID: MRT4577_96661C.1
ggctacccccaacaaatttttttattcaaccaacaggcagcatngaactcgccggtttatttacagcttcaacaactactaccattcacccagctagctggtttgagccctgctacctatttgatacaaccacaattgttgccgttctaccagtacgctgtgcctaacgctggcaccctcttacaactgcatcaatagctgtcattcaaccaacttgctttgacaaactcaacatcgttctacacaacaacccatcatagttggagccctattatagattatcatgaggggggagggaataataaaattttaaatctgatgtttgcgtcttcccaaatattttaaaacacatttttaaaaaataatatataattgggctgttctttct

SEQ ID NO: 181014 - DNA, 354 bp, Zea mays
  Clone ID: MRT4577_96662C.1
gtttttgtttattattctttttttctgttcttatctttttctttcttatctatttctatattttttctcttataggatatattttgaacaaggtgagataatggagtaagtatcaatcaaattgatcaactcaagcaaacaccgcatcctacagaaaacattgaggagatctacgtaactttggttttgaaaatcctgcaaccgattcaataattcctaatccaggtcgactagcagctgacagagtttagacatccaacatcaagaattgtcaggacggacataagtcatgacaagcagaaaggaatccaaagggacgactcaaaaattgggtcaacgattaggggctgaagt

SEQ ID NO: 181015 - DNA, 746 bp, Zea mays
  Clone ID: MRT4577_96663C.1
aaaagaaagatggtatctgccagctcaagacattgtttgctagtagacttcatattagttgctgactgtcttgatacaactcaaggcatttttcataacaccattgttggtctatgagaaataaagaaaacactttaggttgctacaattttcatcgacttgggcacatgtgattattatacttgttctggttttattataatatatttttaagcgttaacctcttctattacatcacgtagttgctagacaagcgatagagcatgaacatatggcgctttgtacaaacaatgaataagtatgtaactatatacacatttcacttctatatattaggatgattatgcagtggaaaaacttgatattgagctgagtggaagttaccatacttaattgctttgaattgatttttctggagatatgacttgactaaacatctaaagcagctccagtgtagaaccctgatttttgtcagtgagaattctcagttaaactcccaagaccgttcactggacatcaaagctcgacatgagatattgtgctctagttgaggtttgtgcgtcaataatacttttttatcaaagttcactcgaggaatgcaagaattaggataggccaattagatcttttttattggtgtatactgagtttcctctgataaggaccctgtgtcaccacctgggtcaattttactaaacatttttgccactagccttaaatacatactacaaagtctgatttacgct

SEQ ID NO: 181016 - DNA, 299 bp, Zea mays
  Clone ID: MRT4577_96664C.1
tttttagtggtttttttacaatattacggggttttttttttttctactacatattttgattgggagaaggggccctttacttatttatttttttcggacatttgacttacacaggcttttaactagcacaagcgtacttaaggaaaaagtgtccataccatgcatggaacaacatctgcaacacacctacccagcttgcttttttattggaaaaacatggcccccgtacccccatgcaggtaccactttttattcccaacttttcctacaaagggacacgggccatttgtgggacggtc

SEQ ID NO: 181017 - DNA, 718 bp, Zea mays
  Clone ID: MRT4577_96665C.1
gaacttctgaactcatcgaccttcaaccactcctagcattcccgagtctttggcaacccgtcaagatgctcatccccaaggccgaccgcaagaagatccacgagtacctcttccgaggggagttctcgtcgctaagaaggacttcaaccttcccaagcacggcgacatcgacactaagaacctttacgttgtcaaggcttgccagtctctgaccagccgcggctacgtcaagacccgcttctcgtggcagtactactactacaccctcacccccgagggtctcgactacctccgcgagtggctccacctgcccgctgagatcgtcccccagacccacatcaagcagcagcgctctgctcctccccggggtatgctcggcggtgacggcgagcgccgtggtggccgcggtgctccccgcggtgaccgtggcgaccgcgagggtggctaccgccgccgtgacgctggcgagaagcctgagggcgctgcccctggcgagttcaagcccgagttccgtggcggcttcgggcggggccgtggcgcccctgcttcttaagcgattgaccttggcttaaggagtggagtacccggctagatacaggatcatcttttgctgcattacaaaaagggacaggacctggtggcatacggcgaaatgaaaggatgataccacgaatgtattactcgtacgagatgccattccgcactcggcgaccactgt

SEQ ID NO: 181018 - DNA, 990 bp, Zea mays
  Clone ID: MRT4577_96666C.1
atgacgatggaccaccaccgcgcggcgccgtcgctgtccacggaagagaagcggcggatcgagcgggtggcgcggtgcgtggcgcgggaccgggacggcggggacctcacggagaagctgctgctgcggctgctcggcctcacgcgcaacgcccgccgctggggcttcctcgcgccggaccacccgctccacccctactacctccagcacaagatttgttactattacaacgaagagagttatcggatcccgcatcgtggaatgcttgccaaagggaggaaggtagctggaaggcgtgaagaaatgtctgcaaattatgcgtttggaccacaggatgatgatgcgattattaaacacaggcttctgactaggacaacgaccaccaggggtgaaccgccactaaagaagcttcagaagaagttcatgtcctttgcaactgagatcgagaaggatgcagataacataagtgactgtgaaagactgtacaaggcctttctacatgaaattaacacctttgagctacctcttctgaaaagcaaggctgtggttgatgcaaacattagggagaaagaaagctttaatgagctgcaggttgagattgagcgacagatcttgcatgctaagactgatattgaggaccttaagaagcaacttgagcagagcaagattgagaggcagcacaaagaagagtgtgaagccatccggaagctgatttgtttgcagcctccacggtcagaaactgaaaaactcattgcagaccttgagaaggagataactgatttgaaggctgagaatgtagcatgcataaggactttggaactgaggaagaagcagtttgcccttcttctacatgtggttgaggaattgcagatctcgattgaagatgagcagaagagtatagcagatgagctgagagctattgctggagagcagaagatgagcatggaagaagggagcgtcggtgcttcagattccatggttgttgactga

SEQ ID NO: 181019 - DNA, 432 bp, Zea mays
  unsure (1)..(432): unsure at all n locations
  Clone ID: MRT4577_96667C.1
ttttttttttttnnnnnnnnnnactaaaaacctatttctttattaatttctgaatatcccaagtgttctggaccgaggacactaatatcaaggagcccagggttaaatttgcaaaactctaccagactcagactactctcgtgaggatggcgggttgatttgtgaaaagggcaggggctcttttacaaagttactttttcgaagcggtataactagatctcggccgttagatcaacagcccacgacacagattacaccggactcatcaatgaaccggtacgatgcccaggaccctcaaatcctgaccctacggtcagggtttaacgaatcaccaatctaatccgagccgagggatcagagatccacagctctgatcagttactcgaagcggtacgcctactgtctcaatcgtgaccgttgggggtgcatcca

SEQ ID NO: 181020 - DNA, 480 bp, Zea mays
  Clone ID: MRT4577_96668C.1
gggaaaaaagaggagaacttttttttttttaatttaaatgggtaattaagggaattggtaaaactgaaactggcacccagggggaggggggaaaaaatataaccaaaaaatggccggtaaaagaccaaactagctagctagccagggggtatacaaaaaaaaaaaatttttttagggggggaaacccccggcaaaaaggaaggggcaaggaatcgggtggtggaggcccaaaaacgccggaaggtggtgggctttttgggccgccaaaaaccccgaaaactggccgttttgggggtgttggtgcaggaaggactggaggaccaaaccaaaaaacgcctgggaccgggggggggggtccacccgcctgaggggggggaaaaactggtggcgaaaaaacggggactgagggaaaaaaaaggggggccccggggggctgcactgaggccctaagaactcgacccactggcccaaaatcggggg

SEQ ID NO: 181021 - DNA, 322 bp, Zea mays
  unsure (1)..(322): unsure at all n locations
  Clone ID: MRT4577_96669C.1
gggtgtggtattattattattattattgatcagagtctggcactggcaccggcagacaccaaatttacagacacacatgcataaatgatctcaggagtcatcacgtacgtgatcaggggggggggggggtcgcaacaaggcaacaggtaaacgaaaccaaaccaggtggatactaatagtngtggggataattggtatgagtgggcgagcagtaagaaggaggggaccggatgccagggggacgaaggggtacacgaggtttagttataggttcggggggggggtnntntaatacatgcgagattgagttaggagggggggg

SEQ ID NO: 181022 - DNA, 975 bp, Zea mays
  Clone ID: MRT4577_9666C.1
tcacagttgtagtcccttttcagcagcaacagccaacacctaaactaaagaacagtagtagtccctgtgtacgtctagcaacgatccgcaccgagctcgccagttttgctcgttagtttggggacggcgatggcgtccggtcaggaaagcagggaggagctggcgcgcatggccgaggaggggcagaccgtcgtccccggcggcaccggcggcaagaccctcgaggcgcaggagcacctcgccgaagggcgcagtcacggcgggcagacccggagtgagcagctgggccatgaggggtacagcgagatgggcagcaagggcgggcagacccgcaaagagcagctgggccacgaagggtacagcgagatggggaggaagggcggcctgagcaccatgcaggagtccggcggcgagcgcgccgcccgggagggcatcgagatcgacgagtccaagttcaggaccaagtcctagatctgatgcgtgcccccgcttagcatgtagtacgtagctgcaggaatgtagtgtcgtcgtagtagtagggtagtcgtacgacgtgccgctcctcgtttggcacgtgtgccctgaataatgtagtgctgtcagtcgtcgtcctagcacgcgtgtaggagaccatacgtgcgcgtatgatcatgcgtgcttcgcttcagttaggttctgatgttggtcgtcgtcaccgtgtttgaagcaggcaggtctcttcaggctttgtcgtcgtagcagcctgtgttctagctctacgaccccatactcatagcgtgtggtggtgggtcgtgatgccttaaggtctccgagtttgtatccgtgcttgtttcgttaaggtagtttggttcataactcaaaaaaaaaaaaaaaaaaaaaaaaaaaaaaaaaaaaatcttctctcacttatgttcgactacattttgtttggagtctctccgttcatatacaagaaagggaaggatgtagctagct

SEQ ID NO: 181023 - DNA, 674 bp, Zea mays
  Clone ID: MRT4577_96670C.1
tcgcgacgccgtctatcccaccatagtcgtgccgcggctcgatctgctgctcctgagcgcagccacctcgtccccgacgccgagctccttctccctgccttcttttccccgtcatctctgtgttctcttcttctctttttctcctgtttactcacatctccctctatctctcttgctctctgttacagaggccgccatggacgcccgaggtcctccgctccgagtctccgacccacaccccggcgtccctgccgacgtcgtcgcctaggaagaccaccatgcccgctgcaggagcttcgagccgaccccgcagcatgtagaccgccgccacccgtccgccgtcgggaatcaccagatccccccgtatccgacctgcctcgccatccttctcccgttcccgacgtctcctcagcgccagaatctcaggcgagcgacaccacaagaccctgcctcctctgccccggaggccgccatggaggtcatcgcctctccgtctcgatccgtccaccgtcggatccttgctggtgttctccagggacccgccatggaggttgccgcccctcccgtctcgatccttccgcacccggatccacggcagagcagccgagatccgtcgcctgttctgcgacgccttggcccgccaaggcaagcgcagaggctgacaaggcgcacag

SEQ ID NO: 181024 - DNA, 872 bp, Zea mays
  Clone ID: MRT4577_96671C.1
tttttggaaccctcatcgccggccgggcatacggccatggaagcgcagaccgactccgcccccggcggcggcgacgatcttgcgatcatgcgcgagcagtgccggacactggaggagtccatttccacccgccgtgaggcgcagctcgacctcatcggctccctgcagcacctcgtccccgacctggtcccatccctcgaacaatcgctccgcctcatcgccgccttcaacggccgccccttcgtccccacgctgtaccccaacgccagcgtccacgtgcagaaccccaaccttaagccccagcaccgccgcgccctccccggcccggcccgctccacacgcctcaagacctcgccggggtcctccccagcttccgccgccgcccggggcgcgggaaccagtggtggcatccacgccgttcgtaccatggttgccgtctgtctcctcgagctcgtcccctttgccgagatcgatgccgccgcgctcgcgcgccgcctgcagtccgaaacgtcgtctgccagcgaggcggagcgcgctgctctggccgacctcgccgcggagcttgggggctccgcccccgctgctgttgctcttgccctccgtcgcatcgcagaagacagcggcggcttgcagatcgaggaggccttcattgggggcaagcagatgactatggtctgggccatcgaccggagcaaactcctcaaagagctaccagaatccgcttctgtgctccaaatccaacctccaccaactccacaggtggttcccctcgatactgatactaacatcataccaaggcctccgccactgcagcagtcggatatgtggggtaaccaatgccaccgatgttccacgtccaggggcatgaaatg

SEQ ID NO: 181025 - DNA, 172 bp, Zea mays
  Clone ID: MRT4577_96672C.1
ataaaaaatatggggatcatgtgagaaataccacaggcgcaacagctgaatatgtttgtaagaatataacaagtttgtactgtaataattattatcgaggttgaaacgtaaactgaatcaattggaggcaaagagtattctttatgtgcgtgctgtaccgaaataaggccaa

SEQ ID NO: 181026 - DNA, 461 bp, Zea mays
  Clone ID: MRT4577_96673C.1
aatatgaaagaataatcattttatttacttcctcagtctggtggcatcctaccacataagaagaaaaaagccgattcgacttcccctcggcgacacaggaccaaatcatctattaaaaccttaacgaccacgacgatacaagggccaagcccacaccatgattacttaacttaacttgaaagttcttctactgaccgaacgaaatctggaaacggtggacgggttccttttacgcatgataggaaagaggcagcggccactcttgccctgatcggcaaaactaaagtggaactgcgacacacatcgagaggtgggtgttcttttaagcgagatctagaagggggcgactccatcataccatcaggtggtggagcgatccgatctcatctggctggacggactgacgcggacacacctcatttggggcagtctacagtcgattttgccttttctctgccatt

SEQ ID NO: 181027 - DNA, 401 bp, Zea mays
  Clone ID: MRT4577_96674C.1
aggccgcccttttttgtttttttttttttttttttttttttgttttattttttatttttatatattttattcatttgtattttttacttactcccaaagatactcttaagcaatgccaatgtaactcatgaccacatctactcaatccgcatttgagcttacacgataactatcgcatgaactaaatgctctgattgtcttaaccgatgggaaaaaaaaacatacaatcttagactataaattcacgtaacaatatgatcgactgcgtcactcctccgtatgatatggtaatgactaaagcggaggctttgattcggtgcataaataatcacaacctgaattaaaatttgtacatattggggattggatgccagcaacaatgtagcactttgcactaaaaa

SEQ ID NO: 181028 - DNA, 540 bp, Zea mays
  Clone ID: MRT4577_96675C.1
ttttttttttttttttttttttttttttttttttttttttttttttttttttttttttttttttttttttttttttttttttttttggccctcaccaaaagacccgccgcccccaagggaaaaccccccccagggcccccccccccttgggtcgacccttggacccccccccccaaaaaaccccggggccaaccccggggcccggaaaccgggtcccccctgaaggccctcccccggaataggaaaaaccggggttaaccccccataccccccagggaagggcccccaagccttccttttaggaaaataccatagggcccggaaacaggggttccaggaaacatggggggccgctgcccccccaacaaaaagggccttttgggaccaacggcaccaactggggggctctttggattccccgggggctcgcccacatttccctcccaacccaacaaacgggggtttgaaccacaaactggggggggttttaactggatggggggctccctaactctgggtggggggccccaagcttttctt

SEQ ID NO: 181029 - DNA, 180 bp, Zea mays
  Clone ID: MRT4577_96676C.1
ttcaaatctacgttctgacattggtgttgtttgtgttatacagagagtttgtaaagaagtaatatactaaggatgtacaagatttgtatgcatgcatgttgaatataatcattatggtcaaaggattgttccgatttttagagatcgacaagtatgtttttaacacaaatagagttgggg

SEQ ID NO: 181030 - DNA, 385 bp, Zea mays
  unsure (1)..(385): unsure at all n locations
  Clone ID: MRT4577_96677C.1
acgcacgcgtccgaactgattgccccgggaaagcatcctccgccggatcatgcatattttgctttctcatttttgtatagagcattgacgggcatgtggttagccttccaggtgtggaaaaccactgctgtccatgctcgttcagattgagncctgactccgatgacatggtcatggactgcagcgcctgaagaaggggcctaaaatagctgcagagaacctttcgagattgttagcgagcagatttggggagcttacaacggaaacttatggcagagccatgcgtttaaaaagagcngatttcttttttgctttcacagcagcctcaagtttccaaactatgggtagcctcctttatgtaattctccagctcgggtcctgcctt

SEQ ID NO: 181031 - DNA, 746 bp, Zea mays
  Clone ID: MRT4577_96678C.1
gtgatggtagccagagcgaaggtctatcttggaaacttcttggccctgaccaactggtcaaaaagaacatcaatacgaggcaaaggatacttgttcttgatagttaccgcattaagagggcggtaatctatacacagtctcaagctttcatccttcttcttcacaaacagtgctggacatccccaaggcgaagtacttgggcgaataaatctcttgtccagcaactcttgcaattgccttttcaattctgccaactcagcgggtggcattcggtagggcctcttggaaattggtgtcgttcccagttgcaactcgatggcgaattcaatatcccggtctggtggcattcctggcaattcatcaggaaagacatccgcatactcatagactactgggatcttcttcagaggtaactccgtcatagagaaagcacatgactgagtagaaccttgactaggcagaattaaggtgaagttcccgcagaacagagaattaacttccacggtacggctggctacatcaagcacaacttggtgcaaggtcatccaatttgctcctagaataatgtccacattttccaaacccaacacaagaagagtggttttgacaatgtggcttcccagttgaataggcacactttggtttaattgattagttgcaattttacccccaggtgtgactatcataaacgacccttttgagtgagagaatggcagttcacatttagcactgaacttttggctatg

SEQ ID NO: 181032 - DNA, 791 bp, Zea mays
  Clone ID: MRT4577_96679C.1
gcccgtttctccaatactctctgcatccagggagcaccaaaatgtaccatgatctgaagcccttgtatttgtggaccagaatgaagagggagatagcccaatatgtattggaatgtgacacctgtcagaggataaaggcaagccacttgaaatcagctggagctttgcaacccctatctataccttcgtagaaatgagatgacatcagcatggatttcattgtgggtctgcccaacacctctcatcgtcatgattcgatttgggttattatggactgactgacgaaagtggcacattttctcccagtgcacaccactgataaggctcaaaagtatgcagagttgtacattgaccagatcgtgtgtttgcacggattgccccggactattgtttctgaccgaggagcccaatttattgccagattttgggaacaactacaagagtctttgggaaccaagctaatcagaagttcagcttaccacccacagactgatggtcagaccgagagggtaaatcaaattcttgaagatgtgctgagagcttgtgcgatcgattgtggcaagaactgggacaagcacctctccttggcagagtccagagtttgcttacaacaacagttatcaatccagcctaaagatggcacccttcgaagctctatatgggagaaggtgtagaacacccctcaattggtctcagcctggagaaagagaagttttcggacctgacttagtgactgaagccgaaaggaaggtcacactacttaggaagaatctagagtcgccctgcaggca

SEQ ID NO: 181033 - DNA, 1034 bp, Zea mays
  Clone ID: MRT4577_9667C.1
gaacagtagtagtccctgtgtacgtctagcaacgatccgcaccgagctcgccagttttgctcgttagtttggggacggcgatggcgtccggtcaggaaagcagggaggagctggcgcgcatggccgaggaggggcagaccgtcgtccccggcggcaccggcggcaagaccctcgaggcgcaggagcacctcgccgaaggtttgtatcctacggccggccggccttgtgatcctcttatcttcctttcacttgtgtgtgctataaacccactactactgcgcgtaagtagccaagaagaactgatcatcaattaaacgattgtgttggtctgttcgtgcagggcgcagtcacggcgggcagacccggagtgagcagctgggccatgaggggtacagcgagatgggcagcaagggcgggcagacccgcaaagagcagctgggccacgaagggtacagcgagatggggaggaagggcggcctgagcaccatgcaggagtccggcggcgagcgcgccgcccgggagggcatcgagatcgacgagtccaagttcaggaccaagtcctagatctgatgcgtgcccccgcttagcatgtagtacgtagctgcaggaatgtagtgtcgtcgtagtagtagggtagtcgtacgacgtgccgctcctcgtttggcacgtgtgccctgaataatgtagtgctgtcagtcgtcgtcctagcacgcgtgtaggagaccatacgtgcgcgtatgatcatgcgtgcttcgcttcagttaggttctgatgttggtcgtcgtcaccgtgtttgaagcaggcaggtctcttcaggctttgtcgtcgtagcagcctgtgttctagctctacgaccccatactcatagcgtgtggtggtgggtcgtgatgccttaaggtctccgagtttgtatccgtgcttgtttcgttaaggtagtttggttcataactcaaatcttctctcacttatgttcgactacattttgtttggagtctctccgttcatatacaagaaagggaaggatgtagctagct

SEQ ID NO: 181034 - DNA, 9473 bp, Zea mays
  Clone ID: MRT4577_96680C.1
tgcagtatgcacaagccttcaacgacttatgccagtatgcagggtatcatgctgattctgatgagaagaagagggatcgcttccgcaggggtctcaataccaagctgcgggaacgactcaacactgtccgggctgatagcttcaatgagttggtcaacatggccatctcccaggaggattgcattgttgctcactgggcagagaagaagagaaaggcaccaatggcagcaccatccgctcaggctcagaggttccggactgtttctcacaatcagagcaggggttttcagcagcaggcaggcagatgggtgatcaggccacctcagcagcagcagcagctggcacccaaccgctatccagctcccgccccaaggaacaatcagcctccgcagcagcagcagttccgccagggcaacgggaacaagtgtttcacttgtggcaatgtgggccactatgccaagaattgtcccaggaaccagcagagacagatgccagcaccgaatcaagacaagggaagaaagcagaaggtgcaagtcaggcaagggaagctcaacttcactgctctagaggaagtgccagaaggagctcctatcatgaccggtaccttttcagtttataatcaacctgctttaattctgtttgattctggtgcatctcatagtttcattagccaaaagttcagtgctaattgcaaactgccattctctcactcaaaagggtcattcatgatagtcacacctgggggtaaaattgcaactaaccaattaaaccaaagtgtgcctattcaactgggaagccacattgtcaaaaccactcttcttgtgttgggattggaaaatgtggacattattctaggagcaaattggatgaccttgcaccaagttgtgcttgatgtagccagtcgtaccgtggaagttaattctcctttctgcgggaatttcactttgattctgcctagtcagggttcttctcagtcatgtgctttctctatgacggagttacccctgaagaagatcccagtggtctgtgagtatgcagatgtctttcctgatgaattgccagggatgccaccggaccgggatattgaattcgccatcgagttgcaaccgggaacggccccaatttccaagaggccctaccgaatgccacccgctgagttggcagagttgaaaaagcagttgcaagagttgctggataagggatttattcgcccaagcacttcgccttggggatgtccagcgctatttgtgaagaagaaggatgaaagcttgaggctgtgtatagattaccaccctcttaatgcggtaactatcaagaacaagtatcctttgcctcgtattgacgttctctttgaccagttggtcggggccaaggtgttttccaagatagaccttcgctctggctaccatcagatcaaaatacgagcaagtgatattccgaagacggcattctcaaccagatatgggctgtatgaattcttggtgatgtcattcgggctgacaaatgcaccagcatacttcatgtatctgatgaattctgttttcatgccggaattggacaagttcgtagtggttttcatcgatgatattctggtgtactcgaagaacgaagaagaacatgccgggcatttgcatgtagtgcttcaacgtctgcgagagcaccacctttatgccaagctatccaagtgtgatttttggctaaaggaaatcaaattcttgggtcacactatctctcaggagggaatagttgttgatcctgataaagtgcaagaggtaatgaactggaggccaccaacgtctgttcgccagattcggagttttctgggattggccggttattaccgaagatttattccggacttctctcggattgcgaagcctattactgagttgctgaagaaagaagtcaagtttgcgtggagtcagaagtgcgaagatgccttccatgcattgaggcagcatctgaccaccgcaccagttttggcgcaacccgacagcagcaagccttttgatgtgtattgcgatgcctctggcaccgggctaggttgtgtcttgatgcaagacaaccgagtcattgcttatgcctcaagagcactcaggcctcatgagcaaaattatcctactcatgaccttgagttagcagcagtggctgatcttaacatgaggcagagaagatggctagagctgatcaaggattatgacctggaggtacattatcacccagggaaagctaatgtggtagctgatgccttgagtcggaagttgcaatgcaactgcattctgatggattctcgcgttaacaccttgtgtgatgagttgagcaagatgcaaattgaaatgattccttctggttctttgtctcacatttctgttgagccagctttgcaagaccagattatcatggcccagctcagtgacaagggagtgcagattatcaagaagaatctccatcagaaggttgagaagtatgattgtttccgccaggatgagaagggtgtgttatggttcaaaagcagattggtaattcctaaggaccgggatcttaagaagaaaattttggatgaggctcatctctccaaattctctatgcatccgggaagcaccaagatgtaccatgatctgaagcttttgtactggtggaccagaatgaagagggagatagcccagtatgtatcagagtgtgacacctgtcagagggttaaggcaagccacttgaagtccgctggagctttgcgaccactgtccgtaccttcgtggaagtgggacgatatcagcatggatttcattgtgggtctgcccaacacctctcgtcatcatgatttaatttgggttattgtggaccgattgacgaaggtggcacattttcttcctatgcacaccactgataaggctcagaagtatgcagaattgtatatcgaccggatcgtgtgtttgcatggattacctcggaccattgtttctgaccgaggagctcaatttgttgccagattttgggaacaattgcaagagtctttgggaaccaagctaatcaggagttcagcttaccacccacagactaatggtcagacggaaagggtaaaccagattctggaagatatgctgagagcttgtgcgatcgattgtggcaagaactgggataagcacctctccttggcagagtttgcttataacaatagttatcagtccagcctaaagatggcaccttttgaagctctctatgggagaaggtgcaggacaccactcaattggtctcagcctggtgaaagagaagtttttggacctgatttggtgactgaagccgaaaggaaggtcaagctgatcaggaagaatctagaagctgctcaggccaggcagaagagctatcatgacaaaagaaggaaacctctccagttcgaggtgggaagttttgtatacctcaaggtatcacccaccaagggagtgcagaggtttggaatcaaaggcaagctagcccctcgttacattggaccttatgagatcgttgaagcatgtggacccgtggcatacaagctgaagttaccttcaaagatgtctgccattcacagcgtattccatgtatctcagctaaagaagtgtgttcgattgccgactgagattctagcagagccagaattggagatagagccagatctctcgtaccaagagtacccctccaagattctggattgcaaggaaagatcaactcgggctaaatcgatcaagatgttcaaggtccagtggagtaatcactcagaggaggaagctacttgggaaaccgaggaattcttaagatccaacttccccgattgcctacctaaggaagctgtggtagtagaaagcacctatttggctagaaaccttaagaaaaccataggaaaagaattaaaagattgtaatcttgccgacggagagtacgtgctcatccccgagcaaggacctgtccaagaggaggaccaggagcaggcttcagaggctgctattgaggatctccccgcagccccagcagttgaaggcaagccccgctatggtgggtacaagtgtggtcactgcacggcggcagccggggtcagtggagcattgtatgccaagccgatgaattcacccacccccgccagtggaggagactctcgtttcagttctgacttcctttctcgcgatggctttccctccatcttgtgggaagtgcttaactccgccggttaccctacgccccctttgtacacggtgcagttgtatgaggagcatcgggtacctcgttgtcaggtctggctaactttggaggctcatccccttcagccgggttggcgttctcttgactctgagacgataggactcatgacggacgacaccgttgaggcagcagccatgaagactctgacgactttctgtggctaccatcccctggagatggtgatgcaccccttgggactcttccctgctgagaagaaggatgatcccatgtggtgcaaccgcgtgagccatgtgaaggatgtgtgggcaatgtatcctgacttggttgggagggtcactgttcagtgcatgagtgcgctgtaccgccttcaggcccttcagagcgatgctatgacacttcttgctaacaccgctcaggctgccaagctcactctcgacaatcgggaagattttgtggtcgacctatccacagagttggtggaaaaggatctgcaggtggagaggctgagccagcgtattaccaccctggagcagcaagtggagatccgagataacactattgatgtcttggagaaccagcttcacgacgtgcagagggaacttgaggaagccaatgaccacttggacatgcaccaccaggagatggaggccaatgaagcaggaagcgagggagaagaggctcccgaggagctaggaccagcccctggtgccaatgggactacctccgtgatacctccttcacccgagtttctgagcacgcagccgcccttgttcaccaaggcagaggatccgttggacgccgacgtgtggcttcgcgtcgtcgagtccaagtttcccctcctcacgggagactgccctgatgaggccaaggctcgcttcgccgcacagcagcttcgcggccctgctcggacttggtgggaccacttccgtgctatgctccccgctgatcatgaggtgtcttgggaggaattcaagactgccttcagaggacaccacattccagctagcattcttgatcggaagttgaacgaattcctggccctcaatcaaggaacccgcacggtactgcagtatgcgcaagccttcaacgacttatgccagtatgcagggtatcatgctgattccgatgaaaagaagagggatcgcttccgcaggggtctcaataccaagctgcgggaacgactcaacactgtccgggccgatagcttcaatgagttggtcaacatggccatctctcaggaggattgcattgttgctcaccgggcagagaagaagaggaaggcaccaatggcagcaccatccgctcaggctcagaggttccggattgtttctcacaatcagagcaggggttttcagcagcaggcaggcagatgggtgatcaggccacctcagcagcagcagcagccgacacccaaccgctatccagctcccgccccaagaaacaatcagcctccgcagcagcagcagttccgccagggcaatgggaacaagtgtttcacttgtggcaatatgggccactatgccaagaattgtcccaggaaccagcagaggcagatgccagcaccaaatcaagacaagggaagaaagcagaaggtgcaagtcaggcaagggaagctcaacttcactgctctagaggaagtgccagaaggagctcctatcatgaccggtaccttttcagtttataatcaacctgctttaattctgtttgattctggtgcatctcatagtttcattagccaaaagttcagtgctaattgcaaactgccattctctcactcgaaagggtcattcatgatagtcacacctgggggtaaaattgcaactaatcaattaaaccaaagtgtgcctattcgactgggaagccacattatcaaaaccactcttcttgtattgggattggaaaatgtggacattattctaggagcaaattggatgaccttgcaccaagttgtgcttgatgtagccagtcgtaccgtggaagttaattctcctttctgcgggaatttcactttgattctgcctagtcagggttcttctcagtcatgtgctttctctatgacggagttacccctgaagaagatcccagtggtctgtgagtatgcagatgtctttcctgatgaattgccgggaatgccaccggaccgggatattgaattcgccatcgagttgcaaccgggaacggccccaatttccaagaggccctaccgaatgccacccgctgagttggcagagttgaaaaagcagttgctggataagggatttattcgcccaagcacttcgccttggtgctgtccagcactatttgtaaagaagaaggatgaaagcttgaggctgtgtatagattaccgccctcttaatgcggtaactatcaaaaacaagtatcctttgcctcgtattgatgttctctttgaccagttggtcggggccaaggtgttttccaagatagaccttcgctctggctaccatcagatcaaaatacgagcaagtgatattccgaagacggcattctcaaccagatatgggctatatgaattcttggtgatgtcattcgggctgacaaatgcaccagcatatttcatgtatctgatgaattctgtttttatgccggaattggacaagttcgtggtggttttcatcgatgatatcctggtgtactcaaagaacgaagaagaacatgccgggcatttgcatgtagtgcttcaacgtctacgtgagcaccacctttatgccaagttatccaagtgtgatttttggctaaaggaaatcaaattcttgggtcacactatctctcaggatggaatagctgttgatcctgataaagtgcaagaggtgatgaactggaggccaccaacgactgttcgccagattcagagttttctgggattggctggttattaccgaagatttattccggacttctctcgaattgcgaaacctattactgagttgctgaagaaagaggtcaagtttgtgtggagtcagaagtgcgaagatgccttccatgcattaaggcagcatctgaccacagcaccagttttggcgcaacccgacagcagcaagccttttgatgtgtattgcgatgcctctggcaccgggctaggttgtgtcttgatgcaagacaaccgagtcattgcttatgcctcaagagcactcaggcctcatgagcaaaattatcccactcatgaccttgagttagcagcagtggttcatgcattgaagatgtggaggcactatctaatgggaacccactgcaacatcttcactgatcataagagccttaagtacatttttactcaggctgatctcaacatgaggcagagaagatggctagagctgatcaaggattatgacctggaggtacattatcacccagggaaagctaatgtggtagcagatgccttgagtcggaagttgcaatgcaactgtattctgatggattctcgtgtaaacaccttgtgtgatgagttgagcaagatgcaaattgaagtgattccttctggttctttgtctcacatttctgttgagccaactttgcaagaccagattatcatggcccagctcagtgacaagggagtgcagattatcaagaagaatctccatcagaaggtcgagaagtataattgtttccgccaggatgaaaaaggtgtgttatggttcaaaaacagattggtaattcctaaggatcaggatctgaagaagaaaattttggatgaggctcatctctccaaattctctatgcatccgggaagcaccaagatgtaccatgatttgaagcttttgtactggtggaccagaatgaagagggagatagcccagtatgtatcagagtgtgacacctgtcagaggataaaggcaagccacttgaagtccgctggagctttgcaaccactgtccgtaccttcgtggaagtgggacgacatcagcatggatttcattgtgggtctacccaacacctctcgtcatcatgattcaatttgggttattgtggaccgattgacgaaagtggcacattttcttcctgtgcacaccactgataaggctcagaagtatgcagaattgtatatcgaccggatcgtgtgtttgcatggattacctcggaccattgtttctgaccgaggagcccaatttgttgccagattttgggaacaattgcaagagtctttgggaaccaagctaatcaggagttcagcttaccacccacagactgatggtcagacggaaagggtaaaccagattctggaagatatgctgagagcttgtgcgatcgattgtggcaagaactgggataagcacctctccttggcagagtttgcttataacaatagttatcaatccagcctaaagatggcaccttttgaagctctctatggaagaaggtgcagaacaccactcaattggtctcagcctggtgaaagagaagtttttggacctggtttggtgactgaagccgaaaggaaggtcaagctaatcaggaagaatctagaagctgctcaggccaggcagaagagctatcatgatagaagaaggaaacctctccagttcgaggtgggaagttttgtatacctcaaggtatcacccaccaagggagtgcagaggtttgggatcaaaggcaagctagcccctcgttacattggaccttatgagatcatcgaagcatgtggacccgtggcatacaagctgaagttaccttcaagaatgtctgccattcacaatgtatttcatgtatctcagcttaagaagtgtgttcgattgccgactgagatcatagcagagccagaattggagatagagccagatctctcgtaccaagagtacccctccaagattctggattgcaaggaaagatcaactcgggctaaatcaatcaagatgtttaaggtccagtggagtaatcactcagaggaggaagctacttgggaaaccgaggaattcctgagatccaacttccccgattgcctacctaaggaagctgttgcaaagagaatgacattcgaagagcagttttgccctaataataacaatccccacccttttcctatcagtctcacccttcgcttcaccccgaaaggactctggcccgaatctcgggacgagattcctttaaggggggaaggctgtgacaccccagtgtcacctagggtttctcttaaacagccaaaccaaaaaccatcattttatgtgaaccaaagtaagcatgagcatcaaaacaatttaagtgagaaagaattcaccaagtatatacttaaaagtgtcatgatcaaaacaattgagacttttgaaagataa

SEQ ID NO: 181035 - DNA, 798 bp, Zea mays
  Clone ID: MRT4577_96681C.1
cattgggaccctcgaggccggccgggacgaactttccaaatatccacggcagtcattctttactaccagaaccgattgactacctcaagcactagccatgcctcccaagttcgatccctccgaggtgaaggtcattcacctccgtgcgaccggtggtgaagtcggtgcctcatccgcgctcgctcccaagattggtcctctcggtctctcccccaagaaggtcggtgaagatatcgccaaggccactggtgactggaagggtctccgtgtcaccgtcaagttgaccatccaaaaccgtcaagccgccgtctccgtcgttccctccgcttcttccctcgtcatcaaggccctaaaggagcccccccgagaccgcaagaaggagaagaacatcaagcacaccaagagcattcctcttgatgagatcatcgccattgcccgtaccatgcgcttcaagtccatggccaaggacctgaagggtaccacccttgagattctcggaaccgctttcagcaccggctgcaaggttgacggccgcagccccaaggatgtctctgacgacatcagggccggcgagattgagattcctgaggagtaaatgcttgcacaatgtgcttgaggattacgatgaatgacatatgccatagagggcgctacatagctgaatgaggatcacgtttccaacctcgaggttaccgtttcggaacccgggggagtttgcacagctacggcgtttgggatatttgataccatactataaaagtgactctggcatagggcaatgatacaatgcgtcttgcc

SEQ ID NO: 181036 - DNA, 10099 bp, Zea mays
  unsure (1)..(10099): unsure at all n locations
  Clone ID: MRT4577_96682C.1
atggcaacataccaggagtttctgagcacgcagccgcccttgttcaccaaggcagaggatccgttggacgccgacgtatggcgtcacgtcgtcgagtccaagtttcccctcctcacaggagactgccctgatgaggccaaggctcgctttgccgcacagcagtttcgcggccctgctcggacttggtgggaccactttcgtgctatgctccccgctgatcgtgaagtatcttgggaggaattcaagactgccttcagaggacaccacatcccagctggcattcttgatcggaagttgaatgaatttctggcccttaatcaaggaacccgcatggtactgcagtatgcgcaagccttcaacgacttatgccagtatgcagggtatcatgctgattctgatgaaaagaagagggatcgcttccgcaggggtctcaataccaagctgcgggaacgactcaacactgtccgggctgatagcttcaatgagttggtcaacatggccatctcccaggaagattgcattgttgctcaccgggcagagaagaagagaaaggcaccaatggcagcaccatccgctcaggctcagaggttccggattgtttctcacaatcagagcaggggttttcagcagcaggcaggcagatgggtgatcaggccacctcagcagcagcagcaggcacccaaccgctacccagctcccgccccaaggaacaatcagcctccgcagcagcagcagttccgccagggcaatgggaacaagtgtttcacttgtggcagtgtgggccactatgccaagaattgtcccaggaaccagcagaggcagatgccagcaccaaatcaagacaagggaagaaagcagaaggtgcaagttaggcaagggaagctcaacttcactactctggaggaagtacctgaaggagctcctatcatgaccggtaccttttcagtttataatcaacctgctttaattctgtttgattctagtgcatctcatagtttcattagccaaaagttcagtgctaaatgcaaactgccattctctcactcaaaagggtcattcatgatagtcacacctgggggtaaaattgcaactaaccaattaaaccaaagtgtgcctattcaactgggaagccacattatcaaaaccactcttcttgtgttgggattggaaaatgtggacattattctaggagcaaattggatgaccttgcaccaagttgtgcttgatgtagccagtcgtaccgtggaagttaattctccgttctgcgggaatttcactttaattctgcctagtcgagattctactcagtcgtgtgctttctctatgacggagttacctctgaaaaagatcccagtggtatgtgagtatgcagatgtctttcctgatgaattgccaggaatgccacccgaccgggatatcgaattcgccatcaagttgcaaccggggacggccccaatttctaagaggccctaccgaatgccacccgctgagttggcagaattgaagaagcaattgcaagagttgctggataagagttttattcgcccaagcacttcaccttggggatgtccagcactgtttgtgaagaagaaggatgaaagcttgaggctgtgtatagattaccgccctcttaatgcggtaactatcaagaacaagtatcctttgccttgtattgatgttctttttgaccagttggtcggggccaaggtattttccaagatagaccttcgctctggctaccatcagatcaaaatacgagcatgtgatattccgaagacggcattctcaaccagatatgggctatatgaattcttggtgatgtcattcgagctgacaaatgcaccagcatatttcatgtatctgatgaattctgttttcatgccggaattggacaagttcgtggtggttttcattgatgacattttggtgtactcaaagaacgaagaagaacatgccgggcatttgcatgtagtgcttcaacgtctgcgagagcaccacctttatgccaagttatccaagtgtgatttttggctaaaggaaatcaaatttttgggtcacactatctctcaggctggaatagctgttgatcctgataaagtgcaagaggtgatgaactggaggccaccaacaactgttcgccagattcggagttttctgggattagttggttattacagaagatttattccggacttctctcgaattgcgaagcctattactgagttgctgaagaaagaagtcaagtttgtttggagtcagaagtgcgaagatgccttccatgcattaaggcagcatctgaccacagcaccaatattggcgcaacccaacagcagcaagccttttgatgtatactgtgatgcctctggcaccgggctaggttgtgtcttgatgcaagacaaccgagtcattgcttatgcctcaagagcactcaggcctcatgagcaaaactatcccactcatgacctcaagttggcagcagtggctgatctcaacatgaggcagagaagatggctagagctgatcaaggattatgacctggaggtacattatcacccaggaaaagctaatgtggtagcagatgccttgagtcggaagttgcaatgcaattgtgttctgatggattctcgcattaacaccttgtgtgatgagttgagcaagatgcaaattgaagtgattccttctggttctttgtctcacatttctgttgagccagctttgcaagaccaggttatcatggcccagcttagtgacaagggagtgcaatttatcaagaagaatctccatcagaaggttgagaagtataattgtttccgccaggatgagaaaggtgtgctatggttcaaaagcagattggtgattcctaaagatcaggacctcaagaggaaaattttggatgaggctcatctctccaaattctctatgcatccgggaagcaccaagatgtaccatgatctgaagcctttgtactggtggaccagaatgaagagggagataggccagtatgtatcagaatgtgacacctgtcagaggataaaggcaagccacttgaagtcagctggagctttgcaaccattgtccgtaccttcgtggaagtgggacgatatcaacatggatttcattgtgggtctgcccaacacctctcgtcatcatgattcgatttgggttattgtggaccgattgacgaaagtggcacattttcttcctgtgcacaccactgataaggctcagaaatatgcagaattgtatattgaccggatcgtgtgtttgcacggattaccccggaccattgtttctgaccgaggagcccaatttgttgccagattttgggaacaattgcaggagtctttgggaaccaagctaatcaggagttcagcttaccacccacagactgatggtcagacggaaagggtaaaccaaattctggaggatatgctgagagcttgtgcaatcgattgtggcaagaactgggataagcacctctccttggcagagtttgcttataacaatagttatcaatccagcctaaagatggcaccttttgaagctctctatggaagaaggtgcaggacaccactcaattggtctcaacctggtgagagagaagtttttggacctgacttagtgactgaagccgaaaggaaggtcaagctaatcaggaagaatctagaagctgctcatgccaggcagaagagctatcatgataaaagaaggaaacctctccagttcgaggtgggaagttttgtatacctcaaggtatcacccaccaagggagtgcagaggtttgggatcaaaggcaagctagcccctcgttacattggaccttatgagatcatagaagcatgtggacccgtggcatacaagctgaagttaccttccaagatgtctgccattcacagtgttttccatgtatctcagctgaagaagtgtgttcgattgccgaccgagatcatagcagagccagaattggagatagagccagatctatcgtaccaagagtacccctccaagattctggattgcaaagaaagatcaactcgggctaaatcgatcaagatgtataaggtccagtggagtaatcactcagaggaggaagctacttgggaaaccgaggaattcttgagatccaacttccccgattgcctacctaaggaagctgattgcaatcttgccgacggagagtacgtgctcatccccgagcaaggacctgtccaagaggaggaccaggagcaggcttcagagactgctattgaggatctccccgcagccccagcaattgaaggcaagccccgctatggtgggtacaagtgcggtcactgcacggcggcagccggggtcagtggagcattgtatgccaaggcgatgaattcacctacccccgccagtggaggagactctcgtttcagttctgacttcctttctcgcgatggctttccttccatcttgtgggaagtgcttaactccgccggttaccctacgccccctatgtacacggtgcagttgtatgaggagcatcgggtacctcgttgtcgggtctggctaactttggaggctcatccccttcagccgggttggcgttctcttgactctgagacgattggactcaggacggacgacaccgttgaggcagcagccatgaagactctgacgactttctgtggctaccatcccctggagatggtgatgcaccccttgggactcttccctactgaaaagaaggatgatcccatgtggtgtaaccgcgtgagccatgtgaaggatgtatgggcaatgtatcctgacttggttgggagggtcactgttcagtgcatgagtgcgctgtaccgccttcaggcccttcagagcgatgctatgacacttcttgctaacactgctcaggctgccaagctcactctcgatagtcgggaagattttgtggtcgacctatccacagagttggtggagaaggatctgcaggtggaaaggctgagccagcgtattaccaccctggagcagcaagtggagatccgagataacactattgatgtcttggagaaccagctccacgacgtgcagagggaactcgaggaagccaatgaccacttggacatgcaccacctggagatggaggccaatgaagcaggaagcgagggagaagaggctcccgaggagctaggaccagcccctggtgccaatgggactacctccgcgatgcctccttcacccatggcagcgaggcagcgtcgcgggcagaatgagcaagctcccccgccacctcctccagctcccacagtgcaggagctgatggcccagcagaatgagattctgcgacagctcttgcagcgccagccccaccaacagcatcatggtggaggccagcatcagcgacctccggctatggcaacataccaggagtttctgagcacgcagccgcccttgttcaccaaggcagaggatccgttggacgccgacgtgtggcttcgcgtcgtcgagtccaagtttcccctcctcacgggagactgccctgatgaggccaaggctcgcttcgccgcacagcagcttcgcggcccagctcggacttggtgggaccacttccgtgctatgctccccgctgatcatgaagtatcttgggaggaattcaagaccgccttcagaggacaccacattccagctggcattcttgatcggaagttgaatgaattcctggccctcaatcaaggaacccgcacggtactgcagtatgcgcaagccttcaacgacttatgccagtatgcagggtatcatgctgattctgatgaaaagaagagggatcgcttccgcaggggtctcaataccaagctgcgggaacgactcaacactgtccgggccaatagcttcaatgagttggtcaacatggccatctctcaggaggattgcattgttgctcaccgggtagagaagaagaggaaggcaccaatggcagcaccatccgctcaggctcagaggttccggattgtttctcacaatcagagcaggggttttcagcagcaggcaggcagatgggtgatcaggccacctcagcagcagcagcagccggcacccaaccgctatccagctcccgccccaaggaacaatcagcctctgcagcagcagcagttccgccagggcaatgggaacaagtgtttcacttgtggcaatgtgggccactatgccaagaattgtcccaggaaccagcagaggcagatgccagcaccaaatcaagacaagggaagaaagcagaaggtgcaagtcaggcaagggaagctcaacttcactgctctagaggaagtgccagaaggagctcctatcatgaccggtaccttttcagtttataatcaacctgctttaattctgtttgattctggtgcatctcatagtttcattagccaaaagttcagtgctaattgcaaactgccattctctcactcaaaagggtcattcatgatagtcacacctgggggtaaaattgcaactaaccaattaaaccaaagtgtgcctattcaactgggaagccacattgtcaaaaccactcttcttgtgttgggattggaaaatgtggacattattctaggagcaaattggatgaccttgcaccaagttgtgcttgatgtagccagtcgtaccgtggaagttaattctcctttctgcgggaatttcactttgattctgcctagtcagggttcttctcagtcatgtgctttctctatgacggagttacccctgaagaagatcccagtggtctgtgagtatgcagatgtctttcctgatgaattgccaggaatgccaccggaccgggatattgaattcgccatcgagttgcaaccgggaacggccccaatttctaagaggccctaccgaatgccacccgctgagttggcagagttgaaaaagcagttgcaagagttgctggataagggatttattcgcccaagcacttcgccttggggatgtccagcgctatttgtgaagaagaaggatgaaagcttgaggctgtgtatagattaccgccctcttaatgcggtaactatcaagaacaagtatcctttgcctcgtattgacgttctctttgaccagttggtcggggccaaggtgttttccaagatagaccttcgctctggctaccatcagatcaaaatacgagcaagtgatattccgaagacggcattctcaaccagatatgggctgtatgaatttttggtgatgtcattcgggctgacaaatgcaccagcatacttcatgtatctgatgaattctgttttcatgctagaattggacaagttcgtagtggttttcatcgatgatattctggtgtactcgaagaacgaagaagaacatgccgggcatttgcatgtagtgcttcaacgtctgcgagagcaccacctttatgccaagctatccaagtgtgatttttggctaaaggaaatcaaattcttgggtcacactatctctcaggatggaatagctgttgatcctgataaagtgcaagaggtgatgaaatggaggccaccaacgactgttcgccagattcggagttttctgggattggccggttattaccgaagatttattccggacttctctcggattgcgaagcctattactgagttgctgaagaaagaagtcaagtttgtgtggagtcagaagtgcgaagatgccttccatgcattgaggcagcatctgaccaccgcaccagttttggcgcaacccgacagcagcaagccttttgatgtgtattgcgatgcctctggcaccgggctaggttgtgtcttgatgcaagacaaccgagtcattgcttatgcctcaagagcactcaggcctcatgagcaaaattatcccactcatgaccttgagttagcagcagtggttcatgcattgaagatgtggaggcactatctaatgggaacccactgcaacatcttcactgatcataagagccttaagtacatttttactcaggctgatctcaacatgaggcagagaagatggctagagctgatcaaggattatgacctggaggtacattatcacccagggaaagctaatgtggtagctgatgccttgagtcggaagttgcaatgcaactgtattctgatggattctcgtgttaacaccttgtgtgatgagttgagcaagatgcaaattgaagtgattccttctggttctttgtctcacatttctgttgagccagctttgcaagaccagattatcatggcccagctcagtgacaagggagtgcagattatcaagaagaatctccatcagaaggttgaaaagtatgattgtttccgccaggatgagaaaggtgtgttatggttcaaaagcagattggtaattcctaaggaccaggatctcaagaggaaaattttggatgaggctcatctctccaaattctctatgcatccgggaagcaccaagatgtaccatgatctgaagcttttgtactggtggaccagaatgaagagggagatagcccagtatgtatcagagtgtgacacctgtcagagggttaaggcaagccacttgaagtccgctggagctttgcgaccactgtccgtaccttcgtggaagtgggacgatatcagcatggatttcattgtgggtctgcccaacacctctcgtcatcatgattcaatttgggttattgtggaccgattaacgaaagtggcacattttcttcctgtgcacaccactgataaggctcagaagtatgcagaattgtatatcgaccggatcgtgtgtttgcatggattacctcggaccattgtttctgaccgaggagcccaatttgttgccagattttgggaacaattgcaagagtctttgggaaccaagctaatcaggagttcagcttaccacccacagactgatggtcagacggaaagggtaaaccagattctggaagatatgctgagagcttgtgcgatcgattgtggcaagaactgggataagcacctctccttggcagagtttgcttataacaatagttatcagtccagcctaaagatggcaccttttgaagctctctatgggagaaggtgcaggacaccactcaattggtctcagcctggtgaaagagaagtttttggacctgatttggtgactgaagccgaaaggaaggtcaagctgatcaggaagaatctagaagctgctcaggccaggcagaagagctatcatgacagaagaaggaaacctctccagttcgaggtgggaagttttgtatacctcaaggtatcacccaccaagggagtgcagaggtttggaatcaaaggcaagctagcccctcgttacattggaccttatgagatcattgaagcatgtggacccgtggcatacaagctgaagttaccttcaaagatgtctgccattcacagcgtattccatgtatctcagctaaagaagtgtgttcgattgccgactgagattctagcagagccagaattggagatagagccagatctctcgtaccaagagtacccctccaagattctggattgcaaggaaagatcaactcgggctaaatcgatcaagatgttcaaggtccagtggagtaatcactcagaggaggaagctacttgggaaaccgaggaattcttaagatccaacttccccgattgcctacctaaggaagctggtatgtaatcaccctcaacccctccccctgcccttcgaatctaattttcaaaaatatgatcttaattcagaatgaagtaactataaagtaaaacttaagaggacttctttctgaagttgcaaagagaatgacattcgaagagcagttttaccctaataatagcaacactcactcatttcctataagtctcacccttcgcttcaccctgggaggactctggcccgaatctcgggacgagattcctttaagggggganaggctgtgacaccccagtgtcacctagggtttctctcaaataccaacccaagaaccattatttcatgtgaatcaaagtaagcatgagcatcaaaatttacttaagaacaaagaattcaccaagcatatacttaaaagtaccatgatcaaaacaattgagtcttttaaaaagataagaatgtgcaaccctaatgaaaaccctaagtgagccccatgagt

SEQ ID NO: 181037 - DNA, 396 bp, Zea mays
  unsure (1)..(396): unsure at all n locations
  Clone ID: MRT4577_96683C.1
aacaagtccccacaaaaacccagggggcagttttggacttggggggccacattggcagttggaatggcaaaaccatatggccagcattatggccacaactaaaaggccaggatctcatggaaggaccgaaatggaggacaaaaactaccccatttaaacaacaaaaccccccttccggggggggcccggaacagaaacaaaccccccccccccctgggagcacccccgggggcaaaaagcaccccgatctttagaacaggcccccctcctgggggggggggaggacccaccctgccttggggtaggaaatccaggggaggaggaccccctgggccattgggccgtngtgaaggaaggacccccccgagggggcaaccccgccggccgaaatcctcc

SEQ ID NO: 181038 - DNA, 358 bp, Zea mays
  Clone ID: MRT4577_96684C.1
attatatttttttttttttttttttttttgagcctgctttaaaaaatgttgggtggcaataggaagcttcctttgaacaacaggcgacagagcatactagtagtatatggaaaggtgaaggaaaagattaaaaaaacaaggggcttaaaccaaaggaattttttttaccccttctttacattccgcattactggaacagcagtaaccccagccgcggacaaattgaaagagagagaggtattaccgcaccaagcaactgcaggaggtggaacaacaactagagagggagccaccatgggctttggctttttggttactttcccttcttttggtcctaaactattaaaactcgacctgg

SEQ ID NO: 181039 - DNA, 426 bp, Zea mays
  Clone ID: MRT4577_96685C.1
ctgagactggcctcctgctgctttgctttcaagttatgtatatcagcttactgcagcgcttaggccacttacgcgtttccatttacaactccatgccgcgtggccggcgcctgctgtacgagatgaatgacacacactcacgacaaagctgggcctgtacgcaccgcatggaagggcaggatgtgcacgcaagaaaagggcggttctcacgaaccacagctcagatgacaggggctttcagatcaccttgaacaggatttgcgcgaacaccattcctggactaaagtgagtacaacttctttaaggacgatgttgctatccattttgataaccgtcaagtgcacggattcattgctgtggatatatgtgtggctcgcggagtaccgcaagacaaaaagtctagatgagcttctgccatcatttata

SEQ ID NO: 181040 - DNA, 158 bp, Zea mays
  unsure (1)..(158): unsure at all n locations
  Clone ID: MRT4577_96686C.1
tgacatgacgntagctcagacatcagctacgaaggcgaagtacatatctagagacaaacgttcgtgacgacgaaggaaccaggtttggaggaccaatgctggcccctacgagttcaagcctgctcccagatcaacatatgacgacatgttctcgccgt

SEQ ID NO: 181041 - DNA, 451 bp, Zea mays
  unsure (1)..(451): unsure at all n locations
  Clone ID: MRT4577_96687C.1
gaaaacaattatgtttcaaagnaatatatgatttactccaaaaacagacaacctgtatgtgcgattggacccctaactaccatcattatgtccgaccaatcttgtttaacctaatctagcacacaccacttggtgcatgagagactgtacttctacctgcgctgatcacaaaaggtggcggttagtcatcactatactgatccaggtaacattatgactacatagctgttaatggcacatcacggatccttatccataaagattatccactatctgatcctgtttagacgaccctgtaaaacgtaactgccatcaaccctgccacatgtgacatacaattaccgtctattactatgggactgcacttatactggaactcgcaatcacttagccctggctccatttgactgatacctagtattaatcacctcaatgtttacagaccataaag

SEQ ID NO: 181042 - DNA, 218 bp, Zea mays
  Clone ID: MRT4577_96688C.1
gtaaatttaaacatatggaaatttgattcaaatgacttattatgtggggtttttttatgattctgagtatccaatgatattctcttttttcatctagctatcagatattatatctcaacctttgacggtgaagttttcctgcagcattgctcatagcatacctattcatccggtgtgctgcattgaacacctgatctttatagtgtttggccttatgc

SEQ ID NO: 181043 - DNA, 241 bp, Zea mays
  Clone ID: MRT4577_96689C.1
ctgaagaaccaatctgagggcacataacgattcaagccggactgctgcaaaagagttttgggtacaatacagaggacacaggatgtacataaaacctacgaagtcacacccacgattcatgatacacaaaccacaaatgcttatcagacgtcgacatccatattgtggttcaccagagggcaccagacgacgcagataccctggtacagaaacagcttaaatgaaccatggtttaatgacc

SEQ ID NO: 181044 - DNA, 573 bp, Zea mays
  unsure (1)..(573): unsure at all n locations
  Clone ID: MRT4577_9668C.1
gtccattgggccagaaatgggccgcttcgtcgggaaggtcggccactggaatagttccgatgaccttgagttttttgaggttggtgaagccgttaaggtgactggggaacttagtggccctggtgggccgataacattccgtgccaagattgggaagggcaagcgacttgtgaattggggcgcgtgtctccaggaattcggtgtgattgccacgtttaaaggtgtgggtggaatagctcagactgggttcaaaaatcctccttgggtggatggtgagctgttggtgctctttggcgngagtnctatcctacaccttgggggcgcagagctcggtttcctgtgctgtgtgcctgtgcagagttttctggttctttttcgtcggcttggccttcccctccggtgggactcctcgtcggggcggcgttgtcgcctgcttattgtttgaacgcgctgtggctgggcccggttccaagtgttcggtcgagtctgtggcctggggggtcttttttttttcggcccttgggcctttttggttttcttgggtgccttggccgtctcttctttctctccttt

SEQ ID NO: 181045 - DNA, 142 bp, Zea mays
  unsure (1)..(142): unsure at all n locations
  Clone ID: MRT4577_96690C.1
tnctggttctgatagactgattattccaacgcgtggccccattaataatgagagaggcacttcctaactttcatttcatatcattgattaaacctaaaaaagttaccttccttcacacctttaccaactatatctttctttt

SEQ ID NO: 181046 - DNA, 221 bp, Zea mays
  Clone ID: MRT4577_96691C.1
tgggtggtttattttgaaggaccctttttattccggaaacagatggccaggcttattacgggtcctttgctcgaagcggacatatgtaaacagttcaaccttgactttcaaacagctgcccagaacatacagatctatgctgtaacttcggacactaaatcctctctttactttttacgctacctttccggtcagtgtctcaagctaagaagactgacaga

SEQ ID NO: 181047 - DNA, 314 bp, Zea mays
  Clone ID: MRT4577_96692C.1
gtcacgcaattcttttttagattctaaaaaaccaaaactgtttcccaacatcatctcaaatgcacaaagagaaaagcaaaaggggttaatcctctggtcaacccatttgactcaaaccttcttcgcagttcccacccaccccaattaaaccaactctctgcaaagtcgactactgcatctccctcctataagggcacccctactactggaggaagcccggaaaaaaaatggcgactcatgaaaactataacctttcgattctaacacctatccccccccccttccttttattttaaccacccctagaacccttt

SEQ ID NO: 181048 - DNA, 557 bp, Zea mays
  unsure (1)..(557): unsure at all n locations
  Clone ID: MRT4577_96693C.1
tcgaaaaattattacaacttaccaagagattttcttccgtcgccagtgtaagaacagcaacatggtcaacgtacccaaaacccgccgcacattctgcaagggcaagaactgcaagaagcacacccttcacaaggtgtcgcagtacaagaagggcaaagacagtgttcatgctcaaggcaaacgccgttacgacatgaagcagaagggctacggtggtcagaagaagcccgtgtttcacaagaaggccaagaccaccaaggagatcgcgcttcgtatggaatgtacggaatgcaagttcaagaagcaactggccatcaagcgcaccaagcacttcgaattgggcgcggaaaagaagaagaaaaatcaagtcatcgcctactaaacagcgcggcgacgacgacgcaggacaacacgtgttttgtcatccgttgttatttttgtttttctcgcacgtgctgttgatgaacaagaaccgacgcacgaatgtgtaacaagagcggcattcgcgcggaaaagaaaaaggaagcacgaacgtgtgtttcctgttttctagaana

SEQ ID NO: 181049 - DNA, 212 bp, Zea mays
  Clone ID: MRT4577_96694C.1
gcagctgcacataaatggaaaaaaagcgcgatgtacaaactttttcaaaaaaaaaatgcccccctaaatccttaagcacaaggaaaatgacaccgtacaactccggtgatatataaaaagacctgacctacaaaaaaaaaaataaactttatattccccaaaataagaaagaaaatctccaaacaaagggtaaaaacaaatattttggccat

SEQ ID NO: 181050 - DNA, 586 bp, Zea mays
  unsure (1)..(586): unsure at all n locations
  Clone ID: MRT4577_96695C.1
atttttatagtatagtgtgatgggggttttagtatctttggtgggttgtgtttgggggttgtgtgttggggtgggttgkwggtkatggatgtatatattgtgttaactgnttgtgtgggtgttgggtatggtatatggaagatggatgggwgactataatattagtatatgtactgtgagtatgagttatagtggtcgtgaggtgtatattatwcgcgrctwgtgtttagkttttatggktggkgcgggtgtggtkngatatagtatgtatgataggatagtagtggatgaagagatagagtgatgtatgatagtagtgagatagaggaggttgatgatgagatggtgtttggtgtcgtattggtgttagtngggggtgatatattagntkgtaknagtgagggtgangtgtggtggagattgtgtttatgtgtkcngtgtgagtggtgagtatttatttgtgntgtggtgttattatggtgagagntgtgtgctgwgtgatgttgtgatnagtgtatggttggatttagnatgtgngntcggnggtagagttgtgtgaagaagnggggtgtagtagatgagtgag

SEQ ID NO: 181051 - DNA, 323 bp, Zea mays
  Clone ID: MRT4577_96696C.1
cctcgaggccggccgggatatcctctcccttggcctcctttctggagagctattgtcgcctcatcaatcgcgatccgccgggtcccaaccacctttccaccctccaaactaataaggggccgcgggagacgataagattatgacattccttaaccgctctcatgctgatgagctataggaggaagagactgagccaacgtcgacgaacaccatccgccacatgatctgggatgactgggtagagaaccgcatccctcttcctaaggtcaagtccgagatcctatctccactaataccggtactgccacaagcacgtacatgcg

SEQ ID NO: 181052 - DNA, 183 bp, Zea mays
  Clone ID: MRT4577_96697C.1
cccacgcgtccgcccacgcgtccgcggacgcgtggggtcttgtgatggcctaacaccaagagactgtggatgacatatctccatctctggctggtctcccaactgagatagacattaccatattctaccggcctctatattcaacgcagcacacacaccgtggtgacagcggcttgttactat

SEQ ID NO: 181053 - DNA, 339 bp, Zea mays
  Clone ID: MRT4577_96698C.1
tccttaattcccggatccacccactcatccgtccacacgtccgtaacacaacactatattactcattcataaacatatactcattactaagacatctgttaacttcatcatgacaaaaagcatttgctcatcccactatcattttcatatacaattacactccctaactacacaattatactctattatcaagaataacataccataactaagctatcatattctacataaatcgtgctatcctttcactataattatataccttacaccttcaatataataactacttaaatctttcttcatttactacataacaccatatctagattaaacctatat

SEQ ID NO: 181054 - DNA, 171 bp, Zea mays
  Clone ID: MRT4577_96699C.1
agagctatttcgtggcaagcacccgtgcgtaagctcggaatgggctccgggacacaagccagttccccctgtaataaacagcactcccttacctagtgggggacactgtacgcctctcgtgggtaataatcgagcttgacttaatcatggagctagcacgaatgcctcaga

SEQ ID NO: 181055 - DNA, 133 bp, Zea mays
  Clone ID: MRT4577_9669C.1
ctcttacccacacatgacaaccgacaccaagggggcttttaaaaacaaggtcgccttcacccacacccaggcagcgagcaaaccgacaaacccaggacaggacgcagggcaccaacgacggcagccaaaagga

SEQ ID NO: 181056 - DNA, 667 bp, Zea mays
  unsure (1)..(667): unsure at all n locations
  Clone ID: MRT4577_966C.1
ccggccggggttatataatgcaaagggcaaatcataaagatctttctttgattaatagtactcccttagctgtattagtacgtgctagcctcaagaactggaataaataagatatgtatgtatgtgctgcactagtatctataattcattaattcgagcctacacaatgcctttcatggtgccaaaatatgcatatggtgttgcctaggtgtccgccataaacgcctaggcattatgaggggtatggcgccgtgcctcaccacaatgcctcaaaaaccatgtttgtgtatatagtaattctttagtgtatatacttgctttgtgtgattatgaaccgctggaacttatactggttgcacagagaagcgtgcacattcatttatcaatgccatttgtatttcaaaattttcgatgtcaaggattaatgtttctagtgtttctagattttgtttcagctttgttatctttgtcttatgacctgtacttaacaagattgttgagctctagcctaaccctacttgtgtaggactaagaggcttcgtgatggttgttgtaacaatattgattgaaaataaatctgcactgactacactactctncattgcgtngttgttaagtttctgggagttctctttgatatttgatcatgccatcatggtgaacttat

SEQ ID NO: 181057 - DNA, 295 bp, Zea mays
  Clone ID: MRT4577_96700C.1
gtcgtttttggccctttttcagggcggacgcgccggcgctcgacctggggttcggccacccaggggcttgcaacccgccggggccccgagggcctggctcaactcggtcctcgacgggctcaacacgcttatccatgggccccgggtcacacaaactgacccttaccctgacactggcaggcaacccacccgttagtacgcacgcgcaggtcttagtcgcgatgcatgcggcgtacattctgtgggccattctcggggagcaaccggcgcccacttgtgagctctgtggcccggg

SEQ ID NO: 181058 - DNA, 570 bp, Zea mays
  unsure (1)..(570): unsure at all n locations
  Clone ID: MRT4577_96701C.1
cattgggtacctcgaggccggccaatctactgcatccgagccgccgccacttgccgcgcgctgctccagcttcttcccctacgcgtcgcgcactccttccctgccggcgccgcgccctgagcttcttctccaccgcgcccctggttccggccccggctcgacagccttcttcccaggcgagctcccggcgttggatccgctgcgagctcccctgcagctcgtccccatctttctggccgcgctgaagtcctgtttctcctgcgccgcggggtcgcaagacagaggctattccggaggtgtctctcatgcgctccgcacgagcctcctcgtcgtcgacgaaggagaagcgacggagacgagaagagtacgccagacggcgtctgtgcaagggaacggaaaacggtgacaggacactgatacctctttatgtagtctcaagtgctgtctcatatccattttagagtttgtctgtcgcctgcgtctctnaaacagagaagccaacaccaacgcctctatttcgtcgaatctccttctctcttcttctataanaaaaaaaaaaaaaaagcggcc

SEQ ID NO: 181059 - DNA, 495 bp, Zea mays
  Clone ID: MRT4577_96702C.1
aagctcggaattcggctcgagatcagtaactaataattactttttattttttagcaagaatagaatcaccaagagggtggagctcatctagaggatgacgatgcacatcccgcggagcctgccggagcggcaggaccacttcctgcggtacaaggagctgaagccgcgcgtcaaggccccttccgacggatgcccgcctttgcccgcggaggaagccaaactcgtggccgatatcgacgcggagaccgagaagatcaacgccttcttactcgaccaggaggaagagctcatcatccgccaccgggagctgcagaaccacaatctagcgcacgctgggccgctgcaggccagagccggcacctgcactcaacgaagccgaggtcacctgcatgcgcatggagatcgtcaacttctcacagagacatagagctggtcctcaactacagcagcaataactacatacgtaggaggagctctagctctagctagctagct

SEQ ID NO: 181060 - DNA, 470 bp, Zea mays
  Clone ID: MRT4577_96703C.1
gccggccggttccgggcacgcgacttctcgtcggtgtcgatctgctccggcgaccgcttgtcatcgattatccctacatcggtttgacttggagaggacgagcttccaccatcttgggaccctataccctctcctttagattattcctgcaccggttcgagttggagaagacgaacttccaccgtcttgggatccaatatcctctcctttaggcacatgttatatcctaaatgtttttattacatcctttttcgcttaagttggtgtttattttctaaatgaatttctttttagttagcaatggatgtggcattaagtgattaccttaggaagaggagagatgaggatgatgatgatatgatgatgtttttttacttatgctacatatgttaaatatgaggaacctgttgcaaattcgttccttgtaacttgctttggctcttaaaaaaaaaaaaaaaaaaaggccccta

SEQ ID NO: 181061 - DNA, 684 bp, Zea mays
  Clone ID: MRT4577_96704C.1
atgactacagccttcggcgctcgaccaaagcgaaggttgaaccgagtgatggatgctctgaactttgagtatcctgactatgagcgtttggacagaggtgccgaaggacaaaaaagaaaaagagttgctagcgccctggatgaagaagctgctaaattggtgaaaaaggatgaaaaaactttgaagaaaagaaaattaagccctgagtcgaaggtaggtgcttcgaagaaaaagaagaatgcggctctgaagcgaaaaacgactgatattggggatgaagctccttcaacacctcctgctactgatgtggaagaaatcttaaagacgcctccactggcatcggcgtcaaagactccagctattgatagcattgctgctgccgaagctgcacccaccgaagccgaaagtgccgaagctgaaaccactgaagatgtaaatctagatgccacagtcgctgaaattgataccatgcttctagatgcggccgcggaagaagctgctgcagccgctgaagagatcccgggcacagtggctggaaaaggaaaggagaaagccgaggatatttcggaagaagaggacttcaattttaaagatatacttgggcaagaattgtcgaaggctgaaaaagaagaactgaaagagtatgttatatcttgcgggtacagaccaggtgcgttactgtaa

SEQ ID NO: 181062 - DNA, 2430 bp, Zea mays
  Clone ID: MRT4577_96705C.1
atggcaagggtacgttccactgccagggttacatgtgacggagaagaagtcgaagctgctgaaaccgctccgatttccgaagtgatgaaacagtcagggctggtagtgccggaggatgtttctgatgaaggtgcacctgccgctgaagctgacagccacctggagtttgggaggtccactgttaccgaagatgatatgtctaagttgatgaagttaggctatttcagtgaagccaaaaagaagctgattcgctttggcagagaggaaattactccgaagctagaaaaggatgaggtggtagtctttaaaagcttctttaaagcaggattaagatttcctttgaatgagatgattgcggatgttttggagaagtttgggatttatcttcatcagctaactcctaacgccaaagttaggcttagcacaaaagctagagaagatgagctgcacgagaacttcggctgctacaattttgcttatcgcaaagatgcgaagtctccagttatcagctatcataccaaatggccagctggctggaagactgaatggttttatgtcaaagttgatgagaaaaaggagaagctggttcaaagcccattagaattaatcttcggagagactaggccccggtgcgacatgaaaccggagagtccatgccaaattgcactgggtgaatttcgagttattgcggagcacattggtactaaggatctggtgcaagaattcttagcttttagagtatttccaactttgaaagaatgggacatgccgaagctcaaaggggaaaagaaaaggaaggaacttgttcggttgccctattactataaattcaagaaacacttcaaagaaccttgccaagaatggttagacacgattgaagttataggtgctgaaggacaaaaaagaaaaagagttgctagcgtcctggataaagaagctgctaaattggtgaaaaaggatgaagaaactttgaagaaaagaaaattaagccctgagccaaagatggctgcttcgaagaaaaggaaagttgcggctctgaagcgaaaaacgactgatattgaggatgaagctccttcaacacctcttgttgccgatgtggaagaaattttaaagaaggaaaaggagccttcggtagcgaagaagccagatgagccgaaaaaacaaagaattattcatgtagttgaagttatcgagcagacaccgccgctggcatcagcgtcaaagactccagctattgagagcactgctgctgccgaagctgcacccaccgaagccgaaagtgccgaagctgaaatcgctgaagatgtaaatctagaggccacactctctgaaattgataccatgcttctggatgcggccgcggaagaagctgttgcagccgctgaagagatcctcggcacagtggctggaaaaggaaaggagaaagccgaggatacttcagaagaagaggacttcaatttccaagatataattgggcaagaattgtcaaaggctgaaaaagaagaactgaaagagtatgctatatcttgcgggtacagaccaggtgcgttactcttcgggggagtcaacgaagaaagcttaggatgccttcgggaccacactggggcgaaggctgtcagcaatctatcgaagagtgttggcctcccgaaggttgaggtagacctcagcaggtaccggcggcagcatatcgccggtagcctattttatgctaactttaagagcttactgctgagcaaagtcctgaggatgcaacaagacctcaaggacaaaaagaacgaaattataattgagggcctggagaagaagattaaagaccatgaggctaccctggagaaaaaagactttgtatttcaaaccatggaagccaaactcaaagctgaagctgagaaaaattcaaatttgtggaaatcactgaaagaacttgaagaaaaatgtgtagacttcggcaaccagtgcctgcaacggctaaagcaggttttcaactcggttggagccagcactgagaaattcagtccttcggttgaaaacctgccggaaaccttcgaacacattgagggcgaagttgatgcactcggcgaagttatagctggacacaccgatttctgcgctctgctagcttctcagggaacagctgttgcctttatgaaatctggctgtacacatggaaaaattgtcaacaaaccaaattttaacttatcatcggtagatataattgatatccccagcctagctcggagtataggaaaaagattcataactcaaatttgggtaaaaggcgggcgaaaaatggctggcgacgaagctcgaagccaccttaagccggaacgtcttttgaacttcttcgccttttatttcggcggtatttttcgcgttgacttttcgcgcttcgccttatatttcggcggtatcagcgttgacttttcgctgtaa

SEQ ID NO: 181063 - DNA, 3355 bp, Zea mays
  Clone ID: MRT4577_96706C.1
aattcggcacgaggcgaggccttgcttggagccttggaccttgtccttgactcgccccggcgcgaacgcggccgcgatgcgcgaggaggtgcggagctcggcggcggcggcggcccccgacccgccgcccgggaggtcggcctcgccaccgcccacacccgtcgccagttctgccggtgcctcgtcaccccctgcacaaactaatgtagctagcatagactggctagacagtgaccaagtgtccaaagcaggatcctctcatattgctccgccgacgtctcggcccgcgcttagtactaatgctaatggagctgccatggactgccttcaatcatcatgcagaccatgggaacgaggcgacttgcttcgtcggctggctacttttaagcctttgacttgggcttctaagccgaaggctgctagttcactggcttgtgctcgaagaggctgggtgaacattgacatggacaagattgagtgtgaatcatgtggtgcacatcttatatttactgcattgacatcctggtcccctgctgaagttataagtgctggggaagcttttgctgagcagcttgatgcttcacaccagaataattgtccctggagaggaaatagctgtgctgatagcttggtccagttccacctgaccccgtcagctcttgttggtggttttaaagatcgctgtgatggattgttgcagttcacgtctcttcctgctattgccttatctgcaattgagagtatgaagctcactagaagcgttcaaattgatcgagtcttatcccagtcagtcacagttttgtctggggagctgggctacagaacagacagtacaactggaattgatatcgcccaacaagatgaaacctgctgttactctcaagcacagaagcttattagcgtttgtggatgggagcctagatggcttcctaatgtccaagattgggaagagaattcgacacgctctgccagaaatgcaggctcagctgaaccagatggccaattccattcccaatttcctgagcatcatcaaaattcaaactctgtgtcaattaagaaagacaaggggaaaggtaaaatgcatgtcaaagattctggatgcagcatgaggtcacctttgctggattgcaacctgtgtggagctacagtgagaatctgggacttcagatctgtgccacgcccttctcattttagtctgaataacatcgacatgcctgatacaggaaggaagcctgtgttggtccgcggtattagtgctacaagtgggatcaatggactggtcactgaaggagcagagagagaaaatgttgagggacgtgatgaggcaggtattgttgagggtaagtctctgtcaaatgctcaagtcgacttaaatctgacaatggcaggaggtttgccgtcaaacaattctgcattgcccccgatgcctggacatctcaactatggtggaatgggaagagatctagttattgggcaacccactggaagtgagcttggtggccgtgcagcctcaattgaatctcggggccctagttcgagaaaacgtaacctggaggaaggtgggagcacagctgacaaaccaataagcaggcttcagcctgctgacagcattgagggaaccgtcattgaccgtgattgtgatgaagttgatgacgccgcacaagattctggtgctaggagcaaaaggcctcgttgttttaatctttttgatattaatcgcccatcttcttcaggagctggtcccagcagaaatttaagttttgacctggatatagatgttaataggttagatacatctaatgctgaggttccatccgcccttcgcaacccatttccaagggactctatgagggcatcttctgttattgcaatggatacagttcacggcatggaagaaaattcaatggagagtgttgaataccatccatgtgatgttgatgatgttaataagccttctagtgcactcaggagtggtgtaatgagtgatatgttggatccgaattatagcaaccaagcacagcaaagcagttttgtacagcctgctgctgaaactgaaagcaatgcaagagagataggagggagtagtatgaatggaggggaagaagtcctcaatgctgaaacaacccctgcatttgctagagatcaacttagcctgggagttagcggggggagtgtcgggatgggtgctagtcatgaagctgaaattcatgggactgatgtttctgagcataaaactggtagcgttgttggagatgctgatccaattcctgagctcatcgagactatgggccacactggtgagtcagctcctggacctgcattgatggatgagtttgtccctgaagaagttggtcgagaaggtcctaatggtgatagccaagatatggcatctcggttagcggttcgtgctgacagtggttctaaaatttgtggttcaactaaagctgattcagttgagagtggagagaagacgagccgtgagaatagcgcacatccttctctttcttgcaatgcaagagttttttctggcattgatgcatcaaaagacgaagtgactggtataatgctaactaatgatgactatgatccaggaagtggtctaggagcaacaaatggaggaaacgattatgaaacaggtcttccagacttcgatccaataaggcaccacaacgattactgtccttgggtgaatggaaatgttgctgctgcatgttgtattagtaccggttcgagcacagctctttcaggctggcagctcacggtagatgccatcgagactctgcagtctcttggtcaggcccaaaatcagacgatgcagtcagactctgcggcttcattatataaggacgatcacgtcccgcctagccggaagctgctgaaaagtgcgaaccacagcaagagctgagctctggagcaagattcttcaatgctcatagaaaagttgtcttgtcgaggccctaacctgagcaggggcgatggcttgcgtttctgtgaaatttggtcttagtgtggtcgtgctgcatttaccggaagagcttagaaaccatggacacgcgtgataagagataattcttaggccgtgatgtgtgcaggtgacatggcttgtcccccgccatcttgcaaaattgtttatgtcaggttgattgtatctatctacatacatgttatgttatttcagtctcctggagtctgtaacatgtaacgtgccatttcgttgatggtttgtcctactgaataatattgacacagacgaccacatttatgtattttgtgcgaaaacttgcaaggccctcaaaaaaaaaaaaaaaaaaaaaaaaaaaaaaaaaaaaaaaaaaaaaaaaaaaaaaaaaaaaaa

SEQ ID NO: 181064 - DNA, 253 bp, Zea mays
  Clone ID: MRT4577_96707C.1
caaggaacacgaaaagaagcgtgatgcagatcttcttgcctggcttcaggccatgtttggattccagaaagataacgtatccaaccaaagggagcatctcatactcttgcttgccaacgtgcacataagacagattcccaaatctgaccaacaaccaaagttggatgaccgagcactggatacagtaatgaagaagctatttaagaattacaagaggtggtgcaagtatcttggtcgcaaaagcagcttatgg

SEQ ID NO: 181065 - DNA, 1110 bp, Zea mays
  Clone ID: MRT4577_96708C.1
atggccagaatgctcccagtcaaaagagggcagcattgctcgccgtttctatgcggtaacgtgaagatcgccttcccgtttgggcttatcccggagggcgccgcgcagaccagctgcggcgtcggggttgggttccaggttcgttgctatgacgccatcccgcgcctcggattttctcaaagcgagatcaccttgaagatcctcagcatcttctaccacaaccgctccttgctcctcgcggatagaccatggtttacatatttcaatacgactactagcaccaaagggtgccgcatcccgccggccaacacctcgtcccggcttgtccctccgctctcggtcagctccgacaaccagaacctcatcttctacaattgcaccaagcccccgtcgccaggcgagggactcgtggccacggtatgccacaacaccacgtttgttcgtgccgccgatgggcggcgttccgacgagtcaggcggctacgttttgcaaggttgcaccgctaccagggtgcctgtgcttggagtgtctggcaaggtgaacgctagcaactacgaccaactcgtctgggatggcttcctcgcgacatggcagttgccgccgacgccgtcagggctggtttggtgacgaaggaattgaggacgttctccaattctatcacccaacccggctgattctatgatttacaattctacaattggtctaaatactgtgcggttcgtgtcttcttcctttccggcggccggcgggtgcagaaagtggcatacggctgtggtcacaaagtggcatacaattagcgctttgattttatttctggtcaaagtagaatgcacctttcctacggacaagagtcccacaagtcacaaagtaggtttactcattacaattacaagtttacaactaggcggttgattatatcaaacacagtttccaggttgtattgctcaaagcagttcttagactgaatctaggaaagactctagcaaacattttttttaccgagaaattaaagtattttatgcaaaaaaaaaaaaaaaactttcggaaaaaatagaagctggaagctgccaaaggtaaaaaaaaaaaaaaaggaaaaaaaaaaaaaaaaaa

SEQ ID NO: 181066 - DNA, 381 bp, Zea mays
  Clone ID: MRT4577_96709C.1
cgttttgggttggatgtgtctatgggaataatgatgagagctgatttagcttactctgccattctgatctgcagaggatgatccaaaaaggatcttcttctcatattatacattgctatcactgtgcatgtgctcacactgattaggtatacctggaacaaagacctcttaatgcaaaggaaaatggtatggatagtatctaccatgcacattgtacaagccaggaccgcatcacactaaaagggcaataccacaactgatacatggttacaacacgtctctcaaacatagtacccataagtagatccacacacagctattgcacatgactactatgacttccatggtattcaacaaggaattgaacctaacatttaggat

SEQ ID NO: 181067 - DNA, 386 bp, Zea mays
  Clone ID: MRT4577_9670C.1
cacgcgtccacaaacagggactcgacagatatggcttccggtgttgcagtagacgatacatgcggaaaggagttcactgttcttgtgagaagcacgccaagaaagtaccgtgctattatttgcaaactcactgatgacctgtcttctgtatgtgtggaaaagacgcttcccgcagccaacataaccaagtgcagtgcacaagaagactggaaaaagtttgtgactgaattgccccaaaacgattgtcgttttgcagtatatgactttgagtatcacacttctgaatgtgtttccaagaatataataatatccattctttggtcacctgaaactgcgaatattacgtccacgatgttgtaatcttctatcagagaagctcttgttca

SEQ ID NO: 181068 - DNA, 414 bp, Zea mays
  Clone ID: MRT4577_96710C.1
tttttttttttttttttttttttttttttttttttttttttttttttgttttttttttttttttttttttaataatttcaaaaaggacctttggtaagggtaaaaaagccaagacagaagttctagaccgagttactaactaaaggaaaccctaaaacaataccctaaatcgcttccagacaaaaaaacgggccgaaggagcatacaaaagcaacggcaaaatcgaacggcttttgagaaccaccagggctcaccaaaagggctccccagttgggggaccaagccaggaggggcacacgattgaaccaaaaatctgacacaaaaagcagacgggtctaggttccccaccaaggacatcccaaaggcccatttgagaaacttttttgaaaaaaagaacccgggggtccaccccgg

SEQ ID NO: 181069 - DNA, 386 bp, Zea mays
  Clone ID: MRT4577_96711C.1
aaaaagggggccccctctttttttatacaggttttaaaaaactttcagggccggggggttttccggataaaaccataaaaaaaaaacccctccccgggccatttttacaaccccccccaaaaaattttttttttgggggggaaagaaaaggaaatgggcccccccctaaaaagggcccacccggaaaggcaagggggggggggggcccccaacttcccaacctaaataataatccccagggcccaagggtatacctcctgctccggccccgggaggtcgcgggacccggggccggggggtttttcggggttgaaccccccttccgggggggccaaagggcccctaggggggccccggggggggggggggcgggccccgcccggccg

SEQ ID NO: 181070 - DNA, 600 bp, Zea mays
  Clone ID: MRT4577_96712C.1
gggggaaaaaaaaaggggggcccaacccatttttccccccccccctttggtttgaacccgggcccccactttggccaaataaaagccttcccccccccccaaaaagggggggggacccccccccaattttggggggggcgaaaaaaatttccacaaaatttatttaaagggttggccccaaaaaccgggggttaaaacccccggggccgggtcaatttgggaaacccccagggacccttttgggaccccttggcactttttcggggaaaacccccgaaaggggcccctcccccttcccccggggggggggatttttttttaaaaaccccttgggcctccgggcccccaagggccaaaaccgggggggcctttcccttgggggggggggaaaggtcccaatttgccttggagccccccgggtaaacccccccggggccccccccccaaaggggggaaaaaaagggggcctttccaaaatggaccccagggccccccccctttaaaagggcaaaaacgtggcccccccccattttttaatttttgccccccaggggccaaaaaacccccccccttttttttataaaaacggaaccttttttt

SEQ ID NO: 181071 - DNA, 393 bp, Zea mays
  Clone ID: MRT4577_96714C.1
cacctaaccaaaggatggggaggagcgctggctcgcggcgtggtgtccgctacaggcggcgcggtcacgcgcaaggaagaggtgtcagttaccttgacgatcgactgcaccaagctcttggaggacaagatcatagaggttggctcgctccaacagttcctgcaagatcgcattacagtcatcagcctcaatgctggcatcctcagctattacaacaccatctttcgtctgtagaccatggtaccgtatcctttgacagatccttgtcctaaagtacctgaattactcttacctaacaactacttgtaagaaacacaaccctgcgttgattggctacacgttgatgctgccaacaataaccgcaccacctatgatctacattgcttcaacatt

SEQ ID NO: 181072 - DNA, 252 bp, Zea mays
  Clone ID: MRT4577_96715C.1
gccggcagcctttccgcccaaattggacccctctcaggtggtggaggtcttcgtccgcgtgacgggaggcgaggtcggcgcggcgtcgtcgctggcccccaagatcggcccgctcggtctctccccgtagaagatcggcgagggcatcgtcatggagaccgccattgtctggatgggcctccgcgtctccgtggggctcaccgttctgaaccggctggccaaggtctccatcttgcgctccgtcggggcgct

SEQ ID NO: 181073 - DNA, 738 bp, Zea mays
  unsure (1)..(738): unsure at all n locations
  Clone ID: MRT4577_96716C.1
cattgggtacctcgaggccggccgggatccagacagcatccatcagcctacggtcaacaatcaatcgcacacgcaaacgaaaaccttgaaagtcaattttcaaccaacctcaagcaacaatgaagttcaccactttcgtccccttcctctttgctcttggagccgctgcgcagcagagcgcccccgttgttggcgaggctgtgctcgatctctctgagaatcgcccaagccatgctgacgttgaacgttctgacgttcagctcgtgggtaccaactctcgcaacccacgcagcctccgaagcggaaacctcctcaagcgtgaatgccagggagccaacagctatggctgctctgctaagggttggtgctggaaggaatgtggcagtggtaactggtgctggactgctcacaatggtggcagtggccagtggatttcgtgtggctcatccaatgactgcaaccgtaaccaggcttgcagcatcggcggctgcggagagtgcggatgcagcggatgcaccaaataagttaaggttgcatccggagttgcgtttagggggcgtgcatatcgcttatagcaaagagcacagttgtttgaaggaatcagaaatgggggcgaagttcaactgccggtataaggatactctctactctttacgtactaccaattctatactgtaccctcagaaaaaaaaaaaaaaaaactaaaaaaaaaaaaaaaaaagcggccnnnnnnnnnnn

SEQ ID NO: 181074 - DNA, 208 bp, Zea mays
  unsure (1)..(208): unsure at all n locations
  Clone ID: MRT4577_96717C.1
gcnctcgagtgnnggngactcatangttaactgtgctccattctnctaaagcttatcnntagntatactcttccacagggtacggggaattnggtctnacattnacgcccggcaacagtgactagncccaaggtccctngntgcngcccaanngngtctttngngaacaggacnacctactttggctctataccgcgtgagctgaang

SEQ ID NO: 181075 - DNA, 1052 bp, Zea mays
  Clone ID: MRT4577_96718C.1
gcacgagctttaatgtgttcattttatttgtcgattttttttcttctgtcgtgatgggcggggtgtttgtttcacgcgcccggcgcaccatactcgacgtaacgaggcatcgacactgacagagtccacggcacggcttgtttaccaccaaccatccggcccttccccgaccatggcggcggcaccccctcgctggtggccgctcctcctgcagctcgcaatcgcccttggcatcctgctcgcggcggccgaggcttggacgggggagatccgcggccgcgtcgtctgcgacgtctgcggcgacgcagccatcggcccggaggaccacgccctcgaaggtgcggaggttgctgtcctctgcatcacaaaatctggtgaggttatcaactatcaagccttcacaaactccaagggcgtgtatactgtcgccgagactatgccggagagcgacaggtgggactcgtgcttggcgaggcctatgagcagcttccatctacattgcacacggcggggtgatgctcactctggggtgaagttcacttacaacaaatcgtctgggaacccgcacaccgtcaagcctttcctctacaagccggccaccgtccctctgtattgtagttaaacaacacatcttgctggaacgcagaagatagaacatacaggaagaaaatatgtattcgtgccccgactccatatgaccatatataagtaaacactgtttgatgtaaatcaaagattcagctgtctatgggagctgttctagtgtctggtcacccatacctgcgaggaaacagatgttgcgtgcttaatgttgataatatcagtgtttttcacctgctgtaaatgttttgcgaatgctattcttatcttggttatgatgatataattaaaaaataatcgtgcaaaaaaaaaaaactggcccgctcgcgctatagaaatatataagaatacaatccttgcactattgattacataagttcgcacatcgctgacatcaaagatatcctcaatctctgacaccctaccaacgtaatggcaactcggacacaact

SEQ ID NO: 181076 - DNA, 984 bp, Zea mays
  Clone ID: MRT4577_96719C.1
gtcgagacgagcacggcttgtttaccaccattcatccggcccttccccgaccatggcggcggcaccccctcgctggtggccgctcctcctgcagctcgcaatcgcccttggcatcctgctcgcggcagccgaggcttggacgggggagatccgcggccgcgtcgtctgcgacgtctgcggcgacgcagccatcggcccggaggaccacgccctcgaaggtgcggaggttgctgtcctctgcatcacaaaatctggtgaggttatcaactatcaagccttcacaaactccaagggcgtgtatactgtcgccgagactatgccggagagcgacaggtgggactcgtgcttggcgaggcctatgagcagcttccatctacattgcacacggcggggtgatgctcactctggggtgaagttcacttacaacaaatcgtctgggaacccgcacaccgtcaagcctttcctctacaagccggccaccgtccctctgtattgtagttaaacaacacatcttgctggaacgcagaagatagaacatacaggaagaaaatatgtattcgtgccccgactccatatataagtaaacactgttcgatgtaaatcaaagattcagctgtctatgggagctgttctagtgtctggtcacccatacctgcgaggaaacagatgttgcgtgcttaatgttgataatatcagtgtttttcacctgctgtaaatgttttgcgaatgctattattatcttggttatgatgatattgtttttttctaaaaaaaaaaaaaaaaaaaaaaaaaaaaaaaaaaaaaaaaaaaaaaaaaaaaaaaaaaaaaaaaaaaaaaaaaaaaaaaaaaacaaaaaaaaaaaaaaaaaacgccccctaggcccccgcccaaaaaaaaacaaatgcaacccccggaaaaaaggaacccaaaaccaaccttatcaaaaccaccaaaatccagggggggccggaaacccaatccccc

SEQ ID NO: 181077 - DNA, 287 bp, Zea mays
  unsure (1)..(287): unsure at all n locations
  Clone ID: MRT4577_9671C.1
aacacgtgcattgatacatanactcgaaattcaactcgagatgaaagttacaattatatttattctagataatcctagaaatagaaaaaacacacaatataccaacattatggaacacttaaattcacccatcttaatactagaaatcttttacatacagagattaaatctaactctgagaatagaaccatgattaaaaacatgataaaggagggaaaaattattccatcagaaataactataaaactattacaggagacaatgataaaaaatgaaaatgacaaatt

SEQ ID NO: 181078 - DNA, 501 bp, Zea mays
  Clone ID: MRT4577_96720C.1
gaggagacctctctataatcttctggtaccaaattgagtcttacaagcacatacatatacttactgcggaatgaaagcgccccttttggtaagcaaacgtataatgccagtgctaatgtcctacttacatacaagcattacacgtgctcgtcaacacggctgacgtacgaaaggataaaaacgacgtgtactgtcaggtttgcacgataaaccaaacatttactggcaggggtgccagataaactaaagatgtactgaccggtctgccagataaactgcatgagcactgatgggtatgcacacaaaccattgagtgaacatgtgctgctagtagccacaatgaactgttcgttttgtctacaaaactgatactcacatcatgactggtttcaatggctccctttgaaggacatttacactttctgtatgcgtcaatacagaaatagcacatgctatgagagttgttttattaggacactcacttaaagttcgtccacacat

SEQ ID NO: 181079 - DNA, 1063 bp, Zea mays
  unsure (1)..(1063): unsure at all n locations
  Clone ID: MRT4577_96721C.1
cttccttggataccgtgctcctnttgcactcccccaaaacgcagctccctcagccaatcttccccagagcgcggctaggcacaggcatctgaagtatggacccctctgaacttccggagctgtcccgtactgctatgttgatctgctgcaaggtgtgtggaggacctgaagaggtggacaagaggttcctgatctgtgaccactatctttgcctgtacaagtactaccacattagttgcctgactaccgagcagattgcaagtgatgtgcagatgggcagccagcgctggtactgtccatcttgcctctgccgtgtctgcctgtgcgacacggacgatgaccagatcatcctgtgtgactgctgcgatcagggctatcatctctactgcctcagtcctccaagaagaaaggtgcccaaggggcattgggactgcgaaccctgcaaggagcggagggagaaggagaagaggatactgatgctccacaggaaggattacgatgaagacatcctgaagagtggcgagttccatggaccgaacttgctgcttaaggccgcgaaaaaggtgaagcgcgatgaggaggtgaaggtggctaagactaagagcaccagaaagtaagaggcatggagattgtgagcgagcggattttgtgttctctgccatgatcagctagcgccaagtttctgccctgggaggctcagctctgcccagctgaatgggacgggcggctgagggccgtagaaacctgtgctttctgaactgaatggttagagaacatgaattcgctagaattgctccagtctatttctttacaatcgtttctttcaacccggcagggtcatacttgacaaacttgccagcgcctgaacttgagaaggttgtgatcacccgtgatgcttttaaaccccgtgatgcttttaatggtttatgaaactggatcttggtagacttaattacccgtgatgcttttaatggtttatggaactgaatcttggtagaattaaagtatctgttgctgtgttgagaaatgttatggtttctagttcgttcttgcaggtgcaaaa

SEQ ID NO: 181080 - DNA, 645 bp, Zea mays
  Clone ID: MRT4577_96722C.1
ctccctcccaattcccacccccgtcaccccgtgctccaaaccctagcaagcagcaatagagcggaacccatgcaatcctaatcgtttcgctgcctaatcctctccctttctcatctcatgacctgtgcctcatcgccgccgccgccgccacgggctatgaagcgcgagctcgccttcgcgctccagtccctgtccgagatctcggcctcccccggccgcacgcgctccggccgccccatctcttcccttccgaacccattggcatcagcatctcccaagaggcgcaagagatccgcccccctcggcctcgcctccgcagccgatctcatctccccgcccacgccgcctatcgacgccgagccgcctaaccagcccctccgtgacatcatccaaccgctccatggatctaatcctcccaccgcctctgaccaccgatccgattccaatgccgatcaagagctcatcccacaaacgatgctggaagccccccaaccatcgcaccttgagactgcaatagggtgtgcaacagcaacagaggtctcggcagtgaaagtgatcgccaacccgaatctgcccgcatcagaaaatagtgcagcagaagactccgccatggaagtgatagcaaaaccgaaagtagacagagaa

SEQ ID NO: 181081 - DNA, 579 bp, Zea mays
  Clone ID: MRT4577_96723C.1
acccgatggacatgcctgtcgcatcccatatccactaccacccatcttggcaggcgacgattcgatccagcccttccaaccgagaggcagcgatggccacgaggaggagcagggccacccgtctcgaggcggatctgacggggaagaacgtgtatcgagcgcgccgacctcaactgaccgctcgacgatgcgcaggatatcaccggcgacacccgcattcgctcctccgtccccaccatccgcttgcttctctagaagggcgccaaggtcatcctggccaggcacctgggtcgttcagaatggtgtacccccaagaacagacttgaagcctctcgatccacgcttgtgtgacctgctaggggtacgtttccagatgcttgatgactgcctcggtcaagaacaagtgaactgtgctgacgctttgccacaacgctgagttctgttccgatagaatctacatggctgccggaagacgagaacaaccaatctgtgtgtgctcccaagctatcatctgtggctgaccttgatgccacggaagcgattgggacgatgcacagagctcatacttgagccgagaga

SEQ ID NO: 181082 - DNA, 665 bp, Zea mays
  Clone ID: MRT4577_96724C.1
ctcggccgggaaagtagccgaagagcgctctagcgtgcgctgcccgagacacatctaggctctgcgcactgcttgccgctgctgctcgcgacggcgggcgagcggacctacttgggtaaggaacggcggctgacgcacgtacgtgcttacgaatgggcgtaggcgatactccgcaaggtcgtagcaggtctacacagggccacaacggcatgggagattcaactggcaagctcgaggtactgcgcagtcgggatcggaccttgcgtactgcgagaggtaccattaaggggtacgatttgcatggctgccatatcaagactaccggaaagataggccaagaacactcttacctatgcttaaggcgactgcgaagggcgctcttcttgatgagtgaacaatggagaggcacgccggctcggcgacaacactcgagtatctgcgtccatgttggatgaggggacgtacctgattgaaaagtgcttgcagtgcacctagctgtgggctgcgtgggttgattgcaacaacctgctcatgctgcagaagcgcagggccgaacaccgccaagctgcacctgcggtgcgacatatacaactgagcttctgcagagttggcgactgatgctgcaagctgcctagattagtagtgctgtatgtctagtagatgtg

SEQ ID NO: 181083 - DNA, 276 bp, Zea mays
  Clone ID: MRT4577_96725C.1
cagtcacattgatgggatccagggccacatcacgagcacggcagcatgaaacaaatcaagtcgtcgctcacctcgaccaacacatctagcgatgacaactagtaggcatccgatgcaagcactggctttgtgttcaattcgacgggcctccagatcatcgaagccgagctcaggcatctcagcacagcagctcgaagacagcggtcaactgcagctgacgcatacctgatgtcgaccaatttcgtgtcgatgtgggctattgaacttcattgctcc

SEQ ID NO: 181084 - DNA, 415 bp, Zea mays
  Clone ID: MRT4577_96726C.1
aaaaaaaaggcggctgcatttttgggagacaggtaacttttacccgtcgccaaaacctaaaaagcttggttttggtttaaaaacccacccgcccgccccaaaaaggggggacctttcctgaactaaataagggggtccgtttcccgtttcccgggtggcaggcttttttatttttgcccctggtttttagtttagaaaacatgtccccccacaaacaaccttggccgggtttttaaagagggaaaaaacaaaaacgtcccgaacgtacgtacgtgttgttaccccgtcattttttcttgggtttggcccggggggttgcttgtcccttggggccagtcccgccagagcccccggggaagacgggccaaagggcgcagccgaaccccttggggggggggggatccatgtccggggc

SEQ ID NO: 181085 - DNA, 573 bp, Zea mays
  Clone ID: MRT4577_96727C.1
aacaagaacttttattttttatttttccctcttcgactgaagttcgacatgttcaccaccctcacccacttctttgcctgggtccccacccagtttcgtcgcttggtctttgccctccagtgtgataatggttgcgagttcgacaacgccactcactccttcctcacccatggcatccagttgcgtcgctcgtgcccctacacttctcccagaacggccgagccgaacgcatcattcgcagcaccaccaaacagaatgtgcttgaaaatgcattcatcatcccagctacctagaagtggccatcaacaggcttcatatatacagtttcaaaacatttagggcctgtttggttcgatgcataacttgcaacactttgcctaacttttctttctaaggttagttattcaattcaaacaactaaacttaggcaaagtttggcgcagttagccgcgaaccaaatagacccttagtcctgcaaaattgttgtgtgctgaggcatattttgtggatgccacgtgtttgctgttttacacgactgtatattttgcagacctcaaacatgcttatttcaat

SEQ ID NO: 181086 - DNA, 245 bp, Zea mays
  Clone ID: MRT4577_96728C.1
ccgttccgtattacctggtggagccacgcgttcgctgctcgcttgctaccgacgttttctccgtcttagacgcaccgtcgttgttgtccgggggggggtgcatgttcatcgggtttgactctttccccgactgtttcgcgatggtcgttctgattgtcatttaactggtgcacgctcttctttgtgtcgcaagccagtatacgccttcttattgtactgtatttttaaacgtgactataccggta

SEQ ID NO: 181087 - DNA, 1118 bp, Zea mays
  Clone ID: MRT4577_96729C.1
cagtagtggcgggaagctgtcagttcttcatggtagagatcgagaaagttttcttccccaaaagatcacctttgagacactgtatcgtggtctaatacaagcagatatgctgcggacctggagaaggcttaagagaactcttgatcggccgggcagcaaaatttggcgatgagttcaaactctaccacatgaagccttacaagaggtgaccattcatgattggggtgctgtcatgaacacacttgtcagttgtgaccaaggacaaaattgatttctcaaaaatgaaacacatcataccatcttgagctcaatctgtggcaagatagtggtggaggaactggagcagggtctctggtgatgagagccggaggtgacgagtgagacagcagctgggctcaacaaggggtcgcacaatgacaaaaagtgtgtccagatcactgacggtgtctgcagcctcgttaacaaaagagtgcgcgtgcatcaaggatgaggccctggtgctggaggtggcttcagtgttgctgttggtgccatcatgcattcatgcctgtgccccctccccttgatgcgaggcgggcactgtccctgcatgaagttcccaccagcaaccagacagatcaagaccgcaaccaccacgactactgctacctttgacatggtctctgttcaatctgccgtccacctcaaacggacttcccacaccacatctgcaattcccatactccaaaaccagccagtgccaggccatgcatgcaattgcagcctctcgacgctgacaagcacggccagagccgctggaaccacttccccgttggtaaattagaggtcaccaccacgttgtaaggtactacggtttttgtcttgatgccttggtggatgggtatgggctgaccgctgacgtggtgccaacaaaggcaacactgggaagtgatatttgtgaattagaggttccgtgaatggcactacaatttaggtcatccagatttttgctatagttggggagaggggaattagacattttttccttcatgttgtaatcatatgtttgtaaccttgttctgcaccttgctagaaaaacggtagttcaaggaaccaaaaaaaaaaaactgttcatgttc

SEQ ID NO: 181088 - DNA, 381 bp, Zea mays
  Clone ID: MRT4577_9672C.1
acaaaaccgtcgacatgcaagttttgattgaaatacttttggttgatgtctaggatacttagattttatttttggttagtcagatactcagatatcatacaaggctacaagatcgagtacacattctgtatactagcggtaaattggttgacctcatcgttcacaatgctgcttcatcacgtagcttcacctggagagtgaagaggagatgttgctgctttccatcgaacttcagcatctagatacaattatgtctcattttatcactgcatttacattttgtaaacttgttttgatctgcctgaaccatcactccccaatgttgtcactgacaaaattcttgtaccatattcagtttaccaataataagatcaacacttt

SEQ ID NO: 181089 - DNA, 278 bp, Zea mays
  unsure (1)..(278): unsure at all n locations
  Clone ID: MRT4577_96730C.1
ggggggatgcgcgggngacgttcatggcgcggcgatcgacggcgcggtgcggcggcaggctctgctccgccgatatgatgtaagcacacgcaggccgagcgcgcgtctcgccgagcccaattatgctctctagttagtccgggacacggcggcaggcactcgacatgaacaggcgggccgcgctctcgtgcctccgaccccgcgtggcccagcatgaccacctccgcgctctgctgtcgaagctccatgcaacgctgctctcgaacgcatgacgctgt

SEQ ID NO: 181090 - DNA, 558 bp, Zea mays
  Clone ID: MRT4577_96731C.1
aagctatctttttttttttttttttctagctcgacgcctttacctgtactaacctttgtggtgttttctttgtcatttcttcctacatactgaatatgatattgggaaaacccactttatacatgtgtgtctatctattgatgtaatacatcaataagacgacacacattattatggggggtttgaccaataatataagcatgggcataggaggaatggtggttttaaaccccacaggggttggggcgggaactgggcaactggtacaagctttttttttttttttacaagcccaattttttttttttttttttaaaaaaaaaaaaaagttgttttttttttttttgttcttctcaaacccttggggggttttcttggaaaacccgcccttttttttgccccacaaattttggggggctcccccccccaccaaattgggggtttccttgccaaattccacaaaaaaacaaaaaagaaaaagggggagggggacaaaccaataatcttggaaaaaaaaaaggccaaaaaagcacggagaacccacacagggtggttgtg

SEQ ID NO: 181091 - DNA, 298 bp, Zea mays
  Clone ID: MRT4577_96732C.1
atggatcccttgactagctacctaccttgcttttttactaatttaccgtcaatcaggggggtattgtaacccataaccaggggtgccagttttagcatttacctgattgaaccttcgaaatggaaaggaatactatattaggaaaaaagatgcttggtacaataattactaaaaaacacaaaaaacaattagattaataaaaaaccaataaaaacttgagaagctcaaagcatgaaaaaaaatgtaggcatgattgggggccgggcctttttagaggaccaatttttcttacccttaa

SEQ ID NO: 181092 - DNA, 286 bp, Zea mays
  Clone ID: MRT4577_96733C.1
cacccgcatatgaattaatagaaggggttattcaactaatggctgtacccctaagaaagaccgtgaaaattcactcaagaaaggctgactcaagaaaacctttggcagcgcattatcatagattgtctacctaacaccagtctgttcagtccactggctaggcctctgcatccataacttcaactcgggctacgactgtgaaaaaatctgcaaaaagcacgatcggtatcactggtttccctacaattagccccaccaaatccaccctgctgtcagctttctgcag

SEQ ID NO: 181093 - DNA, 114 bp, Zea mays
  Clone ID: MRT4577_96734C.1
tcggtcatatatcagtcaatggcaggcttcggtctgataccaccctagagtcgctttctaccatccgttgccaccttgaggtggaagcttacctgccgggggccgacatgattt

SEQ ID NO: 181094 - DNA, 1640 bp, Zea mays
  Clone ID: MRT4577_96735C.1
atcatccattgggtacctcgaggccggccgggattgtgtgcggcgccgcctgggccggccacgagtcgagtagccattgcccattgccattccttccttcctccacagagaaatccgatccgcggagatttgacccaaccagatcatatcacacacgtaatcccatcccattccgcccgcaacagcagcaccaccggtgggaagaagaagatgaagaaggccacttcgctctccgagctgggcttcgacgccggcgacgcgtcgtcgggcttcttccgccctgtgtccggcgactcgtcgacgccgacgtcgcagcaccaccggcggaggctgaccaaggtgtcggtcatcggcgcgggcaacgtggggatggccatcgcgcagaccatcctcacgcgcgacctggccgacgagatcgcgctggtggacgcggtcccggacaagctccgcggggagatgctggacctgcagcacgcggcggcgttcctgccgcgcacgcgcctcgtgtccggcaccgacatgtccgtgaccaggggctcggacctggtcatcgtgacggccggggcgcggcagatccagggcgagacgaggctcgacctgctccagcggaacgtggcgctgttccgcaagatcgtgccgccgctggcggagcagtcccacgacgcgctgctgctcgtcgtgtccaaccccgtgggacgtgctcacctacgtcgcctggaagctttcgggcttcccggccagccgcgtcatcggatccggcaccaacctcgactcgtccaggttcaggttccttctcgccgagcacctcgacgtcaacgcccaggacgtacaggcgtacatggtcggcgagcacggcgacagctcggtggcggtgtggtcgagcgtgagcgtggcggggatgccggtgctcaagtcgctgcaggagagccaccgctgcttcgacgaggaggcgctggagggcatccgccgcgccgtcgtcgacagcgcctacgaggtcatcagcctcaagggctacacctcctgggccatcggctactccgtcgccagcctcgccgcgtcgctgctccgggaccagcgccgcatccacccggtctccgtcctcgccagggggttccacggcatccccgacgggaacgacgtcttcctcagcctgcccgccaggctcggccgcgccggcgtccagggcgtcgccgagatggagctcaccgaggaggaggccaaacgactgcgccgctccgccaagaccatctgggagaactgccagctcctcggcctctgatgatcacatcaccgtctctcttcattaattaattattgcatcaatttccacaacctagcagcagcatccggtacccgtgttcaataaaaacaaaccgctacaatgtgtgctttctagctgcattaagctgcttactacgagtatttgggctgtggctttctttttcatgtatctcaccaaatcgttattgttgtgagagctatactacacggtggtatcaagagtatcacaatgcccaacaggcgatggattgagctttcctaattttttcatgataaattaagttctactccctccgtccacataaatttgtctttctaaattttttcgtaagtcaaaatatttaaactttgatggggca

SEQ ID NO: 181095 - DNA, 273 bp, Zea mays
  Clone ID: MRT4577_96736C.1
gttggtacttttgtttttttgtacattttttactttttgtaaacaagtttaagtcaacatttttgactgtaattcttgcttaaaaggagaaagaggcaaggcatttggtgaccgttactatgcacgacaggcggtttatgatacttaggaccacccggagaagaatagagacatagggcacgtggacttgaaacagctccttgccaaacgcaaaactgggttgccaaaaatggttgtaccccaaaatgctaggggacccagaaccccctaagg

SEQ ID NO: 181096 - DNA, 252 bp, Zea mays
  Clone ID: MRT4577_96737C.1
gccatgacacgtcccgagagcatctcctgatcggagcccaggacccatggccgtgggcaccggcgcgacgtctatgtgcgtggcgcaggggctcgggaagcccctatgcgccggcagctacacgacgtcgctccggggcgtcgcgctcgcgccccgtcgttcggcggcccggatggccgtcgtccgggcgtcgtccgcgcatcacgagcagcacccggccaatgagtgggcggacgcggcggacgtggcagc

SEQ ID NO: 181097 - DNA, 1535 bp, Zea mays
  Clone ID: MRT4577_96738C.1
tgacaagcctagccgcccacgcgaaggccggtggcggatgcctttataaggaacgtgtgacgacgggcgaggcagacctctgcactctgcaaacctccccgtccgctcggcccggtcaaacaagtcaggtagccgcgtcgtcctccggtcagagctcaagaagcccaccgcgatcgacgcggcgcaggcgagacagcatgggtgggggcacggcggcagagcccccggcgtggatggccgccgccgcgcgcaggtggctggagaacgccggcgccacggtggaggacgccccgggccgggccttcaacgcgctgcccctctccggcgtgcgcgtgtccctcgccgagcgaggccgcgcgctctgctccctccgcgtgccgccccaactcacagacgcggaggggaactggcacacgggcgccatcgcggcggcggcggacgacgtgtgcgccgcggccatcatgtccgtcgagggcatcatcaaggtctccgtccactacgacatctcctacttcacaccggccaagctccatgaggaagtggagatggacgggcgggtggtcgagcagaaagggcggatgacagcggtgacggtggagatccggaagaaggagtccggcgagctggtggccatcgggagacagtggatgacggcctccaggcccaaaataaagagaatgacacaatgttcaaaggatacaatcacacttgccttttttgttcataggatgggcaagtattttgtttctcatctctcttcaactgttgtcgccaagctaatattgagctttggtttgctacaacaattagcatccagttatatatacttctttgaagtcgaacacgtcacaagggaagagaagttcatgcaagcatatgacttgattgaattatttaggcccgagacggtatctaccaagacaaggctgctatcacttgaactgctccagggattgctaaagggagtcagcaatgtgttcataaaaaaatttcacttcattgattcagtcaaagcatatctttcgtatgctcttctgcgagcatctgtctcttcatctccagttgtttttcagtatgcttgtggtatgttttcagttctgttgctccggtttggagagagtctgaaggtgggtgttggcctgatgatttttcagcaactgggaggaattaatgtcttaggtttctatacaagctatattttttcctctgcaggattttctggaaaacttgggaccaccttgattggcgttattcagatgaacataacatataccgcttcagatggtgggaatattactttaagtgatgggaaaaagtttgcaaagaggagaggcaatgatggaatcccttaccaacagcttgagatgggaggtcaggcaccgaactcttcaggtttagacaacactgcaaccaccacagacgactgggaagacaactgggatgatgacttggatgatgaagcagcagcaaatggccttccgttgagatcacagacgaatagcaaagatggctggaacgtggattgggatgactaa

SEQ ID NO: 181098 - DNA, 294 bp, Zea mays
  Clone ID: MRT4577_96739C.1
atgtatccatctcactaagacccgaataatattagttatacaaacatcttaccaaaaaaaaatacaactatctcctcttcaaccatattacactatttataaaaacaaaacattattactcttacctaaatacataacccttactaatatcaaacaaaggagcacatactctattaattattaaaatactactcctccgaccaccctgttaatacagttacttccttctctcttcgtctcctcatttaatttacattcacatcacattatacatgcccatccatcccatattat

SEQ ID NO: 181099 - DNA, 1275 bp, Zea mays
  Clone ID: MRT4577_96740C.1
tgaaaaccatgcaaccaaaacacatcatcatcctaatacgattctgcatgcggacaaactctccataactgatacaaacccatcattaagccaataactatacacacagttccacaaaaatgttaatttgttaatgtccaactggttaatgtgaagtctgatcatgatcgtattcacctgagtggaagcactatgttcagaggttgcatgtgctttgaacccctcatttctcggcacaccctatctagcaaaccgagaaaatccctcatgatgacaaatatatggaggaggttgcactcgttcttgccaacctctccatgataatactctgtgagttctctgacctgctgtaggacctcagcttcgtcaaccttgagttccagcatggtattctctgcatgagtttggaatgatctcatgcactgcaggaaattcttgttcctgtcattgcagggtaaggtccttcccgacaagccttatcagtcgagccagtccacgtgatagattcgagattgaacttttcaaggtatctaaatctatacttgctaccttcttgacattgccaagctcattacttaactctgaaacaaattctgttcccatttccgaacacccttctctttctgccagtgtggcttgacaagatccagaagttccactgggcttatctgaagcctttgatccctgtgatcgctccatctcttggacgacaaagtgcaggagggttgtcttcccgtcagctccacgtatatctgacagcttcagcagtgcgtcaagtctgaaagcatttgcccctcctcttatagttccaacattcattctgtttccagtcttgagtaccgcttcaagtaatcttagaaacaatttgctcgacctgagcttgctgcaggctcctctaatcagtgcaaaggacatcctgagatgggcgacttcgtcgtcaaaagtttccttgtatagcattgcctcaattcttggaaatgacatcggtattgtcagcagcaccttgacaaagttctctgctggatccaacgtgttggtactcctcgccataatcaagtagctttttctcctcttcctcggacggtctcgtcttgaccagcgcttccagttgttgggtggacagtccagcaccttccgttatagagttgcagacttgttcagtgctagcgtttaaggtcttcaagagtatggtagtattttgaagcttgtggtgctcgatgacatgtttgctggtaactagaatcttgctcttggggtcctcgtttttcccggccg

SEQ ID NO: 181100 - DNA, 480 bp, Zea mays
  Clone ID: MRT4577_96741C.1
gcggccgggccgacggacgcatacgatcacggtacagtagctggcgtatctaaagataccatgcgacaatacacttagctcgaggctaacacctacggcctaccatcatcaaaacattcttgtgcattcaaccaattgtgtacatcgaaccgaggtgcttattatgagacacagctatctcgattctagcggctagctactgcatactctcagaacaaacactttattgcatttaacccatcgagctgactgaacctcgatgcttattcggagcttgcagactgctaccatctacacccgattgatgcagtgcgccgagcttccttgttgccactaaacctactgatgattttctaccagcagtttcgacggttacctaccagccctgttacaactacaagaagtgaagccctttgtccaacttgatttgacaaagcctgcatcctaccaacaacatctgatcatatggaggtgccctcc

SEQ ID NO: 181101 - DNA, 812 bp, Zea mays
  Clone ID: MRT4577_96742C.1
cattgggtacctcgaggccggccgggcagcttccattaggccccgtcgtcatgcatgttagcagcaatcaagccctagaaacctcgagctcgtcatagaaaccaagaaagaaccatccaagccatggaggatgatgaggagaagccatcacaaaggatcaccaacaagcaggaggaagacgaagaggatgacttggtgttcccgggcttccggttccatccaaccgacctggagctcgtggggttctatctgaagaggaaagtagagaagaagggtttcagaattgacatcatcagggagatcgacatctacaagcatgacccctgggatcttccaaatgaagcacggcatgtggtgcaaggcgcaggaggagacaaggacgactggtacttcttctgcctgcgtggccgcaagtaccggaacagcatccggcccaaccgcgtcaccggctccggcttctggaaggccaccggcatcgacaagcccatacacgacggtggtgccggcgagcgcgtcgtcgggctcaagaagtccctcgtctactaccgcggcagcgccggcaggggcaccaagacggactggatgatgcacgagttccgactcccctccgcagagttggtcgagctccatgatgctgggatctggacgatctgccgcatcttcaagaagaacacgtcgtacacccggaggtgccagcagcagaagcaggaacacggcagcaagcgaagccaccaccagcagcaggaggagcaggagttgcagtactactacgactactaccgctaccaccacaccatcagcaccgttacttc

SEQ ID NO: 181102 - DNA, 454 bp, Zea mays
  unsure (1)..(454): unsure at all n locations
  Clone ID: MRT4577_96743C.1
agcagtggtaacaacgcagagtacttttttttttttttttttttttttttttttgctttttttttttttttttttttttttttttttttttttttnaaagaaacttgnactggaggccacacaaacatatataaaaagagcctacagtacagtataaaaaaagaaggaggcgggaggctgttcctggcaaaacaggggggtttatttaattttttcccgggcttaataactcgggcagggcgcgggacgtacgggtacgttcgggaggcttataagctggggcggggtaacttagctgatcttgtggcagncgggggacatgctgggggggaatccgccggggaccccccacttgccggggatgggggggacggggcccatgttgacccttttgacgctggggggcccgggtcctttgggttggtcccccggcttaggggggatttttggtgtt

SEQ ID NO: 181103 - DNA, 270 bp, Zea mays
  Clone ID: MRT4577_96744C.1
aaagccaagggtggactagcagccggctagctagggcggtagcgggcgcacatcatgtcggaggagaagcaccaccacttcttcaagcaccacaagaaggacgaggagcaccccggcagcgagtatgggtactccgagaccgccgtgacggccaccggagagggcgagtacgacaggtacaagaaggaggtgaaggagtacaagcacaggcagtacctcggtaaagcccgctccattatagacggagccttaacactgtacgagaagtac

SEQ ID NO: 181104 - DNA, 221 bp, Zea mays
  Clone ID: MRT4577_96745C.1
catcgcgaacatatcgttcttttttgtctccccaaaacttacattagacagaaagttctagagtggtggcacgtaccatctgtgcataaagattaaggtaaccaactgccttagcattgcccttatagcaagataaaaacctatgtaggacccgatcaaactgacatttcaaggacacagatgggacctcacaccttaggaggtgccaagacctgatggcg

SEQ ID NO: 181105 - DNA, 351 bp, Zea mays
  Clone ID: MRT4577_96746C.1
gtcagttttactgctaaagacacggcggcaggggaaggaattatggtattaagaaaacaaaaggaggcctgtgactcatagccgcagtacaagcgcctagaccacgaatcccacgggcttgcgctaatattattttggttacagccttcggattcctatacagatgttgcagtattgctagccgtaactacggaatcggcggcggatccctatctattcttaaggtggtggccaacaacaccaatctcgtaagagaaccacagggttgacttgagtatgctttgaattcctctggtagagcaagaccaacattaatcccttagctatgataactgctgattgacgtacttg

SEQ ID NO: 181106 - DNA, 613 bp, Zea mays
  Clone ID: MRT4577_96747C.1
gcacgagcggcgacccctgcggccgggccggggcgtcggcgtcgtcctccgaggaggccgagcgcgccgccatcgccgagaggggcttcttcctccacccgtccccgaggggcgccgagcccccgcgcctgctcccgctcttccccgtcgtctcgccccggatggccgcctccgcggcggcgccgtcgtccgagtgaagatcccccgacgcgggcgcgcgcctgctctaccgtagccgccgccgccgccaccaccaccatcatcagtactactactactaacaaccgtcgccgtgcctaccgtccgtccttgtttcgtgaggtgcttgctttgctgttcttcttgatcgacgccgctgtaatttttgcccccttcttgcttttcttggaacgggcgaggaagggagttctctctcttttttttctttgcttcgtttcggagcggcgacacgcgagcgatctgacgatccaggctcgctcggttcctgatcgctcgcgtcgcgggagcctccgggcgggatgaaatgatggatggatggatgataattagacagttaataattaatgaagcctaatcttaagattgaaaaaaaaaaaaaaaaaagcggccccta

SEQ ID NO: 181107 - DNA, 210 bp, Zea mays
  Clone ID: MRT4577_96748C.1
cctcttttttctaattctaattcctttcttctcctttttctatttttgtttctttttgtttctttttctttggagaccaaaaatattttctaagtgatcttgagtgagaaacatagtctatgtgaggtgctctaattatttcaagtgtatgcacatgagaaggggttctaagggtcaggttaagggagaaaggtcaaactagggggggga

SEQ ID NO: 181108 - DNA, 655 bp, Zea mays
  Clone ID: MRT4577_96749C.1
gctaaccaccgcagcggctgcggcctgcgagtgcgacaacctccgcggaggagttggagccggcggcggggatatttgcttgcccggctggggttgcggcggaaggagggagagacaaccggcgtcggcgtcgtcctccgaggaggccgagcgcgccgccatcgccgagaggggcttgttcctccacccgtccccgaggggcgccgagcccccgcgcctgctcccgctcttccccgtcgtctcgccccggatggccgcctccgcggcggcgccgtcgtccgagtgaagatcccccgtcgcgggcgcgcgcctgctctaccgtagccgccgccgccgccgccaccaccatcagtactactactactacaacaaccgtcgccgtcgccgtaccgtccgtccttgtttcgtgaggtgcttgctttgctgttctccttgatcgacgccgctgtaatttttgcccccttcttgcttttcttggaacgggcgaggaagggagttctctctctctgtttttttttttttttgcttcgtttcggagtggcgacacgcgagcgatctgacgatccaggctcgctcgcgggagcctccgggcgggatgaaatgatggatggatggatgaattagatataattaatgaagcctaatcttaagattt

SEQ ID NO: 181109 - DNA, 403 bp, Zea mays
  Clone ID: MRT4577_9674C.1
gattcacaagaagtaaacagcttagcatggtgagggatgacatccaatggaaacgtaaaatgtacacgaaagctctaatagaaaagataagcaacttgtaccagatacgcacaacaaccaatatgtagatgtacaacgtgaaaattcttatgtcagaacaatcagaagtacaaatatcaaggccttctgattctggccgttctagtttcattacaagagaagtgttcacataatgtgattcatagacagcttctgcaatttctttaatcctggcaagttttcagttagcaacagtaagtccatatttggttatttttatttttatgttattttatttaattatttttattttttttttttatttactttatgtttattttttttttatttttttttttttttt

SEQ ID NO: 181110 - DNA, 763 bp, Zea mays
  Clone ID: MRT4577_96750C.1
agagcttcccgggatcccaccttcaattgagcgcagctgagcaaaagccttcaccggtcggcaagaacaccaatggctgacgagtcatggagggtgccaacgccagtgcaagaactggctgccactgccaccttggaggagccgccaagccagtacgtgctgcaggagaaggaccggcccggaagcccgctggtcgctgatgacatgccagagcccctccctatcatcaacctcagccggctatcggaagacgctaccgaagctgccaagctcgagtccgcactgcaaagctggggtctcgtcctggttaccaaccatgggatagaaacgtcgctgatggacggtgtgatggatgcgtcaagggagttctttcgccaaccgctcgaggagaaacagaaatacagcaacctgatagacggcaaacgtttccaggtcgaagggtatgggaacgaccgtgtagcaacggagcgtcagatcctgaactggaacgatcggctgcatctcaaggtggcgccagaagatgagagaaactacactcactggcccaaacaccctgaatctttcagggacgttctgcacgagtacgcactggaaaccaagagagtaagagacggcatcttccgagcaacggccaagatcctggagctggacgaggaccacttcgtcagcctgatcagcgacagggctgctgcgtttgccaggttcaactactaccctccctgtccgaggccagacctcgtcaatggagtccagccgcactccg

SEQ ID NO: 181111 - DNA, 364 bp, Zea mays
  Clone ID: MRT4577_96751C.1
gacggcacgcgtccgagccaatcgactgcgtacctcatttttcttcgatcatgtagcttttgctcagagcagtgtcagggcgcataagacctgcttctgtcgattttttctctgatcatttgccgctcaaaccattcatcaagcttttactcgtcagatagattgttcaagtcaccggagcacggcatggacttcagccctcaaagaaagagcggcgaacgcgatcccgtcagcttcgtcgaacacgatgacagtgatgacgacttcggagctgaatccaccgcctctaataagccgtctgcgcattcgcacgacaggaccaaatccaagcccaagacgagccatggcagttcaacccacgcga

SEQ ID NO: 181112 - DNA, 231 bp, Zea mays
  unsure (1)..(231): unsure at all n locations
  Clone ID: MRT4577_96752C.1
taccctccctcaagcagtcgttgggcgtgatctggtgaccaagcccgatggctcccgggaagagatctacacgggcctcacagaattccgaagaccctcgtactgaatacgagaaaatgagggctatgaatatgatgaagaacaatcaattgtttcaacggctatgcttttttttttaaaaacaangancaccggggggggggcgaacaacaaacaaggcagnccncagga

SEQ ID NO: 181113 - DNA, 329 bp, Zea mays
  Clone ID: MRT4577_96753C.1
cccacttgttttctagggcactgatactcacatggtcgctgctattgtgggggacgtgtttggcatcaacgactaccacggtcttcaggactaaggtgctctaatttcacgcggttagtgacatgctgcgcagggtactgccaactgactgcagtgccaacgggataatactgaccaggcccaggtcatgcaccattgtgatggtctactgaacccagaatgacatcatgcgcacaaaactacgagctagcgtcgtctgagtgtataggaagcggacttgcacttacgaacaagtacggaaacttgaaacgacaatccactctccgctc

SEQ ID NO: 181114 - DNA, 290 bp, Zea mays
  Clone ID: MRT4577_96754C.1
acatggagaagcgcaggagccgtgagagcctcaacgtggacgtggtcaagtacgagagtggccctgacggaggggaggaagcctagccgcccgtgactctcacactgtctcctgcatgacgggtggcgcctcccgtcgcttcccttctctctccagtgctgcccgctgtgtctagcagcctctaggatcttgtcagagctgcacttctctgtgaactggccattcctttcggtgctgctgtcctttttgggggggttctgatttctgtatacatgtagctttgccagata

SEQ ID NO: 181115 - DNA, 655 bp, Zea mays
  unsure (1)..(655): unsure at all n locations
  Clone ID: MRT4577_96755C.1
ggccgcttttttttttttttttttatccatagctgatgcttattatgcctggcgaaatggtgcttgaacagatgttctcatggaactcacgttatggctagtgcaataccttaagtacaggcaagttcataaaagaaccacatacgacactttatatgtactaaggtgctattagtatttgaacacaacgaccgccaatccgggcacacataggttagctacagtttcagaagcttctaaaagttcatgttcagacgagcgagatccgagtcgaattgctcctaatccaaggatgaggagccagtgtcagggctctctactgaccgtgccttctcgggtgatatgcggtttgcatggagccgataagttgctggacccttgctgtgccgataacctggaactggtggacggtgccgcccttcttcctgccgacgatggccacgtggcagttggatccggacagtttttcgccctgcagagcctccttcatggtggagagagtgtctttgtcgagctgatccggcgtgaatgtcggagaaccctgtaacctgtgctccaggaacgtcttancggctttagagctggagccgatggctaacgcgtggtactcgaagtagctgccgctggggcacatgtagtacaggtgggctcctga

SEQ ID NO: 181116 - DNA, 318 bp, Zea mays
  Clone ID: MRT4577_96756C.1
cagcgtctgctccacctccaatacgggaggctgtttattctcgggcagaaaacgccaaacggctcaaaacctccaaaaaacaaacccactcttcaacaaaagagcccggcacaccgtctgcgtgactacagaaagcaccccaaaacactctagtcatcagatcaggacccctaccacatgcaccctgacccaaggcaaaaacccccgccttacatgaatccggcgggcagctcgagccccaacccaaaaatcctcagccagttagagcccttcaatggcttgttaaataccccaaactaccccctcctgaagagaaaa

SEQ ID NO: 181117 - DNA, 601 bp, Zea mays
  unsure (1)..(601): unsure at all n locations
  Clone ID: MRT4577_96757C.1
attacaaanaggggggaaaaaaaaaaaaaaaattaaaaaaaaaaaaaaaaaaaaacaaaaaagaaaaaaaaaaaaaaaaaaaaaaaaaaaaaaaaaaaaaaaaaaaagggggcctctctcccctcttttaaaccgccaccccgagggcccgccgcctcgtcggaaaaaccttcttttaaagttcaacgcccgccccgcaagggcaacacgccaacccccgagacccgacgggggcttccccttccccccgcgggggggaaattcggggggaaagaggttctccccttcccgccgggggttgttgggggcaaagcccccccaaagggaccggaaccaaaggggggaaaacccgcgggaggggtcccctatgggggccaacgaaatccccttcccggggaagggccggccccgaaactaaatcacctatgggctcgcccggctccaggaaaatgcaacagatgactttgtcttcagggccatggaaagggcgatcaacaagacagttgccatcggggagcttcttaaaagaaggattgcgggcccccctcaaaaaaccccctatggaatccctggatataacccaacctttgggagcccttgg

SEQ ID NO: 181118 - DNA, 363 bp, Zea mays
  Clone ID: MRT4577_96758C.1
gacaaatgtggccagtgccttaccatatataatgtcacatatatgtgcctcgctcagccactcacacacgacgccacagtaatgtcccacttatttactacactcggggtcttgctataaaaatgcgaggttgttgactatacttaacagcttcctctccttctgtgattcctagccaacaacacaagacttacactttttcatacggtcctgagctactccatctttgcctgctagttacactaatgcagtcgtctgtgggcatttagaaacactaccaggatttgttgcaggtactacatatcttatcaccttttcaggtgccacaccacagtgatacatgagcttttagactgaccggtt

SEQ ID NO: 181119 - DNA, 241 bp, Zea mays
  Clone ID: MRT4577_96759C.1
agtctcgctgtccggtggccgccgcctcgccgccgccctgtgcaccccacgcaaaccgccccaacgtgtcgtggtggtgcgacccgcaagccggtgctgagcccacctcggcgtgcgccgccgttgagggcgccggtggtgcgcacgtgcgtcccaggtgcaagcgccgcaaggtcgccgtcgttgtcgggtgctgcggcgcggggtgtcagggcatgcacaacagtccgggcgcgcgcac

SEQ ID NO: 181120 - DNA, 264 bp, Zea mays
  unsure (1)..(264): unsure at all n locations
  Clone ID: MRT4577_9675C.1
ggggcggcgtataaataatctgggggtgcgaccccccgggcaacttcaactgccagcgcccgttcctcaccctctactcgtctgccaattatcagcacacagcccggctgcattcatttttcttacacacacatctacatttttgtgggttgttggggggttctatcacntactgcttgtgctctctcaccataataactattatttttctccttttctatccttttttacactcttactctcatatattaacttatcctcttc

SEQ ID NO: 181121 - DNA, 160 bp, Zea mays
  Clone ID: MRT4577_96760C.1
cggacgcgtggggcacaagcatacgtctctaccatctgaaatccatcccataaatacacaaggccagtgtacaatgtgatactaggtgctacgtgcctttctttttttaatctgtgctgcactcttgcctgtatgggctgttttgttgttgggttccggt

SEQ ID NO: 181122 - DNA, 301 bp, Zea mays
  Clone ID: MRT4577_96761C.1
attacacagacgtcatctatccttttggcccctgttaccttctttacagaatgtttcagaagtactcttacatttttccaatctgctggtctgaatgtaaaccaagtccttacaaggtgccttttcgctggactgtgtttacatgcataccaccagatgacttacatgactttggcgatggtgtctcctatcactcattctgtgggcaactgggttaaacatcatatcgtcattgtaacatcacagctgctcttaaagacaccacgttctactatcaactctctacgttctgcgattgaac

SEQ ID NO: 181123 - DNA, 540 bp, Zea mays
  unsure (1)..(540): unsure at all n locations
  Clone ID: MRT4577_96762C.1
tctccgcgtccgcggccgcgtgggcggacgcgtggngaaaaaaaaaaaaaaaaaaaaaagaaaaaaaaaagacaaaaaaagaaaaaaaaaaaaaaaaaaaaaaaaaaaaaaaaaaaaaaaaaaaaaaaaggggggcctttttaaaaggacccaagtttataaacccttacttggggggccgttttttttgtttcgggtcccctaattttaatttcggggcccgtgtttttcaccggggggaccggaaaaaaccttggggtgccccactttaatccttttgaagccgttccccttttggccggctcccgttttacccacttggcccgaaccgccccctcttccaaacgggtggtaaccctgaatggcaaaggggaccccccttgtagcggggcattaaccccggggggtgtgggggttccccttagagggacctttacactggccggggccttagggccccctccttggggtcctttcccttcttttttccccaagttcccgggtttttcccgttaagttttaaattgggggctcctttta

SEQ ID NO: 181124 - DNA, 192 bp, Zea mays
  Clone ID: MRT4577_96763C.1
ttttggttttttttttttttttttttttttttttcgccccagcagcgaaggattttctgaacgggctactaaatccgaataggggctcaatcaaaggtcacgagtttccccagggccccatgaaacagaattgaaactacgtaaacgtttattcggggcatttaaggagtcttatttccccttaagccgaat

SEQ ID NO: 181125 - DNA, 459 bp, Zea mays
  Clone ID: MRT4577_96764C.1
ttcgaatcgaaattctagggcggactctatccttgaaagacaaccattggcgccgaataagaagcaacagtccaccttcatatagagctgggtgcacaaaatataaacagcattgtgcctcgtccaacaatcgatttacaaagttgcttgatctaaatccaagcgctttgaaggccccccatacaactccatatatctacaaccctgacccctgcaccgccgatttttggaaccatatgcttggccattggtaaatcaacatcgacgccctactgaatgcccctttgcctcaggacgctcttgaacttgatttctttaacaaacacacaccctctatttcaatgatttgccagaagccagttatattttacaccataactggctgcccaaccaatggaaatgccatactggccacccattatgcctccagagatgattttcccctctctatatctgctg

SEQ ID NO: 181126 - DNA, 417 bp, Zea mays
  Clone ID: MRT4577_96765C.1
gggactccctcaccccaggagggaacaaagggaaatacggacctcacaaatggggctaatacattatctcggagctccaggccttacggggggggggggggaaccagattgggagcccgcgggggaaaaactttgggggggcggggggggccgccccggttttggccccccccaacagaagaaacgggggggcccttctaaactacgggggcgtcctggatatgccatccggctgaactggacgggggggaaccaagctttttttttcacgggcacgggtggggcgttacctttagccccgccggggaaaaaaacgggaatggtgcttgggcacgcgtgggtccgggccggaacatagggggggcccttttggggaacggcggggccccggggggagggggggcgaggccggggggg

SEQ ID NO: 181127 - DNA, 3333 bp, Zea mays
  Clone ID: MRT4577_96766C.1
aattcggcacgaggaaactatctgaaaatattgctctagaagagatggggagtatctgcaacgctggggttggcgatctgacaccaaaacacgagtcaagcacacttggtggccaatggcaaggtagtgatacagttttcatgcggtctaatgagcatcacaatactgagaattgtaggaagtgggacatgactgggcttgatgcagtatcgctgaaattggtggagggtgataaagcatcaagaaactggtggcggaagttggagcttgtccgtgtgctcttgtctgaatatgttcaagatcagagtcacttggaggctcttacatattctgctatatatctaaagtggatatatactggtcaaataccatgctttgaggatggtggtcaccatcgacccaataaacatgctgagatatctaggcaaatttttggtgaaattgaaaggatatactatggaaaaaacacatcgtctcaggatttgcttgtgatacgcaagattcatccttgtttaccttcatttaaatcagaatttactgcctccgttcctctaacacgaattcgtgatattgctcatcgtaatgacataccacatgatctcaagcaagaaatcaagcatactataccaaacaagcttcaccggaatgctggccctgaggatcttattgctactgaagccatgcttgctaggattactaagactcctggcgtaggcaatgaagcttttgttagaacaattccagatattttatagtgaactaaaatatttttttattgtttgtagcctactggaacaactgtgttgtggggggggatcttagaatgagtctggcttagaacccctctgatggcggggtgaaaaccaaaaagaatttagaccaactggaagatgcaaaagatttggatgaaaatggcggcgttcacgttttgttgaagaccttgctgtcattatcttatctaagatcaattctaatgaagggtctggaaagtggccttagaaatgatgcgccagatagtgctattgcaatgcgacaaaagcggcgtctttgtgaaattgggcttgaggattattcgtttgtattgttaagtagatacatcaatgctcttgaagctttaggtggatcagcttcacttgcagagggtcttcctacaaatacaagtctatgggatgatgcccttgatgcccttatcattggcataaatcaagtttgcttttcaggttggaaaccaaatgagtgttctgcaatagtgaatgagcttctttcttggaagcagaaaggtctatctgaatttgaaggcaatgaggatggaaagtatatttgggcactgagactcaaagccactcttgatagaacaggaagactaacagaagaatactctgaagcacttctttcaatattccctgaaaaagtcaaggttcttgggaaagcccttggaatacccgagaacagtgtcagaacatacactgaggctgaaattcgtgctagtgttatttttcaggtctcgaaactttgcactgtacttttaaaagcaactcgagcagttcttgggtcgtctgtgtgggatgttcttgttcctggagtggcccatggagccttgatacaggttgaaagaatagctcctggatcattgccgtcatccatgaaagaacctgtcgtgctagttgtaaacaaggcagatggagatgaagaggtcaaagctgctggggataacatagtgggcgttgttcttctacaagaattacctcacctatcacatcttggtgttagagctcgtcaagagaaagttgtatttgtaacttgtgaagacgatgacacgattaaaaacatgaggttacttgagggaaaacatgtcaggttgggtgcatcatccaataatgttgatctttcagttgtatcaaacaaagatgactgtgctgccatgtcttcagagccatccgctggaggagatctatttgcacagcaattctcactattgactacagacaagaagttagaattgtctgagcaaaagagctatacttccgtagcaaatggtatgtctggtgtgctcgagctttcagaggcatcgattgaatcatctggtgcaaaagctgctgcatgtggaactctttcggttctttcctcaatgtcaaataaagtttacaatgaccaaggaactccagcagcattcagagttcctgcaggtgctgtgattccttttggatccatggaggacgccttgaagaaaagtggatcaatcaaatcctacactaatcttctagagaggatcgaaacagctcaaattgaaaatggtgaacttgatagcctatcctcgaagcttcaagcaactgtttcacttctttctccatcggaagaaatcattgaatctttgaagaaaacatttgatcagaatgttcgactaattgtgagatctactgctaatgtggaggatttggctggaatgtctgctgctggactctatgaatcaattcctaatgtcagtctctctgaccctagatcctttggagctgcggttggacaggtttgggcatcattatacacaaggagagcaatccttagccgtcgagcagccggtgtacctcagagagacgcaaagatggcggttctcgtgcaggaaatgctgcagccagatctctcttttgtgcttcatacaattagcccagttgaccatgatcccaaattagtagaggctgaggttgcccctggtcttggagaaaccctcgcttctggtacccgtggcactccatggagactctcatgtcacaagcttgatggcaaagtcacaactctagcttttgcgaatttcagtgaagagcttatggtgctcaactctggccctaccgatggtgaaatgagtcgtaggaccgtagactacagcaagaagccgttatctgttgatgcaacctttagggagcagtttggtcagcgccttgccgccattggacagtatctggaacagaagtttggaagtgcccaagatgtggaaggttgcctggttggccccgatatatttatagttcagagcaggccacaaccacaataaacaaaaagttttgtgtggttacctggctagctgaataaaaatggatactggctgaagaaatatatggacttcgtagcacgcgtaggagtgatcgagtcttttttaatatgctatctcaggtaaaataataatttattggcacaggtttagccattcactaacttgtatcaattttgtgaactaaagaacttactattacatgtgggagccacatgccattctatttcgatggtacctattttttcgactgtttgaaaatctatatgacgtataggcctgtttgtttt

SEQ ID NO: 181128 - DNA, 1443 bp, Zea mays
  Clone ID: MRT4577_96767C.1
gttctgtgtttatgccgtcagtgcaggcggaggtgtagcagattaaagtacgaaatgtaaaaggaatactaaaaataaagagctgtgttggttgaggcacctcgctcttagggctgaggacgagtggcttgagatctggtggtgcaaagcttgcaacaatatgacaattgatcaataacaattaattcatatcttctttttggggatttgtggcctgcagaacttatagattctaacagatgtatacaaacctacagtacggatgctaggccaaggagttagtatctatccacatgttagaatatttcgtaactgtagtaacttcaatattatatagattaatcatgaacttatagttgtattaaacaaataagctctgtatgcttattgttgtagagctcggtttattgtgcaacatgccgatcctgcagcagctgcacctggaggaggagctcctgcgccgcacatcggacaactggtgtgtcatcaacgatggcatggcccctgctaccattctcacgggactgcattagagtctcggagcttgtcgacatacagccggtcctctgggaccaagtgccgattgtgaggaggttcagtggaggtggcacgtcattgttgattggggaacggtggttgtgactttcatttgcaacaagaatgccgttgccgggctgcagatttatggcaaaaattttgacagattggtgaatttcatctgcgtgagaatgactatgcatttagtcactcgaaagtttggcggaaatgctcaatcaataacaaaaaatcgttggcttcatcacatgtcgttcttgtgggattatgatgtaaaaaatatggattatctcaaaatcccaaagcgtgcacctgaatatcgactggcaagaaacacacagatttcttgtgccgcatgaaggagtacataccttcgcggccagttttcaccgatggggtcactgcggccctgggagaacacttctcagttcagcccgtggatctacaagcagctctttccggtgatgaaggattcgtgccttctacaaagctgctgtcacaacaagacctagaaaaaaaattgtttcgtccaaagaaccccttaaaaatatagaaagttgaagcgtgaccatgcttgtcgtttttgttgtgaaatgtgagcagttttgtcgagctgtgaattcattcaaacattatggtcaacccagtacgtacatatgaatgcccaccaccatatttagtaacaaatggttatgttttggattgtaagtctaccgttccaagcttgggttacacgttatttacctatgggctctagaccaagtgctaaaactatgagactggctaaagggttatggactctaaattatagagaagattctcgtcttctttgaggaaaaatggaaacaggtcacaattacaaaaaaaaattgaagccggaagaattaa

SEQ ID NO: 181129 - DNA, 1101 bp, Zea mays
  Clone ID: MRT4577_96768C.1
gtagggttggctcgggtgagtggtgtggctcgccctccaggggcggaggcagcccttattttggggtcagctgaccccgcttcgctactgtcgccctctcatgaggcttgtcaccatgagccgcatgccgatcctgcagcagctgcacctggaggagcagctcctgcgacgcacatcagacaactggtgtattatcaacgatggcacggcccctgctaccatcgttatgggcgtgtctgggagagtctcggagcttgtcaatatacagctggtcctccgggacaaggtgccgattgtgaggaggttcagtggaggtggcaccgtcattgttgatcagggaacggtgtttgtgactttcatttgcaacaagaatgttgttgctgggctgcagccctttccacgggacatcatgtcatggagtggtcagttatatggcaaagtttttgacagatttggtgaatttcatctacgtgagaatggcaagaaaccacacagatttcttgtgccgcatgaaggagtacataccttcgcgatcagttttcaccgatggggtcattgctgccctgggagaacacttctcagttcagcccatggatctacaagcaattctttccggtgatgaagaatttgtgccttctacaaagctgctgtcacaacaatacctagaagaaattgtttcctccaaagaatcccttgaaattatagaaagctgaagcatgacctgatgaccatggttgtcgtttttgttgtgaaatgtgagcaattttattgtgaaatccgagcaattatcggcgagctgtgaattcattcaactttgagtccgacattatttcactgaaccacttacatacgaatgcccaccaccatctttagtaacaaatggttatgttttggattgtaggtctaccgttccaagcttgggttacacgttatttgcctatgggctctagaccgagtgctaaaactatgagagactggctccaacatactctgtaaatggttatgtactctaaattataaagaaattttttgtcttcttaaaaaaaaaaaaaaaaaaagaataaaattctaaaaagagaaaaaaaagtaaaatttattgtt

SEQ ID NO: 181130 - DNA, 315 bp, Zea mays
  unsure (1)..(315): unsure at all n locations
  Clone ID: MRT4577_96769C.1
tccgaaaggatcttagcggatttcggtgaggcggcggcggaccccgaggccgggtccaatctcccacacgttggccaccncncnctttccttgccttagcgcatgccgcgaccttcctttctggagttccgttaaaggggtccggaattcacccttgccaaccccccaatcaaaaagaagttggaaaggttaaccctaatccaggagaagttaaataatttggagaactggaccaaaccaccacttcgcccttctactacactaaatacacaagcaccagcaaggttcattgaacactcactttcccatctgaca

SEQ ID NO: 181131 - DNA, 967 bp, Zea mays
  unsure (1)..(967): unsure at all n locations
  Clone ID: MRT4577_9676C.1
tgtaagcagtggtaacaacgcagagtactttttttttttttttttttttttttttttttatccaaactttattttttctctctttctttagttttgtttcactcttgtaagaaactcttttaagaaagtaagaaagagtcgttctattccagtataatagaatagaaagggcgattataggaattcataacttctattttactagaaattatgagtaaaaagaaagttctatacataagaaaattagaacataagaaaattagactttcttacacgaagctattcacaatatatcgcacattttccatttatactattttcttattcttagaaaatttttgatgttcttttttttttttttttgaaggatctcgattgaagcatctcgcaccttttttaagcatgaaagattcgtaggttttttccttttactttttttcttttactataatctattctagtctattctcgtattatttttctccccctccttggattctttcaatgaagaattatcttcgatttttttgattttgacttgattgaaattaagtggatgcagtgaaaaaagaagttgaattagactactatttcaatctactaatcgattctatgtagattcaagataatataatagaaagaatctaaagtgtggtagaaaaaactatatgtagttctttctaccacactttatgattccaaccagaccctttcatttaagacttggatttttttattttctttaatccctttttcattatgcacaccacacaacacaacacaataatacagcaaaggaggctagcagaagtgcaggattaataagctaagctagtagaaattaagcaaagcataggcacagccatggctacctcctctggttcttgccttatattagcctgttnggtgggtggtggtggcnncnnncnctgtcgnnctcaacggcgtcggcacagctgtcgtcgac

SEQ ID NO: 181132 - DNA, 1312 bp, Zea mays
  unsure (1)..(1312): unsure at all n locations
  Clone ID: MRT4577_96770C.1
gtttattggcccattataaaattgtacaaagcttctccaaatatgccaattgatccattacaattgtttcataactactgtttatggattttgggactgcagaactgatggattctaacagatgtaacagacctacagtagggatgctaggccaaggagttaaaatatatccacatgttagaatatttcgtaactgtagtaacttcaacattatatagattaatcatgaacttttagttgtattaaacaaataagctctgtatgttcattgttgtagaactaagtttattgtgaatttgtgaacacatatatttgttcatgaaactgcattggatttggactaacaaagtttgtgtacgtgatatgttttagtctggatctgcccttggtcaagattcaaatatggcttctgcagggttggctcgggtgggtgagtggtgcgactcgtcctctcatgaggctcgtcaccttgagcaacatgccgatcctgcagcagctgcacctggaggaggagctcctgcgccgcacatcggacaactggtgtgtcatcaacgatggcatggcccctgctaccattctgatgggcgtgtctgggagagtctcggagcttgtcgacatacagctggtcctccgggacaaggtgccgattgtgaggaggttcagtggaggtggcaccgtcattgttgatcagggaacggtgtttgtgactttcatttgcaacaagaatgttgttgctgggctgcagccctttccacgggacatcatgtcatggagtggtcagttatatggcaaagtttttgacagatttggtgaatttcatctacgtgagaatgactatgcatttagtcatcgaaagtttggtggaaatgctcagtcaataacaaaaaatcgttgggttcatcacacatcgtttttgtgggattatgatgtaaaaaatatggattatctcaaaatcccaaagcgtgcacctgaatatcgactggcaagaaaccacacagatttcttgtgccgcatgaaggagtacataccttcgcgatcagttttcaccgatggggtcattgctgccctgngagaacacttctcagttcagcccatggatctacaagcaattctttccggtgatgaagaatttgtgccttctacaaagctgctgtcacaacaatacctagaagaaattgtttcctccaaagaatcccttgaaattatagaaagctgaagcatgacctgatgaccatggttgtcgnttttgttgtgaaatgtgagcaattttattgtgaaatccgagcaatatcggcgagctgtgaattcattg

SEQ ID NO: 181133 - DNA, 683 bp, Zea mays
  Clone ID: MRT4577_96771C.1
cccacgcgtccgatcgccatctcttctcttcttttgctcgctctatacatataccagagaggtaggtagctagctagctagtggtgaaaatacaatggcgcagcggcagggaagaggcagtggtgctgtggcccttgcggcggcggcggcggtgctcctctgcgtgctccttcatgcccacgtcgcggagtcggccgtgttcaccgtcggcgaccgtggcggctggagcttcagcaccggcacctggactaatggcaagcgcttcaaagctggggacgtcctagtgttcaagtacgactcgacggcgcacaacgtggtggcggtgaacgcggccggctacaaaggctgctcggcgccgcggggtgccaaggtgtacacgtccggcaacgaccgcgtcacgctggcccgcggcaccaactacttcatctgcagcatccccggccactgccagtccggcatgaagatcgccgtcaccgccgcctgagtcctgaccgatcgcggctgccgccggcacgcctgctgccgcgggctacatacatctacctatcgactgcctgattgtcagtttgactggcttgtatcgactccctgattgttatatatatatgaataaaacacaccatcatgattcgatgcgtaaagtaacaaaaaaaaaaaaaaagtcgacgcggccgcgaattcgg

SEQ ID NO: 181134 - DNA, 474 bp, Zea mays
  Clone ID: MRT4577_96772C.1
cttcgcggtcagttttcaccgatgaggtcactgcggccctgggagaacacttctcagttcagcccgtggatctacaagcagttctttccggtgatgaaggatccgtgccttctacaaagctgctgtcacaacaggacctagaaagaaattgtttcgtccaaagaatcccttaacaatatagaaagttgaagcgtgaccatgcttgtcgtttttgttgtgaaatatgagcagttttgtcgagctgtgaattcattcaaacattatggtcaacccagtacgtacatacgaatgcccaccaccatctttagtaacaaatggttatgttttggattgtaggtctaccgttccaagcttgggttacacgttatttgcctatgggctctagaccgagtgctaaaactatgagagactggctccaacatactctgtaaatggttatgtactctaaattataaagaaattttttgtcttctt

SEQ ID NO: 181135 - DNA, 723 bp, Zea mays
  Clone ID: MRT4577_96773C.1
ccggccggtgccggaagactcatcagttcaattcaatccaatccaatcccaccccgccccgccccgccccgcccaagaacttcaatcgtccaacaaaagcaggagtcgcatcccagatccccccgcattagagacaggcagggagggaaccgagatccatccatccgagtcgatggagtcaacggtggagcggataagctcgtcggtgcagtcctaggtgaagggccacgagctcgcagccatcatgttcaagtacgactcgacggcgcacaacgtggtggcggtgaacgcggccggctacaaaggctgctcggcgccgcggggcgccaaggtgtacacgtccggcaacgaccgcgtcacgctggcccgcggcaccaactacttcatctgcagcatcctcggccactgccagtccggcatgaagatcgccgtcaccgccgcctgaccgatcgcggccgccgccggcacggccgcggccacgggctacatacatctacctaccgactgcctgattgtcagttcaagtggcttgtatcgactccctgattgtcagttcgagtggcttgtatcgactctctgattgttatatatgaataaaacacaccatcatgattcgatgcgtaaaaaaaaaaaaaaaaaaaaaaaagaacacttgcctcggattgacttcaatatataattgctccagtgaataacgaaaaaaaaaaaaaaaaaaggccccta

SEQ ID NO: 181136 - DNA, 702 bp, Zea mays
  Clone ID: MRT4577_96774C.1
ccggccgggccgggaacaccagtccactcatcatcgccatctcttctcttgttttgctcgctctatacataccagagaggtaggtagctagctagctagtggtgaacgtacaataatacaatcagcacagcaagacagtaatggcgcagcggcagggaagaggcagtggtgctgtggcccttgcggcggcggcggcggtgctcctctgcgtgctccttcatgcccacgtcgcggagtcggccgtgttcaccgtcggcgaccgtggcggctggagcttcagcaccggtacctggactaacggcaagcgcttcaaagctggggacgtcctagtgttcaagtacgactcgacggcgcacaacgtggtggtggtgaacgcggccggctacaaaggctgctcggcgccgcggggcgccaaggtgtacacgtccggcaacgaccgcgtcacgctggcccgcggcaccaactacttcatctgcagcatccccggccactgccagtccggcatgaagatcgccgtcaccgccgcctgagtcctgaccgatcgcggccgccgccggcacgcctgctgccgcgggctacatacatctacctatcgactgcctgattgtcagttcgactggcttgtatcgactccctgattgttatatatatatgaataaaacacaccatcatgattcgatgtgtaaaaaaaaaaaaaaaaaa

SEQ ID NO: 181137 - DNA, 383 bp, Zea mays
  Clone ID: MRT4577_96775C.1
gtgtttatgcccgaactagataaatttgtggtgggggtcattggcgacatcttaatttgattgcgagaataaggaaaaccttcaaatcatcttcgaattgtgctgactcgacttcgggaacacaagttgtatgctaaattcagcaaatgtgaattttgggtggaccaagttcccattcttggtcatattctgtcagctgaaagagtagtcgtggatcctaggcaagtgacgaatattatagagtgcaaaccatctaccacgggtcacctagttcgaaagtttctttgggatgtctagatattaccatcaattcatccccaactttttcaaaatatccaaacctattactaaactattgaagaataatgtgaagtttaattgga

SEQ ID NO: 181138 - DNA, 693 bp, Zea mays
  Clone ID: MRT4577_96776C.1
cttcgttccatttaatgggcacttgtagctggggtcacgcatggcctaattctccacattttttgcaccttctcttccctcttatcatcttcttcttgcttttttcagattggttttcagcctgcacgtcaacttcattagctgcctctctgtcagcctcttttcctttttctgcagcaacctttttgcccttgctattcccaccttcaaggcaactcttgattctgagttttttgtaccttcctctacctctcttgtccagtggggcgccaacaacaaatggtaggtccacatgtggccactgggtcttatctggcagtggctcaataattctcttgtatgcattcttgaacctctgaaccgaataaaaatcatgcacaaaatcctccaactccacatccacactatcttgtgctgtaatcaacgccagtgcatgctggcaaggcttgccagtgtgctgccattcaagacatgtacattcatgtaaataggatttaacgacatgcctattatgagtatttgtgctgtcatccacttgtgcagagaaataactagcctttgtaactgtcaagtgacctagtcctctagtctttaccttcaactgttgtataactgcaggtaagacttttccattcaacttgtctgcaatccttcttcttttctgccacaaaatcattatcagctctctacact

SEQ ID NO: 181139 - DNA, 442 bp, Zea mays
  unsure (1)..(442): unsure at all n locations
  Clone ID: MRT4577_96777C.1
ggacatacctagcgccggcgcctccattagcatcctacctcctacctcagatcacgtttcgcgcggagacaggaaagccatntggggacgcgcgaggataacagaccatacgagagaggtctggagcccagggtgttcgaggactccgttgcccacgctttctcttgacacgtataatgcgaacccggagctaaatagcgacctcatggacctgtacatcaacaatgcatcccagaaggatgttaccgggagtaggaagcctgttgtcattcacgctccagaccgcctgcgcaaggccctcaggaagcaccatgtcagactcgtcagggagctggagaagaaactcagcggcaaggatgtggaaattgttgctacacggaggattgtgaggccacccaagaagggctcacttgtcctgagcccttgcaccaggactctcact

SEQ ID NO: 181140 - DNA, 326 bp, Zea mays
  Clone ID: MRT4577_96778C.1
tggggtggaccccccagagccaccggagccagaagaaaacggacacacatggtaaggactggcaggacgcgaaagcgacagggcatggcaagccgaccggtgcctgtgccgatacaacggtggaagctgcggctacaaggacgtgaacaagccccacttcaatagcaaggacgcatgcgggaacactctcgaatttgcaaggatgcgcctgggatgacggagtcctgtttcgagaccaactgcgactagcctgcggggtgctctagaccgaccttggtggtgagcatgaccgacatgaccgatgagcctatggacgattaccactt

SEQ ID NO: 181141 - DNA, 216 bp, Zea mays
  Clone ID: MRT4577_96779C.1
ccaccccttcttttttatatttttttgagaacgacccctccgggactaagggcttaggggaactaccacgcgctcacgaatggaaaaaactgcccagacaccgcataagggctagataggccacccacattttgctaagggacttacaatgccccaaggaaaaaggaactaatttcccatggcaaaacaaaaaaccctcgggccccgacggaggag

SEQ ID NO: 181142 - DNA, 446 bp, Zea mays
  Clone ID: MRT4577_9677C.1
atattttcggaccggctgaggttcgagctggctgtttgggttcccgactaaatggatcactcctgacgtcccatgactggatgacgaacgacctcccatgaggcatgtcgtcctaccaggcttctaaagccacagtcccgattgcttgtgtcgccggcatgcggcgtgcttacgattccaacacctagtcctcacacatagatgagagtcattcgggacctctccgtctccttacacttcagcaggcaatccggtctgcaagcgccgccggctaccccagtagatgcatataccacgcgatcagcaccgcgtactgtctccactatacctcctgctcggcaaccttgtatccgctagcacgcctaaagatttctatctgcatagaaccactagggccttctgagctgtgtcaacaacaagaacaaatgactccacctctggtatgt

SEQ ID NO: 181143 - DNA, 234 bp, Zea mays
  Clone ID: MRT4577_96780C.1
atggccaaaatttcaagcaacgcccaggccaaggtggaagagctcccggtcccaggtgagccgcgggctcggcgtcgatcgcttcggactggagaagagacatccgacgaggaggtcccacctggcggtggctcaaggaatcacgggtgttacagtgcagccctaattccagggcacctcgacacatcacaatatgaggagtggggccaattcctgacgggtaatcgcacttga

SEQ ID NO: 181144 - DNA, 788 bp, Zea mays
  unsure (1)..(788): unsure at all n locations
  Clone ID: MRT4577_96781C.1
cgggatcccaacatcgtggnttatacaataacatcttgtgtagtactcaatcctcaactctcatggatcccaacttcaatggtgtgtggagtgcctccgagatggatatggcgaagtcactcatcccaagtcaaatcaccaacaaaacctacacaaacgacatggagacgaagcacattgactttgtggatgatctccaagcaatgttcccatggaaggagaagcaccaggtaaccaatttatatgttgagctactagtggagatcatgagggcacagagcaacaaccaacatgttgtgccaagtagcgtccttgtgaatgataactttgggatgctgtcaaaacccatggacaacatgaaagtgatagaagggtatctaatggatgagatggaggccatgaggattctagaggagcaaccaaatatgctgaatgtcattcataagaaaaagaggcatggagtgaagttttggaccacagacgagcacatgaattttcttcgtggtctggaagcatttggccgtggtgaatggagtaacatctccaagtactttgtccccacaaggacaccagtggacatctctagccatgcacagaagtattttcgtaggcaggagtgcaccacaggaaaacaaggcttcaacatcgacaatgttagcttctatggcacacaaccatgggtgcaaaacaacccttccagctgtgaagcgctcaccttcactggtnggtgcttacaacacanactacaatgacttagacgagaaacatgttggctttcacagcttcgc

SEQ ID NO: 181145 - DNA, 452 bp, Zea mays
  Clone ID: MRT4577_96782C.1
atgggacagagaagctgtttattttcacccatttctatacccaaaatctgatgttctaatgttaaaatatcataaaaacaagtgaaacccagtgtgatagtgtacaatgtcccctcttttttttgcatcccatgaaaaaagcagtttataactgtcttcgatagcccttcaacgtgttctggaagctaccatccaggcatccagcaattttaaagaagtcaaaaaattgcagattgttcagcaaatgcaaaagatcaacactaatttctaatagtacctgattcaagggtatacggatgggaacgcagacacttaagacacataactcttgactatttcttctgttggtcttgttcatcatgcttttgccatggattgagagcttctttcatagcttgggcctctagactgcttttccaagctccgttttcttaccccaagacagttacctt

SEQ ID NO: 181146 - DNA, 1285 bp, Zea mays
  unsure (1)..(1285): unsure at all n locations
  Clone ID: MRT4577_96783C.1
ataatgtgccaatgctcggaatagatatagtatggtgttattttgtgcttcgtgatgtatcgtgcttagaggtcgcaggggcccgcctagaaaaagcacggttaggttttgagcgttctcatgggaaagattccacccgcttcagaatactccaggctggccggcaagctgatcttgctatttatgtaaggctggaacttttggaaggagtggtggcataccataatggtcatgttgaaaaggcgcgtgaatctctcacttctgcccatgctaaatacctgcagctccaagtgccagacgaagctatatcaatgttaatggatatgggctatgaagcacggtctgcaaaaagggcattgaagatgactggctatgatattcaatcatcagtcgaactgttatgtgaggagcgtgaaaagaaacttcgtagaagagaggaggatcgagtgagacaaagagagattttgaaacaaatggcatatggtaaaactcccatgaacaaggcagttgacatgcagaagctgaaaggcttgactgctatcggatttgagaagtatcttgctgcagaagcactgcgcataaatgaaaatgatgctgacaaagcgttagacctattgacaaatcctgaacaaaactgtaccctacaaagtaaaattcaggcaaggagaagccgggcatcttgtgggtttggtgcaggatcctcgcgttccagggcagctgttgccagggctgctccagcaatcaacaattctcatactcttgataatgctcctccacatcctgcggatggagatgctcctccgcatgctgccgttggaggtgctcctccacatgctgcagatggagatgctcctccaatgaacaatgaagaaactgcaaaccaagatgaaattatgattggtgaagtagctgcagatgatgaagacgaagacgcaaactctcatccagttccagccagggatgcgtcgatggaaagtgagcttgccaatgaactgaagggggatgccttggatgactacgatattgatgtcagtaacgaaggacaggctatcgcagagtacttgagcttactggaggctgctcctagcagttcttagattgcaaagatctacagtgctcgataggtatctccgactttagaaggataaatacaggtggtttcaattagggagttcgagtggtacggtcgatttgtacataaataatgctacccttatggattatatatatgatgcttangaaagttcttaaaaaaaaatcaaaaaaaaaaaaaaaaaaagcggcc

SEQ ID NO: 181147 - DNA, 402 bp, Zea mays
  Clone ID: MRT4577_96784C.1
aaaataggtaatggcgatttgataaatccccgaaagaaattaaggtacaacacaaacttatgcttgttcaaataaatgtttaaagatgtttgttaaataaaaaaaattcgaataataaaaaattagggtagtattaacaataattaggtgggccaatttattcaacaaataatttagatacggtatttttacggagccaggtaatgtttgaatttaaaacacaaattgtttggataattaatagtatgtgacatgtattgacaaaaacgatggtttactgccggttaaaaacctaagcgacgaactttaaataactattgattaaattgaggtcccaagaaagaagggctttattttcccaaattgtcagtaagggagggtttaagaggactagttttttca

SEQ ID NO: 181148 - DNA, 234 bp, Zea mays
  Clone ID: MRT4577_96785C.1
cgccttgagagggaatttcccctaataaattgatcaatgtgaggtccttaaatccgtagggttgacttgctacaccatttcctggcaaaactgcttcgctgaccctagatcattcggaagatttggggcacggcatggtacggggacatgtgccaagatcaacggttaacttgaggatcgccccaaagaggctgcacggggaaaacaacaatattattggcgccaggttgaaaa

SEQ ID NO: 181149 - DNA, 243 bp, Zea mays
  unsure (1)..(243): unsure at all n locations
  Clone ID: MRT4577_96786C.1
gacttcgaggcattgggttcgaaaaataggccattgccctttatttcacattttaccaagcctgcagtgcactgccgtgataaagagaatcacagaactggcagtaaagaacaccaaggccgatcctagaagaccggggggggggcttgcaatatacctggcaagtgaacttcatcttcctcatttacatccttggaaaaatgttccctcagagtntagcagcgcgccagcgccttaggtcct

SEQ ID NO: 181150 - DNA, 597 bp, Zea mays
  Clone ID: MRT4577_96787C.1
ccggccgggagtcgttgatatctcatccgttgctaccatagttgcggagtctatataatactgtgccgaatgacgactggaacgacagcgacgctgtcgcctctgagctcggtgccaaggactgctggacactgcccccggcaaccgctgatcaagctcgtttgctgctgtgcgactgcgcgatgtactgcatctcggtcaccaagttcatctgcacgctggtgctcctagaacatcacgaagtcgcaccaatgcatcgggtatctaccaccacaccaacgcgcgctccatcacttgcagagaaacctggcatcccatggtgaataatgaagatccgctggacactttgctaaatgatctatagaatgcactaatgaaaagcctcgatcatgtcgtggcacataaatcgcgtcagctaatatcctccactactggcaggccacgcttccatggcgccttcatctgttgtaatcccgatgcaagtctcaacccatctgtccactcggcctcatacaatgtgtactagagcatctacatcgacagacactggcaccgctgcgattctctcgactccggtaatctttcgtatccgactag

SEQ ID NO: 181151 - DNA, 701 bp, Zea mays
  Clone ID: MRT4577_96788C.1
tttctttttttttttttttttttttttttttttttttatattttttttttcatttttttttttttttttttttcatttctgttttaaaaaaggtcatggtttttgaaacttaaaagaaacacagaactaaaaaagaaaacataaaatggcttttgtataatactagaaaaaaacaacgggcaccaccaccaggcaaaccgaaaagacaaagaggaggcaaccacagacaagctcctgaactgcagcgagccgagcaggcggaacccagaaaggggagcgaggaaagcggaggcccaaccccagcactcaccgcgaaggaaggcgcgcgaggagggaaaggccacaacacaccgcaggttctaccacaaaggggccgcggccggcaaagaaaaggaccgaaacaaaaacaaaaccacacactgggaacaaagcgtgaaaccaggcgggagccaccaccccctctgagaccaaaaacccccgaagggggcatggtggagaatgccctgagcaagagagacgggaacgaaccctcccacaggatccctgctgtacccaaaggccatcagcgaaaagaagttccttcccaacgaaaacaattcagcctgcgccgctatctgatgaaacaccagagctgccctggggatctcaaacaaagaaacaacttggtaccccacacccttgcccaaatgggcgaacactgg

SEQ ID NO: 181152 - DNA, 148 bp, Zea mays
  Clone ID: MRT4577_96789C.1
cacagacacacatgtttggcggggagctttcaccacatttgatgatttttgtccgataatttcgggatgcctgagttcagtgatccatgagcatgatcatcaatgcaccatggcaggcatggtcaacatttccctctccatggctctg

SEQ ID NO: 181153 - DNA, 1144 bp, Zea mays
  unsure (1)..(1144): unsure at all n locations
  Clone ID: MRT4577_9678C.1
agcagtggtaacaacgcagagtacttttttttttttttttttttttttttttttctataatctattctagtctattctcgtattatttttctccccctccttggattctttcaatgaagaattatcttcgatttttttgattttgacttgattgaaattaagtggatgcagggaaaaaagaagttgaattagactactatttcaatctactaatcgattctatgtagattcaagataatataatagaaagaatctaaagtgtggtagaaaaaactatatgtagttctttctaccacactttatgattccaaccagaccctttcatttaagacttggattttttattttctttaatccctttttcatttcttcaatgattaattggaattccaattaatcattttgactggctgtttttacataaataataagtaaaaaggcagtaggaactagaatgaacattgctgtagcaataaacattgggtacctcgagtccagccgggacgggtaggattcaggatgaccacctgcacaccacacaacacaacacaataatacagcaaaggaggctagcagaagtgcaggattaataagctaagctagtagaaattaagcaaagcataggcacagccatggctacctcctctggttcttgccttattattagcctgttggtggtggtggtggcggcggcgctgtcggcctcaacggcgtcggcacagctgtcgtcgacgttctacgacacgtcgtgccccagcgcgatgtccaccatcagcagcggcgtgaactccgccgtggcgcagcaggctcgtgtgggggcgtcgctgctccggctccacttccacgactgcttcgtccaaggctgcgacgcgtccattctgctgaacgacacgtccggggagcagacccagccgccgaacctaactctgaacccgagggccttcgacgtcgtcaacagcatcaaggcgcaggtggaggcggcgtgcccgggcgtcgtctcctgcgccgacatcctcgncgtcgccgcccgcgacggagttgtcgcgctcggcgggccttcgtggaccgtgcttctgggcagaagggactcgaccggttcgttccctagccagacaagcgacctcccacctccgacgtcgagcct

SEQ ID NO: 181154 - DNA, 551 bp, Zea mays
  unsure (1)..(551): unsure at all n locations
  Clone ID: MRT4577_96790C.1
gtgtcatggnagcttccagttctggnagtgcttcacattctgctccatatggaactgtcggcctgcccatcacaccttggggatcggccgaacacataagctgcagggtgcactgtctacaaactggtttcacagcagtggtactngaaacaaaaggccatcagtctactgtctttgtgaatggcgcaagccaatcactttcttgttctgatcatgtaagtatgtaccacatgtgcatgcatgtctatgcgataggtagcacaagtctagtgaaaaaaatgacaaacaatgatgtgatgcttcaacattacttcagttctttgctcacatatttggcttactattaacaattgaaaatgttgcttcatttacacaaaaagaaaaggtagcttagtaaatgttatgcaaggcaggagcttgcacaattaaggtatctcgaatctcaatggcaacaaagttaatcagattgccttttgagttcattatccttctcgaatttgctatgtttcctgtttatgttctgatttaggtcgttatagttgttgttgtga

SEQ ID NO: 181155 - DNA, 152 bp, Zea mays
  Clone ID: MRT4577_96791C.1
tgacactcgcaatgatggagtgagacgcgctcgcctgagtcggagatcgtggacatcaagccgttccctgagctggtctcgcgcccggcgttccttgacccggcgatgatgatgtctgcacccaaggcggagccggctgactactgcagctc

SEQ ID NO: 181156 - DNA, 643 bp, Zea mays
  Clone ID: MRT4577_96792C.1
ttgggtacctcgaggccggccgggactcattcattccatcatcccccttgcaagtatagtctcggcgactctaaaagacgatgggcaaggacgacgcgatcgacagcggcgctggcgggggcgagttcgctgccaaggactacacggaccctcccccggggccgctgatcgacgcggctgagatggggccctggccgctgtaccgcgccgggcccgccgagctcatcgtcacgctgctgatcctgtacatcacggagtgcaccgtgatcgccgacacatgcaccacacggatgcgccggcggcgtccgccgacgcggcgttgcgtcggcgtggggcagctgggcatcgcctggatcttcggtggcatgatcttcgtcctcgtctactgcagcgtcgacatctccggggggcacatcaaccccgtcgataccttcggcctcttcgtggcgcgcgaggtctccctgctgcgcgcgctggtctacatcgcggcgaagtgtcactacgccatctgcggtgtctcgctcatgaaggcgttccagagcgcctacttcaacaggaacggcgatgtcgacaactcgctcgcctccgtgtactcccgcggtaccggtctcggtgccgaaatcatcgggacctgcatgtgcga

SEQ ID NO: 181157 - DNA, 384 bp, Zea mays
  Clone ID: MRT4577_96793C.1
ggcatgggcagtatccgccgccatcctcttccgtgaggcgcgctgagacccggaccggccctcctgagaggatgccggtgcgggccgctggtgaacaggacccgtcgccatgggccgtgtgatccgtggacagaggaagggcgccgggtctgtgttccgcgcgcacgtgaagcaccgtaaaggcgctgcgcgctgcgtcccgtggatttcgctgagcggcacggctacatcaagggcatcgtcaaggacatcatccacgacccgggccgcggcgcgcccctcgccaaggtggtcttccgggatccgtatcggtttaagaagcggacggagctgttcattgccgccgagggcattcacacgggccagtttgtgtattgcggcaag

SEQ ID NO: 181158 - DNA, 187 bp, Zea mays
  Clone ID: MRT4577_96794C.1
ctcggcagtcggcacgcaggctagcagcacagcagcagccagagctatcgcctctcctcgctacggttcggttcctcggcgccgattcctgcgtgtcgtcgtccaacctcgtccgtaccgttccggcgcgcgagtcggtcgagatggcgaacgcgagatcgagtgtcgctgtgaacgatgagtgcat

SEQ ID NO: 181159 - DNA, 342 bp, Zea mays
  Clone ID: MRT4577_96795C.1
atggtaccgatccggggagggatatctgcgccgcctgtagaggccgcgacctccgtcgacccagccaccgccatcgggagcaccgtcggcgtgtccgcgcccatctgggctgccgccgcgcgcgcccccatgggggtgcgcggctgcccattgtgccgcatgctcttgcgctgcctcccttgccagcctaagctcatcgttggtgctgccgtcgccggaaacagagctgtcgacgctactgccacgcataacctcgagctctgccgccgctgcacggtcagcatccgccgcctccgctgcttttacttccgctctcgctgctgccagttccgcagccgctag

SEQ ID NO: 181160 - DNA, 306 bp, Zea mays
  unsure (1)..(306): unsure at all n locations
  Clone ID: MRT4577_96796C.1
attaatacatagaaatgtggtcatctaaanancccccgtccnaacaaacattttccgctcttaaacaccancacctacaaaaanctatcaatcacacaacatcttataataagccacggacaacgaaaaccctgcttgacactgacccccacctaaaaaaaaacagtaccaacctgctcattaatccaacaaacaaaataaacccccccctatacataaaccatagcatacaaccaaacacacccatgcacaaacacactgttcaacaacagaccagtcctggaattattccacttcatcacataa

SEQ ID NO: 181161 - DNA, 1820 bp, Zea mays
  Clone ID: MRT4577_96797C.1
cggccgcgcaggggagggctgtcacctgctcctgtgcgtcacctttggaagcccgctctaggcaatgaggcactgtccagggcaatcctgcgtgagcgctggggtggtaacttctgccacgttgtctcacagcacgacgtcgtcccaaggctcctcttctgccccccggacgccgtccctgcgcatatcattgtcggaatgcaactggatcaatggccggcccggactcgccacacaggtgcggtgaacacggtcaccacacgcatggcggacactgacaagaacgcgctccagcagctgatacagacacacatggccgctgtggccatggagcagaagcttgctactcctgagacgacaggtgggagtccttaccggccgtttgggacgtacgtgctgtgctccccagaaggtgcggcgtgcgtggacaacgcgaccgcggcggcacagatgctgtacgccaccttcgcatctcggagttcgcccggtgcagagtccccggaggccgcgcactcctgctacggcgagctcgtgctgaaaatgccacagcacctgctcctcaagagatgcctgcgtgtggacgacacgcgtgccacgcccaactacgacgacggcgtctccctcgcactggaggcctccggcatcgacgccacggccatggaggcatcgacagcgcggcagtggctgaagacatcgaagcgggcagggcggcggccgagcctgaactgcgcttgcctagcgacgcagcttggccggatcacgcctctccgtgcgcagatcgaatggtacaaggcggtgttcgacgcggagatggggtactacgacgcgtttaagcagcgcaggtcgcccaggaagtactccaaggtgaacttaaaccgcatgaagctgggccagttctgggaccgagtgctgaccatgctcgacgccggccagctcccccacgatttccaccgccgcgccaagtgggtcaacgcctcccgcttctaccagctcctcgtcgagcctcttgacattgccgactaccaccgccacggccaccacctgacgagcgggagctacatgactcacggccgggagaggaggtacgagctgttcgacaggtggtggcaggagaaaggatgcactggcgctggcggtggcatcacgtcctccatgtcggcagcgtcggcgagcagccggagacgcagcaaatacgccgggctaacgcaggacccgtgcttctgggcgagagtggaggaggcgagggagcagacggagagcgcacgccgcgagcgcgacgcggccgaactggcgatgaagctggaggagctgcaagagttcgagcgctacgcccgtgagctggtggcgaccaaggaggtgtccgtcgacgtgctcgcgccgcagtcgagctacacgctgtgggtggaggattggaaccagctcaagctcagggatgatgtgaggacaatgttgcttcggttttgagctgggctgcaaaaagctgatgagttcgtaggtagctggtgggcgttctacaaatagttcaggtatacatgaatcattggatcacggtgctagtatatgtgattgtaaatatatccaaacctagaagcgcagcagtggattacagtattgttattggggttcccgtcgaaattctgaaaaaacgataatatgacaataccaattagttttaaaatcctaggtgcgtcgtgcgtggacaacgcgaccgcggcggcacagatgctgtacgccaccttcgcatctcggagttcgcccggtgcagagtccccggaggccgcgcactcctgctacggcgagctcgtgctgaaaatgccaca

SEQ ID NO: 181162 - DNA, 307 bp, Zea mays
  Clone ID: MRT4577_96798C.1
cggacgcgtgggacgattcattggacacgatgtacgaatacatgtcatagcgcatgcacgagagccattcctttggacagcacgacagcttatctagatgcgattctttcagcagcaatgctgacaacagtaggaatgacactcttgcgaggattgattctttgcacatcacttcagatcaaggtgggggcaacatgttgacgaggtacgatggcacgaacagcagctgcaaccatgactgaatcgctacgtctgcgaggataggttaggtgaagagcatggactgcgacaatcggtgctactctgt

SEQ ID NO: 181163 - DNA, 181 bp, Zea mays
  Clone ID: MRT4577_96799C.1
acgcacacgtggacgcacgcgcggactcctgatggcaaactagtcataaactgacctccagcatccaggggagacatgctatataagtcgaaaatcacccacttgaatctctagagcatatgtgcacagactttgctttgcgttgtgctaaggtactagccaggtatggcacgggattcaa

SEQ ID NO: 181164 - DNA, 477 bp, Zea mays
  Clone ID: MRT4577_9679C.1
ggaaaaactaaaatggattgggggggaagcaagaggattaaaaaccaaccaaagtaatttggcatgatgttttgtccccaacggaatcaaacattttttttggaaaaaaaatgattagctaccaccccaaaataggaccaacaagggggaagggggggggggccccccaaatgaccaaaccctaacaaatttttttttctcttcgccttttttctgcttgaggcgacccccggaaattccttccttttgcgggggggggcatcccaaaggggtttttttttttacccccaatgcaacaaggatacgggggccggggccccgaaagctcaagggggggttaaaatggacagggcaaccccctgcgcccactgttttagccgaattttcaccctctccggggtttcccctggaaaaaatatggacatggggttgcccaacgggaactccttggaaaaggacccctctcaaccgcggggc

SEQ ID NO: 181165 - DNA, 221 bp, Zea mays
  Clone ID: MRT4577_967C.1
acccaaaaaacactgattagtggagatgggatcacggcagcgcttccatcttcccttttttgacttttttttaacgccctttgaccgttggagtggcacggtgcttaatatatgaacttcttgatccaaacctggaacaacagctcacaccctatcatcggtactatttctctttgactttataagaggaattttgctcgactttctggctctatttggtt

SEQ ID NO: 181166 - DNA, 150 bp, Zea mays
  Clone ID: MRT4577_96800C.1
cgctgcatgtatgtatgtcagggtcagtgtgctccttggtgctagaaaaaggtactggtgagatggtgcaccatgtgggtaagctatgtaacgctcgatctgtgattcagtctgtctaagaaagcagcatggaagggcctgtggaaccgt

SEQ ID NO: 181167 - DNA, 530 bp, Zea mays
  Clone ID: MRT4577_96801C.1
gctccgcaggctccgatcctgtatagcgggcgcgatccacgcgtccgattgagaccaacaagcaacatacatagcacaagggaagcccaaccatggcacccaaaacattatgcctgctcatgctcctaggtcattctgacaagagctgctccccagacgcatggtccggagatgcacccctgctgctatagctaaccttcgtcccccgaacctctcaccagcggtgtcttcggaaagggaacacccagttctgtcacccctacatgatccaacaggcacatcacggctggcatcttacatgtatcacccttgatactacatcaatcatcagacgtattacatcagttacctttggagcattcatgggcacaaaacattagggcacagcagctacgacaacttgtgctagcagaccttgctgcctactctcagcatcagcagtgtcttccattcaaccaactagctgcattgaactctgcttcttatttgcaacaacaacacctaccatgcagacagctagctgctgccta

SEQ ID NO: 181168 - DNA, 414 bp, Zea mays
  Clone ID: MRT4577_96802C.1
tacaagtgcataaagtggacttggaagcaaagcaacgagtggaaataaacaggttgcagtgtgatagtgttttatttcttggccacaacgattcactttgccttagtgctcaagtacatccagaactcaagtcaaatcatgcatacttcagtgacgattttaaagaagtggctgtttcattaaaaaattgcatgcgtgatatgggagttatggacttggaaaatagtgtcaagaaggaaattgtctctcaaatttggtccaactggccctgtcccacttggataacacccaatcttatgaagctgaatcaggcattcaacagatagctttttaggtattattatttagtacctttgttttgttattcttgtatcgaaaatggtgtaattgatattatgataaaagaattgtacg

SEQ ID NO: 181169 - DNA, 314 bp, Zea mays
  Clone ID: MRT4577_96803C.1
gccggccgggtcggggagctcgaccctgccttataccttagaggatggatttaaagacgagatgagattgtgggtttctgctggagctaagaacttgcgctctctttttgaccctagatagagaaaggaaagtcttatagcctattaaaagacaggtgttggggtgttgtatgtgtctgtgtggtgtgtgctttgtaagggtgagtgtgtgtttgtgttgtgtgtgttctgtttgtcccgggccacaggccctttttccctctactacgcaaccctcctgcgtattcgaaaaaaaaaaaaaaaaaaggccccta

SEQ ID NO: 181170 - DNA, 1711 bp, Zea mays
  Clone ID: MRT4577_96804C.1
atggtggtcaacgacaaggagaaggagtccctcttcaacgagccaagggacgacaagcccactaactctggctcgagtcataagaagaaggacaggaagaagaaaaggcgcatcaagaagattgtctactacgacagcgatggatcttcttcttcaccaagagacgacgacgatgatgattcttcgtcaaagaaaaagacggttaatcaaaactattcctttgattattcccgcattccatacaattcaaatgcccatttactttctattcctcttggaaaacccccacactttgatggagaggattactcattttggagtcataaaatgcatagtcatctattttctcttcatcctagcatttgggaaatcgtggaaaatggaatgcattttgatagtacggataatcctgtgatgattcatgaacaaattcataagaatgcacaaactaccactgttttgctagcatctttgtgcagggatgaatataacaaggataccctcaagatctcacatgaggaaaatgatgccactatgatcaccaagatggaactggtggaaggcgagctggggaggctcaagaccctggtcaacaagattaggagctatggaagcacaagatggacggaccacgacgtcgtccgactaatgctatggtcatttaccgtaattgaccctcatcttgtcaaccttattcgtgagaatcccaggtacaccaagatgacgcccgaggagattcttgggaagtttgtaagcggacgcatgatggtgaaggaggctcgatatgtggacgatgcactgaacggtccactacccgtttacgagcctcaacctgtggctcttaaggctactagcagcagggagacactaccaagcaaggtggcacaagtggaggccgcgggcctcaacgaagatgagatggtgcttctcatcaaacgcttcaagaccgcattgaaaggatgcaaggagtaccccaacaagaacaaagcaaggggaaagcgctcctacttcaaatgcgaaaggagcgggaagaaggagaagaaaaagagctacaggaaggcaaagggcgaggcacacctcgaaaaagaatgggactcggactgctcttcctctgactccgacgacgaaggtctcgctgcctcggccttcaacaagtcctttgtcttccccaacgaacgccacacctgcctcatggccaaggaaaagaagggtttagatagaactaaagtagataaaatcaatgagttaattgatgctttaaatgaaaaatatagattgttagaaaagcaagaggatattttatatgaggagcatgataagtttgttagtgtgcaaaaatctcttgctttagagattaaaaggaatgaaatgctatcttctgaattatctgcttgccatgaaactgtgtctagtttaaagagtgtaaatgatgatttaaatgctaagctagaggaagcaaataaatctagttcatgtgtagagcatgttagcatttgtaatagatgtaaggattttgatgttgatgcttgtaatgaacaccttatgtctattaccaaattaaatgatgaggtggcaagtcttaatgctcaacttaagacttgcaagattaattttgatcaattaaaatttgctagggatgcctacaccattggtagacacccctctattaaggatagacttggtcttcgaaaggaaaccaagaacttaacaa

SEQ ID NO: 181171 - DNA, 1200 bp, Zea mays
  Clone ID: MRT4577_96805C.1
atggggatggtggtcaacgataaggagaaggagtccctcttcaacgagccaagggacgacaagcccactaactctggctcgagtcataagaagaaggacaggaagaataagaggcgcatcaagaagatcgtctactacgacagcgatgaatcttcttcttcactaagagatgacgacgactcttcgtcaaagaaaaagacggttaatcaaaactattcctttgattattcccgcattccggatgaatacaacaaggttagcggcttggacaacgacaagcaaatctgggataccctcaagatctcacatgagagaaatgatgccactatgatcaccaagatggaattggtggaaggcgagttggggaggtttgccatgatcaggggagaggagccaactcaaacatacaacaggctcaagaccctggtcaacaagattaggagctatggaagcacaagatggatggacctcgacgtcgtccgactaatgctaaggtcatttaccgtaattgaccctcatcttgtcaaccttattcatgagaatcctaggtacaccaagatgacgcccgaggagattcttgggaagtttgtgagcgggcacatgatggtgaaggaggctcgatatgtggacgatgcgctaaacggtccactaaccatctacgagcctcaacctgtggctcttaaggctactagcagcagggaggcgcttccaagcagggtggcacaagtagaggttgctggcctcaacgatgatgagatggcgcttatcatcaagcgcttcaagaccgcacttaaaggacgcaaggagtaccccaacaagaacaaaacaatgggaaagcgctcctacttcaaatgcggtaaaactggtcactttattgctcaatgtcacgataatgagaattaccaggcacaagaaagacacgacaagagtgaaaagaaaaagaactacaagaaggcgaagggcgaggcacaccttggaaaagagtgggactccaactgctcttcatccgactccgacgatgagggactgaccgcctcagccttcgacaagtcttcactcttccccaacgaacgccatatgtgtctcatggccaaggaaaagaaggtaagtgttcgaaataccttaagtatactacttctagcgatgacgattctagttgtcggcgtttcgaccccggggggtccctggaccgatgagtaa

SEQ ID NO: 181172 - DNA, 256 bp, Zea mays
  Clone ID: MRT4577_96806C.1
cactgtcaaaaaccttgtagtcccctccatgttggcgagatcgagcttgagagtcttagctggacgtaccacaaggatacgatactcaacaatggcgactcctttcaagattcagctggaaccccagaactcggggcttctagggatgaagcttggtcagagtgaggcctcgaaggcaactgacctgctgcagtaggatctagagaaccaccacgtcttcttcaacgagtctggctttcacgagcatattgttcat

SEQ ID NO: 181173 - DNA, 332 bp, Zea mays
  Clone ID: MRT4577_96807C.1
tttttgggggtaatgttaattagactgtaacatcattaacatcgcttaacaacagaaaacactgtagcaagccccaagggggaccacatttctagagagacaatcagcctcccgaacctcatatagatgaagtgttgcgaaggaacattaatttagacctccactacatcgtactgtttcgactatagggtctcacaacccggttgggctggtgcctactctgaagagcttcaaccggcaccttgtagacaacatccattgcacagaacatcttgccaaacacaacatgctttcagttctaccaaattgttgtcactttgatgatgaaaaac

SEQ ID NO: 181174 - DNA, 1414 bp, Zea mays
  Clone ID: MRT4577_96808C.1
cgccggactccctagaaagcttgcttgggcggcaaatgagtctgggacccgtcaaaaggaaaagagacattcaaaagcaactaagagagaaaatactttagaaaaaaccaaggacttctcctagaacaactaatatcatctgatgagaatgcccgcaacaatacaaagattttttctctggaagagctcaagaaggctacaaatgactttgatacatcacgcatacttggacgtggaggccatggaatggtttacaaaggaatcttgtcggatcagcgtgtggtagcaataaaaatttctaagatcatggagcaaggtgaaatcgacagtttcatcaacgaggtcgccattctttctcagataaaccaccgcaacatagtacgactcttcggatgttgtcttgaaactgaggtcccacttctcgtgtatgatttcgtatctaatggttctttgttcgaaattctccatgccgctgaggcaagcaacgatttccagttgtcttgggacgactgcttaaggattgcattagaggctgcaggggcactttattatctccattcttcagcttcagtctcaatcttccaccgtgatgtcaagtcctcgaatatacttttggatggaaactacactgcaaaagtttcagattttggtgcgtcaaggttggttcctattgaccaaacccatgttgttacgaatattcaaggcacttttggctacttagatcctgagtactaccacactgggcaattaaatgagaaaagtgatgtgtatagctttggagtggtacttgtggagctactccttcgaaagaagccggtttttacaaatgagactgggacaaagcaaaatctgtccaactatttcctttgggaaaagaagatgaaacctgttacagagatagtggctgctcaagttctcgaggaagcaacagaggaagaaattaacatagttgcctcccttgccgagaagtgcttgagactccgtcacgaagaaagacctacaatgaagctagtggaaatgactctacagtttttgcgagcagagcggttgaactcaagtagtgatgttcctgcgagcaagcaagaggtggaagagcttttgggtacaagcgcttcctattccgactcattgggttctgacactttgctggacaataaagctgctacaacatcccaacaatcaaagggatattatagtttggagcaggagtttgcttctactactctaccacgttagatatgtagtgtacactgtgctaaatacaagaacgatgttgggtgctgtttggttcacagacaatgattaaagttattgatgttgtcactctagtgcgaatcattaccgttgtcatttacattataattcgtgaaccaaacaacaccttggtgcgttgtcatttacttgttattctgtc

SEQ ID NO: 181175 - DNA, 1513 bp, Zea mays
  Clone ID: MRT4577_96809C.1
aattcggcacgaggccaccactttataaaaaggcaacgaacccctccaaagcaacgctgaactcctgcatcgaagtttttgatgacctgagcccgttgacttggtggattggagaaggcagcagcacatcactatctggttcttgtgttcttgctgcaatcagtcgagattcaggctgctttggatatacttgcaacccttgacaggattattaaggatttggaaggatcctagggaatagttgaatcaataattttggggggaaattaccctcatccctccagaatggagaacaagtcagatgaccttcagcacgagcatggtatgcccgatcagacgtctcgtcccttcacttcactcttactgtcggcaacatctgtcgcccaagcagcacaacaagataccggttctgacatcaaatcgcttagtctgctgcatggaagtagcttactcccacctgatgatggttacatctggaaggcgcgcgcgcagaacattgttccaggctgtgaatatcccaccatgtattacaagtgcgcccaggacaactgcaacacaaataaattggtggtatgctctgctgatggtcatcaggttcttgagacggttcttagtggttgccacaaccacccacgtcagcaagattgtgatctacccatacccaaggtatcaaaaacggatacttcaatgcctgtgtccagagagggagatgatgagcaactttcaagttcaagtgatagcgatgaagatgatgttgaccaagcaagagttgaaggtgatggcagtgtaactagacatgtgccacatccagctgaaaggatcactgcacaaactggaactgcaaattctcaccgacatgctggtagaagaagaccgaagtccaaggtgtgggaagaattcagtgctgtgttaagagatgacaaaattcaatgggccgaatgtaagcactgtaaaatgagccttggtggaacaagcacaggaagaacaacccatctgcggcggcatcttaagatctgtccagcgctacctgcaactgatcggatgcagaaacagaggtcatctccacatcctggttccaccattgagagcatctggaagttcgatcaagacagatctcttgaattgctcatcaaggttttagtgtccaaccttttctcctctccattgacaagcagcacaacttttagacagctatgggctggcatctgccctactaatgatgtgttatcggacgctgctattgaagagaagtttctcagtatttttgagaatgaaaagcttaagcttaaggaggaaatagcacttgcacctggcggagtttttctgacagctgcaagcagttctcttgaaactaagaacttcatctttttgaccgtgcacttcattgataaagaatggaaacttgaatagaaaatattagatgttgctttacggggtgtgaagactttgatgctgagtattttgttagcatgtttccgaaatttgcatcatgccacaatttcattaatgggga

SEQ ID NO: 181176 - DNA, 265 bp, Zea mays
  Clone ID: MRT4577_9680C.1
aaaaaaaaaaaaaaaaaaaaaaaaaaaaaaaaaaaaaaaaaataaataaactccacgacgcaagggagagtgacggaaagcgacgcggcgcgagcgaggagggccaaggcgaagaggggaagcaccgcaccaagaccctagtaagaaaaaaaaaactcagatctccaagaggtagaaaggaatcaatatgaaaaacaaaaaataaaataattactagacgctgaaaaacaatgttaaaacaacgcaggcctcccaaacagcggag

SEQ ID NO: 181177 - DNA, 1176 bp, Zea mays
  Clone ID: MRT4577_96810C.1
cctgccgggagcagcaggtagcagcagcgcatgactttgtatctgcaactcgtttcgactagcctgcacgccgggagcccgcccttctccacctccgaagatcctgcgagttcaacccgcgagtgagcatgtcgtcctactccccgccaccgccgctgccgccgcgggaccagtccatggacaccgaggcacccaacgcgcccatcaccagggagcggaggctcaaccccgatctgcaggagcagctccccaagccatatctcgcgagagctctcgaggcggtggacccgagccacccgcaggggaccaaggggcgcgacccccgcggcatgagcgtgcttcagcagcacgccgccttcttcgaccgcaatggcgacggcgtcatctacccctgggagacgtttcaaggactgcgagcgataggatgtggactcactgtatcattcgcgttctccatactgatcaacctcttcctcagttatcccactcagccgggatggttaccttctcctttgctgtccatccgtatagacaacatccacaagggtaagcacgggagtgattctgaaacttacgacactgaagggaggtttgatccatcaaagttcgatgctatattcagtaagtacggtcgaacccatcctaatgctctaacaaaagacgagttgagctcaatgcttcaaggaaaccgcaatacgtacgatttccttggctggttggccgctgccggtgaatggctcttactctacagcttggcgaaagacaaggatggcctcttgcagcgcgaaactgtccgtggtctatttgatgggagcctatttgagcgactggaagacgacaacaacaagaagaaatcgtcctgaatgctgagcagccttgtacagctcagggaagtgctgtcagtacaaaactaccagatataccattggtcgtgttcaaataacaaatgcttcggctttgttcatccgtcattaactatgagtgctgggatttgtttgtatgtgtgtcgtgctaccagtttcttctcctgtcgtctcacacaggtactgaattacgcatgtgttttctagtgtccgtgcggaagctgtattataagctgaaaatgtgcgtttgaaatttatggccaaaactgtcttcttggtcttgaaatgtgaaatctgggtttccttctttaac

SEQ ID NO: 181178 - DNA, 587 bp, Zea mays
  Clone ID: MRT4577_96811C.1
tgccacgcatgaccggtggctgctgtcttcctcgtttgccaagtgacggttgtgccatggatatttcctcatcctcaggtccagcagccaacatagagcccgatcaactcatctgtccacttgatggagatcgtgaagtcgtcgggtacgagaacgacgagataaatgtagttgccgtggaacatggagatgaagacgcacaaggaactcaggtcgctaataaaattcaacaaacttcatttgttccagaagttggaatggcttttgaatcagagaatagtgcttatgagatgtataacagttatgctggtaagattggatttagtattagaaaaggtacaacaaaacaccggccagatggtagtttatatatgaaacatttagtttgcagtaatgaaggatttgggaaaagtgagtcatcgaagggcataacaaggacaggttatggtgctcgtgttcaattcagtgttagtaaagaagggatttggatagtgcaaaagattatagtagatcataatcattatcttgctagtccaaataagaagaaaaatttaagatcccaacgacgtgtcacagaagcagacaga

SEQ ID NO: 181179 - DNA, 313 bp, Zea mays
  Clone ID: MRT4577_96812C.1
ggccgggggacaagttggactgttttctttgggataaatacaaatacccaagtttcaacaaatcataaaaaaatttgttctccactttgacatgcgtagaaacgtctttagcttattacatgggtacacaaatttttcacaaccaaatacagcaaaacttgggccaagggcagcgtcccaatccagccacagacggactttttactttgacatgcttgtgtttactgaagctcccatttgcagccacatactttaaaagttgaaatgctggttgaaaacctgggcccaaaaacgggaagaccgacactttacc

SEQ ID NO: 181180 - DNA, 532 bp, Zea mays
  unsure (1)..(532): unsure at all n locations
  Clone ID: MRT4577_96813C.1
caaaatcaacacataatgaattaaatctgcttcttaattaattacaaagggtggactggatcatgtagcacagcagaggatgattttgcaaatgcaagaactactacaaacttgtatgtatctatgcgactatgcacaagcaggaaggattcaggcagcaacgatctggctcttgaagtctagatgctcgctggctaccgttccgcatttccctccctgtctgcgccgccgccgacctcggcgcggcagacggggcacacacggcttttgcgtagccactggtcgacgcactgcgcgtggaagccgtggtcgcaccgcggcagcacccggcagcggtcccccgcctggaacgcctncaggcacaccgngcactcggcgcccgcgccggccttgcactcgtgggcatggcacggcagctcgttaaggtcctcggcagacagcccctccgcgcgctcctcgtcctgccgcgactccgctgcgcggaggacgactccccgccggagcgcccagacgactatgaggatgtggagca

SEQ ID NO: 181181 - DNA, 496 bp, Zea mays
  Clone ID: MRT4577_96814C.1
ggggtaaagcaaattaaaaaatttattcccccggcccggcccaaaaaaaaatgggaaattggcaacggggacctgaaccaaattaaaagggcccagttaacggggggcggggcactcccccccaaaaaatgaaatttgggtagcccccaaaaatacctaggggggaggggagggcacttgtttgggaaaaaactaataaaaccttgacgctggattctggggggggggggaacttgagcgacaacccggggttgttgaccccggggtaaccccgggggagcacgggggggcaactgacaaaaaggggggagctgccggaaacccaattggcgacctttcacttgaggggggcggccaccttgacctggaaggggacaaaacccggggggaagtcctgtttaatggggttggggaattagggggaaacgggcacggacttggccaaaaaaacgggggaccaaacgggggaaatcgcgggggccctggtactgggggg

SEQ ID NO: 181182 - DNA, 341 bp, Zea mays
  unsure (1)..(341): unsure at all n locations
  Clone ID: MRT4577_96815C.1
aattcccgggntcgactcgcacgcgtgccgcagaagacccagaggagaaccaacccagatgccgatgtcccaagtgaccntgtcagtcccatttatttcctatgggacttcgggattgtacccaatttnntagaagtcttacnntcgaatttctgtaagggcctaaagaatnccaatcagaaatgtgtttatttgggttttaggtcccagaattatttagtgcannatctgatgcccgtttgaatttnnctgttttccttttttaaccacccatgtacccaatangaaccattttcgggacccagtcattatnnngttcctngtatttctctttttcggtg

SEQ ID NO: 181183 - DNA, 1306 bp, Zea mays
  Clone ID: MRT4577_96816C.1
tgggacctcgagccggccgggaaattcgagagccgaagcgaagcggggccatggggagatcacgagcgactgccgccgccgccacctccaggcccaggcgcaaccccaagccaaagccggactcccccttcctctccccgctcgcgtcgctgtctgccacaccgcgcatccgcacccgcaagggcgccatccgccgcggcggcccctcccacgcgtcgtcgtcgccgggttcttcccccaccggtctcaacgtcagattcctttcctcgccgggctccgcctccccgtcgaagcccaagccgaagcttaggtccagtgccaagcccaagtcgcgcccctccttcgtctccccgctctcgtcgccgtcacccgcaccacgtacccgcaaacgcaccgtccgcggcgtcggctcctcacctgcgtcgtcgtcgccggggtcctctccagccgaactcaacatcagcttgccctcctcgccgggcttctccgcctccccgccgaagcccagtgccagggccaatctcgccgcgcgcgcccccttcgtcgctagcccccgcaccgccacaccttcccccgccgcgtctccccagcctgcttcggtgtcggcgaaggggttatccagcgtcggagacctcaggaccgccgtcgcctcacagatggagaacctcaagcgccgactcgacgcgctccattcccgcgctcacgacgacctcgatgcgtccttctcccgcatctccaagcgaatcaagacccaaaaccaagcctgtcagcatctggcagatgaagttgacaaggagcacaagaagatgtctgataatataaaagaaagttctgagattgccagggcaaagtacaagcagatcatcgcagaggcacaagcttccacaactcgtgtgtgcaaggtgactatccctgagatgacaaaatctgtggagaaagctattgatggtctgtgtacccgatataatatctcaatgccagtttaattaccaagtacaagttctactcactacacttctgaatagccttcacatcaatctgagatggtgtgatcgttatttcgacatccgtagataatcagtagagtacagggacatataaatatcgaataaagttcatgagcattggaaagtatgtaatatcgagagcttatcatcatctgtatgactatcccatttttccgccgacttcaatccgtagcaaagcaggccatggaatactaaactgctgtttcgtttgagaaattttcatttaccagtcaaccccagcttaatgtaatatactccccggcccgagttttttttct

SEQ ID NO: 181184 - DNA, 149 bp, Zea mays
  Clone ID: MRT4577_96817C.1
acgctttgttttcctaggggcgccacggagtatcctgttctcagctgaattttttcttgtaggttggtgtattcggtagttgtgttgtagtcactgtgctaaacaaatatttatgattgattggctgcaaaaagtgaagtgcgctattg

SEQ ID NO: 181185 - DNA, 299 bp, Zea mays
  Clone ID: MRT4577_96818C.1
cggacaaaatactaatttgggacttaaacacaacaacgggggttgacctcaaaaaacgctgcccgccactatgggactcacatgggccactggcagggcacaattacccaaacaatgaacgagagtcgccccacacgcacgcacacacatggggagctcgatgataccaaaaatcaacaacgaacagcgcccgttgggacgatccggacatccacctgtccagcgttttacttttttgacggatttccctcccccttttccttggcggtttttacttgaccatgaagggcaagcggctt

SEQ ID NO: 181186 - DNA, 1928 bp, Zea mays
  Clone ID: MRT4577_96819C.1
ggtggtgcgaaagcccacgaaggaaagcgaagctgcgaagagcggtctgtggcactggcagtgcacgtgtgccatgtgtgctgcggcgcggcgcacacggcaggcactgcacagccagcgaggcagaagaaacacagggagcgccgcgcccccaccagacctgccctgccccacgcgtccgctcgccgggctcgggcgttccggaagaaacaagcctggaaaatatattttataaacaattcgaccaaccccaagtccagacccgcagcgcccgccggaggcggagggaaccgagccggcgaccggcagaccgcagagaagaggcctggagccgaccgcagagaagaggccaggagccgaccgcaggcagccgccaccgcaccagaacccgaggtctcgaggcaatcgagcgcacgcgggtcgggggctgcggccatgtcggtgagttgcgggctcgagtgggtggtgtgccttggctgcacgcggtgggcgtggaagcggctcacctacatcggcgcctacgacagcgagacgtggccgccggcgtccgccgacgagttcgagcccgtcccgcgcctctgccgcgccgtgctcgcgaactacgacgacgagctctccagccccaagttcgcgccgccggagcacggctacttcgacatcgaccccaagggcatcctcaagcgggctacctacaaggaggtcggcaacgcgtgcccgccgtacctcgtctacgtcgacgaggcgcacaaggagatcatcctcgccgtgcgcggcctcaacctcgtgcgcaacgccgactacaaggtgctcatggacaacaagctcgggatgcagatgttcgacggcggctacgtgcaccacggcctgctcaaggccgccaaattcatcctggagcgggagacggagacgctgaggaacctgctgcgccgttacgggcccgagtacaagctcatcctcaccggccactcgctcggctccggcatcgccgcgctcatgaccgtgctggtggtcaacaaccgcaaggagttcgacaacatacccaggagccgtgtcaagtgctacgccctcgcgcccgccaggtgtatgtcgctcaacctcgccgtcaagtacgctgacgtcatcaactccgtcgtgctccaggacgactttttgccaagaacaccgactccgctagagtacatttttggttctatcttctgcttgccctgcatgctatttctcatctgcttgagagatacatttaaacaagacaagagaaaatttaaagatccaagaagactgtatgcacctgggcgaatgtatcatatcgttgagaggaaattttgcagatgtggaagattcccacctgaggttagaactgcaattccagtggaagggcgctttgagcatgttgtgttatcatgcagtaccacttctgcatcatggcatttattggattgaacgagaatcacaaaaggctttagagctaatgataaacagcaagaaggaaacgactccacctccgcagcaaaagatggagagattgcaaagttttgaggaggaacacaagaatgctctccagagagcaaagaccctggatgttcctcatgctgcggacctgtctgaagaggagattcaggaggatagcactgcaccaccctctgatactcatagcgaaacaaccacggaaacaaaatctggaggtagaacgagttgggacgaactgatggagaagcttttcaccagggatgaagatgggagacttgtcgtgaacaaggacgcgatggcgagggaaattgttgtcctgtaacgagtgccgagactgctctgtccgtggtagtttattctattagcgagctgtataaaagagtaagctgcggttgtgctataaaaaaaaaaaaaaaaaaaactcgagactagttctcctctctctctcctcgtgcctctat

SEQ ID NO: 181187 - DNA, 375 bp, Zea mays
  Clone ID: MRT4577_9681C.1
cgcaattcggctcgagtggaaatatggcctttgaatgctgtctgtgtccctgtcgttggtagcatgcactggtgagtgactacccttgttatgttacctagcctggatggaaatttacattcgctccacaggatggtttgctgcccgtgttagcttattctggaatccagtctgtgctcgtcagaaggaatgcatataaagggttcatgatatagacaataggccttcaaagacctcatcagaaggaagaaactagggttgaaggcttccatctaaaaggttcatgatgctcaaaaggatggatgaattggtttctctaaaaattcttgatataattaataattaagtcataattgcaagtctaaaacccaaaaa

SEQ ID NO: 181188 - DNA, 674 bp, Zea mays
  unsure (1)..(674): unsure at all n locations
  Clone ID: MRT4577_96820C.1
ggccgggnaactcgacccaacccaagtccagacccgcagctcccgtcagccgccggaggcggagggaaccgagccggcgaccggcagaccgcagagaagaggccagaagccgaccgcaggcagccgccaccgcaccaaaacccgaggtctcgaggcaatcgagcgcgcgcgggtcgggggctgcggccatgtcggtgagttgcgggctcgagtgggtggtgtgccttggctgcacgcggtgggcgtggaagcggctcacctacatcggcgcctacgacagcgagacgtggccgccggcgtccgccgacgagttcgagcccgtcccgcgcctctgccgcgccgtgctcgcgaactacgacgaggagctctccagccccaagttcgcgccgccggagcacggctacttcgacatcgaccccaagggcatccccaagcgggctacctacaaggaggtcggcaacgcgtgcccgccgtacctcgtctacgtcgacgaggcgcacaaggagatcatcctcgccgtgcgcggcctcaacctcgtgcgcaacgccgactacaaggtgctcatggacaacaagctcgggatgcagatgttcgacggcggctacgtgcaccacggcctgctcaaggccggcaaattcatcctggagcgggagacggagacgctgaggaacctg

SEQ ID NO: 181189 - DNA, 3335 bp, Zea mays
  unsure (1)..(3335): unsure at all n locations
  Clone ID: MRT4577_96821C.1
ccggcgccacgcgttcggaacaattgctctgttgggatggttttttggcgaggggagggggaaaggggataaattggatcaaatgtgctttgcttgttgcctcattgagaatgtctttcaaaggtgaattagtttgattagacggaacggcaggaatcgtttagttttcacgcgctaaagaaaggttgtctagaggaggtttaagtcatatctgtccatcatggaatgcaatgttcaatttgaggagcagcctgtaccgataaatggaccctgctttctcattgccccacatcgtgatgaatttggttcgtgcacgaagtcgggttgatacagaccagagaccaggttctagatttctgaagaagcaaagatagcgggcgtgaacatattatatatattctatttgtgtgtgctgcaagtctgcaactaccaatgttggttgttgttctgttgctgtcttgcttattctgaataaatgaacctttatgaactcagccaatcctgtattgtcaatttaattgttatctctggtagtaatgaaatcttagtctcatctgaagtctttgccttattttatggtctctcttccaggacgactttttgccaagaacaccgactccgctagagtacatttttggttctatcttctggtaactagatcatgttcactttctccagattcttatttgttcaggaaaaagaacaactgcatgtatgatcgagtttttcaccaggcctttatgctttggacagcttgccctgcatgctatttctcatctgcttgagagatacatttaaacaagacaagagaaaatttaaagatccaagaagattgtatgcacctgggcgaatgtatcatatcgttgagaggaaattttgcaggtaatgtatcatgtcattgcaaatagtatcttcccctgcttgcgaattgctcttttctttttttatgtcataaataatataaacaaaaacctactcttctagtatatgggagctcctgcggtcctgcctatggcttataatccatactacagtcttttcatgatttaaagcaaatatttttagtccttgtattttttctagcagaaagcagcaaagcttcagtctgctcatgcatgagagtatggaggctccaatcatgtattcttctatattgtttgaacagatgaaggctaccttcctcaacttccttacatttctgctggtcaattaaaagataaaatgaattacaaatattaagaataagttagagttcaggagcctagtacagataggttgtttcgaaattggcgagttatctggagattatcggataatatatgtatgcacctgggcgtatgtatcatatcgatccatgccagtacctaggtttgatgtatgttggtacagcggttagaactgcaattccagtggaagggcgctttgagcatgttgtgttatcatgcagtaccacttctgatcatggcatttattggattgaacgagaatcacaaaaggctttagagctaatgataaacagcaagaaggaaacgactccacctccgcagcaaaagatggagagattgcaaagttttgaggaggaacacaagaatgctctccagagagcaaagaccctggatgttcctcatgctgcggacctgtctgaagaggagattcaggaggatagcactgcaccaccctctgatactcatagcgaaacaaccacggaaacaaaatctggaggtagaacgagttgggacgaactgatggagaagcttttcaccagggatgaagatgggagacttctaactgtagtatcttgttgattacacatttatccaattgctaaatcttggccatattatatttacggttgatataccattgacttacaagaaattgttagaaaatgatagggaagttcccctaccatatatgtaatataaatatccaatataagaacgaaatagcatcacaagatatgtaccaactcctaaatagcagatgttcaacaagaaattgtggaaccatgtttgtatcactaacttatatgattttgccatatggaaaaccaaggaaaactctgccaaaactgtatttttccaagcatctacttgtttgagatttggctttacattttatctttttgtttgcttcccctatttctcttttgtgcgtatttttcttcccctaaaagctgttgtaaaattaagaagtacactttgtgtcatctttcttttgttgtaaattgtatttggaagatgtctaccttttaccaatattaataaacttggaaaaaggctgagctacttgggaacaaagtgttcagaaatgtacatctttgttgcagcaaactcagcagagcttcaacttctatatactggaacttgtggttgcttgcagcattggtatgctaacttttgcagtgaatatttgttgttgattacagatttatgtttttttgcagctaatgataaacagcaagaaggaaacgactccacctccgcagcaaaagatggagagattgcaaagttttgaggaggaacacaagaatgctctccagagagcaaagaccctggatgttcctcatgctgcggacctgtctgaagaggagattcaggaggaggatagcactgcaccaccctctgatactcatagcgaaacaaccacggaaacaaaatctggaggtagaacgagttgggacgaactgatggagaagcttttcaccagggatgaagatgggagacttgtcgtgaacaaggacgcgatggcgagggaaattgttgtcctgtaacgagtgccgagactgctctgtccgtggtagtttattctattagcgagctgtataaaagagtaagctgcggttgtgatatatttaaaactgtattcaacagcttatctatacccatatttatattcaaagtacactctacaaacagtgtaatatacaatgcaaaacagtgtttttttgaccatatgggtgaactgttatatattgcacccatatagtcacccaaaatactgttttgcaccattttgcaatgtacattacacgtttgtagaatatagtttgaatatgtgtatgagtatgaataagttgctggagatagtaggactagtttggaaagtggaaacttaaatcttttcgggattctcgaggattaagctcttcggagttctcgaggattaaagagaaaattaatctcaatcttcagaaatctcgaagaggatttaagtttttaaactagtccttagtgtttaaacggtcttttttagatcaaggtctatctggtagnnnnnnnnnnnnnnnnnnnnnnnnnnnnnnnnnnnnnnnnnnnnnaaaaaaaaaaaaaaaa

SEQ ID NO: 181190 - DNA, 343 bp, Zea mays
  unsure (1)..(343): unsure at all n locations
  Clone ID: MRT4577_96822C.1
tcagccggcgggcgggattacagatcttgggaagccaatatccgcttgttcctgnaaaagaaaatggagacgtggntcgntttgacggnactcctgntttcactctctctggnttacttttttattcatttaatttcatgaacttggattgatggaaactatggagacgatgaatcatcaacgtatacgcatgtgccgaaagatgacgacgacggaacggagacggcgaaagagatcaccaccccagactacccccacatccctcgaattaaggtaagaaaggatttacaggtgttcgtgcgcgtaaaggcgacaacggcgatgaagcaaaatagacgcgaaa

SEQ ID NO: 181191 - DNA, 487 bp, Zea mays
  Clone ID: MRT4577_96823C.1
gaattccgttgctgtcggtccggcaaggctcctttgcatgtttcaaacgggggcatgctatccatttattactgcccatcctgtagcattccactgtgtgataccatgaactgccattcccaccaccaaaaatatagagatggtccttcaatgcaacagcggctgcatatgcacgggctgagctcattgaacacagaggcactactctgtctgtcgtagggcaaaaggaatctagtgatgacaggcaagtactgcccctgtagccacccattaagattattgatggcccttccatattatcatgtcgactaccaaggagtgggactaaagagttatagttcgattgtagtttctcatactgatattccagttcctgaattcttcttcctgtgtccttcattgattccctcagaaacagcatttctttatctgactcagacagttttttctccattgcttggttcctcttggataactctttgacaat

SEQ ID NO: 181192 - DNA, 520 bp, Zea mays
  Clone ID: MRT4577_96824C.1
ccggccgggatcgctgaccctgaaagcgtctctgctagaaagagggcggagagactcgaggcacgcacatcacacactgtcttgtctgctcgtcccatagctttcttggatcgcgaggaatccactggaaattctgtaattgtagtagacaactgcatccgatcgacgaaggtgcatggtgttggtcatggctcacggcaatgaacagagacgaacaggttgttgctctacccccagctcattgatcctgtcctcgctataaggtacatcctgcggaggcctgcgaatattactcgatcgaacaccacatgaatcggccacacggtgccagccctcctctggctgcgatgaccaattccaacgatgatggataccgcgtgatctggaaggatgctgacgcagacacggacgcacgacgaagagatgattgcgaacattggcagcggggataacaagcggctcctgagcttcaaccagatgcgcgctctggaacccagcttcaacgtggacaacaatctgg

SEQ ID NO: 181193 - DNA, 288 bp, Zea mays
  unsure (1)..(288): unsure at all n locations
  Clone ID: MRT4577_96825C.1
cccaagcgngcgcccacacgcccgccccacctccacgcactcacccnctcacacggggaagcgggcactccagccgagcgcaaacgccgcaacgcacccgaacgctgcgagcgcacccagctcacaggcggccagcgcacctacctgatcggactctgcccgacgagcttgctggctatgcctcctcaagctcggttccatggccttcctcgccttcgggcagctggagctcacctgcgctctgcagctcgagcagatccctggtcgacaggccgcgcacttcagtga

SEQ ID NO: 181194 - DNA, 164 bp, Zea mays
  Clone ID: MRT4577_96826C.1
taccgtgattgccagcggccgacccgcccgatgcgcgtgcctcagccgacctcggcaacctcaacctctcggacaccacagagaagatcatcgccgagtacatatggatcggtggatctggcatgcatcccaggaccaaacccaggaccctcccgggcccggga

SEQ ID NO: 181195 - DNA, 522 bp, Zea mays
  unsure (1)..(522): unsure at all n locations
  Clone ID: MRT4577_96827C.1
tgcaccnatgaacacggtctatgcaccctggcgtaccggctgctctctacaacgacgacgagcgcctgggcacgaccactgtgatcttctggctcgggacctctcgtggtatgctggcatctcgacccttctaacaccactacatcctcccggctgctgccgtctcggccctctcctccttcatgacctacggttgatgagcgggggttggctgctgcagcagtgtcggactgacctacgggcggtgggccatgcagcggcagaatgccatcattcgtctagcgaattggactgccggcggtcggttcgagtcatctgtcttttgttctgaaatctgttgcgtggcgctcagacgtgagattaggattgggttcgctccccgaggatgtaataatctcgcgactactcgaggcgttcttccactttgctcgtatgattgctgtgttatgaaaagtgagtgttattaccatgtatcagcatccctcgttggcagtgagaagcttgttggttcctaacaaccaa

SEQ ID NO: 181196 - DNA, 389 bp, Zea mays
  unsure (1)..(389): unsure at all n locations
  Clone ID: MRT4577_96828C.1
ggcatttactttataatcatgcttttgcaatgttattattccggagacttagttgagtataaagcgctgaggctacacnccggaaaaatttgggtccaccgcctttaattttatgctacagagtgcaaaccgctttgggcgcgggctaaaaaaaaaaaattttttcaaacctccggggtggaaaaaaaaaaaaaatctatttttaaacccgctaaaaacgacttgggctttaaatgaaaaattctcccgggggggggggttcttttaagatttttgccttaagcgggtattttgcccatcccgccctccggggctttcctttgccattaaagggggaaaagttgggccaaaaaacctttttttttacctattaaaaattttttttgggg

SEQ ID NO: 181197 - DNA, 355 bp, Zea mays
  Clone ID: MRT4577_96829C.1
tgggacctcgaggcggcgggccggggttgcgatatctagttttagaagaacggacctttagatggtgcagtgcactcccgcaccattggggactgacctgatcccggtatgtgtagacccactagactgcttggctgctgatgtgttcctgtggaggaacaggaacatctccgcctgagtacttggacgtagccacaccaatctgggatctatttccaatgcttgactaccatcttcctacctttgactgacatggtgtcatattctccccgaggacctccttctctgatcttatgctgctatcatatatccacgagatctccccctgatatcgcatactcggatgttcctgcac

SEQ ID NO: 181198 - DNA, 844 bp, Zea mays
  Clone ID: MRT4577_9682C.1
tcgaggccggccgggctccatgatgacttctttcagtacccataaaatattattagttgttccgtgattaaatgataatcatgactcttcaacccagataacttctctgtcttcagattcaaatcgcttctatacaattaggatggcacacatgcatgaatcttcttatgatatatcatgacatgaaagcaatttttctgaccggtacatattttttggcattttatgattcaccggacgaatatgactagtcaagttcactagctctttatagaaattatttaagaactattgatcactcgttttttatctctaaagaatatcgaaaacaagacaacataagtcattgaattagaagcttcgctcttcaattaactctccttcgaaggttaattcaagaaagaagacgaatgacataacaataagatgatgaaaacaattgcaaataaaaaagagtaagatatatcactcatctgtttgtggtacacattattttattccttgcaagatatcaaatgattacaagtatgccttcggcttcacacaaacgagagctcgaaggtatatttgaaggatgagcaaatcagtgttctgggctcgataacgtaccattatgcatgtatgacattgtttctttatttataatcgtgaggtacaacttcgtatgaattacaaacatatccttaaactctatacatgataactacaaatattatgaggtccatattgtacttctcgcatctattcgtcttgcagatcaaatcttccacaacctttatcttcgtccccacttcgtacgctgaagcacatcgcatgaagctagctccttcaaatcatatgactc

SEQ ID NO: 181199 - DNA, 211 bp, Zea mays
  Clone ID: MRT4577_96830C.1
gcagagcgcgctggaggctgagatgaaggatatctttgtccgctacagaggattcgtcaagcgtaatggggtgggtgtcttcgcggtagtgttgtaagaggcagacgtgtccaaggccattctaggttacatcactgcaaacttgatccagagcattgcgctcgtcctttccagcataaatgcattcaccacgaaattcaagaacgcggac

SEQ ID NO: 181200 - DNA, 528 bp, Zea mays
  Clone ID: MRT4577_96831C.1
accctaactcctccgaggggacacgagggttatgagacggacggagaaagatactatggagggcgcgcaggtccggacaccaaaccatgaggtcggagttctgtggcaccttgcatcattacaccgggcagttgacctatatcgcctcttattgagggcgaccccatacttcggatcgacatgaagctaggctatgatctcatttacttacgaagatgagcgcgacgcatatgatgctataaggggtgtaggcaatgcttatttaggctacgacaggcgcaagctctgtgagcaatggcctaagtaagtggaaccgtggccaaagagccgtgataggcctactgctgatgtactgtctacgaaaaccctctttgcatgaagtctgacctcatacacactaatgatcaagatattgagaagcatctgcaaccgtatgggatgattgccaacattgacattcaaaggatctttgtgtttgcacactttgagacacatgaggaagttagtgccgttgctaataacactgac

SEQ ID NO: 181201 - DNA, 309 bp, Zea mays
  Clone ID: MRT4577_96832C.1
atgacgacggtgttgtccccaactacggcgaccaccgccaagccgccgcccagcaccatccctttcccttctcgtcctggatgtgccgccacctcccccaccgggataatgctggcggcggcagctcgacgagaagaaccaatggcatggtcgtgctatggaagtcgcagatggaggggaagagacgattggaaatcggaggatgatggttcgaagcgccaaaaaattgtaaggatcctgggcagatgggtgaggtccgacgccaccgccgtcaaggtctcgaggggcgtcgaccgagagccggagtaa

SEQ ID NO: 181202 - DNA, 149 bp, Zea mays
  Clone ID: MRT4577_96833C.1
cgccgttttctcgctctcgcgctcgccttacctgggatgggatggcaccgcacgcacacgaccatccttctctcctctcttcacctaccgattctgcgcgcatagaagaggcactccttcatcgtcagctgcctttcgcatgtcggcat

SEQ ID NO: 181203 - DNA, 919 bp, Zea mays
  Clone ID: MRT4577_96834C.1
ccgacagtcaaataacaagggctaagaaaatattttgctcagtctgttgaaagtgcccttaaacaaaaataagtatctctgtagacaacaatgcataatgaaatcaaatcgaagctttcattcttaaaggcttagcagcacattcagaagtatcctactcaaatagatagaagcaaagtttttttttttttttttgggaaccaatttggtcttgatatttttgaaccagtagttgggatgcagagaaccaatttggtccaccggaaccactaacaggggaagatgctccagccaactttctagacaaataaagatcagccatgtcgtcgtcatcatctaataattacggaagcacatctctcacctggcaaatagagaacagttcccagccaactttctagacaaataaagatcagccatgtcgtcgttatcatctaataattgttcaagctcatatctcacctggcaaatagagaacagtttgtgattcctatcacaagaaaaacggaagaactgatccacaaattctacatgtctctctatgtttcatgcatgattcagtcaacctcaccaatcctgtctcgccctctcggcgtcttttgcttccccgggccacatatctgtccatcatggccgacaccgccgtcgccacaaccacggtctgctccatgtgcagtgacgtcggcttcaccaagaagctcttccgacgagggtgggacgcaagtccgatcgcgcttgcagaagggcgtctagttacacgagggcgacaggggatgccgtggcaaggaggaggcacacgaggccacgacgaggaggaggagcggggcggctagccaccgcaacggggatccatggtgcacgcaacagggcgtagcagacgggtggatttgggactgaaggcgagcccatggcgttggcg

SEQ ID NO: 181204 - DNA, 236 bp, Zea mays
  Clone ID: MRT4577_96835C.1
ccggaatgccggcgacccacgcgtcgcacatcgccacagccaacactaccccggcacgacagccgcggagaagaataaactcactgccaccaggaaggggagaaggtctgtcgcaccaggccgcaccgccgaggctgtattgtgcaccagggattaatgctggcggttggcatacactgtcaccccgcggctggcgtcggcgctcacttcgcgtgccgcaggctgagggggccgcg

SEQ ID NO: 181205 - DNA, 160 bp, Zea mays
  Clone ID: MRT4577_96836C.1
gaagcaaatcaaagccattaatgattcattttttcagttggaaaaatgtgttgagatcttttccttagtgatttcatagtcctgacattagacattttcctaaatttatatttgcactagtcttatatctggtccttttcttaagcgatggaccctcctt

SEQ ID NO: 181206 - DNA, 762 bp, Zea mays
  unsure (1)..(762): unsure at all n locations
  Clone ID: MRT4577_96837C.1
ccggccggccggaaacccgtcatcatctccctcctccctcttcttcctttttccctcaaccacaacctttcgactatttagctgcctgaaaccaacagtcatcgcgacacttgaatccaacacacttaccgcctccacaacaaccatcaccgtcaacatgcgcagcaaattcaaggacgagcaccccttcgagaagcgcaaggctgaggccgagcgcattcgtcagaaatacgctgatcgtattcccgttatctgcgagaaggtcgagaagagtgatattgccaccatcgacaagaagaagtacctcgtccctgccgacctgaccgtcggccagttcgtttacgtcatccgcaagcgaattaagctgtctcccgagaaggccatcttcatcttcgttgacgaggttctacccccgacagctgccctgatgagcagcatttatgaggagcacaaggatgaggacggcttcctctacatcacctactccggcgagaacacttttggcgaagcgtaaggccggtgatgcaggatcggttctatcttctaagtcggaaatgaagaaggcgtcacggtcgtatttttgggtgaacgttttttgatggttacttgttatattcttatcaactttctatgtccagacaccggactcgaatagagtgttcacagctccttatggcaaaaaatccgcggccctgttgctacataggggcagcnggagacaaattgtaaccaccgaaaaaaaaaaaaaaaaaacccgcggcc

SEQ ID NO: 181207 - DNA, 366 bp, Zea mays
  unsure (1)..(366): unsure at all n locations
  Clone ID: MRT4577_96838C.1
tctgacagaatcatcgcaccaaaaaacagcactaaactgtccgcaacggtatccaaagtgtacaaacgctgcccgtggattatcgtactcttatacatcatgatggatctcactcatctctatcatatcaaacaatacaggccagatatgcggagacatggaccagaaaacggatccagatatacctctaaagaccaggcctgtcctttatttttctgggcgtgcgtcgccatcaagtaccattttctccttccctacgtacgagactaacctcctgatctcatctcgatgccgngcgcggccggcctcctcccaatggccatttaatctacttggcggtggcctcgtgtagtgatagaatcaaat

SEQ ID NO: 181208 - DNA, 775 bp, Zea mays
  unsure (1)..(775): unsure at all n locations
  Clone ID: MRT4577_96839C.1
cattgggtacctcgaggccggccgggaaacataaccgctcgaattcgcaacggcaaacccggcccgcccgactagcaaccaacaaacctcgtttaatagcctccttctactttttggcttttttgcccctcatcattaccctcataccgccacgaacccttaaatctcctcggtaactctacgtgcaccggctcaatcgactccaacgcttatctctatctactcttactttatatatatcactctgccattcgcaccgacttgacggtcaattgtacatccacaagcagtccgagtgaaacaccatgtccaacctcatcgccaccaagcgcgtcgacttgctcgcgccttatctcgcgctcgaccagggctcgcgggtccaggctgaatacatctggattgacggcgatggcggtctccggtctaagaccatgaccctcgacaaggcgcctgccgccgtgtccgagttgaaggagtggaactttgacggttcgtccaccaaccaggcccccggtgacaactcggacgtctttttgcgccccgtcgccatcttcaaggacccctttccgtggcggtgccaacatcctcgtcctctgcgagtgctacgacaacgacggctcgcccaacgtgtccaactaccgtgcccacgccaacaaggtcatgaaggctgccgaggccgagaagnccctggttcggtctcgagcaagaatacacgctctttgacgccgacggacagggtctttggctggcccaagaacggtttccccggtcccca

SEQ ID NO: 181209 - DNA, 338 bp, Zea mays
  Clone ID: MRT4577_9683C.1
cggggcggaccaagccgtccgccaacccttccaaagcaggttcgatttattattattactagctggtccaaatactacccggcttgccagcaagttggccaggggcccaaccgtaataatggcctcttcggaaaccgccgtcgccccgttcaagggtttaaagtccgccgccggcttcccggtgtcccgccgaagaaccagaagcttgggaaacttaagaaacggcggagggatccggtccatgcaggtttggccggcctacggcaccaagaagttcaagacgctttcttacctgcccccctttgtcaacggacaacctgttgaagcaggtggactac

SEQ ID NO: 181210 - DNA, 1518 bp, Zea mays
  Clone ID: MRT4577_96840C.1
atgtccggtggcacaccggacagtccggtgcgccagaccagggtgaccttcggttggttttgctcctttatatttgaaccctttcttggacttggtattggtagcctgggtcttagagtgcgaccctcttctaaggacattgaagctctaattgccccactctggagtctcctaaagaatgagatgcagattcattttgaaatgtcaaccagcactgacgacgcagagatggacactgtacttagcttgctggctggggagtcgtctgactccgccctcgtcgagccaatggctatcacagatgggcaagaacttggtgaagtggtgaaagcccagaaacccgaaggtgcccgaccaaaacgttcacgccgagtgagccgatcgattgcacccgttgaagaaaaaaggaagaaaaggcagcttcggcgactgtcgagcttggaccagggtgtgggtccttttgctccggttccagatgagacaccggtggaggcccttcctaaagttgacaccaaggatcgtgattgtgcaccagccgctgctttcatattttatgaagatgaggaggaagaagaagaagtcctgctgatccgtaagaatagcaggcactgtagaggtagtgaggggggaagtgatattccttctccagccctgtcaacccttgtcagccttcagggactgtcaatatcgaattttgatcaagcacttaaggacgtcatccccgaggacatgctgacagagccgactgccgatgatgtgatggctatttgcttagaggttccaggcgatggattggaggtatcccaagtggtatctcgcgcatcgtcgactttggaaggcagtcttcaatgtcaagatgctggtttgagtcacctgactcccatggaggttacaaaagagctctcagccttagaggtggctactgcggaagacccaacccccgagggtggtgctggcggttacctagcccccgagggtgttgtcggtagtgatccagctctggtgggtagcgcgagctacaacccagcccctaagagtgttgttggtagtgatccggctctggctttggttgatggaatgtctgtccagctgaggttgtgcggtgccgctgttccggaagaagctctgtctctaatgcaatggaaccccttgctgcttcagaaacagattgctaactcgaaggcatcaaacgctgctacattgtcagatatggcccagcggtgctctgatcttgaagaaaaacagttggtgtcaagcaaggactccaccatcaaagatctagagtccgctcgactggctaccaaagtttcagaggacaattgtaccattttgaaggctcagcgcgacaaggccatggacaaggccgttcatgctggacggatcttgatgaggcggcctggcgtcgtggtgcctgacgatatcattgcggatgtcaaggctgcgcccgatgcttcgagtcgtccttcctcttccattgctcctgtgaaggacattgctaaaggtgtttcaatgcaataa

SEQ ID NO: 181211 - DNA, 382 bp, Zea mays
  Clone ID: MRT4577_96841C.1
ccaaggggaaatggggaaaccgggttatcctttggaaaaaaaccccttggggcaggtttataacaacctcctggaaccattttaggaaattcaaagggcttttaccccctttttttttacaccccaaccacctaatttaaccggttaaaggctaaaaaaaaaacccccacccccaggaaaaaaaccccaattggggcggggatttcaagggggggggggccccctaacatttaaagggggcccttttggaacagttcctctttttccagggggggtttaacaacagtttgcaggggggcccccataaacggaacaaccccggggaaccccttaagggggccgcccttgggttaagggccccccgccctggggccaaattccg

SEQ ID NO: 181212 - DNA, 809 bp, Zea mays
  unsure (1)..(809): unsure at all n locations
  Clone ID: MRT4577_96842C.1
ctcctaggtcgtcgtcctcgttgagcagcggcggcgcgcccatccaggcgccggacctccggaactgccacccgcccgacctccccgacacggcggaggacgtcaactgctgcccgagcccggggatcgtcgacttacgagaaggccgtggcgctgatgaagcagctgccggacgacgacccgcgtagcttcgcgcagcagtggcgcgtgcactgcgcctactgcgacggcgcgttcgaccaggtcgggttcccggacctggagatccagatacacaactgctggctcttcttccaatggcacaggttctacctctacttccacgaaaggattcttgggaaactcgtcggcgacgacaagtttgcactgccgttctggaactgggatgcgcccggcggcatgtcgctgccggcgatctacgccaacaagtcctccccgctgtacgacgaaaggcgtgaccctgctcaccagccgccattcacgcttgacctcgactacgacgggaccgagccaaccataccaagagctcagcagatcgatcagaatctaatgatcatgtaccgtcagatgatctccggtgccaagaagaaggaactcttctttgggatgccttaccgccagggcgaccagccagatccgggcgcgggcaccgtcgagagcatcccgcacaacccagtacacttctggagcggcgacccgaggcagccgaacggcgaggacatgggcaacttttactccgncgcgcgcgacccgctcttcttcgcgcaccacggcnacatcgaccgcttgtggtcggtctggaacggcct

SEQ ID NO: 181213 - DNA, 1974 bp, Zea mays
  Clone ID: MRT4577_96843C.1
gggtaccccctcgaggtcccggccgggaaaaaaaaaaaccggccacgtacgacttcacagttcacactccacagcaagttcaccactgagtagcagctaccgccatgttgatcgccaccaccatgccacgaggtttcgctttcgcggcgccatgccgcagcctccagacgacgacagtcaggtgcaaggctaccggcgccgccgaccgccgcgacgtgctcctcggcctcggcggggcggcggcgtccggcctcctcaggtcgtcgtcctcgttgagcagcggcggcgcgcccatccaggcgccggacctccggaactgccacccgcccgacctccccgacacggcggaggatgtgaactgctgcccgagcccggggatcgtcgacttcactccttcgccgcggctccgcgtgcgcccggccgctcacctggtggacgcggagtacgtggccaagtacgagaaggccgtggcgctgatgaagcagctgccggacgacgacccgcgtagcttcgcgcagcagtggcgcgtgcactgcgcctactgcgacggcgcgttcgaccaggtcgggttcccggacctggagatccagatacacaactgctggctcttcttccaatggcacaggttctacctctacttccacgaaaggattcttgggaaactcgtcggcgacgacaagtttgcactgccgttctggaactgggatgcgcccggcggcatgtcgctgccggcgatctacgccaacaagtcctccccgctgtacgacgaaaggcgtgaccctgctcaccagccgccattcacgcttgacctcgactacgacgggaccgagccaaccataccaagagctcagcagatcgatcagaatctaatgatcatgtaccgtcagatgatctccggtgccaagaagaaggaactcttctttgggatgccttaccgccagggcgaccagccagatccgggcgcgggcaccgtcgagagcatcccgcacaacccagtacacttctggagcggcgacccgaggcagccgaacggcgaggacatgggcaacttctactccgccgcgcgcgacccgctcttcttcgcgcaccacggcaacatcgaccgcatgtggtcggtctggaacggcctccgccccggcaacagcgacttcaccgaccccagctggctggacgccagcttcctcttctacgacgaggaggcccgcctcgtccgcgtgcgcgtccgggactgcctcgacaccgctgccccgggctacgcctaccaggacgtcgccctgccgtggctgaacgccaagccggccaaggagaccgggtctccggcgcccaccgcgggcgcgctcccggcgacactgaaccagaccgtgcgggtggccgtgacgcggcccaagacctcgaggacccgcaaggagaaggacgccaaggaggaggtgctggtcgtccaggggatcgagatcgccgaccactcgagcaggttcgtcaagttcgacgtgttcgtgaacgactcccagagcgggggcggcatgccggcggcggcgcagtgcgcggggagcgtggcgctgacgccgcacgcggtccggcctgggaagggcaagggcacggtgaagaccgtggcgaggttcggcatatgcgacctgctcgacgacatcggtgctgacggggacaagacgatcatcgtgtcgctcgtgccgaggtgcgccggggacatggtcactgttggtggcgtcgggatcgagtatgtcgggtgaggtcctacgtcctacgtaccggagtgagagtacaggtgctaacgcgtagcaacatctgctctacgagtatatatatatgaggtatatatacacgaataactgtgtgatgatttacgagtatacctacgtgtatcgcggagtgtgggatttgtgtttgtgctgccgaaacagcaggatgctagaaaaaactcaaagatatttaagttaaaatatttaattcttggacttc

SEQ ID NO: 181214 - DNA, 2325 bp, Zea mays
  Clone ID: MRT4577_96844C.1
aaaaatacaaaaaaaaaaaattgggaacctcgaggccggccgggacggcgaaatcaccgctcgctacctagtactcgtcactcgtgtacacgtgtagcaagcacgaagcagcaaaggcgggatcggcagccatggcgatgatggacaagtggacaggcctgggctcggcgctggcaagcatgctcttcctctggtccatggtgcagaaccacctccccgccgccttcggctaccgcctcagcacctgggggaacaagctcgcctctctcttcagcccttacctggagatcaccatctccgagtacggcgccgagcgcttccgccgcagcgacttcttcctcgccgccgaggcctacctctccgacgcctgctcccgccgcgcgcgcaagctccgggccgacctcggcaaggacagcaagaacctccaggtctccgtcgacgacaacgacgaggtcaccgacgccttctccggggccaccatctggtggtacgcgtccaagcagctggccaggtcacaggtcatcagcttctacccgggcgaggacgagcgccgcttctaccgggtcgtcttccacaggcgccaccgcgacctcgtcgtcggcgagtacctgccccgcgtcctcgaggaaggccgcgccgtgaccgtccgcaaccgccagcgccgcctcttcaccaacaaccccagcggcagctggaactcctaccgcggcaagagcgtctggagccacgtccccttcgagcacccggccacgttcgacacgctcgccatggacccggacgacaaggaggacatcctcgacgagctccgcgcgttccgggacgctaaggcctactacaccaaggtcggcaagccgtggaagcgagggtacctgctctacgggccccccggcaccggcaagtccaccatgatcgccgccatggccaacttcctcgactacgacgtctacgacctcgagctcacggcggtcaagaacaacaccgagctgcggaagctcttcatcgagaccaccggcaagtccatcatcgtcatcgaggacatcgactgctccgtcgacctcaccggcaagcgcaaggacgacaagaagcgggcgtcggccgaggcagacgacaagcccaaaactccaacggatcccgacaaggacgagggaagcaaggtgacgctctcagggctgctcaacttcatcgacgggctgtggtcggcgtgcggcggcgagcgcatcatcatcttcacaaccaaccacaaggacaagctggacccggcgctgatccggcggggcaggatggacaggcacatcgagatgtcctactgccgcttccggaccttcaaggtgctcgccaagaactacctggatgtcgaggagccgcacgagctgttcggccagatagaaaagctgctcgaggagacggacatgtcgccggcagacgtggccgagaacctgatgcccatgtccaagaagaagaagcggagggacgccaacgcgtgtctggagagtcttgtggaggctctgaagcaggccaaggaggatgctgctgctgctgctgctgctaaggcactagctgacgctagggcggccaaggaggaagcggaggaggcgaaggagaaagaggccaaagagaaagacgaggcaacaaatagcaaaggagcagcagacccagcagggaaggacactaagatgagcaatggagatgttactgccaataaggaaggtgatgacgagtgacaagtatagaatggagagagctcgcttgctagtgaagtaatggagaaacatggctataaataatgacaccagtggcctatgtaaaatagtgtagtctctagtgaagattacagtcacacgtcgtcatcttccatgttaaaaagatagaaagatagacttgatttggattagttaaaaatagaaagatgtaatgtaacaaccaaatcaagccttctttgcctttcaacttgtaaaccaaggcgacagtgaatgttgcctcatatatactagtaactgtcgcgcgcctttgagcacgctaccaaaagccaggcgcgctggctccgagccttccccgtgcctccaggctaagaaggccgaggcagagggcaagagcacaggcagcataagcagaggccagggcggtataagaggaaatgcgctaaaaaaaaataagccctatacaagcctgaaagctaggtgaggatacttgacttaggcactcctttgcaaaggtggtggtacctagaattacttttcgcacttgtatgctaactatcaggtgggttcaagaaaagaaagaaaaaaaaaaaaaaccacagggcggccgatctagaggatccagtgc

SEQ ID NO: 181215 - DNA, 111 bp, Zea mays
  Clone ID: MRT4577_96845C.1
gaaaacaaacggttacttattgattcatcgttacacgatctttaccagaaaaggttacaagagacatgtagtgatttattctatggcgacagccggacgcgtgtgcggtca

SEQ ID NO: 181216 - DNA, 427 bp, Zea mays
  Clone ID: MRT4577_96846C.1
ggaaaaaacgcccatcctttcaaatatgcaaattggggaagatacatagctaaggttttacccccaaacaaagggaacagtggtacccaaaccaaatacatgggtggcacactaattggacatattatttgaaaaaaagcagcttttgaatcacaaagcagggcatccgaaaggcatgcccttagtggggaaaacttttccccccttaggcaaaagggtggggatactcctaaaaaacccttaacttaacaacgcaaatttaaacagtttgaccccttatgaaaggggcggaaaatagctagctaaaaacctttttggggggacaaaagcggggccaaactcaagggactcatccttggatatccacatttgggggaccgtcctgggcgacgcagggatggagccaccaatccaaacctggtttttt

SEQ ID NO: 181217 - DNA, 1379 bp, Zea mays
  unsure (1)..(1379): unsure at all n locations
  Clone ID: MRT4577_96847C.1
ttgggtacctcgaggccggccgggtttnctacgaagagggtgtttggtttttcgtgcctttagctaaccgactagggattgctagctggaaagagcagctggagaatctttgtttcaagtatttgaatccggaagagcacagggagctgtcatccaaacttacagaatccttcgacgaagagctaatcacatctgctgtggataaactggataagggtctgagggacgctggtgtctcgtaccacaacctttccgggaggcacaagagcgtgtacagtatccactccaagatgctgaagaagaacttggcaatggaggagatccacgatatacatggcctgcgccttgtggtcgacaacgaagaagattgctacgaagccctctgtgtcgttcataaactgtggcctcgagttactggtcggttcaaggactacatatcacgtccaaaactaaatgggtaccggtcgctgcacaccgtcgtcatgggcgaaggtgtccatccgttcgaggtccagatccgcacgagggagatgcatctgcaggccgagtacgggttcgcggcgcactggaggtacaaggagggcacctgcaggcactcgttcgtgctccggatggtggagtgggcaaggtgggtgctcacatggcagtgcgaggcgatggacagagaacggaccgcctcccttggcagtgatgacggtactgtgagcgtgaggccaccaccagcatgcccgttcccccagcatgcagaggactgcccatactcgtacacccgccaatgcaaccatgatggaccgctgttcgtcatcctcttggagcatggcaagatgtctgtccaagaattcccggcgaacttgacggtgatggatctcatggaccgcgtgggcgccaacagctcgagatggagcccctacagcattccgatgaaggaggacctgcggccgagggtgaacggcgagcccatatgcgacccagaccggaggctcaacatgggggacgtggtggagctgacgccggccctgcctcgaaagtccctcagcgggtaccgggaagagatccagcgcatgtacgatcgcggcggcttcgcgctctcagcccggggcggcggcggcggcggcggcggcgccagacgctgctgagagacagtagcaagacgacgatgcgtagccctttttttttctagtaccattgtaccattcaattcgttgtaaatacgtagtatagcaggtaggtaggccttgcagccggggtgggtgggttctgaaatctgttgcaccctgtcctgaaccccatgcagtgtgtaaaaagtagaacgctgtgtatgtaagctgttcaagttcgtctcagcttctatctcaggccctgtttgaattacaaggact

SEQ ID NO: 181218 - DNA, 836 bp, Zea mays
  unsure (1)..(836): unsure at all n locations
  Clone ID: MRT4577_96848C.1
ccctcggtgccggccgggatcttccgaccgctctttcttcttccttacgcgcgccgcgctcctttctccctgcacgcgccgagcacactcctctgctcggtccttcccctggacactcctctcagccgaggtctcgcccagctcgcctggccgctgcgcagcccccttggcttcatctccctccttctgccctctgacgatgctcttcctcaaatcttgccagccaacgtcgcctcctcctggtggtgccgagctccttcctcttgcttggatccggccatcgttttatggtagctggcctcgcccctcaagcccggccttcgtccccatggcgagctcctggcccctgctcgagtttcacctggccgcaccctggctcgccccctcagcctgccgcgcgcccctagtcaagcttgtccccatggcgcctagagcttctttccccagtcgcgcctgctctagctcatctgcgcgcagctgggaactcccctacgcttgtcctgtgccgaggtcccgccatccgcgctctgcccagtcgcccagctcggatttcgcttggtcgcccgccgttcctcgcacgcgcccatctccctgctgttgcgttggccggagtttcctgctcgctcggccgaccatggtggctgcgcaagtctcctgaccgtgggcagctctggcccaggccactaccgtgcacgggatatggcgtgttcctgcactcagccttcgtctgtttcgcgccgatctgcgctcgcccgtggccgtcgaacccgcccagctncttgctcgtcatggccttggtcgtcgcatcgttgtgtgtagcggaagcgtggtgggtt

SEQ ID NO: 181219 - DNA, 796 bp, Zea mays
  unsure (1)..(796): unsure at all n locations
  Clone ID: MRT4577_96849C.1
caggccggcgggccgggccttccttcaagaaggcgcacgtgtacccaaagagattaccgtagaagagatcaaacaaactactcaacaatttgtcgatgcagccattcgtgccaacaaagctggattccaagtactcgaactacactatgcgcatggttacttggctagtagcttcttgtcacctcacaccaatagacgtactgacaactatggtggctcattcgagaatcgtatccgatttgcactcgagacagcagatgctgtacgcaaggtatggccacaagagtacccattgttcgttcgtatcagtgctgcagactttattgacccagtacacgctgacaatggtcaatggacagtagaagattcagttgaacttgcgaaacaactaaagtcagttggtgttgacgtcatagattgctcgtccggaggtaactcacctttctacaagacacctactcgtggtgaaggataccaagtaccactagcagaacaagtcaaagccgaagctggaatcaatacagcaggtgttggatctatctatacaccaagctatgccaatagcatagtacaagaaggcaaagtagactttgtactattaggtagacagttactagatgagccatcgtggccaacaagagcaggcgacgagcttggtttctcagttaatagactagatcaatacaagtacggcaagttcaagaagtttccactgtacaaatccgattanagatcctattgttacggtgaacttgtgctcacctatcaaaaaaaaaaaaaaaaagcccctagggcc

SEQ ID NO: 181220 - DNA, 289 bp, Zea mays
  Clone ID: MRT4577_9684C.1
caataacatgcaccatccattatatttatttattaaattgactctatcggatctgctatagtggggtttataactggggagggtgacaattaagttcatcgtactatgcttgaacttataaaccaccttgataatttttaatcatcacacaatattaaagaatttatgacaacgaacagtatagacattatccatcaatccctactgagtcctctccctataaacagtaatattgaattccctaatcctatcgaagattcaaaattcgatatatcaaatatccaatcaa

SEQ ID NO: 181221 - DNA, 1059 bp, Zea mays
  Clone ID: MRT4577_96850C.1
ctcgaggccggccgggacctctcactacgaccggaggggattgccatgtgcagttctactctaccgtccgtacccctgcatcgagccgatgtgcgtccaccagtggccggagttgaaggagagcacgtcggcgtcgcgccacgactcagcgttctcggagatgtcgtccagcatcagcacccgcttcccctggaccacgtcgatgtccaccaggtgtacaaagggtccgcggagacgagctgcgccggcgactgcggcgcggcggcgtgcagcaggcagacgagcgactcccactggttgcgccccagcgagtcgcccacgaacatcaccgtcttccccttcatccgcgtcaggaagtccgcgccatcgaacctggtagctcgcatccggccggcttccagaggtaccggaggtagtcggagtccgggcggccgtagagctggcagttgaactccgcgtcgatgagcgggcagttgtacccggtgtacgccgccgaggccgagctaccgccgtcgaggacccagctgccgctgaagacgtcgcagccgccggcggccagcccgggcgtggcatcgtgcctgtggcgccgcgccaggccgacggagagcgcagaggctgccgggagagagaaggcgtggagcaggacgaggacggaggaggacaacgcgacgacgccgaggacggcactcttcctgcgggacggcagcatcgtggcaaacaaaagagaagagaacggaagcaaagccgtctttttgatggcccctttatgctgctgctcggttcatcgtgtaaccccgagtccagaatccagatagccgcgagtaatctatctagctgcgctaattttcaggagttcgatttaaaaggaggtgtgcatgttagggtaaaaattgccgctagaccccgactggagttcacgtgagggtgttcgagatctcgtaagtagtttgcccccgtatggaatccgtggattcgttgccttgcccggtttgcccttcggggtacgtcggtgtaggaacatccaaagatttgcagccatggaattcgtgcttttttggg

SEQ ID NO: 181222 - DNA, 366 bp, Zea mays
  Clone ID: MRT4577_96851C.1
gggcaataaagcaaacggttgcataatctcttcggctcgacagaccaccagctagtggggcgagtaaaaccattaaccaatgcgcacacactggacaataacatgaggtaaactaaggaagaagaggctccctagctaagctagaaagacgggctgtatatcatgaggaaatggccaccttacctaggggtggtcctctggggaccagggaccagccacacctgcgtacggacgcccttttattggccacaaacacatcaccggtaaagtcgcttccttttttttgcggcaatcacatgacatccggcgctgatgaacaacttgggggtgctggcatgccatggcacatgtgttttagcggacatc

SEQ ID NO: 181223 - DNA, 800 bp, Zea mays
  Clone ID: MRT4577_96852C.1
aggtgtgaggccgcgctggaacgccaccgtgcggtccatgtcctcgtagtatcgcccagactcgcccatgtagtcccacccctgcatcgagccggtgtgcgtccaccagtggccggagttgaaggagagcacgtcggcgtcgcgccacgactcggcgttctcggagatgtcgtccagcatcagcacccgcttcccctggaccacgtcgatgtccaccaggtacggcgcgcggtagaaggataccgtcacctggtactccaggaacttgtaggtgtacaaagggtccgcggagacgagctgcgccggcgactgcggcgcggcggcgtgcagcaggcagacgagcgactcccactggttgcgccccagcgagtcgcccacgaacatcaccgtcttccccttcatccgcgtcaggaagtccgcgccatcgaacctcggtagctcgcagccggccggcttccagaggtaccggaggtagtcggagtccgggcggccgtagagctggcagttgaactccgcgtcgatgagcgggcagttgtacccggtgtacgccgccgaggccgagctaccgccgtcgaggacccagctgccgctgaagacgtcgcagccgccggcggccagcccgggcgtggcatcgtgcctgtggcgccgcgccaggccgacggagagcgcagaggctgccgggagagagaaggcgtggagcaggatgaggacggaggaggacaacgcgacgacgccgaggacggcactcttcctgcgggacggcagcatcgtggcaaacaaaagagaagagaaccccggcc

SEQ ID NO: 181224 - DNA, 797 bp, Zea mays
  unsure (1)..(797): unsure at all n locations
  Clone ID: MRT4577_96853C.1
atagcactctctcactacgaccggaggggattgccacgaataggtgtgtgcagttctactctaccgtacccctgcatcgagccggtgtgcgtccaccagtggccggagttgaaggagagcacgtcggcgtcgcgccacgactcggcgttctcggagatgtcgtccagcatcagcacccgcttcccctggaccacgtcgatgtccaccaggtacggcgcgcggtagaaggataccgtcacctggtactcctgctcgatcgaccaacgtacgtatttagattatattaggcccaatctcttcggccaagcagtctagctggtacatgtgtttacatgacataccaggaacttgtaagtgtacaaagggtccgcggagacgagctgcgccggcgactgcggcgccgcggcgtgcagcaggcagacgagcgactcccactggttgcgccccagcgagtcgcccacgaacatcaccgtcttccccttcatccgcgtcaggaagtccgcgccatcgaacctgcaggtgcacgcagacacagtacaagctaagtaatcagggcggcgctcactgccactggttgccgtgggttcatgaggcatggctggcgctcacggccacgtacgtacctcggtagctcgcagccggccggcttccagaggtaccggaggtagtcggagtccgggcggccgtagagctggcagttgaactccgcgtcgatgagcgggcagttgtacccggtgtacgccgccgagggcgagctaccgncgtcgaggaccagctgccgctgaagacgtcgcagc

SEQ ID NO: 181225 - DNA, 733 bp, Zea mays
  unsure (1)..(733): unsure at all n locations
  Clone ID: MRT4577_96854C.1
ccggccgggttccatcggcgtccgcatccacctgcatctccccttccatcccacgcagacacgcccgcgctcagccagccggccatggcccgagcctcgctcccttcacggatcccgctctcagtcgctagccactggccactacccatgtctccctctttccccaagcatagccccacacagcgcgtcttcgggcctccggccaagagtgctcaccgtctcgcgccggttgcctggtgcggggcgagaaccgggcagagatctaggacgccgaccatggcgagctttggacttgcctaccccacatctgcggtgacaaccaggtgttcagtctgcggcgtggtggtggtcgctcaattcagtccgccatggaaggtgcagccggccaaatggtcatcccgatcctcggcatcgttgtcgcaacagccatgaccttctacatcgtcaacttcatggagatgcgagatgtacgcttcgcttttcccattcttatccctcctgtctgctagctattggtcggtttccctttcattctacacgttatgactatgtttgggtatgtcgttcaccatacaacttgcaatagctgttggttggtttaaaatcagcacttgaatactaagtatgtgagtacgagacactggttgtacaatcaaaaaaaaaaacagaaatatgtaaccaaacgcaatccaatttgtagatctacccaaggngacatatttttagtgctgga

SEQ ID NO: 181226 - DNA, 200 bp, Zea mays
  Clone ID: MRT4577_96855C.1
caatattacgatctacgatgctggcctgaagagaaagggtggtgatgagatcccctactgcgtgcaccttgtctcttgggagaaggagaatgtcttcagtgaggctcttgaggcttgccgtattggctgcaacaagtacatgaccaaatctgcaagaaaggatgcctttcaccttcgggtccggttcaccccttcatgtc

SEQ ID NO: 181227 - DNA, 297 bp, Zea mays
  Clone ID: MRT4577_96856C.1
atggggaagcccgtcgacgtggagctcggcggcggtgcgggaggtctcgagatcgccagagacggaggcggaggcccatggggagggcgactcttaggcgcgatcgggcggacggtttcgttccggtgcggcttcgcactcttgctcgcggtgggggtgctcatcccggcgctgttcctgctcgtgccctcgcgccaggaggggtacatctcggacgaccacgacgtgctcgctgatgtaaaagatatagatgcaaaaggcagaagggcgcagaaggataaaaaaagtctaagatga

SEQ ID NO: 181228 - DNA, 267 bp, Zea mays
  unsure (1)..(267): unsure at all n locations
  Clone ID: MRT4577_96857C.1
cgtatgatcatngncgtcgtttggnnactcggannagctcaaatttcgctataanatgagctnnagaactgactctcntcggnagctctcagcntcagnaggnagctcnatgtntncaggacatcnctaacggagtcttggtacnctcncntcggtggtanngttcctcttcacgtncatccaacccnctacctctgtnagtggtagttttanaccataaggagnttcanatagtcncgcagtgtttcatcccgtnggcaagcatnt

SEQ ID NO: 181229 - DNA, 210 bp, Zea mays
  Clone ID: MRT4577_96858C.1
atggacgcccaacagtggcctgctacagcaacaatatcggcctcagagattcagttgcgcaccacgttttcagacagtttactgaccggggaccacggccgtccgctgccggctgccggagacgacagtcgaccccatcggcggcacggcgtcgcgacagcaatggcctgcctggccgagatgaaggcaatcaggcagagaaaatggtaa

SEQ ID NO: 181230 - DNA, 355 bp, Zea mays
  unsure (1)..(355): unsure at all n locations
  Clone ID: MRT4577_96859C.1
gcccccgtccgtaagctcggaattcggctcgagcggctaggtagacttgacaggaaagttgagttccctcttcctgattggtggcataagaggcttgtgttccaaatgggcggttgcttgacaccccaaatgaaccgggtgtgggccaggtgttggcaagttgctcaattagtatgtcggtggaagccgacaaagccactctggtgcccagtcttgacactgatggtcactactctttcaatagtgaatcttgcagcgtctgaagtactcttaattttgtgcaatgtatgcaactactaacctttcagagaaacgctaagatattgatgtcaatgataacataagtngttcgtgt

SEQ ID NO: 181231 - DNA, 205 bp, Zea mays
  Clone ID: MRT4577_9685C.1
accaaacacaggaaaatcggactggggcattccttgatcatcatcatcaaaaaatcaacaggcagtataaaacttcccaacacatccatgtccaaattccaaccctgaaaaaggctttatttttttgctccactcggctacggcatttaaacccaaaaactaggggataccacggttgacaagttaaacaaaactggaacacaga

SEQ ID NO: 181232 - DNA, 725 bp, Zea mays
  unsure (1)..(725): unsure at all n locations
  Clone ID: MRT4577_96860C.1
gtaccctcgagggcctgccggacgaagacgaaactgtagacacattcgagtgggttttcaatgcattcaaaacgtgcatggggcctgaaggaccacgggtaatactgacagatcaagacccagcaatgccggttgcactaggcagggtatttccaaacacaatccatcgtttgtgtttgtggcatgttcagaacaggtatatgccttatttaaatgagttgtacgctagattcgaggaagaggatttcaaatcaagatctcaatctataatacatcatcctttgactgtaactgagtttgaggctgcctgggcaatgatgcttgatgatttccacctgcatgataacatcagtcttaccagaatgtaacatcagtcttaccagaatgtatgaaattcgcaaggattggatactcgcttttttgaaacaggattattgtgggttgatggtctctacacagagtagcgagagcatgaacaagctcgtaaagagtgctcatgtcgatgcaaacacgccacttcatcaattcgcctagcanatgttgaagcttctgcacggtaggaagatgaaagaggcaaaagaggcactaggatgcatgggtcaaaaggaaacaaatacgctgtatatgtttgagatacgtgtagcgaggacatacancagggctgtaatgaataggttccacgagtctttgaaatatgctactgcatacaggatagcacatgatct

SEQ ID NO: 181233 - DNA, 284 bp, Zea mays
  unsure (1)..(284): unsure at all n locations
  Clone ID: MRT4577_96861C.1
cggcaacatcttcaacaacagnnnctgaagacaggggagccacataaccatnnntnaaccctntcacctacttncaacagcanctgcttgcatccaacccacttgctctggccaacgtagctgcataccagcaacaacaacagctgcaacagtttatgccagtgctcatttaactanccagggggggggcctnccntctacctacaactactttcatctaacccccttcccngtgggcaatgcacctacttacctacaacaacagnttctgcaacaaattgtac

SEQ ID NO: 181234 - DNA, 165 bp, Zea mays
  Clone ID: MRT4577_96862C.1
agctattaattcagatcgatattttttttctcttactaacacaaaaagcgggccatcccaataggagtggactcctatttcggctagtcatttcatttggtatataataagtaggacagatttacattaacaattttctcctaacctattttttatgactttatt

SEQ ID NO: 181235 - DNA, 2607 bp, Zea mays
  Clone ID: MRT4577_96863C.1
atgacgacaccctgtacgagcgatggccggaatgctgtaacgccaccggctgcgttaccggcgccaggaattgttgaagaaggcaacacggttcatcaaagtttgatgggaacaagtcagcggatacccatgcggacaattggtgaacatgagcaggacacaccacacattctccaaagccatgatgatagtatagatcaacgattggtaccgaaggtgggtatgacatttagtaatgtggacgaggcgtacaaattttatagccgatatgcatatgaagttggatttccattgaagagatatagggagagaaaaaattgcaagtggttgaattgttcaatggaaggcaagcgtgccgaaagaggaaatggtactccaaaagtgcgaaatacaatttccaaaagaacacaatgcagagctggaatgaaacttaaaaaaatctatgacgatgccaaagagaatatcatttcagtgcggattgatcttattcatttggaacataatcatgagttcttcagaaaggatacagaaaagaatcagttacagtgcaacaagacacatgatccagaatacatggaattccttagtgcgatgcaagaaagcaggattccgcaacactgtattatggattttgtttcagaaatgcatggtggaccagagaatgtaccgttaactacacaagacatgatcaacctgaagaaagcacgacaaagagaaagaaatgccaatgatgtgtctaagctgctatctttttttgcattgtgtaaaaaagataacccacagtttttctctgacttccaactagaccaagaaggaaagattttgagcattttttggtcccatgctagccagcaagcagattacattgactttggagatgcagttacctttgatacaactcataagacaaatctatatgacaaaccgctggggatgtttgttggttgtaaccaccatctgcagtgcaccgtatttggtttcacattgttgggtgacgaaactgtagacacattcgagtgggttttcaatgcattcaaaacatgcatgggagctgaaggaccacgagtaatgcttacagatcaagatccagcaatgccagttgcactaggcaggaaccggtatatgccgtatttgaacgagttgtacgctagatttgaggaagaggatttcaaaacaaggttccaatctataatacatcatcctttaactgtaactgagtttgagactgcctgggcaatgctgattgatgatttccatctacatgataacatcagtctttccagaatgtatgaaattcgtaaagattggataccagctttttttaaacatgattattgtgggttgatggtctctacacagcgtagcgagagcatgaacaaactcgtcaaaagtgctcatgtcgatgcaaacacgccactacatcaattcgccaagcaaatgttgaagcttctacacagtaggaagatgaaagaggcaaaagaggcactaggatgcatgggtcaaaaagaaacaaatacattgtatatgtttgagatacgtgtagcgaggacatacacaagggctgtaatgaataagtttcacgagtctttaaaatatgctactgcatacaagatatcacatgatccagaaggtggtgtgaatgaatgggtggttcagcatacttcaaggtcaaataagattgtgtgggggcaacaccaattcaaagtaattgctgatgtagatgctggaaagtatgaatgtgaatgcaagcattgggagcatacaggtctgctttgtgtgcatcttttacgaacatttatgcatcttcaaattgatcgaataccttcggaatacatccttcagagatacacctactctgctatacaagatgtgactttttcaagggatgataagaatttgaagggtaaagacggtgagactaaatcatataggcagaagatgttgcttaaaaagtcaatgaaagtagtacatcatgcaagtctttcaaaggctggatatgatagagccctggagatgatggatgaactgcttttgctactttcacggttggagccagatattgaaggtgatgatagtactagtgatggcgaaggaatacaggtaattcaattggtgcctactttacaagaaggtggtgtgagcgatacccaatgtgttatgccacaacaaatattggaacagcacgattatggacaattgaccactagcacagcactgattgatgagagtggtacagatttgacgattaaaaagaagctagattttaatgtgagtggagtaagcttgagaagaccggataacgcgaagccaaagggcagaacaatcagggatacagaaaaaagagttattaagttgggggcaaaaggagacaaaaaaaagaacagaaagtgtcaaaggtgtggaattgcggatggtcacaatagtcgcacttgtctatctgtggaggagaataggcttcggttggccagccttactggtcgaaagagagggcggcccataggttctaggaacaaaggttcatctagcgctccaaactggaatgaggcatgcacttcaaaaaaacatcaaggaggtgtcacagacaatgattcatctagtggggagtag

SEQ ID NO: 181236 - DNA, 1086 bp, Zea mays
  Clone ID: MRT4577_96864C.1
atgactttggaaatagtgaagcaaacagctcaacaggattgtgcggatttggtaaaggcagccaaggacaagcatttgagggttaagggacctgtcaggatccctactaaggttctccacatcaccactcgtgtgtcccattgcggtgaaggtctgttcttttcaactgccagagatgttttaggcattgtgtcatcaaagtttttgatggagccagccgtattgaaccgtgaaagagtagcattggacaagaaaaacaggatgcctatgttgttcgacgactatagcgatgaaaatttttatggggtacaacggaagtatagtattgtcgctcgagttgaagttaaattcccgattgaaccacgttatcgtgacaggcaacattacattttggctgacatcaatggagccaagatcgaggccattgcaactcggtatgagatagtcaaatacttcaacagtttgctccatgaaaagcatgtctacaagatgcacaacgtatggtttggtcttaatccgggtgcatttaattttcgacatctaaatggtaccatggagttgtatttcacccaacatactatcgtagagccatacgctgtcccagttcaaatgccgccatttccaaaacatatattcttgaaccttgatgatattgccgagttgccaaacaagactttagttgacattatggctattgtagtccacttggatacaatccatcgcacaatgtggggtacaatcaggaagattgttataatggatgctaggtggtctttacataccattaaagtttggggcgatttactaaacaaaaatgcactccgctgggcgttggctaatgagaattatagcatcataattgggaccatgtttcggcggttcagaaaacaagagtgtctcgaatcaactgaccatacatgtgcattccctatactgacgacggagtgcattccctatactgacgatatgtttgcgggggcagcgacagagctcatgatcgtcgagacctttgataccagattggtaggagccgcgtttcctatactgacgatatgtttccgttgcaacgcacgggcatccacctag

SEQ ID NO: 181237 - DNA, 394 bp, Zea mays
  Clone ID: MRT4577_96865C.1
gtctatactttgcagatcaaccaattttgcttcaatggataacactgcatcacctgacatggtttatcttcacaaatgtcctgtccacttccgaatcgacttcttatcgcaactgttgccttcatcatactctcgatcataaaccatatataccatcatggttagaacgatggcctcaacgctactcatatttcttataaggcatgcttctcttgtcaagccactctcacaagcaggcaatttcataattgcacggcacattcatgatctacagcttgatcacggtcacaatctgtttccagatcaataactcaggtccccatacacgtcactacaggcataccgtcctgtcttgttcctgaaaacatctcaccttgacaagattccgctcctt

SEQ ID NO: 181238 - DNA, 350 bp, Zea mays
  unsure (1)..(350): unsure at all n locations
  Clone ID: MRT4577_96866C.1
gtctggagtctagactcagngttgttaacttaagtttaatcatcttagcaactacggtacgtgaccctgagcgcctggttgttggcaaacaaccgacaccttgggcctacaccttaaaaggttttgcgccgacattggcttttcataagtgctcaatcgggatctatcccctcgagcatagagaaaaagtatcaattttgacaagggggtccaatattctttaagcatgcctacctcaatttgccacaagccagaatgccatgatatgatcgatgaaatggctgttgccggcaaatgactttcaaggatcaattgtctttcaagaaccacaccttgtattggattacggg

SEQ ID NO: 181239 - DNA, 269 bp, Zea mays
  Clone ID: MRT4577_96867C.1
gtcccggagcccacggtggtcatggcagccagagcgctctgcatgctggggctggtcctggccttgctgtcatccagctctgctgagcgagtacgtgggcctgtctgcaaaccagtgtgccgtgccagccaacgacagggtggactgcggctacccccatgtcacccccaacgactgcaacaaccggggctgctgctttgactccaggatccctggagtgcctaggtgtatcaagccccggcaggaagcagaatgcaccttctgatgca

SEQ ID NO: 181240 - DNA, 261 bp, Zea mays
  Clone ID: MRT4577_96868C.1
gctctttcccttaatacttccctccccaggcaaccagtagagtggattttttacaaggcacatgcatttttacgcctagggaaaagaaggctgattaggcacgcatacatgaaatgtgcacggacggacaccctgacaaaagacacagatgcaatgcttacccaagcaggcacgaacaggcggggatgacaaacgacaaagctggtcagtcagccctggccaagaagcattgactgcggtcggggaccttgacagggcagg

SEQ ID NO: 181241 - DNA, 409 bp, Zea mays
  Clone ID: MRT4577_96869C.1
cttcaaaatcgacagccagtaggtaacatcaaagaatcatgtggggtttcaacagttagcctagacatatttatgtgtgcccagatatcaagttaagcaggatatcaagaacatagcaaagcactgatcaagcttacctttctgcattgtaggaagaagaacgtttaagcgccggatacctctcaaccggaccatctctttgcgtcttcttggtctcaacaaggctcccgctgaagtactcctgctcctccagctttatccccatcaacttgaggttttctgacaggcagtcgagctcgcccatcatcatggtgcgcgagattcggcttgcacgtccgaacgaccccagcgttcccgtgatccttcaccgagagcgagccacaggtgacgagctgcatcaacacgctca

SEQ ID NO: 181242 - DNA, 283 bp, Zea mays
  Clone ID: MRT4577_9686C.1
acggtgcggccgcccttttttttttttttttttttgttttttgttttttttttttttagaaattcacccttagatgtacgaattttcaccttaacacaacctaagggtaaccaacatttgagctagcggggaatccaaaaaaaaaagatcgatcctttcaaatgggcggtaacaattccaaaagctaccttttatatacacaagcaggaattagactgaatcttggccaattcagtgttttttttcatcggggtcgtggaggggctaccttgggccggacagt

SEQ ID NO: 181243 - DNA, 282 bp, Zea mays
  unsure (1)..(282): unsure at all n locations
  Clone ID: MRT4577_96870C.1
aggatagaggttgttgtgtatatnaaggacacaaaagcgcgttagagttgttaaatttggagctgaggcctgcggagaatgagatcgtctcttttgtctcgacttccacgactttctttgggctgaggtctgcggtgaatttggagctgaggtctgcggtgaaaaaaaaaaaaaaaaaaaaaaaaaaaaaaaaaaaaaaaaaaaaaaaggggaaagtggtaaaaaaaaaaaaaaaaaaaccagaaaaaaaaataaaaactgaagaaaggggaggtagaatat

SEQ ID NO: 181244 - DNA, 190 bp, Zea mays
  unsure (1)..(190): unsure at all n locations
  Clone ID: MRT4577_96871C.1
ctagttctaaatcagcagcngcgcggacatgagcaggtcttttgttcttttatacacatcctctgtatgtatgcatgtatacagctcaaataaaatatttggagctaattaaaaaggaacgataatataactcttattttgngacaaacaccagcatgacaacctcaaatgctgcgccggacgcaccaac

SEQ ID NO: 181245 - DNA, 238 bp, Zea mays
  unsure (1)..(238): unsure at all n locations
  Clone ID: MRT4577_96872C.1
cggcacgaggttgcatcatgcccaggcatgcattcaagaacttatgcaagagaggcagcagtatcatcaggaaattgattcactagccaggcaagccaccgaagacaaaatggctcgaaggagcaaggaccaagagaagatgagcgcagcccttcgntccctgcaagaggagcttgaagatgagagacgtctaaggaaacattctgagactctccataggaagctaggcaaagagcta

SEQ ID NO: 181246 - DNA, 348 bp, Zea mays
  Clone ID: MRT4577_96873C.1
gacgctgatccttaagcggcgcccttttttttttttgatttgtatctgaacaatacccaattttagggagggcttgttagactacctatgtacataaaggcgtagcccacatacatacacggagcatatttgtgtcagtacaatgcaaaagcatattgcacaatttagataagacttccataacatttgtgcagaaccctcatccattgcacttttgacccaccgtttaactcctaaacagataaggcgaacacctggttatcgggcacggagaagggcatccccacttttggatgtatatcttaaaaggacagcaccagcatgtggcgacgggtgcagcgccttcac

SEQ ID NO: 181247 - DNA, 419 bp, Zea mays
  Clone ID: MRT4577_96874C.1
aggcggcggttcatctatccataaatatgcctggtttctctattcccaaaaacgctgctgaattgaacgaaatccttagcagcaacaagtatgttgttattgattttactgctacctggtgtggtccctgtaaaatgatcactcctatcttggaaaaactctctaatgattatacaaacgttgtctttgtcaaggttgatgttgatgaccttgctgacattgctcaagaatacagtgttcgtgctatgcccaccctttactttatgaaggatggtgaaaaggttgctgacgttgttggtgctaaccgtaaagccattgaagacaaccttgcaaacctcgttgcttaaatctattgtatatcaaataaagaacaaatccttttttctatcctcgaaaaaaaaaaaaaaaaaaggccccta

SEQ ID NO: 181248 - DNA, 413 bp, Zea mays
  Clone ID: MRT4577_96875C.1
gaagaaaaggaatgcgaaaagctccaacagctaatgggccctacaatccgggggtttgggccttcattgagcccaaacaacggcccaaaaggggggcgctgaaacaatttatttatttacccttttccccttattttacggcacgggaaatgatgggggggccctggcgcgggcaataatcacccgagcttgggggggaacgccccttttctgggggccttcttccaattgagcgggacccggcccttgcgggcgggggtgaaccacttctggccccccccggggagttttttcaaccccaaagcgtttttttggggcatgggaaacacctttaaaacgttgagaaaggcttcccccaaccaaaaaacgcttccaaacaagaacaaacaccccggtttccccccgtttggggg

SEQ ID NO: 181249 - DNA, 288 bp, Zea mays
  Clone ID: MRT4577_96876C.1
acccactcgtccgcggacggtggcgacgacggcctggtcaacgcggtcaacgtgtgcttggtggggcgacgggcccgggtgcaggcgcggacggccgccgacgagcacgtgtcgccgcggagggactgcacatgcaggaggtggtgggcggcgagtgcccgcagaggtgcccgcggtgcagcatgggaccgcggtggcgggggtggggggtatggggggggtggtaggagctggtggacgcgggtggagtgcgacgtgcggcggggggtggtggggtagggggaggtg

SEQ ID NO: 181250 - DNA, 1311 bp, Zea mays
  Clone ID: MRT4577_96877C.1
atgggagcctgctgggccgctgccaggccgcttggccgagcagcccagcagggcagccggctggtaacaaaaggtagggcacgtcgtgccttacgcaggggaggaggcaagcggccagggggcctgtggcggcggcagcttgtgctgttccgatctgggcggcgtatcctgccggagctctcgcgatatggttgctgctcctcctctcggctccatatatggaggcttgttcccctggctggctctccacgggagagaagctggttctctgttcttctcccactcactgtttcaatcgcaactcgctcgatccactgctccaccagtggctgctccacggaggttgtgctgctcgtgcgcagtgaggatctccggtgctctattgcttcaccagtgcgcgtgtgtgctgcggttgattctctggtgtctgtccaccgtggcctggtgcttgggctccctgctgcgcggtgttcctcttctcgggccggtgccgtggacgtctccctcggctccggcagcggctctagtatctccgtcaacctcccgccgtgcaggtccggacgtgggcggcggattggttttctgggacagaacctcgtgttcgctgagctggtcttcccacgtagacaatctacgtgctctttaagatcggaagctgacgtcgtttgtctattattttcagatcaagaaattacagcagaattttgtgtccctgcttcccccttccctatcctcactctcccctacactccacacaacatcatccatgacatgtctgtagactggctattggtggttgcatccatggactggccacaagtcacaacatataaagctctggtctcggcacaagcacacatggaagagattatacaaaatctcggcggaatgataagggagttgctgatttcgttctacaagaggactggcaaaaagcccaaaaggattatattttacagggatggaataagtgaaggacaattcaaccatgttttgatccttgaaatggacgcgataaggaaggcttgtgcctctctggaagatgggtatctacccccagtgacatttgtcgtaatacagaaaaggcaccacacaaggctcttccctggagttcatggaaggagagatgttactgacagaagtgggaacattcttcctggaactgtggttgataccgagatttgtcatccgcgggagtttgatttctacctttgtagccatgctggaattcagatacgcacgatgcacacgcgctgtctcagttgtgatcctggctttcagtctgtgatgcattgtagcagttccccataa

SEQ ID NO: 181251 - DNA, 1505 bp, Zea mays
  Clone ID: MRT4577_96878C.1
aactaggagagtggaggaggaggagacccaccgtcggctcgcccgtgtcccgattcccactcacgacatcaacctgtccccatccatctcgcccgcgacgtttgatggagtctctcctcgcctcgcgatccattaggtcttccttctccgccgtcgccagcaccaggggcgccgcttcccccaggccctcgcgcgtcgccaccctcgccagcgccggcgccggcgcccgctcccgcgcgctccgtgctggccacacggacgatatgctgaacgcaaaggagctggtccaatgggagaatggcttgtcattcaatgacatagcggctaggcaggggattcgcatccgcagacactgccgccccactgcctccttgaaggagatagaggaggagctgggagccccccttaacatcctagagaagatcatttgggacaaggagattgaagtagctgaggggcatgctaagaagcctcttgaggaggtgattcaggctgcaacgaaagcccctccttcaagagacttctatggcgctttagaagctgcctacaagcgtaatggggtgcctgcattgattgctgaggtcaagaaagcatccccgagtaggggtgtgctcagggagaactttaatcctgttgaaattgctcaagcttatgaaaagaatggagctgcatgtttgagcattttgacagatgagaagtactttcagggaagctttgataatcttgaaaaggtgcgcagctcaggagtgaagtgccctcttctctgcaaggagtttgtcattgacaagtggcaaatctataatgctcgctctaagggtgctgatgcaattctactaattgctgctgtgctaccagatcttgacataaggaaatttcttcagatttgcgaagagttgggaatgacagctcttattgaggttcatgatgaaagagagatggaacgtgtgctgaagataaatggagttaagcttattggtatcaataaccgaagccttgagacatttgttgttgatacttcgaacaccaagatgttgctcgagaagcatggggatagcatcagggagaagggaattttggttgttggtgaatcaggtctgtttactccggatgatgttgcttatgttcagaatgctggcgtttctgctgttttggttggggaatccctggtgaagcaagagtgccctgggcgagccattgttgggttatttggcaaagaacttctgcactgaatgagaggacaaagattgtagtagtacatggtttggtggtgaggtgttagtgctaggctgctagctgttagccatagcatcatttgcagtaatagcattggttttattaataataccaccgaatgtgacatgcagaataaaaataatgttcaataagttccattcagtgattttctttagttcagtgacaaacgaatgcgatctgttcatgacagaggatctcccaagctaaatgaaatcggagagttttacttgaatatgacaaggggatctccc

SEQ ID NO: 181252 - DNA, 561 bp, Zea mays
  Clone ID: MRT4577_96879C.1
atgagccttccctacccagccgtcatgtccctccattccctgatctatcaaaacaaatgaagaagaagagaaggggcctgctcctgccgccggatctggtctgcccaacaacaaccgaagtctggaggagtggccaaccctcctattgctgctccttgttcttataccgattcgatctgtgctgcagcttggctttggaaaagctaggtgaaaataaggagagaagggaggaggtcgtggtctccttgaggtgtgctaattggatatgtctgctcgagggatgggagtagctgcacttcacacacatagatgacactttaaccgacgtttggcttgctactaatttaagtgaatggaagagaagtctttaactagcttgttttaccttttttttaattagtgcttttgctttgtcttagaggtatgtgtcaaaattcaatctattttggcataacagtgtagttctagtagcaccctagagttgttttcttaataactgtggggagttttcatcttctcaatatagtataattttcggggtgttataaaaaaaaaaaaaaa

SEQ ID NO: 181253 - DNA, 340 bp, Zea mays
  unsure (1)..(340): unsure at all n locations
  Clone ID: MRT4577_9687C.1
accggtcttgaatgaccgactcgatccacgcatgcctncacgcacgcgtcgaaaaaaatttatcattcttaaagaacttgtaccagaactggctcaaagaacatattgcctgtgtgaatggattgctgcttttacacaatcacagcttacttacccgtggctccatccaaacaatcccatatagagcgtatttaaactcaatcatgcgctcgggttttgataatgcctgtatgtgcacaacatattcatggccctgttaacaaacacgtcccaattatctgaactcggaattatttacacctcggcaaaaaccataaccaaatcgaccttaaaagactgg

SEQ ID NO: 181254 - DNA, 437 bp, Zea mays
  Clone ID: MRT4577_96880C.1
cccacgcgtccgatccatctcgcccgcgagatggatggggacaggttgatgtcgtgagtgggaatcgggacacgggcgagccgacggtgggtctccatccatctcgcccgcgacgtttgatggagtctctcctcgcctcgcgatccattaggtcttccttctccgccgtcgccagcatcaggggcgccgcttcccccaggccctcgcgcgtcgccaccctcgccagcgcctgcgccggcgcccgctcccgcgcgctccgtgctggccacacggactcaatccttgaggtgctggcacaggacgatatgctgaacgcaaaggagctggtccaatgggagaatggcttgtcattcaatgacatagcggctaggcaggggattcgcatccgcagacactggccgccccactgcctttcttgaggagatagaggaggagct

SEQ ID NO: 181255 - DNA, 646 bp, Zea mays
  unsure (1)..(646): unsure at all n locations
  Clone ID: MRT4577_96881C.1
ccggccgggagaaaaaaaaaaaaaggcctacgggagtcgaggaagttcgctcgccaccgccattaggcatccgccgtgctcgccgctggtccaccaccagccccttcctagaactgagcatctaccctcatcatcacacacagcccctgttcgcacgcgacgtccctttggacgattgagccaccaacccctcctggaattgaggacgacctggaggagccaccgcccgtagggagcatggccaccaacgccagttccacctccggcggcgggagtaaggggtccccgtgcgaggattcagggaggagccgtggaagtaccggtgccttgggtgcagccgcctcaactgcaaccctccctgcatgcaggttcacaagcgtcgtactgcctgcacaggctcaccgttggctttggccacaaccttggaggacgcggatctgacgacgcccagctgtctagatgggttgttcatcatggcggcacaccatcgaagtgtcaggttctgctttctttccagaggcatgtccaggagagagcaaaaccgatcgcanaacaattataggcgctntgccttaattgattcaattttacttgccatcgttgtgatgctttgctgctggagatggtcagcagacttgctctgcag

SEQ ID NO: 181256 - DNA, 2468 bp, Zea mays
  Clone ID: MRT4577_96882C.1
gtcccgattcccactctcgacatcttcctgtccccatccatctcgcccgcgacgtggagtggattctctgcgggcctggggatccattatgtcttccttctccgccgtcgccagcatcaggggcgccgcttcccccaggccctcgcgcgtcgccaccctctccagcgcctgcgccggcgcccgctcccgcgcgctccttgctggccacacggactcaatccttgaggtgctggcacaggacgatatgctgaacgcaaaggagctgttccaatgggagaatggcttgtcattcaatgacataccggctacgcaggggattcgcatacgcctaccctgtccttcgttgcgcctcccatgaattcggcacgaggtcgctgccttccaccccactctttccccggaccaacccataacccatccgcatcgctgccctgcgcgccccaaccccaccaccggtctcctccgcctcctcccgccctgccgtcgcgctcgtgctcccgcgctcgtccgcctcgccgtttctgcctcctccacctccgccccgctcccatcggccgatcggtcggaggccgcgtcgtcgcttgagagatgcctcttgttgacgggggcggggatggaaacgggggcgatgccaccagcctcggccccgccgcgcgccgcgccagtgatgaaggggggacggaagcagcgcagcacattaggagccgtcacgctcgagaaggccaagctcgatctctcccagcgtcgcaagaagatcatgcccgagctagcaaccggtggtggcggtggagatgttggaaaaaggatcggtcatggtgggggtgatggtggtgatgatgatgggaagcctcttgaggaggtgattcaggctgcaacgaaagcccctgcttcaagagacttctatggcgctttagaagctgcccattgcggcgactccggctaggaactaggagagtggtggaggaggagacccaccgtcggctcgcccgtgtcccgattcccactcacgacatcaacctgtccccatccatctcgcccgcgacgtttgatggagtctctcctcgcctcgcgatccattaggtcttccttctccgccgtcgccagcaccaggggcgccgcttcccccaggccctcgcgcgtcgccaccctcgccagcgccggcgccggcgcccgctcccgcgcgctccgtgctggccacacggactcaatccttgaggtgctggcacaggacgatatgctgaacgcaaaggagctggtccaatgggagaatggcttgtcattcaatgacatagcggctaggcaggggattcgcatccgcagacactgccgccccactgcctccttgaaggagatagaggaggagctgggagccccccttaacatcctagagaagatcatttgggacaaggagattgaagtagctgaggggcatgctaagaagcctcttgaggaggtgattcaggctgcaacgaaagcccctccttcaagagacttctatggcgctttagaagctgcctacaagcgtaatggggtgcctgcattgattgctgaggtcaagaaagcatccccgagtaggggtgtgctcagggagaactttaatcctgttgaaattgctcaagcttatgaaaagaatggagctgcatgtttgagcattttgacagatgagaagtactttcagggaagctttgataatcttgaaaaggtgcgcagctcaggagtgaagtgccctcttctctgcaaggagtttgtcattgacaagtggcaaatctataatgctcgctctaagggtgctgatgcaattctactaattgctgctgtgctaccagatcttgacataaggaaatttcttcagatttgcgaagagttgggaatgacagctcttattgaggttcatgatgaaagagagatggaacgtgtgctgaagataaatggagttaagcttattggtatcaataaccgaagccttgagacatttgttgttgatacttcgaacaccaagatgttgctcgagaaacatggggatatcatcagggagaagggaattttggttgttggtgaatcaggtctgtttactccggatgatgttgcttatgttcagaatgctggcgtttctgctgttttggttggggaatccctggtgaagcaagagtgccctggacgagccattgttgggttatttggcaaagaactgctgcactgaatgagaggacaaagattgtagtagtacatggtttggtggtgaggtgttagtgctaggctgctagctgttagccatagcatcatttgcagtaatagcattggttttattaataataccaccgaatgtgacatgcagaataaaaataatgttcaataagttccattcagtgattttctttagttcagtgacaaaaaaaaaaaaaaaaaaaaaaaaaaaaaaaaaagcgaagaaacaacagtacacaaactcgaaagagggcgccggtacc

SEQ ID NO: 181257 - DNA, 851 bp, Zea mays
  Clone ID: MRT4577_96883C.1
acccttgcatggtccgtcctcatctccatcctggctgtcggcggcgcggcaagcgacgaggcggcgctgctagccttcagggcggggctgagcccaggcgccctcgcctcgtggaacagcagcggcggcggcggcggcggcggcttctgtaggtggtacggcgtggtgtgtagccgccgacgcaggccgggccgcgtggtggcgctgagcctggcgtccagcaacctgtccggcacgctctcgccggccatcggaaacctcaccttcctgcgggtgctcaacctgtcctccaacgcgctccacgggggcatccccgaaaccgtcggccgtctccggcgcctgaggaccctcgacgtgggccacaactccatctccggcgcgctccccgccaacctctcctcctgcgtcagcctggagtacctgcgcctcgagtacaccaagctcggcgggcgcgtgccgccagacataggcaacacgctggcccggctccggactctcgtgctgcggaacaacagcttcacgggacccgtcccggcgtcgctggccaacctgtcctcgcttcggtacctcgccgtggacggcaaccacctgggcggcccgatcccgccgggcctcggcggcatcgccggcctgcagcacctgcatctggaccagaacaggctcgacggcgagctcccgcgctccctgtggaacctgtcgtcgctggtggcgttccaggtgaactacaacatgctgcacggcagcatccctcccgacatcggcgacaagctcccggccatacagtacctctggctggacggcaacaggttcagcggggcgatccctccttccctcttcaacctctcggtctc

SEQ ID NO: 181258 - DNA, 474 bp, Zea mays
  Clone ID: MRT4577_96884C.1
acgcccgcaggtaccggtccgagattaattcccgggtcgacgagctcactagtcggcggccgccctttttttttttttttttttttttttttttttttttttttttttttttatttttttttttttttgggatcctaccacctacatttatcccacttgttaaccacaaagataaacaaaaacaacacatagggccaatgccaaaaggcgcaccccaaccttaaaaaaagcggccccattttgccaaacaaatcaaaaaaggggaaaaaagaaaaaaagtacccccaaagacgaaaaggtcaaaaaacgtgcttaccccgccccaagcgcccccccaataggggagggccgaacccccccctctttccaatgaaagggaaaaaaaacgtccagcgctcccttaacaaaaaagcccccaacccgcggtgcataaaaagaaaccccccccccggaacagacaaaaaaaccaaaacc

SEQ ID NO: 181259 - DNA, 260 bp, Zea mays
  Clone ID: MRT4577_96885C.1
cgctcacttttcaatcatatccactctacaagttttcagattcctgatattctctaacttcacatttctttttatcttttctggacatggctattaccatcacccttggccctaacggccagtatcaagtcaacggttctgccaatgaactgaacacaaacctggacttggtgcctatctctggagcaacaaagctccgtagaatgctcaatgagacagatgagctaatcgtctgtccgggcgtttatgatggcttatcg

SEQ ID NO: 181260 - DNA, 2427 bp, Zea mays
  Clone ID: MRT4577_96886C.1
ccggccgggatatttcgttattttgataataacaatctatggtcaccttctaaaggatttgcgctgtgtgtcctgctggatatgcagattgtgatggagaaatctggacagaatgctcatatattgttgtctatgttagtcaagcatcttgaacacaagaatgtattgaaacaaccagatatgaatctagatatcattgaagttacttcacgccttgctgaacactccaaagctcagtcttctatagcactaatgtcttcaataagtgatatggtcaggcatatgggtaaaagcatgcaatccttggccagtgatgcaggtcctggagacaacatggtcaaatggaatagcagatatgggaaagctgtagatgaatgtcttgttcagttgtctagaaaggtcggtgatgctggacctatccttgatacgttagctgtagtactggaaaatatttcgagttctatgattgttgcacggtctactatctctgcagcatatcgcactgctcaaatagttgcatcattgccaaacttgtcacatcagagcaaagcatttcctgaggcgttgtttcatcaacttcttttagcaatgctctatccagattgtgagacacatttaggagcacatcggattttctctgttgttcttgttccctcttccgttgctccgttttcatttgcagacacttcacagacaaggaagattgatctccgaaggacattatctagaacaacatcagtgttttcatcttctgctgctttgtttgggaaacttaaaagagatatgctttcatttcgtgaaagtgcactccaggataacacaaagctactgcccatcagtgagaatgcaaatgagatcagtgcaaatgatgcaaaattattcaagtcacagactattcaaaggatggttagtacaagagatatttctctcccctcttccacagatacaagtacttcgagcgaaccaacttcaaatcaggaaaaggatgctgtcaccctcatgctcagtgttcgtcaggcaaatcttcttctttcctccttatggactcaggcactgtcacctgaaaatgttccacggaattatgaagcaatttctcatacttacagcttgatgctattgttttctagagccaagggctcaggtgctgaagttttggttggtagctttcagcttgctttttcattaagaagtgtttcattacaagcaggctttcttccaccttcacgcaggcgttctctttttactttggcaacttcaatgctcgtgtttttttcgaaagcttttaacgttcttgcgctcattccagttgtgaagcaagtgttgacagaaagtacagttgatccatttctttgtttaatagaagactgtagattgcaggctcttgatagtgctaatgagtcctgcacgaaactctatggttcaaaagaagatgatgagctagctctgaaatcactgtcgaacattgacatgaatgaaaatcagtcaaaagaaacatcagtgcctcttatacttgacagcttggaagatatgtcggagtcagaattgtctgctattaggaaacagttgcttgaggaattttcagcagatgacagctgtctgggatctcattttactgaaacaccttcacagtatccagcacaaaatgggaaactgcaccataagtctatggaggttattccattgggatttgtttttgaagatgatactctcgctgaagcatctgacagctcagtagaacctcacttgcaacatccgccatgtaacaacattcttgatgtcaatcggcttcttgattcagttttggaaacatctcagcatgttggaaggtcgtcagtgtcaacaaaccaggatctgcctttcaaggacgtagccaaccaatgtgaagcacttctgattgggaagcagcaaaagctatctgcgtgcatgagtgtctgtgaaaaagaggctggtgaatcttccgtcgagcagtcatctcggcaggatcctcaagcagatacgtttctctgcacagctgatgaacaatggcaccccaattcctgtaagctgccagcgctgtgtccctacgaccggttccttgcaacgtctgggtgctaagatgatctcttctgcgatgtggatctctataaccaagaacgtgttcagtggacgcctaaaaattggtggttccagagctcatgcatgctaaaatatgtgctgtcgtgtgtgagtgccagatgacatgatttccctgttttgtaaatggttctcgtctaccatgcatgggaaatatagggggtgcatcattgagtttatttcattgtttttgacagaaccattctatctatctctcatgctttgtactaattattagcaaacgagggatgatggggtaaagaatcaaccaattttatttcacaaaatataaacaaaaatgatgagccgcttcct

SEQ ID NO: 181261 - DNA, 894 bp, Zea mays
  unsure (1)..(894): unsure at all n locations
  Clone ID: MRT4577_96887C.1
cccgcgtagaggtagagatcacctcacccctcccgactccggcgcatccattcggtcgctgccggatgcgtgctcgacccggccatggatgactctgtctctttcaatgacctcggtccctccaagcccccgtcggcctctttctacgacgatatgttcgagtcctacttcaatcgcgcggccgaggcccccgagcccgcgcctaaggcttcttcctcgccgtcgacgccgccgcccgtgttcgacaagccagtcttcgacgacgatccttacacggccgatccattcgacgcgatccccttgtttggaggcggtggtggaggggaagaggaagacttgcacggtggcgtccggagtgcggcaaagccggagaggacggagttggaggtggtgggttttgatgaagatttgttccctgggttggctgggagcaccaattttcccatggagaagccggccagggaggtggagcgggaccgtcaaccagtggggttcgacgacgagttgatccctggattcgatggaagcatgaagccagcgccgcaaatggagcctgagacagtggcgtttgatgatgatgtgatccctgactgcagtggaggcacgagctatccctcttcggcaagggaggaacctataacgagacaagaaagtgaatcaatttcctctagcaaaattagcatgagcatgccagaagatcctttcgttactttaggtggtacacacaaatcgggatattcatctttagggttgttttcaaatcttctgaataacattggcatgcctagaaaggaagcggacacaacgcctgataataccagtgggatatttcagggttctgatatctttactgagtttncaaaagccatgccacccttttcgtttacatctgaa

SEQ ID NO: 181262 - DNA, 1478 bp, Zea mays
  Clone ID: MRT4577_96888C.1
aaactattcaagtcacagactattcaaaggatggctagtacaaaagatatttctcttccctcttccacagatgcaagtactttgagtgaacaaactccaaatcaggaaaaggatgctgtcacccttatgctcagtgttcgtcaggcaaatcttcttctttcctcgttatggactcaggcactgtcacctgaaaatgttccacggaattatgaagcaatttctcatacttacagcttgatgctattgttttctagagccaagggctcaggtgccgacgttttggttggtagctttcagcttgctttttcattaagaagtgtttcgttacaagcaggttttcttccaccttcacgcaggcgctctctttttactttggcaacttcaatgcttgtgtttttctcgaaagctttcaacgttccagcgctcattccagttgtgaagcatgtgttgacagaaagtacagttgatccatttctttgcttaatagaagactgtagattgcaggctcttgatagtgctgctcagtcttgcaaactctatgtgtcaaaagaagatgacgatcaagctctgaaatcactctcgagcattgagatgaatgagcatcagtcaaaggaagcatcagtgtctcttatacttgatagcttggaagatctgtcagagtcagaattgtctactattagaaaacagctgattgaggaattttcagcagatgacatttgtctgggatctcattttactgaaacaccttcgaaatctgcagcacaaaatggaaaactgcaccacaaatctatggaggttattccattcggatttgtttttgaagatgatactctccttgaagcatctgacagctcagtagaacctcacttgcgacatctgccatgtaacagcgttcttgatgttgaccggcttcttaattcggttttggaaacatctcagcatgttggaaggatgtcagtttcaacagaccaggatttgcctttcaaggacgtagccaaccaatgtgaagcacttctgattgggaagcagcaaaagctatctgtctgcatgagtgtctgtgaaaaagaggctggtgaatcttccgtcgagcagtcatctcggcaggatcctcaagcagatacgtttctctgcacagctgatgaacaatggcaccccaattcctgtaagctgccagcgctgtgtccctacgaccggttccttgcaacgtctgggtgctaagatgatctcttctgcgatgtggatctctataaccaagaacgtgttcagtggacgcctaaaaattggtggttccagagctcatgcatgctaaaatatgtgccctcaacagatgtccatcgggccaaggttccttggagacgagtcgtgtgagtgccagatgacatgatttccctatgttgtaagtggtgtttggttcgccgaaatgtaacaacataaatggattacatagggcaatggatactgatacttctgtttggttg

SEQ ID NO: 181263 - DNA, 510 bp, Zea mays
  Clone ID: MRT4577_96889C.1
gaggaaactgcctacattcaaatttgctcatacggctagatacataaccaaagtttcacgctccaccaacacgaaccgatggagccataccgaatacattggttgcccacttcatcaacgtatgactcgcaagaactccccctatgaatcactacacacgggcttccaaagcatgcgcttatgtgggaatactcttccacactaatgaacaaaggatgtgaaacttcatgcttacactcaactcatcaacgaacatctgaacaccttaacactctatgaaacgggcggaagatagctagctcaaaaacatttttggtggaccatatcaagctcagacttaaggttctgctgcttggatatcacacatatgatggaacgcactgatccaaccaaggagggagccaccaatccaaacactctattgtctgtcagtatgcgccacgcaccttaatcttcatgctgactggatctagggcagtaatatgcctattcattctgtcaccgatacca

SEQ ID NO: 181264 - DNA, 509 bp, Zea mays
  Clone ID: MRT4577_9688C.1
ggccgcttttttttttttttttttctttttttttttttttttttttttttttttttttttttttttttttttttttttttttttttttttttttttcggccaccccaatggattgggacgggttaaatcaacaccccacaaaaaaagggggcccaggcacccataaaacaggattaaaaacaagggggaaaaacaagcccagcatttttttgtaaaaccagttaaccccccaacaggggagatccaagggaaatgaaagtagggggaacaggcggtattaatgggttaaacaggaagccctaaaaaaattcgttaaaaaaaagagttttggggggtttttaacccaaagttaagggggaacatgctattttgcacaaaaaaggacccagttgccggcagcaaagggaaggcccgaaaaaacttgagggggggctcctcggggccgggggggggggaaccggaaacaaaaacaaacatgcctccctgggcccccggcgggtggcagccga

SEQ ID NO: 181265 - DNA, 296 bp, Zea mays
  Clone ID: MRT4577_96890C.1
tcgaaaaaaaaaaaaaaaaaaaaaaaaaaaaaaatttaataaaaaaaaaaaaaaacaaacaataataggggggacacatttacatatcgagtgtatacaaattacaaaagggtcctttccttttaaatgacccatacttaattccccctaattttaaatcaatagcccttgtaaaacactccctttaccaataaaaagcccgttgtaccaaaatctattttctggaaaaacattaccatttcccaaattaattccttttcaaatattccccatttgaccagctttaataacaacta

SEQ ID NO: 181266 - DNA, 312 bp, Zea mays
  Clone ID: MRT4577_96891C.1
ggcgctactcccttgccggtgaggttgttaacatctggtatcagattcggttccatcctggacactccttccccagttcctggttggcgtccacaactgcgatggaggtggcaatgcaacgggttctcgaggcgatggcacgtatggagctccgcttggccgcggcactggttggcagtggtggcgagcaggtccccgaatccttctcctacgccaccgcttcctccgccattgtgccacggtacgacgacagcgtgttcgactcttcggcggtccagcgtacgacggtgctcccatcgacgatgagttgta

SEQ ID NO: 181267 - DNA, 360 bp, Zea mays
  Clone ID: MRT4577_96892C.1
cactgttctcagcttccgctcgctggtgtcccctctctctcaccgatggcttcggctgaggcggtagctcaggtggggacttacttcctgcggaactactataacctgctgcaagagacccccgatgtcttccaccagttctacagcgaagccagcaccatggtccgcgtcgacgacctcacctgcaacaatactgcatcacagagctgtccttcagccattgggaagccgacagcatgtgatggcactggcaccgtgctcgaactgacggtgacgcacgacctgccttgctgtgaggagtatttttgtagtttatatttgtacgatgagtgttcttcctggaaaagaggggaccaatgt

SEQ ID NO: 181268 - DNA, 324 bp, Zea mays
  unsure (1)..(324): unsure at all n locations
  Clone ID: MRT4577_96893C.1
gactttnttttttttttttttttttttttgtttttttttcttttttttttttttttttttttttttttttttttttttttttttttttttttttttttttttttttttaaaggggggggggtttgttttggaaagatcgggttttttttgggggggggggggaatgccctttttttacgttttctgggtggtgccatggggaactttattttatgacaggcctatgacctttgcggtggtagggtggatattgttctggtaaaaggtgggtttggggggaagggctggaattgggtttttggggcccaagagggggtggtagaa

SEQ ID NO: 181269 - DNA, 603 bp, Zea mays
  Clone ID: MRT4577_96894C.1
cgtgtagaacactatacgtggtgagttggtacctattacagatttttcgcgtttatggagctaaagcaactaatatgccacacatgacacacaggtgttcgtgcgaaaacacagatcaatgctataaaatggaactgctctacgataaaagttcagacagcttgccatctacgaattgtacagttcttgacaaagttcttctatccaggaatacagggcatgagctaccaatcaaggaaaacacaaatagctctagaactgctaattttatagtcatcaaccaattctgtacaagagtgcggctacatatttatcaatttcgttcaatgacatacatatgttctcacgtggtcattgggcataattgccactcggattcacataaccactaggattccttctatcggacacctcctggggtcttctcaattgtatccattgaaggtccaacacctccactagttctgtcacttagatttgttgcacaaatttccaagtgcaaaagcataaacctggggtcttctcaattgtatccattgaaggtccaacacctccactagttctgtctcttgccttcatccgcaggttgcagcctatctgagg

SEQ ID NO: 181270 - DNA, 462 bp, Zea mays
  Clone ID: MRT4577_96896C.1
gtacagtaaaagatctttacttcacacattgtttgtagccacataaaacgcagcatggccaccagcaaagtttcaggtcctagaaccccctgtacttattgttcatggccagacgccgactctgtgccccgccggctttagaaaacaagaccgaatgcagataaactggtgagctacatgtacaacgacggcaagagggtcctaattaaccacccttgctagcgggtcgactatggacttgacagacacacggacattcttgaggatcgatacgcctatagggacggcagcaaaagaaaggcatctaacctaatgatacgaccttggcggagagacgcttgaggaactcgcaggtggttaccatgggggctgaggactgggacatgaacctccacctgggcaccaacactcagtggcacgtcggccatccgaactgactgagcactccgatctacggtgctc

SEQ ID NO: 181271 - DNA, 906 bp, Zea mays
  Clone ID: MRT4577_96898C.1
cattgggtacctcgaggccggccgggatctctcgcataatctcttctttcttcttctatctcagccgccgttctctcccgccctaccccgctacccgacggcgtcgttgacaccatagccacacgacaccagctgggtcaaggggtccaagcctgcgctgcgcggccaagcttttgcccagaccatcattgctcctctcatctttagttggggaagtgggaaagtggcaatcagacccatcaaaagaggccccttcatctttggtggcctagctggattggatatttcgacgagtgttcttcttgtttggccacccgcctactccgtcttcttcatacgagacaagccgtgcgcttcttcttggcctagcccttcgagcagggcaggagaggaggccactctgactctgagcttcgcgtcacctgagtactgacggacgacatgggagaggttgaggacatgtacacccaagacgggaccgtggacatgaaagggaatcccgccgtgaaaaagggcaccggcaactggcgcgcctgcccctacatcctcgcgaacgagtgctgcgagaggctggcctactatggcatgagcaccaacctggtgaactacatgaagacccggcttggccaggtgaactccgtcgcctccaacaacgtcaccaactggcaagggacgtgctacatcacgccgctcatcggcgccttcttcgccgacgcgtacatgggggaggttctggaccatcgccatcttcatgatcatctacattttcggcctggcgctgctgacgatggcgtcgtcggtgaaggggctggtgcctacgtcgtgcggcgacaagggacgtgtgccacccgacggacgcgcaacggcgggtggtgttcggggcgctgtacctcatcgcgctgggca

SEQ ID NO: 181272 - DNA, 157 bp, Zea mays
  Clone ID: MRT4577_96899C.1
gccgcggcgtcgttcgtcggcagccgcgtccttagtcgctcgcatccgacgccttttcctcctcgctgtcttcgtcctcgctgcagctctcgtcgccgatgtcctggtccgggtcctgggcgccgtcgacaaaccatctctctcctccgtgtctcgt

SEQ ID NO: 181273 - DNA, 197 bp, Zea mays
  Clone ID: MRT4577_9689C.1
gacccacgcgtgcgcgtccgcgtggagccggagcacggttttcaccagctgaatccgtcgccgtcatgttcttcgtttacgtggcgatcgtcacaagtccagtaccaaacgttccagctcgacatcaacaggcacaacgtctgcgccatggaggtataggcacaacagattaactgatgtaccattgcctacattat

SEQ ID NO: 181274 - DNA, 536 bp, Zea mays
  Clone ID: MRT4577_968C.1
ggggtgtttttttttttttttttttttttttttttttttttttttttttttttttttttttttttttttttttttttttttttttttttggaggggcccagaaaaaaatttcaacgggcggggttttccccccccctttaaaaaacaacagggggggggggggggccacctggggccaaaaaaaaaaggggaatccccccaaagggacctgggcctttgggcaaacggtaaaaaccggtttacccttaaacacccggtcaaaaccaaaacaatccccccgcccccttcggggggggttttctggggggccccccttcaccccctggggggggggactaggtgacccaccggccctttcctggggcaacttaaataaaaggggggttccggttacacacccggtaaaaaccaaagctaccctcgggcgcccttttggtgggggttttggggggcccccttggaaccaggggacccactggcctcttcccaaagtttttgggtgggccccaaaaaaaccaggttgaaaaggatcgggt

SEQ ID NO: 181275 - DNA, 901 bp, Zea mays
  Clone ID: MRT4577_96900C.1
aattcggcacgaggggaaagtggcaatcatacggacccatcaaaagaggccccttcatctttggtggcctagctggattggatatttggacgagtgttcttcttggcttggccacccgcctactccgtcttcttcatacgagacaagccgtgcgcttcttcttggcctagcccttcgagcagttcactttgggcactaatggttgctgctgtctagtcactgaaactctactttgcgggcaggagaggaggccactctgactgtcactctgagcttcgcgtcacctgagtactgacggacgacatgggagaagttgaggacatgtacacccaagacgggaccgtggacatgaaagggaatcccgccgtgaagaagggcaccggcaactggcgcgcctgcccctacatcctcgcgaacgagtgctgcgagaggctggcttactatggcatgagcaccaacctggtgaactacatgaagacccgacttggccaggtgaactccgttgcctccaacaacgtcaccaactggcaagggacgtgctacatcacgccgctcatcggcgccttcttcgccgacgcgtacatggggaggttctggaccatcgccatcttcatgatcatctacattttcggcctggcgctgctgacgatggcttcgtcggtgaaggggctggtgcctacgtcgtgcggcgacaaggatgtgtgccacccgacggacgcgcaggcggcggtggtgttcgtggcgctgtacctcatcgcgctgggcacgggcgggatcaagccgtgcgtgtcctccttcggcgccgaccagttcgacgagaacgacgagcgggagaagaagagcaagagctccttcttcaactggttctacttctccatcaacatcggcgcgctggtggcgt

SEQ ID NO: 181276 - DNA, 243 bp, Zea mays
  Clone ID: MRT4577_96901C.1
gttctccgtcggtcccagctacaacgtcagctcgttgtgacctgtgagatttcagaggagagatccatgaggattgatgaagagaagcagccccaatacagcatccgctagatattcgacgaaacgctgaaaccaataatcttcgtcgtctctgacttccgcagcagcgtcgttccctccatggtgctcgtcatcgacttcgccctcaagtcatcatggcttgacggtcgcctaagctcgtcc

SEQ ID NO: 181277 - DNA, 266 bp, Zea mays
  unsure (1)..(266): unsure at all n locations
  Clone ID: MRT4577_96903C.1
caggtagtaggnnnagagctaggcctttgaaaaccccggaaattgggtttggatttaaaaaaaaaattttaacccgtaaaaatcagggggcaacaccgagcaacatataaaacactgcaggttgttagtgggctttacaaggtgaacggtgcccttggatcgaaagaaagggggaaagcaaggacaaaagaaaaattataacgagaaatttcgttcccaccacagaaaccccaaaaaaaagaaagccccttgaagccaccttgggg

SEQ ID NO: 181278 - DNA, 951 bp, Zea mays
  unsure (1)..(951): unsure at all n locations
  Clone ID: MRT4577_96904C.1
atctttagttggggaagtgggaaagtggcaatcagacccatcaaaagaggccccttcatctttggtggcctagctggattggatatttcgacgagtgttcttcttgtttggccacccgcctactccgtcttcttcatacgagacaagccgtgcgcttcttcttggcctagcccttcgagcaggtgcgtgcgagcggcctcctcgccttcctgattccgtcctcgcatcgcatggccttctgcgtcagcagatgcctgacgggtggagatttgggagaatcccggtgattctgtgaatcctttttagctctgggcaggagaggaggccactctgactctgagcttcgcgtcacctgagtactgacggacgacatgggagaggttgaggacatgtacacccaagacgggaccgtggacatgaaagggaatcccgccgtgaaaaagggcaccggcaactggcgcgcctgcccctacatcctcgcgaacgagtgctgcgagaggctggcctactatggcatgagcaccaacctggtgaactacatgaagacccggcttggccaggtgaactccgtcgcctccaacaacgtcaccaactggcaagggacgtgctacatcacgccgctcatcggcgccttcttcgccgacgcgtacatggggaggttctggaccatcgccatcttcatgatcatctacattttcggcctggcgctgctgacgatggcgtcgtcggtgaaggggctggtgcctacgtcgtgcggcgacaaggacgtgtgccacccgacggacgcgcagaacggcggtggtgtntcgtggcgctgtacctcatcgcgctgggcacgggcgggatcaagccgtgcgtgtcctccttcggcgccgaccagttcgacgangacgacgagcgggagaagagagcaagagctccttcttcaacggggtctacttctccatcaca

SEQ ID NO: 181279 - DNA, 425 bp, Zea mays
  Clone ID: MRT4577_96905C.1
cgaagaaacagataataactcgttgactaggatggcagttcgaactacgtgtttgggtggtaacagggtcccttctccaaccttcttttagattcggtctcatcttcgttcctgccattggttggaggaactgccctatcaccattctcattggaggagagtgttgatgagacatccataacgggcctgtcagcaatctcagttgtagtaagagagccagacagttttgtttcaagagctttcctatgcacatcttggaactggccatctggagcaattccctgtgattgtgaagctgctgagtgataggcaggcccaggcttggagctcaagttttccagaccatcagattgtgaaccacacttgagctgcgtgggagggacgctcgaccggtggctgggcagcggcagtggttgtatccattc

SEQ ID NO: 181280 - DNA, 426 bp, Zea mays
  Clone ID: MRT4577_96906C.1
acggacgcgtggggcacattatgttttctgtcaaaaagttgcatatggattatatgaacatgttttcaaaaattcattactggggttcttagttctgtgactggaaaaataattttcgggttactttaggaatgaacacattaaaggagctggagttgtcaaggtgcaaaaagatctctgaggctagcacatgtgagttgtgagaaacaggcacaactaggagccttttggtccagaactttatctctgaacaaatctgaattgttttgatgttcagtgatgaacaggcgatatattcttcttaagaaccagtcctccttgtaaataattttttaaaaaaggtcttgctatttgtcccaaatttttttttcttttaaaaaaaattttgggttttttaaaatttatttttttttccccttttttttt

SEQ ID NO: 181281 - DNA, 449 bp, Zea mays
  Clone ID: MRT4577_96907C.1
gtatagaatatatccctttcgtctcgcgcaccccctcctcccctcccgatcaccccgtgcgtcgccgtgcatcttccccgtccgctcgtcgcgtcgccgtccgcttcctcctcctcgccgtctcggccgccatccgccggcgtcgcgtccctacagacagaccggagaaggtagggtggtccgctgtgatggcgcgcgtgtacgtcgggagcctggaccctgctgtgacggcccgggagctcgaggacgagttccgcgtgttcggggttctgcggagtgtatgggttgcaaggaagccacctggttttgcatttgttgattttgatgacaggagggatgctcaggatgcaattaaagatttagatggcaagaatggttggagagttgagctgtctcgtaatgccagcagtggtcgtggtggtcgtgatcgatctggtggatctgagatg

SEQ ID NO: 181282 - DNA, 258 bp, Zea mays
  unsure (1)..(258): unsure at all n locations
  Clone ID: MRT4577_96908C.1
ctcttgagacattttcttgccctgtcagtcatcattttgttatagcacacatgtacattatgagtcaaatgactgaaggaaccaacctagattctagagtatgacaggatcactagttattgtcatgtagtcacgttaaaatgagctgcagctttattagagcagcgctcattttttttaatatctgcgactaattcacacttttgttcaaccatggntcgtaagggcaagtattgttagctgccattcatgtccttc

SEQ ID NO: 181283 - DNA, 488 bp, Zea mays
  Clone ID: MRT4577_96909C.1
aaatagagaatcacagattttttgagctaagatttttagattggcgcgagacgtaatcagaacaaatcagaacagtttttcggactgggttccatttgatttgaagtcaataatttcatccgcgaacaactggctccaaagccacggataatttaccagtgaattggagcgcaattaaaatttctcggacgagttgtctcagttgacgagtggaaaccgaattatttaataattgtttatatccgaagatttagatccggcgagaaacagcagaccgaaataactgatttcggtactgacactttgttctgcgtaatttgaatgaagttagccgaaaccatatctgctaaagtacacatgatttcgtcgccaaaatagcgtacagaagaatgaacggaattataacctcgcgcaagatttctctcaagtagcgtgtgatccaatttatcttgcaccgagtattttagtcgtcgagtttaaactaattt

SEQ ID NO: 181284 - DNA, 369 bp, Zea mays
  unsure (1)..(369): unsure at all n locations
  Clone ID: MRT4577_9690C.1
agaagccgagcancgncncggaggcgcgncncgaccgcgggaagaacangacaggccnggggggagagcacggcaagaacgcgcgccggagggagcnggcgaaccncgggagcggggggggggaccacggcaaggagnccaaggacagggaggagcaggcggagnnncaagaagagcacagccncancgacgaggacaaggggaagggccaganccggnggancncggcgcangagaaccgcgnccgcaacggggagcngnaccgnnacannggcganaccaagggcgcanncgngcagccnggcggcgacgaagcgggcggccggacggggagcgagnccaggacgggcggncggccaacgagcgcga

SEQ ID NO: 181285 - DNA, 390 bp, Zea mays
  Clone ID: MRT4577_96910C.1
gtcccaagtctttgtccttccaccgccgctacgccgatcggcacaagagtagagagcactatgaccattctactcgtggcaatgtccgccacgatcctatgcgacggctggcgcacctccacggggctcggttaccttctcttcctggtgggcctgcttctcgccgtcgtcttttacctgacctcgaggctcttgtggtgatcgccagaagctcatcgcggcaggatccgccaagccagcctcctccatcccttcacccgacagctccgacccgaggacgccggtcctcgcgcccgacttcgccgggcgctggtcgtcgcgtgtaggccgtggccctcgatgcttcgtgagccacacttcgggctcggctacctcctgatgctctccatc

SEQ ID NO: 181286 - DNA, 303 bp, Zea mays
  Clone ID: MRT4577_96911C.1
tccaaggtcccttttttttctggatctggaagcgccgcagtagcagccatggacttgagcggagcaggccttaaggctaagaatgtttcgtacgaactcaaggccgtcggtccgactaagaagtcggtgtcgcggtcctccaggtccgttctgtagtttcttgtcagccttgttgggcggtacctcaaaaagggccgttacgcgcatcgtgtttgcacggttgcccctgtctacctcggcgtcgtactggagtacctctcggtcgaggtgctttagctcgccggcaacgcggtatgttacaac

SEQ ID NO: 181287 - DNA, 324 bp, Zea mays
  Clone ID: MRT4577_96912C.1
ccgtaaaaaaaaataaaaacaaaaaaaaaaaaacggacgagtacaaaaaaaattttttccacataaaacaaaaccaaccccttccttacttaactcacaacctacaccccacgcccttccctctaaccaactcctaatcctacccacacctactctacaaatttcacccacctcacgcatataataactccattacccatttctataccccaaaacattccaccccgaaccccccaccgaaaacacccccccaccatactcataaccttccccacatctaatccctaaaccttactcccctctttcccgcctccaatcctaacc

SEQ ID NO: 181288 - DNA, 563 bp, Zea mays
  Clone ID: MRT4577_96913C.1
aaagaaatggtctatctgcagtagtatttataaatgtttcaaaaaaggcatctttctacaactcttttgagcgttaatctctgaatgttaggggttcactagaacccttacagttactagatctgttaataaccaaattctgcagtcagctacaatctaattggtactattagattgcatgatgctacacacaaggtatgacaggtaaaatcatattgttcccaaattcaatatatttggtcatctacatcatcacactccattaggggatgtttaaatgctgacctctttgagcttttatcggaggaatctctgcccttaccaaacttcttgattgaccttttcagtgacattgtatagctttgcaaattttgctgccctctgaagttcttcgatgactgaactacctcatcaaaagccttggacagtgaatctttagcgactgcatagatttcagcagattttgaaccttcttttgcaaattttaccacatgacagaagagatcattgaaccttgcagttgaaggatcatcacggtcccccctcagatcaatgtaattatc

SEQ ID NO: 181289 - DNA, 241 bp, Zea mays
  Clone ID: MRT4577_96914C.1
tttcgttttcccaggaccagaacagccgcgtcgaggcggccctcgagaccccgcggccgggacccatcccaccaacactcccacccccaccgccacctgggctcccgtatccgcacccgaagggcagactccgcggcgactctgagccgcagggcgcgaggcggcggccgcggttcctgagcctgcacgggttccccaccaacggcgagatcatgcgcaagcaggtgcttgggaagtggcc

SEQ ID NO: 181290 - DNA, 1829 bp, Zea mays
  Clone ID: MRT4577_96915C.1
gtcgttcaaaccaactgtgcagccagttcacaagcccatctcatctgtcctggagaagatccgccttcgtaagatggaggttctgaagaaatcaaatacttctattgaagacagtgatggcaatgatgctgttccggagccagtggttgatttggctgagcatttggatgtgcctcagtctaaagaagtggcacttgataaagacttgaggattgatggcgctgaaaaggagcttggagcaaatggccacagccttgatcgatgtgatagtgttcaagaggatgaggatggtttgagttgcaaggagaaagatctctataactgtggtaccaaagcttcagatgaggaattttctgatagattgcaagagaatcacgagaacacccagccaagtaataatcataacgattcagtagatcagagtcaactgcccccttcttcaagccctactgagagtacagatgaaatttcatcagaagacgaagaaaataatgataaagagaacatggatccaagcgctcagaataatgatgtacatactcttgaacacctccaacaagccatcggaggaaactcacgtccagatgatgctatcttaaaggattttctagatgatgaagctgaggaagaggatgatagtgacaatgacatgactagatttaaggacaatgaagaagatgatggaagcgatgaaaacgaggtgttcaatgacctaatagcagctggttatgaagaaaaagaagtagatcacgagaagcgtaatgaactccaccaaaagtggcttcaacaacaggatgctgctgaaacaaataatgttatccaaaggctgaagtttggtcatcgggagcaaaaagaatcagcatatgaagatgaagatgaagacgaagacgaagatgaagatgaatatgtagctgattgtgaggaaggatcacaaaatgaagatttaactccagcaaatattgtgcgacaaaattcagagaaggcaaaacagatgattgcaaagatgtttgaagatgacaatgatacttatgagcactcggatgatgaggaaatagaggagcatttggctcgtcagcgcatttcaaagcgagaggttgataataatacattgatatccccattagaagatgacaactcaagggaggtatttagtctaataaagaagctcaatattgctcctaaacctaagatgagaggaaagcaatcaacatcaaatcatgaaatgcttatggctggaaggaacaccattgcttcaaagtcatcgtttcttggacgaacagccagtggttcactggcatcttctcacagatcagtctatagatcctatgtatttggtcgtgatgacagcaatagcagcagtaggagctgcatttctacttcagagagtaatttagatctggatcagaccaattcctctcaacccaagaaggccaagttcagttcacagccgaaaccagaggggacaagggcaactccagagtgtaacacgacgagttcaggtgtttccctcttcgacgtcctgcgcaggacttcagagcagagcagtcaggaaagctgtagcacaatcacagaaagtcaagctgtgcaccagttctcggcattcaagttatcaaggaggttttccaaggtgggttcaaaaaatcgacaatctctagatggctgttagtatcgagagggtgggttactgttggagcttatggggcaacgcgttgagttagtttcgagcttcaaaccgccaaaatgttccggattgcaccatgagtgccaggtgttttatgcacgaactgcgaatgctgagacctggccctgttgtagattatgaaacccag

SEQ ID NO: 181291 - DNA, 314 bp, Zea mays
  Clone ID: MRT4577_96916C.1
aactgtacaacgtccttgctccaggcatcacgggcccagccgcacgtcttactatacaaagcatccctcttgcgcccaaatgacctgtcaacaaagctcattgccgctgcgctgtacaaatgcaccgtcatgctcgtgtagagtgcttgaccatgcgcaccgggacaaggcgcttgatctcgtcatccaagttatagacgaacttcggaggatgaaatgggcgctgtgggggaatgttacacgggctcaaatacacgtggaccatgaactggggaacggtcacgctattggaactgtaaccttgtctattgtac

SEQ ID NO: 181292 - DNA, 195 bp, Zea mays
  Clone ID: MRT4577_96917C.1
atcatgcttactactcataaagtgatactctttattcttggaaactattcccctacttcgggagggggaatctcacgacagaggttcacctcatttaataatttctcaacttcaactccctaatgacgaccctgacatgctcggcgatctacaaatgctcgcataaacactactttgcgacaatgtcataatagc

SEQ ID NO: 181293 - DNA, 443 bp, Zea mays
  Clone ID: MRT4577_96918C.1
aagaggccccaacaggggaccaaaaacgtttttgggcaaccccaaccggcctacacgggtggggagggcccaaaaataaaaaggggggggaaataaaaggatatgattggatggcaaaaaaacagcaggggggaggcgggcaaacaaacaaacgaaacccccctggaaacggaaatgctaagctaggcccaccccaaactagttgggctgctaatgggaggggccaacttttggccaactttttgtggagggcaatcccggccttgcccccaaagggttaaaggcccgccttttaaaaggtcttaagggccttggggaaaaggcccaatttgacaaaacgcttgccggcctcccaccaaaattttttgtactgaaggttaaaaaacgggtgttttttcggtttggggtggaaaaacaacaccttgttcgcccggttcgttttt

SEQ ID NO: 181294 - DNA, 370 bp, Zea mays
  Clone ID: MRT4577_96919C.1
aacggacactcctccatagcaggaaaaggatacccccagcaccaggtcttccgcccacgctaccagctttatagatggggccgttcccgactccaaagccaaatccacctcgttacctaacataatggctttgggcccgaccatttgaaactgtcaccacaaaacctcaagaaggagaaggggggcaaagctattatggtggctgggcgctttcggggaaggacctcaatagtagtgtgaggcggggtggaccatgctaaccaccctggcccggggccgaacaaccggttttcaataagttggttggtgaccaagccgccagggccaaggtcctccacttgatggaaggagtcttctaccttgaagttaa

SEQ ID NO: 181295 - DNA, 661 bp, Zea mays
  Clone ID: MRT4577_9691C.1
tccccgaagagtgaaaggcgtcttcgtctcgacttgcttcccctccgagagaccgacctacccatccaatccatacactttcctgcaaagggtaggggatagacagggattctaaggctccgctccacaccaagagtagcgaagatctctgatttgagagagggaagcatcgaatcagccgacaggaggaggtctcagtcaccaacccagcagcagccatgagtgccatgaagttttgccgtgaatgcaacaacatcttgtatcccaaggaggaccgggaccagaaggtgctcctcttcgcctgcaggaactgcgaccaccaggaggttgcagacaacaactgtgtctaccgcaacgtggtgcaccacagcgctggagagttcacccaggtgctccaggacgtcgccggcgacccaacacttccccgcaccaaggaagtccggtgcgccgtctgtggtcacggcgaagctgtcttcttccaggccaccgcgagaggtgaggatgggatgacgctcttcttcgtctgctgcaacccgagctgcggtcatcggtggagagaatgatgtgtccatcacccaaccgatgacggatttcaccgatgcacagtctgagagaagttgttttttctttcttcccaagagatattttccccagtagcatg

SEQ ID NO: 181296 - DNA, 448 bp, Zea mays
  Clone ID: MRT4577_96920C.1
gggcaacaaaacctacaaatcatcacagcgggttttcacaaaagggcctccttgtatccatagaaggatccctttacctatggccctactaaaaaaacgggggggctcaaacaggggactcacaaagcgacaattcgtacccacatagtactttcccaggagaagcacctttttcccaggaaaaaaaaaaataacttcaaaaaaaaaaaaaggcaaaagggggatatggtgttcctcgggggggttctaaaaggcaaaaagaaaactactggttgggccatttgaacccgggggaagcaaaagtaccattgcagccaaactttccttaaaggcccgaaacaaggaaaggccgttctgcaaaaccataaaaaaatggacggtttattaataggggtaagagaaaattttagccaagtaaggtttcaaaaaaacaaaaaggggcaaaaat

SEQ ID NO: 181297 - DNA, 670 bp, Zea mays
  Clone ID: MRT4577_96921C.1
ttgggtacctcgaggccggccgggaccactttcaccgacacagagctccgctcgtcgatcagctctcggctgaccactcatcgccagtgggtgcctgccgaccaggtctcgccaccgccgccgccgccgcggtagagaggggagggagagggagaaaaaactggcccagatcgagaggtacagcacgaaaaagagaggcaagcagtaccggcaccttgagggcgcgtcgtccctgccagcgttcgcgccgacggcgttcctgttctgatcatggcgtcggcgtcggcgactcgtcgtcatccacgaggacgacgacggcggtgaagacaataagaaccaaccaaaaccactacgcgaagcatatatacagattactgtcaacgtattgtagaaccaaggatctatgtatatatatatgtgtgcgtccatatcatcatcggaccggaataaagctagcaatctctcttcttcacgatcgagagatagcgcgcgtgcgtgtaattaagtattatagatgcatgcatgatgcatgcgtgtgtgtatctatatatcatgtgatggtttgtatatgagctagctatagctatagctagaatcgtgtaatagtatactacaaactaagctaatacaatatccaagtttgctagaaaaaaaaaaaaaaaaagcggcc

SEQ ID NO: 181298 - DNA, 680 bp, Zea mays
  Clone ID: MRT4577_96922C.1
ggccgcttttttttttttttttttatagaaaacttggatattgtattagcttagtttgtagtatactattacacgactctagctatagctagctcatatacaaaccatcacatgatatatagatacacacagacgcatgcatcatgcatgcatatatatatagtatgtagtaatctataatacttaattacacgcacgcgcgctatctctcgatcgtgaagaagagagattgctagctttattccggtccgacgatgatggacgcacatatatatacatagatccttggttctacaatacgttgacagtaatctgtatatatgcttcgcgtagtggttttggttggttcttattgtcttcaccgccgtcgtcgccgtcgtggatgacgacgagtcgccgccgacgccatgatcagaacaggaacgccgtcggcgcgaacgctggcagggacgacgcgccctcaaggtgccggtactgcttgcctctctttttcgtgctgtacctctcgatctgggccagtttttttccccctctccctcccctctctaccgcggcggtggcggcggcgagacctggtcggcaggcacccactggcgatgagtggtcagccgagagctgatcgacgagcggagctgctgtgtcggtcagaagtgtgtcccggccggcctcgagggtcccaa

SEQ ID NO: 181299 - DNA, 416 bp, Zea mays
  Clone ID: MRT4577_96923C.1
ttttttttttttttgtttttttttttttttttttgttttttgttgtttttttttattgtttgtttatgattgggttctattggtctttttttgttttaaaaacaaaggccctaaaggaaccattagagctcatttaaaaacatgcggcaaaagggggccaaggggggggtatctaaacaaaaattccccccccaaaattaaatgagacccatttggggggaaaaaatataaaaaagggtaattctggctcccggggaatggaaacattttttgctttccccaatccgcgagggggtaggtattttttttccccccgaaaatgtattgccctgctgcaaaccccccaaaggaggaccttaagggtttgggaaaacaaaacaaggtgggaaccccattggggaagttgttaggggtat

SEQ ID NO: 181300 - DNA, 2302 bp, Zea mays
  Clone ID: MRT4577_96924C.1
ctagttctagaacgcgagcggcccccctttttttttttttttttttatagcaaacttggatattgtattagcttagtttgtagtatactattacacgattctagctatagctagctcatatacaaaccatcacatgatatatagatacacacacgcatgcatcatgcatgcatctataatacttaattacacgcacgcgcgctatctctcgatcgtgaagaagagagattgctagctttattccggtccgatgatgatatggacgcacaatatatatacatagatccttggttctacaatacgttgacagtaatctgtatatatgcttcgcgtagtggttttggttggttcttattgtcttcaccgccgtcgtcgtcgtcgtggatgacgacgagtcgccgccgacgccatgatcagaacaggaacgccgtcggcgcgaacgctggcagggacgacgcgccctcaaggtgccggtactgcttgccgccgtgcgcgcggggcagcgcccgggcgaggtcccaggacgccgccttcctgaccttgacggcgtcggtgctgctgctgtactcctcgcagatgtcgccgagcgaggggcgccactgctgcggcgcacccgcagcagcccccagcagctgggcggctctgttggccctcctcctccggcgcctcctcgcggcggcggcggcagcgtggtccacgggcggcggcgcgtcgtcgatgggtccagcacggcagccgaaggggacgagcgacaggagcctcatcagcttcctgcgcacgagcccctcggtcttgggccccggcccgccgccctccggtcccctatctctcttgcctctctttttcgtgctgtacctctcgatctgggccagttttttccccctctccctcccctctctaccgcggcggtggcggcggcgagacctggtcggcaggcacccactggcgatgagtggtcagccgagagctgatcgacgagcggagctgctgtgtcggtcagtgtgtgtgtcccggcgggcccgggggagcgcaccacctctatcacaaattatgacgtccactctcccacttggggagatggtaagccaacgcacccaccaagtgcaatgtgggccattggcctaggccacgagccttgatgatcgctcgtcgaccccgtccaggtaagtatcccggccggcctcgaggctctagctatagctagctcatatacaagccatcacatgatatatagatacacatacgcatgcttcatgcatgcacatatatatagtatgtagtaatctataatacttaattacacgcacgcgcgctatctctcgatcgtgaagaagagagattgctagctttattccggtccgatgatgatggaggcacatatatatacatagatccttggttctacaatacgttgacagtaatctgtatatatgcttcgtgtagtggttttggttggttcttattgtcttcaccgccgtcgtcgtcgtggtggatgacgacgagtcgccgccgtcgccgacgccatgatcagaacaggaacgccgtcggcgcgaacgctggcagggacgacgcgccctcaaggtgcctgtgtgtgtacgtgcaagcatgcatcatgttctcggattagacggagagcggagcagagcagtgataaacaaagggcacagtgacagatagataggcacagtgacagatagataagtaccggtactgcttgccgccgtgcgcgcggggcagcgcccgggcgaggtcccaggacgccgccttcctgaccttgacggcgtcggtgctgctgctgtactcctcgcagatgtcgccgagcgaggggcgccactgctgcggcgcacccgcagcagcccccagcagctgggcggctctgttggccctcctcttccggcgcctcctcgcggcggcggcggcagcgtggtccacggacgacggcgcgtcgtcgatgggtccagcacggcagccgaaggggacgagcgacaggagcctcatcagcttcctgcgcacgagcccctcggtcttgggccccggcccgccgccctccggtcccctatctctcttgcctctctttttcgtgctgtacctctcgatctgggccagtttttttctccctctccctctccctcccctctctaccgcggcggcggcggcggtggcgagacctggtcggcaggcacccactggcggtgagtggtcagccgagagctgatcgacgagcggagctgctgtgtcggtcagcccacgcgtccgcccacgcgtccgcccacgcgtccgcccacgcgtccgagaactagtc

SEQ ID NO: 181301 - DNA, 1576 bp, Zea mays
  Clone ID: MRT4577_96925C.1
ggccgctttttttttttttttttatagcaaacttggatattgtattagcttagtttgtagtatgctattacacacgactctagctatagctagctcatatacaaaccatcacatgatatatagatacacatacgcatgcatcatgcatgcacatatatatagtatgtagtaatctataatacttaattacacgcacgcgcgctatctctcgatcgtgaagaagagagattgctagctttattccggtccgatgatgatggaggcacatatatatacatagatccttggttctacaatacgttgacagtaatctgtatatatgcttcgtgtagtggttttggttggttcttattgtcttcaccgccgtcgtcgtcgtggtggatgacgacgagtcgccgccgtcgccgacgccatgatcagaacaggaacgccgtcggcgcgaacgctggcagggacgacgcgccctcaaggtgccggtactgcttgccgccgtgcgcgcggggcagcgcccgggcgaggtcccaggacgccgccttcctgaccttgacggcgtcggtgctgctgctgtactcctcgcagatgtcgccgagcgaggggcgccactgctgcggcgcacccgcagcagcccccagcagctgggcggccctgttggccctcctcctccggcgcctcctcgcggcggcggcgtggtccacgggcggcggcgcgtcgtcgatgggtccagcacggcagccgaaggggacgagcgacaggagcctcatcagcttcctgcgcacgagcccctcggtcttgggccccggcccgccgccctccggtcccctatctctcttgcctctctttttcgtgctgtacctctcgatctgggcgcgtctgtaactaaatttccacgttgcgatgcaatatgagctgtagtactgtcctcgcactactatttaccgtttgtgctgcatatgtgatataaaccttcaaaaaatatacactcgaatggtctgaatgagcactgcctcagttttttgcttcttattgatttgcgatgacccagactatgcaagacatgagatgaaacttttgctgcaaataaggaggctgaaaaggaggcctttgaaggagctgaaagaaagaggaaggctagagaagaagaggaagcacggagggcacgggaggaaggggagagacgaaggcgggagagggatagggaccgcggcagggaccgatacaaggatagatataagcgtcataggcactacgactaccatgacgagctatagatcctgtattcttttgaaatctgcacgatattggatgtctgtctacggagagcgcacgtgcaaaacttgtatgttgtactcacggatgaagctgaacctgtgattttggcgatgggtagagattggccatcgcgtctgtaactaaatttccacgttgcgatgcaatatgagctgtagtactgtcctcgcactactatttaccgtttgtgctgcatatgtgatataaaccttcaagaaacacacacacgaagggtctgaatgagcacggcctttgttgtttgcttcttataaaaaagaactgttttatc

SEQ ID NO: 181302 - DNA, 540 bp, Zea mays
  Clone ID: MRT4577_96926C.1
agcaggatcgatgatactaatagggggccagggatagtcatcaccttattatatctgatgcatacatgcacacactgtagcacaaaaaaacccggatggcaacgatccggtttgatgaaccactcccttactgacgcccactgccgaggaagtaatgtctgtcatgagtggacaaccttgcaagatttgctgcctccagtattctcagaatctacagacttgccaccacttctatttcagatgaaggaattgtgtctgcagtgtattaaataatatatctacaaagcctgatcctcggtacccagcacccttgatgctgacgacaattcgcctgttttataaaaatatgcaatttgtagctcgaagaccagacccattatgatgcagtctgtagctccaaccgtcttgcgatattgaaataagtgatgagtatggctcagttggcagttgccgtagtggaaggtcagcaatgaactgattactgatatagagcaaaagccgcaacccgactttgtgcttcctgaacatatccatattctt

SEQ ID NO: 181303 - DNA, 257 bp, Zea mays
  unsure (1)..(257): unsure at all n locations
  Clone ID: MRT4577_96927C.1
gggnaaaaggaggctgggnaaataatcagataagggagagcaagtgctaccttcagatgacgagctcatcttcaattcttgactagctgagtagctggcagacgccggacggatggagcacttggaggcctgaccgctggagcagagacgccggcaaggacagaggagaggagagagatgtcggcaaggacagaggagaggagaggattagggttttctggcggctaggaaatgttctggcggctggaaggcctttg

SEQ ID NO: 181304 - DNA, 794 bp, Zea mays
  Clone ID: MRT4577_96928C.1
gcacgagcttcacgctctcccacgcagcccttccagcaccaccaccaccagcagcaagcatcgtcgtcccccgtccgcctctccgcttccttccaggcttctagccctctctcctcggcatctctagcgcgggcggcatctatagtagccctagccccggccgcggcattggaggaaggcagcggcattggctgcgggaaccggagaaggaggcattgactaggtacaagcctctgtaacctgccggatccggatccgaatccgcgctgccgacttgccggagtttgggggcaacgaagcttgctctagtctctagagatggaggacctactgggttcggagatcgggaagaacgactacgattggctcctaactcctcccgggaccccacgtgttcctgcactggagggtgctgagaaaacaccacccacaaatatattaccgaagcgcactacaactagatcatcctcaactactagagcatctagggacattcggcagaacttgggtggcattcgtggcacatccctgtttccccagagcatccgctcggctgctgccaaggtccgcccggtaagggcatcagatccagggcatggcatctcaaacggggaccagcgctacagtgacaatggaagcagcgtgaacggacacctctccggggactcaaacggggttctctcacgtaatggtggcagctcaaccgattcgccagacagggggagcatcgggaccaaggagaccctgagcgaactggacatctatggtagctcgcgctatgaagcgatgcttct

SEQ ID NO: 181305 - DNA, 550 bp, Zea mays
  Clone ID: MRT4577_96929C.1
cctcgaggccggccgggccgggtttcgaactcgcatcgtgcatgtctctcagatctcccatactagccctcgagccatcctggtcgtcatactgcgtagccgtgccgtcgatgcggctctaccgccaccgccgattagtggttggccctgacgtagacctacttcgagaaggaggtgggccagcaccgcggccccctcgctcataggtctacgcggcgatgccgtgggacactcgctgcacgcgttgccctccgagtatcgataaactgtgccgaccgcttcgagaaggataaatctgtactgataccaaaggttgactgtgatgagcaccagagtgtatgcacgaactatggagattctgggtaccccacagttcaatgggttcccagaggttccctgacagccaaagaagtatgaggatcaacggtctgtggagcccttgcataatttgttaacagcagaagcaggaaccaatgccaaaatagctgccattccttcgagcgtcgagattctgacttcacagagctttgactcaagtgttcttgatgaa

SEQ ID NO: 181306 - DNA, 510 bp, Zea mays
  Clone ID: MRT4577_9692C.1
gtgggggggtttttaaccctttaattttgtcacccgctggtccacaaaagacttttcgacaccaggtgcaaaagagttccagattttccacactttcttaagaggaggaaaagataaggggagttggccgtgtggcaacacaagtcctaaaggaattgctttgcgggaatcagagctgggaacggggctgcctccaagggggggacgcccttgtccactcctggggccactagcctggggggaacgggtcagccggggccgacgattatgttgttgattgggatgaagattagcttggcaaagaagcctcctaatcccatgacgacgaagccgatcgcagtacgcgcggtgaccttggggaactccttgcgggcccgcttgtgaggtccttgacgaggcgggtgctgtccttggcgaactcccggagggtgtgggcttccgagttaactgcgttcctggggtggcggggagggagagatctcaagggggggtcttttgttggttggaccc

SEQ ID NO: 181307 - DNA, 2017 bp, Zea mays
  Clone ID: MRT4577_96930C.1
cgaggccggccgggagcggcgcagaacttcacgctctccccgcagcccttccagcaccaccaccaccagcagcaagcatcgtcgtcccccgtccgcctctccgcttccttccaggcttctagccctctctcctcggcatctctagcgcgggcggcatctatagtagccctagccccggccgcggcattggaggaaggcagcggcattggctgcgggaaccggagaaggaggcattgactaggtacaagcctctgtaacctgccggatccggatccgaatccgcgctgccgactgccggagtgttgcctttttgcagtttgggggcaacgaagcttgctctagtctctagagatggaggacctactgggttcggagatcggggagaacgactacgattggctcctaactcctcccgggaccccacgtgttcctgcactggagggtgctgagaaaacaccacccacaaatatattaccgaagcgcactacaactagatcatcctcaactactagagcatctaggctttcaatatctcaaacagagaatgggaattcgacgattcccactagaccagcaagaagtaactctgttagccgatcatctatccagtcagctctcatgaatggcaacaacaggacatcagttctgaatacaagcatttcttcagtcacttcaagacctacaactcctagtaggcgaggcagcacagttggcacaccgaagcattcagctcctgctgcacgtccagtgcctgcaagatcctctactcctgggtatactcgtccatctacacctgcatcttctcgtgcaactaatgtaataagccgtccgagcgcctccttgagtgcaacaagcagaccagggtcttcctcaggtaatgttcctgggataagccgtgccacctcattgtcctcaagttcggttccttcaatgagccgttccagctcacgatcatctacacctacacgacagcctgcaattcgctcatcagctccagctattggtcgttctccttctgttggacggacttctagcatcaacagctttacgactacgtccaggtctgcagccagtactggcaggaactcagcaccttcatctgctccatcatctcgtccaagttctccaaatccacgaccccgagctccagtgcgacctcttgatatccccgattttccaaatgaaactccaccaaatctaaggacaaaattacctgaaagaccaccatctgctggcagatcacggccaggaatggctttaggcataagatcaaccccaaatactgaaccttcagctgcctcagctcctgtgaagaagatctctgtgcctgctgtgagccgaagtaaattttctgatgcatcatcaaagacctctactctcacaaatggacaccaaaatcgacaggctgacaggtccaatattgacagtcaagctaatagaccctcgagaccttccacgggtaccacagataatggatttgggaggtcgatatcaaggaggtcacttgacatggctatcaagcacatggacattcggcagaacttgggtggcattcgcggcacatccctgtttccccagagcatccgctcggctgctgccaaggtccgtccagctcgggcatcagacccagggcatggcatctcaaacggggaccagcgctacagtgacaatggaagcagcgtgaacggacacctctccggggactcaaacggggttctctcacgtaatggtggcagctcaaccgattcgccagacagggggagcatcgggaccaaggagaccctgagcgaactggacatctatggtagctcgcgctatgaagcgatgcttctcagggaggacgtgcggaacacaaactggctgcacgggcttgatgacaagcccgaccaaagccccctgttcgaccaccggttcgagccgctgccggagcccttcagcccgttatgacagctgctgcttgtaaattatggtcatcactatgattgactggtcgggttttctgtccttttgtgctgtc

SEQ ID NO: 181308 - DNA, 658 bp, Zea mays
  Clone ID: MRT4577_96931C.1
cggcgggcgggatatcctaccgagagtgccagccctgagcagagcaaaaccattggtgtggagacatcaccggcgtgggtatgcaaagcggggaaaagggtccgccgcgggtgctcctgcgcggggtagcccctgcgtcgtgtgactgctccctgcacggcggtcgcccctgcgtcggacacctcaccccctgtgctggaactcgacgtccgtgctcctctgcccaaagccggttgctcctcctcctatcccacctctctagagcttcagtgaccgggctgggagagatgcacgcagttaggagctcggcggggaccaccgtcgcgagttcatcggtggcgctctgtggccggtgtgctgtgggtcaataccgcgaacgccccctcaaccgtcccataccagcggtggggcctgggcgtgttggccagggagtttcttgggcgcacctggaactgcaccgtggcgaccgcgggcgtgaaggtgtgggcatcgtggaggaatttctcactggtgctgcgggtccgcgcatcgccgcgtgccatcatcaccacgcccggatttttgcgcgaagggacgtgtcatctgaaaagcaagttgatacctggagtctcaagtgcccagtcaagaactggtatcactgggagaggcgcatggggga

SEQ ID NO: 181309 - DNA, 203 bp, Zea mays
  Clone ID: MRT4577_96932C.1
tggaggcctgacagctgttgtcctttggggatcctttgcttctctggggcctcaacagaactaaagaagaaaaccgaccctttccccaactacatgtaccatcggaaggaaggaaggcaaatgtaggaacccaaaatgcttatttcttcttctcttacttccctctcacagaaaagtcttacgaatggggaaattccacacaa

SEQ ID NO: 181310 - DNA, 267 bp, Zea mays
  Clone ID: MRT4577_96933C.1
cggacgcgtgggcgagcgcgtgggcgactgcgctggccctgctctactctgccgcgggagccgcctcggagtgcaccatcctgtgctagcgctgcaacttgaacgtccgctggcctaaggcctgcaacgtatatggccgattctgcgagcgcgccatggcggacatgatactgtacctcatgagctcattgctcaacctagtactcctcatgctcaacatactgaccatacacaagagctcttcctactactaagctagctactata

SEQ ID NO: 181311 - DNA, 540 bp, Zea mays
  Clone ID: MRT4577_96934C.1
ccggccgggatcacactcgacttcttcttcatacactccaacaagcaacacatactacaacatcaagatgaagactaccggactcttgaccatccttttcacctccatggctgcaactgccattgccagtcctaacgccctgcctatgggtgtcgaggttgttgaacgcgacggcaagaccattgttcgcgaagtgccacatgcactcttgagtcgcggtcttgaaccccgatgccgagaatgtgtcggccaaggtggttcgtgcaccattggtgatggcagctgctatgctgaggaccccccactgtactgcacatggtgcggtgacaagtgcggatctcgctgtgttcgccagggacagacttgccagcagacgtgtgtttaagacttgacaatgacaacccgataccttagaagcatgaggtagcagatcaagttcaatcgctatggatacgctatttttaccattcagacaatcgttatatatacaactcaattaaatatgaacataaatgaaaaaaaaaaaaaaaacccgcggcc

SEQ ID NO: 181312 - DNA, 163 bp, Zea mays
  Clone ID: MRT4577_96935C.1
cgtgtgccaagcctaccacgtatggaacggcgaagattcacagaaaaggtgtgtgcccctagacgtgggcctggcggcccaagcacgggtctgaccagacaaacctgccacgatgggggccggccaagatggcgcgtgcgtaagccgaccatattttgctcag

SEQ ID NO: 181313 - DNA, 126 bp, Zea mays
  Clone ID: MRT4577_96936C.1
actgctgtaaccctgtagtctcatgtagcttacgttacatggcgatcggcatgcagttgtaagcttaggtttcggtgataaattgtgaatctcttggctgtaaaaagtagatcactcaataaagaa

SEQ ID NO: 181314 - DNA, 507 bp, Zea mays
  Clone ID: MRT4577_96937C.1
ctgcacgcactggggtggcgaataaagagtggtacctgcatgcgcgtaccgctgccatggctctccgatgagagagctagctcgtgtacgtgctttcgctatgttgctccatgcatgacatgtatacgtccagcctaagtacgcttgtactaattcagagactgtgtcagtgaaatgtgctataataataaataagtaaagggcgccttcaaataaaacacactgaagcatagagggcctgtcctcactcacgtgacctaaacaacacggcgcggcaaagcgttccaacgcaccccggactacgtggaggaggcgcgccgcaagatggcggaggccgcggcgcacgcgggccacaagaccgcgcacgcaggccaggccattcaaggcagggcgcaggaggccggcaccgggggaggtgcaggtgccggccctagcggcggcggcagggcttcctcgtaagcaagtcatccatgcatggatggatacccgcgttcgtgtctgtcagta

SEQ ID NO: 181315 - DNA, 207 bp, Zea mays
  Clone ID: MRT4577_96938C.1
aacgtattcgcttttttttggggtcccctaatttggttccgcgggccgtggttttccacccttgggcctgggaaacccctggtttcccccatcttattcgccttgaagcacatccccttttcgccatttggcgtttttgcaaatgggcccgccccgttcgcccttccaaattatatctctgcctgaatggcaaatggccccccccct

SEQ ID NO: 181316 - DNA, 251 bp, Zea mays
  Clone ID: MRT4577_96939C.1
agcagtggtaacaacgcagagtacgcgggtgtcagatttccaatgtgctttatttttttattctcttatgtttcaggatgttttgatatgttcttgctttcaccaagaagtttgccatttcaatccgtttcattttattttattcgactgatacagtttattgtttttctgttcgcttttaacaagaaattcaccggcgaaggaaaacaacaacaagctccaaagaatgcgtcttttgctccgaattcctt

SEQ ID NO: 181317 - DNA, 476 bp, Zea mays
  Clone ID: MRT4577_9693C.1
agcagtggtaacaacgcagagtacttttttttttttttttttttttttttttatttttttttttttttttttttttttttttttttttttttggacaaccaaaaaaaaaatggggcacaagagctttatttatttaatttaccccccacgaggaggagcgaatggaaaaaaaggaaaagggaggagggggcaggaccgtagctagcagtagctcccctgctattattcgaataaaaactgacccagggaaacaccgaaagcatcgacgagccgggttcccgcccgcgcaaaaaaaccaacaaagctgctgccgatgggcgccgcgacggaaaaacgcatcccgttcccgacacccaaggggccccaggtcctgctgctggggacgagcctgagcgagggcagggcaggggcccctctaaccgcgccggagggtcccgagacttacctgccatccacgggcccggcaaggccgatcc

SEQ ID NO: 181318 - DNA, 225 bp, Zea mays
  Clone ID: MRT4577_96940C.1
tcgtttacgcgttcgggtgcgcggtgtgacgtgaccgagtgccataccttaggcggtgtgccgtatggggaagggtgagtgcgtgctaaggctaattcagaggtctagggaggtagcgatgggagaggtccatcggtggagacagacggtgatgtgatattgagaaaggttgtaggaagacattcaagccattggggacaacagatacgattttctcttggaaag

SEQ ID NO: 181319 - DNA, 294 bp, Zea mays
  Clone ID: MRT4577_96941C.1
ttctattccactgccgcatccacccacggtcccgtgttagatctggctgggcgcgcaaacaagaacaactctgcatgtgccccccacgccctcacactgatctctgattcctggagggtgtggttacattcctcctttctccgtcaaaaccatgaacggcgaacatgtacttctgccgcctgtcgaaccaactgcctttctccgtatcagaagaacacctacattagcaccacagcgtaatccacttttagatgtactacctctactccatgcatctcagctccctctcataca

SEQ ID NO: 181320 - DNA, 429 bp, Zea mays
  Clone ID: MRT4577_96942C.1
gggggacctcaaaaaaatttttttttaactggctctaaaaccggggatcttttaacagattccttgccccccatgggagggcggggggacagaccctcctgatggaactttgggggcataattttccggggggccccgggccttggaggggggcataaaagagcctttgaaacgccatgttggaggaccccccctcctcaattgccttcgggcccggggttttaatttccaggccctgggccctaaccttcctgggtggctggccgtcacacataaaagctttaaccgttcgttccagttccggggcctccacgaaatttttccttttcttttccacgttaagggccccggggccccccatgggggcccccagcgtgaaccccttttattgttttttggccccaaggggccatggcaccatgggccccc

SEQ ID NO: 181321 - DNA, 721 bp, Zea mays
  Clone ID: MRT4577_96943C.1
aaaaaaaaaaaaaaaaaacaaaccgtcagaattcattatttcattacaatttatttaatatacaagccattttgtcatcgagtacatgattgctgaaattaaatattaaggcaatttataaatcaatataccactctatattgtatatttttagtaacttaaatagtcctgaacctgtccatataattcttgcgtatttttaggatgtggcttttaagttctggacatgttttatttacaatgaaatcttgtgtggagtgcagggtcgcagggtttccttcaaaaatacgttgattgtcatgacttcgaatgttggttcgacatcaatttcaaaaggaagacagagcataggtttcttgaaggaagataccgagtcaggctcatacttcgcaatgaaatccttagtgatggaagagctcaaggcatttttccgtccagagttgctcaataggatcgacgagatggttgtgttccgtcctctggagaagactcaggtttgtttcttatacattttgctccgaagttgttctgctggtaattcatagaccttttcaaagcattagccacttatggctgtacgaaattcatagtttcagtcataaaactaatggtctaacctcagcacacgagatgctaatggtaataacctcatcattttttgcagatgctggccattcttgatatcatcctaaaggaagtcaagggccgacttttggccctc

SEQ ID NO: 181322 - DNA, 361 bp, Zea mays
  Clone ID: MRT4577_96944C.1
gtggggggtttttttttttttggtttttttttttttataaaaagaaatttgctcccttttcatataaacgattctccaggcaccaaatagggcggttactttccccctcaacagggggtagcagacataaaaattctagggtctaggtttttggtaccaaacctacattaatagggttccacctcccccaccccaaaaaaactcacaacgcacaccggggcgggccataaataatacatggctgcgggggggggagactttaaatggccccccaatgggctgggaacacccactggttgattatgggtgttggggttagattggaaacccctaatcttatttgtggcccttttttattcac

SEQ ID NO: 181323 - DNA, 488 bp, Zea mays
  Clone ID: MRT4577_96945C.1
tgaattcggcacgaggctcgagccttgcattcctccgatacttccgctctcgggtgcacacagacagcgcacgacaagcagccgactcgctacggactccatacgactactttttccgaccaggtatcgctgaagccgttccaacgagttgattctccgaccttctcattccttgcgtgggatctgaatgctatgttttatcatggaccgaaattcaatacgatctaagaagagggcgttacaaactgacatttgatagtcttcttaacatgatactattatcggtgtgaatacaagagctaggtactcatccgccgagctcaagagccaagatcacaacctccaccatcaccaaccaccgagccctaggttttcagagaaaaactgaaatgttgtaacttataatacccgactaaaagatatttgttgctttttactgcacgacaaatctattgggcgctacaatgatcgtgctaaagcaacatcga

SEQ ID NO: 181324 - DNA, 313 bp, Zea mays
  Clone ID: MRT4577_96946C.1
cggcaaaaaaaaaaatccttcgacgccaacagcaatagccacatgagctcataccaccacaacagcaagaactagccaatgatcaaaaagattcagatacggttggcagctcgatagaaccgacgaagggacaaaaatcctgtatagccaccgtaccagagaccgttgcccacacaacaaggtaaaggaggacactgctcacgggcagcgcaagcaccctgaaatccaggtgagggaccccaagaccctcttctttggcgagaaagaagttgctgaacttggctgaaagaaccctgatgagtacccatggggt

SEQ ID NO: 181325 - DNA, 388 bp, Zea mays
  Clone ID: MRT4577_96947C.1
atcgcagctctataagggcgccctccttttttttttttgcgtcagccaagtctgtggatgccgtcggtgcggatcggggaggtcgaagcacatattcaattgtaatctttgatggcctaagagataaatggttcattgtgaatggctcttgcacatgggttagcctctcctaagggacggcggaaaccaggcagagagcgcgatcatgcgcgtcacccgaaagggaatctgcttaagatttcccgagccgggacgtggctgctgactgcgactttcggaagtccggagacgccggcgggggcccttggaagagtcatgtttttctgttaaagggcccccaatcctggaattgcgtcaagccgggggtagggtcccggcgggccggaag

SEQ ID NO: 181326 - DNA, 314 bp, Zea mays
  Clone ID: MRT4577_96948C.1
caaatgcattgactagtggtgtgactagctatgccactacaggtgatgctatatctgagggcttcgaaagaggatcgactgcaggagcgcctgagaagggctcgagccttgaatatgccttgcaaaatgactcgactgcacagtaagctggtgtgacagcaactgggaacaacaccgatctcttcaaggacttgctaagctacttggtacagtaaggcacaccgtatggtacacctgatccttctgggtagatggaggtcatcatcgacatgatttgatcactgtaacaatcactatctcactgattgatcagc

SEQ ID NO: 181327 - DNA, 379 bp, Zea mays
  Clone ID: MRT4577_96949C.1
gttagacacattttaacatgcttccttttaaaataaaatctttacaagttcaatcttaaatactcaagttagatgggggcaaaagtcgaaagaaccatatggtacactgttatacaaccccagcctccaactatgaagcacttcatcaagtcattaaggacatgaactcgaatcaatcaataaatccttataaaagtccttcaacagttatctaggaattctaggaagtgttttcgtcccaaacacaacggcggggtgcgtgcgcgtgccaacacatacgggattatgaagctgttccttgggtagccactaaatacataaattctttttatgacaagtcttggtaagaacaaataagttaccttttggcaaacctttt

SEQ ID NO: 181328 - DNA, 203 bp, Zea mays
  Clone ID: MRT4577_9694C.1
ggggaggaaagcacaagggccccatgtccatttttaaaatctgcccggccttaggggggggggaacaaaaaccacatgttcatttttaaaatctgccaaataacacccaacatgagggaaaaggggcatgacccttgaattacacaaccctaaatcctgggaatcaaatgtcatccacataaaccccaactgaatcgggcctt

SEQ ID NO: 181329 - DNA, 1780 bp, Zea mays
  Clone ID: MRT4577_96950C.1
ccttggttattgattatagacaatagctaaaagtagtaggtgcaattaagtgcaaaaacgaccgacagtatatacagacaaattcgagagagagagagagagagagagagagagagagagagagagagagagagaggcaagcactataccaaatccagaggatgtaggtaggccgatagcagactatgtgatgtgagaatacaaagcgacacacacgccgattgggcgcatacagacatccgctcatgtctcagttttccccgcctagaggagcccggccagcgcgccggaaccacgtcttgaacgcggcgaccagatgcgggcagtcatcgacattgcgagtcgagaaccccaggcattgctgcagcagctcctgtgcttctggaaaaggcaatgtggagatgatctgaagaaacgccccctccagctcttggcagttggttgatttctgggagtgcattggttgaacaatgtcccggcagacgtttaggacagggagccagcttctgacgagcatcctcctcacctgccgaggtaccagagtctccccagtgatgactgaattggcgagcttgagtgtgcaacgagtcacaagcattggaagcccaggcgtcatgttccgccacatgtctgcatcattcagcaacttctgcaaatcagtagccagggcagcttgatcactccacagcgtcaccgcattatctgccaccctcagatcgaccatcctctcgatgagccaatataggtgtttcacattcaacactgcagactgcaggttaagcctctgtatggcctcgcgttcatcactgtccaccgcaaccctgaaatccgggctagcgtacttccccatgagctccttgattgtgtccaggcgcgactgaaatgcctcgtcgagcaccttgtggacgcagtcccgcgacgggtagtccttaaggagcatcgctacgaatgccttggtggcagcgtggacggggtggtcatggatcgccgagtggatctggccgtgcagcatcgcttcggagggtgacctgccggccacgcccgcagcggaagaaagaccagccgccagcggcgactagaggagacaccctggcgagcaggtcggctgcctcatcggcggggaggagccgcgccaggttgatgacgcgggcctccttgtcctcggaccaggacacggcctcgagaaagcggatgcaggcccaacgcaggcgtcgacgaggaggaggagagcagcggggaggaggtcgagggcatcgccgggggagcggatggcactcgcgaaatcgagagtgtggaggaggcggagcaccttgatgtgggcatcgaacgggcggggacaagaggggggcgccaccaccgcgagggagaggcggccagtcgcggcggtgggccagcggtcggaaaggagggcggcgaagtagcgggagcggaggagggacgcggacgagacgtgcaggtcgacgaaggttccggatgagacggctgcggagaggtggcggtcgatgtcgggcttgacgtccacgtcgtcgggggaggaggggttgaggtagaggcggaggacgacgtcggcgttggggaaggtatgcgggttgggagagctggaagtggatgggggagccggaggggacggtggcgagcagaaggcggtgaggcgggagctgctcgccgagcgctggcgcttgcggagggacatcgccgtcggcgtcgatgtcggtaattggggattatttcctttcctctttggggtgtagtcgagacttgagaggccgcgagggggtac

SEQ ID NO: 181330 - DNA, 372 bp, Zea mays
  Clone ID: MRT4577_96951C.1
tgtcattctgcttgtaaatctactagaaatgctagggaccacagtatggtcgatttgtatcggcggtttcaaacttacatataaacccagtatgttgattgatgggcggctactgctacaatttcatatcttctatcctgttcatttctatctttcttgcaatgttcatgtttgtggctcttaagttgttcacattcttaagacaaagccaatggtttttttgtccctgtggatgagattcttggtatctaggtgaactgcagatagcaaatagcctaatggcttcctacatcaccataggtgaagtggacaagaaccattgcacataatgctctgtttgaatatagatatcggagatggtgcaattgaatt

SEQ ID NO: 181331 - DNA, 292 bp, Zea mays
  unsure (1)..(292): unsure at all n locations
  Clone ID: MRT4577_96952C.1
aaaagtacaattatgctggatgggctattgacctgtggtagaggcaagcantgtctctggtacatctagaaccaacttgagaacaccaacgactatcagcagcctgagcagcagctgatgcccaggtctttgcaacacgagctttcttcatatttgtaaaagcctttactcccgggcagcccaaattgtaagccatatcaacaactgcaccatgaacgttggtaggcaaaccagaaatccaaccgcttacgcaggttaccaaaggagggtacaggatgtccgagaacacatg

SEQ ID NO: 181332 - DNA, 563 bp, Zea mays
  Clone ID: MRT4577_96953C.1
gtccgcccacgcgtccgcccacgcgtccgctcgaggcattctttttaccttttcacatttaccgcgcaaacatcacacaaccgcaaacatgggtgccgtagtttcctgcatcaagtccatcttccgcacgatcggcaactgcatcatggccatcgttaacgccattgccgccggattgaaggccatcatcaacgccatcgtctccctgttcggcatcatcatctcctgcctgacctgcggacgcggcggcggccgaaagactcgtaccactcacacgagtagagtctaaacagtctcccgtcttgacctccgctgacacagtgtgtcagccaggaagacgagacgggagttgggcgtctgaggtagctgagcgatcagcaaagcgaccttaccgacatcgcgactacgactacgactggagagaagatgtaatgaacgatgagcatgctggagttttcttttgcacgaatttgaggtgcgccggatacccgacgagatgcattcttgtcatgagtggcgcatagatacccaagcttttctgaagaatcaactgtttaccgacc

SEQ ID NO: 181333 - DNA, 633 bp, Zea mays
  Clone ID: MRT4577_96954C.1
tctttaaatattaatagagctcctcagagatcttttattaggacaacgatcagagaacgactcgccaccagatgttacagaataaagttatgaactatgtaaaaatggacatagtgatcatcctctattttcagaattaagaagtaaattataagcataagaagcagaaactgaaacagaaacacgctctaataatatttctagatttacttgacaacgataagatagttatacttctacttctataactactaatggactgttgtttcgtagatttaccatgtcctacttctccaactccaactaatagtattaaaggaggatcatctgttaaatttcatatttattcagatgttaataattctcgttcattatataatatttaattacttcaagaaggagaagaagaacaacaaactagagaacgagaacgaaatcgtaaactcgtatcagtcatcttccaatgatcgatttattaacagctcattgttcatagacatagacagctgtatagtgataagttctgttctcgatcgatgacataataataataagcataaagatgaagcaagcgggtggggtaatgctgtgcggttcaatcaagacggcctccactccactccactcctgaga

SEQ ID NO: 181334 - DNA, 406 bp, Zea mays
  Clone ID: MRT4577_96955C.1
ccatccacatagaggaggaatcgtaaacatacactttaatacataaggacgctcggccccatcccaaaggcacagaggccgatccacgactgactagcacacaaaaacctaacacagaggtgatttacatgcacttgtaaggggtgaagaccaaccggactgttagggcgacaaaggacgcggaacaactttcgttagagggttgatgaactcccaaaccaaacacctgaaacctgagttatttacacaaaacactaccggtaacccaaaggtactcctgatagggacatcacaggagatgatacaaaaccaagggcaccggctgactaagtggactgcaatgcctgtcatcccataagcgaccaccctctttggccctgggcgcccacttaccgaaccaacccat

SEQ ID NO: 181335 - DNA, 260 bp, Zea mays
  Clone ID: MRT4577_96956C.1
catctagagaacattatctatatctacttaatagcgacgacgaacccgatcggcacggtgattgcgctgctggcgcggcttgctatcctgccatatcggtgcaagcgccacctgctcgtatacaactacccgctgacattgacagccaccgttctacgttcattttccgacgtcattgtatatgtagtttcccaagaagagcgctccatcaggttgtaagggagcacagttacctaagcacatagattccactctcagca

SEQ ID NO: 181336 - DNA, 260 bp, Zea mays
  Clone ID: MRT4577_96957C.1
cggacgcgtgggatgaagtagctagttcatgatggaaaataaaatatttcacatggacattgagggacctgtaattctgattaaagtatgaaacacaagtacacaactatggagaatacaagtatttcttaaagactggatatctctacttaattgaggctgaatgtgctatcatcttctaatattgaaacacatgctttcagtgactttggaccagcaacgattggtgtacagtttcatactcccatcatgtgcttgcc

SEQ ID NO: 181337 - DNA, 156 bp, Zea mays
  unsure (1)..(156): unsure at all n locations
  Clone ID: MRT4577_96958C.1
ataaaaggttttccgcgttttttacaacaanccacactttggaacacagaaagggctacccgtggaggcacccttccaaatattagtgaagcaaccctacaaaggtccggccgatataaatcgcaacaagtgaatgtattatttgtggaagatagg

SEQ ID NO: 181338 - DNA, 533 bp, Zea mays
  Clone ID: MRT4577_96959C.1
gcaattcttagacctatatacagtattataaattcttaaaccacgctgtctagcatacataagggttcacgattccagtacgtgccgttatttctacagtcacgagaggctggaccttttattacagaagtatgtactctctcacaggccgcccattgtgaaggactagacaggtcacatatcccagggactcaaactaagtctgacacccagccaaacctaatctggagaagctgctccagagaagctgcgtggggcctatggggccaaaacctgccgacgcttgtattgcacctctgttttttcaacaccaggcataaacattgcgtatctcttacagaggtctatcctccggacgccagataccatcaaaagatgtgttctcagacatgtcattctgggaataaggacaatcgactagctaacaaggtccaacaggcagaggcatttcaagagtacacagagtgtcctgggaaaatgtatcattcttcgtgctacggggtacatccagggatacactcacattcacacca

SEQ ID NO: 181339 - DNA, 1116 bp, Zea mays
  Clone ID: MRT4577_9695C.1
cattgggtacctcgaggcccggccgggaagcgtccaaaccccccatacaaccaactcgcaactcatcgcgcggttcctcgatcgaagtctccagacgcccagcgtcgatcgcgacgacgtacgccaagccgcagcaaagctccggcggcgcgcgcggcggtgtgcggtgagaatatggcggtggtgtcagcgctggccaagtacaagctcgtgttcctgggcaaccaggcagtgggcaagacggccatcatcacccgcttcatgtacgacaagttcgacgacacctaccaggcgacgatcgggatcgacttcctgtccaagacgatgtacctcgaggaccgcaccgttcgccttcagctctgggacacagctgggcaggagaggttccgcagcctgatcccgagctacatcagagactcctccgtagccgtcatcgtttacgatgtgaccgacaggcagtcattcttgaacacgtcaaagtggatcgaggaagtaaacacgcaaagaggtggagacgtgctcatcttcctcgttggaaataaaactgaccttgtcgacaagaggaaagtgtccaccgacgaaggagaagccaaagcacaggagcatggtgctatgttcatggagaccagtgcaaaagctgggttcaacgtcaagcccctgttccgcaagatcgctggatcccttccaggactggacgcactttcgtcaggaaagcaggaagacatggtcgacataaacctcagacctgccagcggttcgtcggcttcaggtgcagccgcgcagctggagcagaaatcaggcggttgctcctgttgagacttcgacagttttgtgttcagagaagctacagcagtactgcaacatcgagttaagtactttcagagagattatgacgaagagtgtgttttcgcccagacgtccagtagtgatatactgacatccatagcgagaagccaatttctgtgtacagatttgtttagcaagttatcatatactaggatataactttttgagacacaagggacaaaatctgtggaggtaagggcatctcactttttttttgatgaaacattagcaggagctctgccatatcatataagaagagcaagccagagt

SEQ ID NO: 181340 - DNA, 2999 bp, Zea mays
  Clone ID: MRT4577_96960C.1
cggccgggccgggaattcggcacgaggcagtctctcagcctatggtcatcgtggacacgagctcacactgacactgactgacagagtcaatggcgacgggcgtgcttgataggcgcgccccaactaacacgacgtcggtcctcgatgactgactgggtatatatgccatgggtcaccccttccgccaatccagtcaggttcgtcgtccggtcgccgccgcctagttgctgccagtccaggctgggaaatcgtatcgtcagggagagcagcatgaaggggctgctgctgctgctgctgtgggcgtgggcggccgccacatgggtgtccgtcagcgccgtgactcgcctcggcagaggcggcgccggagagcagccgctgtccaggatcgccgtcgagagggtggtcctcgccgtcaacgacgcggcgtacgtcaaggcgtcccctctggttctcgggcacaagggcgagaacagtgagtgggcggacgtggagttcttccacccgaacccgtccgacgacgactggatcggcgtcttctctcccgcaaatttcagtgatgcgatctgtgaggctgagaatacgggtaccccagtgctgtgcactgcacctatcaagtaccagtttgcaaacttcgaaaacgatggctataacaagactggaaagggctacctcaagcttcagttgatcaaccagagggaagatttctcattcgcgcttttctcaggtggtctctcaaagcccaagctgatttctgtctccaacaaggtagcctttgctaatccaaaggcaccagtgtacccgcgtttggcgcaagggaagtcttggaatgaaatgacagtcacctggacaagcggctacgatattacagaagcagttccttttgttgagtggggtgagaaaggaggtcgccgacttcttgctccagctggaacattaacatttgaccgaaatagcatgtgtggcgtgtggctcaccggcacgaactgttggttggcgccatcctggttacatccatacaagcttcctgaaggatctgtggccagactcgccgtatacttacaggcttggccataggctgatgaatgggacccgcgtctggagcaagtcatacagcttcaaagcatcgccttaccctgggcaagattctttgcagcgagttgtcatatttggggacatgggaaaggcagaggctgatggttcgaacgagttcagcgacttccagcccggttcgttgaatactacttaccagatcatcagggacatcgaagacatcgacatggtggtccacatcggggacatctgctacgcgaacggctacttgtctcagtgggatcagttcactgcacagatcgaaccgattgcttcgacggtgccatacatggttggcagtggtaaccacgagagggattggcctgtcaccggttcattctacggcaacctcgactccggcggagaatgcggcgtccctgcccaaaccgtgttctacactccggctgagaaccgcgcaaagttctggtacgcaacggactacggcatgttcaggttctgcgtcgctcacacggaggaggactggaggcccgggaccgagcagtacaggttcatcgagcggtgcctgtcgtccgtcgacaggcagaagcagccgtggctcgtcttcctcgcgcaccgcgtccttgggtactcgtcctgcgcctactacgagtcggagggcacgttcgaggagcccatggggcgggaagcgctgcaggagctctggcagaagtacaaggtcgacctcgccttctatggacacgtccacagctacgagaggacgtgcccagtctaccagagccagtgcgtcgtcgacgcgtcggaccactacagcgggccgttccaggcgacgacgcacgtcgtggtcggcggcgcgggagccagcctctcggagttcgccgcctcgaagatccagtggagccacttcaccgacttcgaccacggcttcgtcaagctcaccgccttcaaccactcgtcgctgctgttcgagtacaagaagagccgcgacggcaacgtgtacgaccgtttcaccatctcgcgcgactaccgggacgtcctcgcttgctccgtcgacaactgcccccggaccacactggcctcatgaagcctcacgatcgcggtggttttcacttttcagacaagggattcggtccgtgcggtgggtctcttgcagggcagcagcgattcaagttactgtacatagttttttttttctttttttctttttttggtagtgcgccaataaatgaggcgttttctttactgcctccgttacctgcatgtgaaactatgttgttctacccgtagctaaaatatgttttagtatgagaagggttaaccaaaaagcaaaaaaaaaaaaaaaaaaaaaaaaaaaaaatcaaaaaaaaataaaacgtaaaaagctacaaaaaaaaaaaaaaggtctaccagtctcagtgcgtcgtcgatggatccgaccactacagcggcccgttccaggcgacgacgcacgtcgttgtcggcggcgcaggagccagcgttctcgattctgagttcaccacctcgaagatccagtggagccacttcaccgacttcgaccacgggttcgtcaagctcacggccctcaaccattcctccctgctgttcgagtacaagaagagccgcgacggcaacgtgtatgaccatttcacaatctcacgcgactaccgggacatcctcgcttgctccatcgacaactgcccccggagcacactggcttcctgaagtcccacagtagttgcagaccaggaattttagttcttagcttttctgtactgcaccgaccaataaatgagaccttttcttttttttaataaaatataattatatgcaaaaaaaaaaaaaaaaaaaaaataggctacaggtgaaatagtgagtgccttttttatatgttgctaaaatgtgtatgtttgcagttaaggtacctacagtgagtgacaggaagcatgattcat

SEQ ID NO: 181341 - DNA, 394 bp, Zea mays
  Clone ID: MRT4577_96961C.1
tcgaggccggccgggccggggtctggttcgtcgtccggtcgccgccgcctagttgctgccagtccaggctgggaatcgtatcgtcagggagagcagcatgaaggggcggctgctgctgctgctgctgtgggcgtgggcggccgccacatgggtgtccgtcagcgccgtgactcgcctcggcagaggcggcgccggagagcagccgctgtccaggatcgccgtcgagagggtggtcctcgccgtcaacgacgcggcgtacgtcaaggcgtcccctctggttctcgggcacaagggcgagaacagtgagtgggcggacgtggagttcttccacccgaacccgtccgacgacgactggatcggcgtcttctctcccgcagatttccctgatgcgacc

SEQ ID NO: 181342 - DNA, 833 bp, Zea mays
  Clone ID: MRT4577_96962C.1
cctcgaggccggccggggcagtacctgcttgcaaacttcgaaaacgatggctataacaagactggaaagggctacctcaagcttcagttgatcaaccagagggaagatttctcattcgcgcttttctcaggtggtctctcaaagcccaagctgatttctgtctccaacaaggtagcctttgctaatccaaaggcaccagtgtacccgcgtttggcgcaagggaagtcttggaatgaagtaagccttcttgccattcgacaaaaagatcgtaggagtagtattctgctctgaactcaactttgtatcagaacgggagaagatcgcattgtggagataacttaactgtagacgaccagtagtcaccaatctaagaatggcgactatattattattgtttttttttcgtagatgacagtcacctggacaagcggctacgatattacagaagcagttccttttgttgagtggggtgagaaaggaggtcgacgacttcttgctccagctggaacattaacatttgaccgaactagcatgtgtggtaagaagctactatactgccgaactctctggggatgaacaagaaaaaaaaagaggcctttgagaagttcactgcttacgttacatgtgatgtatcaccaatcttttcatcctaatctgcaaactcaggctcaccggcacgaactgttggttggcgccatcctggttacatccatactagcttcctgaaggatctgtggccagactcgccgtatacttacaggcttggccataggctgatgaatgggacccgcgtctggagcaagtcatacagcttcaaagcatcgccttaccct

SEQ ID NO: 181343 - DNA, 824 bp, Zea mays
  Clone ID: MRT4577_96963C.1
ccggccgggagctcttacccttccttcttctcaaccgactcaattgcttttcttgaccttcaacttctcttctctagcaagcacactcgattcacccacaagcaatccgtccaactaccaatcacctcaggccgggcatacacaaccatcactatgttctctgctactcgtgccctccgacaggctgctgtccacactgagcgaacccctctcatcaagttcctcggaccccgaaccattccttccaacctcgaccacacccccaagcctcaccccgcctctggcgctgagaagctccccgagtcttggtccggctacggaaacggcgatgccgccgcttcccacaagaacttcagctcctaccgcgaccacgtccagcagcatggccctctccagaagtctggcttcggtggcaccagcgctgcctccctaggctccgtcaacgcccccaagggtgttgcctttgacctttctgagttccctgctcgcttccaccgtgctcgcctcaacgctgccgagatcgaggctatcgagtctggcggcgctgctctcttcggttaaatctgtctcccgccacaggcgaggagtcataggtggagcggagggatgaatcagatgggatgaacgaatacctacaacgacacgcagattatggcaagaaccaggacgataccgcctggggcatacatcctgcgcggcgtagtatacgaggaccccaagtggttgggcacagtgacaaactattcacggtgcatttcgggatgggcacgcaagcctatttcatcgacatacagtgcagacaaggacagagtctccgaactgca

SEQ ID NO: 181344 - DNA, 588 bp, Zea mays
  unsure (1)..(588): unsure at all n locations
  Clone ID: MRT4577_96964C.1
cccacgcgtccgcacacttgtctgaaacgtgaaagagaccctccgagatcgtcagaccgtcctcctttccccatggccaccaccctcgccaggagcagcagcagcaacggccacggacgccgccacgaggcgtccaccacctcgtcttcgtcgtcctcctccacagcctcggctcagaggcggaggggggagtcgcagtcgcagtcgcagcaccaggccgccgccgccgtcccggagacgccgggtccgggtccggcgctgcagttcctcgcgagccccgcgcaccaccaccacccccagacccagctcgtcgccccgaggaggtcggtgccgtccaagtgggaggacgcggagaagtggctgcggcagtcgtcgtcgttgtcgtcctcgggttccgaccaccacctccacggcaacgcgagggccgccttctccaggcagcggagcggcgggctcggacaccgaggcggcgccggaggcggtggcgacgagaagagcgcancggtggcggtgaggaggtcggtggacgcgctccgggacgcccactcgctcgcgctgtacgcggcgccggcagcggaggtgctcctc

SEQ ID NO: 181345 - DNA, 358 bp, Zea mays
  Clone ID: MRT4577_96965C.1
taaccgcttgaaccttcgacaaccgaaagaagtattacagctcacaccttttggccatttggagggacaaaaatttggtgccgtcaactaccacaacatgtgactgctgaccttgggtggtacgtgtaaaaaacattgggggtatgccattaaacacaactggctgagtgtgaactctgctgcttatttgcaacaaaaattaccattcacccaggtaggtgttgactacccccatgaatttgttacattcaaccaagtagtggtattgcaactctgctgcttatttacagccactgacaactactaccatccaagcacctaactgatgtgagccctgatgccttcttgacgcagcaac

SEQ ID NO: 181346 - DNA, 310 bp, Zea mays
  Clone ID: MRT4577_96966C.1
cccacgcctccggcggggactccatgttgctgagcaatatttatgcaagtcctgatcgatggagcgacgccatgaacatcaggcgatggacggctgatactgcagtgaggaagtcgcccgcctgtagtgttgttgaatcaagtttgccgacgaatagttaggacccaacgaattgtcttccctgtcaggtctaattttttcaacagcactgtctattatggtagtaacctcgtctcaatttggtcaggggaatacatggcgccggagccgtgccgccccagtggtgtcttaagatgtgtcgaccctttca

SEQ ID NO: 181347 - DNA, 437 bp, Zea mays
  unsure (1)..(437): unsure at all n locations
  Clone ID: MRT4577_96967C.1
cacccacagaaancnggcccaaacanaaggcngnaagaggngncnccaccaaagngcggcgggccgacancaccacccagcaancggacggagccaccaccgcagncaagcngcggcncgggccccacagagaacngcagcaccaggggcggacccggggcgcngaacncagggnangcggccgaagcggcagagaaccgggaacccncggagggccgaacaccngngnccgcggcnncnccaccccangggcccgaaggggggcnccagncaccagccagggccacagccgncggccacgcggacccgacccaccgacnnncccagccagcngcggaccgcnccgggaagaagacccccccggcgacggcggcgacggaggcgagcgcgggaagggccgcgacggggnnccgcgggcgcgaccacgcggaggggcg

SEQ ID NO: 181348 - DNA, 604 bp, Zea mays
  unsure (1)..(604): unsure at all n locations
  Clone ID: MRT4577_96968C.1
ggcctggcacgcagnatcctggtgatagcaaacgggatggcagcgtgctacagcctgctgcagggcgggaggtgcctggtgagcatcctcacaggtggtggcgtactaatcaacaggcccatggcatgggccatcttctcctgcgatcaggcaagtatttctataataataataattgtcgctgtcagcctttatgctttttcttggtcgctgtctctatgttcttgcatgcatgtgtgtttatttgtcattgtcgagtggttggttaattgttctgctatcgcttcttctaataagtttcggggccgggggtcaacacagccagacgcgaaaaatacctgcgatcaaaacaaacggtgctggacagctctgacgttcaaacagtaatgttcaatgcatattattgtcatagcaggatggaaacaggagatatgagagacttcagtttaggagtaggaacttggacgtgtcaattgtcgatatataggaacaccactttgctagctttgctatgtgcataccgtcaacactgacgttcttttagagacgagatgttgacctacaaagacagggggngaagaagttggcattaattgacaccttg

SEQ ID NO: 181349 - DNA, 357 bp, Zea mays
  Clone ID: MRT4577_96969C.1
aacgaaaccgaaggcccgcataccctattttttttggaccgaaaaaaaaaaaacaaacctggaggcccgccaccacaaccacgatcacccgccaggggatcaaccccggggaaccaaaaaaaaggccaaaaaaaaccaaggcccttccgcccagggatcgttaaaccaaggccggggccggggccaggggggggggaagccaccaccgggggcacggggcgccatgggccgggctttttttgacgtccttttggcccacaggagcagggtctttttccgggggggggccgggcgcgtcggccacggggggccccggggggcgctggcccgcgggggccttgcctttgccagccttgg

SEQ ID NO: 181350 - DNA, 276 bp, Zea mays
  unsure (1)..(276): unsure at all n locations
  Clone ID: MRT4577_96970C.1
ttcgcggncgcgtggggntaaaatcgatagtttcatttatctcttcanaccgtatagggtcttgtggtagagttatgttaattacaatggcatgcactggtgggatcctcgtgttgttgatctgtcacttcactggaatatattggtgattctttgtgtttaaaaaaaaaaaaaaaaaaaaaaaaaaaaaaaaaaaaaaaaaaaaaaaaaaaaaaaaaaaaaaaaaaaaaaaaaaaaaaaaaaaaaaaaaaaagggggggccgtttttaaaagaac

SEQ ID NO: 181351 - DNA, 269 bp, Zea mays
  Clone ID: MRT4577_96971C.1
aaaaaaaaaggcgaaagcaaaacacacacgccaaacaaaaaacacaacgagaaacggccaagtccaccaaagagacgctaaccgaacccaagcacaagggcacagggggcaacacccaaagaacgcaaaaccaccgggcgatcccgcccgaccagaccaaggagcaaacaaacaaccgcagagcgagccggcaaaccggaagcggaagaccccggggggcgacaccatgccgggcaggggaggctcaaacacacgaggacccgggagcc

SEQ ID NO: 181352 - DNA, 732 bp, Zea mays
  Clone ID: MRT4577_96972C.1
cattgggtacctcgaggccggccgggatatcccatccatcacagctagctagcgtacagacgaataatctcttcttcacctcactagctaacaccatctagcagctctgatcgctctgtcctgcaataatggacgctcggtcctcctcccaccagctggccccgaaggtgctgctggcagcgtcgctgctgctgctggtggatatggactgagacaggctccgcgtcagagaactgtggtgaggagacgtcatgcgatgactgccacgtgctacgagaacgcttctggagaggcatactagtgccccattccgtcggcagagatgcatcgggatatgcactaaataggcaacacgctccctctctcggagggggaccgatgtgattcctcgaactcatctctggaactggaaaaaccgctccctgcgtggtctggaacatggcatcaacctgaatatgccctgaccaaatggcaggcattgattcttgatccaactcacgacctgctcagaaactcgaaagctatgcgtgctcttgtcgactatttggtcgacacctgcattctgtgtaggggaaatctgtacctgaggacccaaggattcttgccagtggtgtacatgctgttgtgggcacaccaacacgggtgcttgatatggtgtacaagccgtctctccgacccgacaacatcaagatgtttgagtggtatcaggctgatgatatgctctgccgagga

SEQ ID NO: 181353 - DNA, 204 bp, Zea mays
  Clone ID: MRT4577_96973C.1
atatactaggttgcaaccgttatatataatcagagcgcggttgagatggacgagagaacacctgattagcacctccgaactgtattcctgcactagcaaaggaaggtcgatcaccttgccatgcacgtatacaaccttgccatgcacatatactttaatcttaccatgccatattgctaccaagaaatatgattgatctattta

SEQ ID NO: 181354 - DNA, 210 bp, Zea mays
  Clone ID: MRT4577_96974C.1
atggcttgggagaacaagagcgaagagcttgcccttgttgaatttcgagaggccatggagagggccaacattgagaagattactgataaaatgctaggttatcagatgattctgaagaaagcgaggactttgattttgaagaggatgctaacgatgtcgaagagcgaccttggaagccaagtcatgtcatttttgacaagtcaactgtaa

SEQ ID NO: 181355 - DNA, 259 bp, Zea mays
  unsure (1)..(259): unsure at all n locations
  Clone ID: MRT4577_96975C.1
attaaaaatcttccccttgccgttttncctgctccgcttccccaagccgagctctcgctttcggcgctctcctcaatcctcgcccccgcgtctttcagagcgcccatgagctgatgccgccgccgatgggctctccccccgtcgcgcaggacccggcgccgtcgctgtcgggcggcttcggctctttcatgcgtcgcattcgctgtctctaccgccgctacgcagtcaatcacatcgcctacgacgtcactaacttctg

SEQ ID NO: 181356 - DNA, 1796 bp, Zea mays
  Clone ID: MRT4577_96976C.1
ctgaactggtacaagcggtccatgatatgctttcagctgcaggagtaaggatggatgctgagaaggaaacactctttgaggctactctttccttgcaagatcagcttaaagaatctcaagttgctctcttggtagagcaggagaaggcggaggcggctgtaaaagaggctgatgtcgccaaagcagcatgggcatgccgtatctgcctgaatgctgaggatgcattaaggattgtgatgatcagcgtaaccaatcatttcccttcatttgaagcccttgctttggttcagatagaacggacactagaggatatatcacagaaactgcaactggttcaacgtctccatactcgctttctcttacttcccaatctccaagatgttacaagaaccatccagcatccttctattcatgaatggtcaagcaatggaatgcaccgaagcatttgtttcgtcaacaaagctacgggttatattctaatcgcagagcccccaagttttttgacgatatatgatgttatcgcaattattgttagtcacaggttaggggcaccaatgatcttgccgattgcctcagtgtttgcatgcccagatggttcagagaaagaagtccttcaaattcttcacctgggttcagactttggagtttcaaaacgtgaagggagatacgacgcttcccttggagcagaattgttatctcaggatgctcggcaggtgcaattccttccattaagaccgttctatagtggtgaaattgtggcatggaagacaggcaaagagggggaaaagctcaggtatggtagggtccctgaagatgtaagaccctcagctggccaagcactttacagatttccagtagagacagctcctggcgaaattcgcatgatgctttccagtcatgtttactcatttaaaagtgtttcaatggctgatcttctatctgcaccttcccaagtgaatggtgatgtggcattaggtggccaagagaaactcttggccaccaacactggcactgaagtcaccaaggatgcggatgctggacttgaatatggaaaagtatcttccactgaactggtacaagcagtccatgatatgctttcagctgcaggagtaaggatggatgctgagaaggaaacactctttgaggctactctttccttgcaagatcagcttaaagaatctcaagttgctctcttggtggagcaggagaaggcggaggcggctgtaaaagaggctgacgtcgccaaagcagcatgggcatgccgtatctgcctgaatgctgaggtcaacatgaccatcataccatgcggtcatgtcctatgtaaccgatgctcaagttcggtttcgcggtgcccattttgccggacgcaggtggccagaatgatgaaaatattcaggccataaaaaacattgaaggacgtttggtctgactaaccgcttcagcttgtgaatgtgttacgatatcggggctcggctcccttctggttgtgcgctgcattcctttctggtctgatgcatctcattattctccatcggtgatgattggtaatccgatatggggggtgcaagtatagttacgttgtacaggaacgatgcattgcagtgtacagattccaaaatgaaatcattttacacacttcgaagggcataaatgtctgaagctggttttctcgtgctatactttcagagtcaacactacactgccctggttatccattcagcatgtatggtggtgtccaacaaagacccattccttgtgaaaaaatcttagcactggctccttcaatacgaaagaaa

SEQ ID NO: 181357 - DNA, 596 bp, Zea mays
  unsure (1)..(596): unsure at all n locations
  Clone ID: MRT4577_96977C.1
accatgnatgcatgccccaaggacagataccgcagatgagcaatcttgcaagtacccctcttcaagggaggggcgtnngctctatgccaagnaagggactacannnaccttggcgaagcacgccgcagnattgganntgtgcccannacctccnnaggtgatcaaagctcagtgcgagagcgttcagagtccaagggagtacccgtcagggagacccttctcctggcagtacttactactggtacnctcaccaacgatggcnattgagcacnctccgcaactaccctgaacctcccgtctgagatcgtgcctgccacgctcaagaagtctgccaggccaccgggccgcccattcggctctggccctcctggtgaccgcccaccaaggggcccaggtcgttttgaaggcgacaggccaaggtttggtgacagggatgggtaccgtggtggtcctcgtggtgctcctggtgactttggtggtgacaagggtggagctcctgctgagttccagccatctttcaggagttctggtggcaggcctgggtttggacgtggtggcggcagtggctttggtgctggcccgacctcttcttccat

SEQ ID NO: 181358 - DNA, 292 bp, Zea mays
  unsure (1)..(292): unsure at all n locations
  Clone ID: MRT4577_96978C.1
cgncagtttagcaannagcncaacgacgccagaggggagaacncgacaccangaaggngcggagcgnngcccnngcncnccnggcgcncgcngcgagcgccgccnccagnacaagcggcggcngnggcngccagacaccaccgnnncancnaccgcccccgnnccanangccggcggggggggagcngccgccgcagcagcagccgcagccanggcaanaccccacncaaccaccgcagcnaagcccgggccagcagnncggancccgcggcggcggcagcgncggcagccc

SEQ ID NO: 181359 - DNA, 797 bp, Zea mays
  unsure (1)..(797): unsure at all n locations
  Clone ID: MRT4577_96979C.1
ccggccgggaaaaccacgaagcacatgccagctcctcttccggtctttcggacgccgaactcttcctccacccgttcgatgatactacagcactagcgagccaaacgtgggaggaggacctacaggccattctttgttcgattccggaaacgcgagcagtcgtcccagcggcgtcaaccgccatgtgcgccgatggctcgtccacctgttgctcggggccagacatcgttgccgctcaccacgttcctcgctcggcgacggcgacgactaaagacgccgcctttagtgggtctccggacacgatcctggaggagatggctgagaacccgctggacatgtacttccctccactgccaacaacatccggacagtccggaatgatgatgatgagcgacaccacttgggcgccggaacatcggttccgagaagagttcgcgggcagctgcgctctggggtgcgcggagctacggttctgctcggaggacgtggcctccgcaggagtatttcataagcagcctggctcggcgacggcggtcgtcctggatgccgtgccagtgaaggatctttcgtttcagaagcttcagcatggcatgagccagcttgatctggccaccagaggacgcatacgggattccctgtaccggttggccaacaggcttgaacaaacgcattgcgttgccagaacaagcnggagaatgggttcaaatangatgttacgttacgtgtggcaggttcgaaatcggacgggtggggcgaaacgcagacgacggcccccatggatcggttagtcgcgcagc

SEQ ID NO: 181360 - DNA, 306 bp, Zea mays
  unsure (1)..(306): unsure at all n locations
  Clone ID: MRT4577_9697C.1
cggtccgnattccgggcatgattcatgatccagaggattattaatggaattctttcatttgtttctagtacgtcacgttgtcccttgtcatattactagtatactacacacgattgcacgaagcagatgtgttcgctttggactactacattcattcttctccgtagtatcttcagtgtgcgctgtactgtatgctcttgctctctgcaaccaggagctgagaccgcgacatcttccatttttttcactgacgctgcggcttgttcttgggaaatctacatcatctataaaacagcatctgaaatc

SEQ ID NO: 181361 - DNA, 408 bp, Zea mays
  Clone ID: MRT4577_96980C.1
gtcagctcgtcgacctgcccctcccggccaacctctacggcgcgggcgtacgggcctgggccctcagagtgcgcactaacgcgctctgggcacgtcggggtcaacaccaccggttataccgatcagccgcgcgttgtgccagtcccgttcgcgcgccgtgtagccattgcaatagagctgttaggggtaaactcaactggcgaataacgactgcacgcgagtgtatgatgctggcaattgcgcgggggcgactcttcaagtattataagtcagggcaaccgctacatacgagcatcgatcatggccgtcaaagtgataatcaaccactacgcgaaagaaggcgtgtggaagaactgagtgttggacacggaggacgacctgtacatgaacagcgcgatgttcaatacg

SEQ ID NO: 181362 - DNA, 531 bp, Zea mays
  Clone ID: MRT4577_96981C.1
ggccgcttttttttttttttttttgggtgtttttttttttttttttttttttttttttttttttttttttttttttttaaaaagccgcaagaatgcgagatccagctttttttcggcaggaatcaggggagggggacataccaccgacagccgggaacggagcatccaccctataccctttttttgggggagggggacgtttttggagaccctttaaacaaggggggccctggttacctttacaaaaggccgggggggaagccctactttttaggtcacggcatttacaacccatttggggttcttttggtcatggtccgggggttattcgctttattcgaaaactgcccccccacaaccagggggcggccccttttaaccatgttcctccgggcttgtaactaaacccccgccttcttgggccctcgggtcatcattttttccatgcggttttagcccgagggcggttttttgactcaacccaagttgcccctgcagatggtctttgggccccaaatttttggggacgcc

SEQ ID NO: 181363 - DNA, 635 bp, Zea mays
  unsure (1)..(635): unsure at all n locations
  Clone ID: MRT4577_96982C.1
ggnnnnnnnnnnnnnnnnnnnnnnnnnnnnnnnnnnnnnnnnnnnnacacagagggatacttcattaattatttctgtaaagagatcaacaagacaagcttaagatttgctaacatactaatagcgtaccaagctccaaagtactccggttaaaaccagagagctgcattaaaataaatttgatacaactgccttattacaaataggcatatttaccnnnnnnnnnnnnnnnnnnnnnnnnnnnnnnattgcaaagtcagatgcaattgcannnnnnnnnnnnnnnnnnnnnnnnnnnaaacactcatggaaaatgctatcaagcctgagagcatctcaaactgagaaatatgtgggacatgaacttaccagtccctcttgccaacccatgttgcgtagaatacggttacccacattgctttcgtcgattgcgctatcagcggtaataacttcatagttttcgttgttgccaatttcaccattagaacgttcacccacgccaggaggaaatggcatcgaccctatctcacttggaccctttcgggacggatagtgaccagcttgacaacaggtaatttccagaaaatcaannnnnnnnnnnnnnnnnnnnnnnnnnnnnnnnnnnntgaactgat

SEQ ID NO: 181364 - DNA, 429 bp, Zea mays
  Clone ID: MRT4577_96983C.1
tctgactcgtgggaaaaaaaaaaaaaaaaaaaaaaattaaaaaaaaaaaaaaaaaaaaaaaaaggagaggacaaacaataaaaaagaaaggaaccttacattacacatacatacaaactaaataactcttatataggggccacctttttaaaattcccaagcttccttccccacacttccaaaactttactttccttttcttgcccccaaaaaaaatttctttccccacattttaataacgtcagatctgaaaaaaccttaccttcccccacctaattccctttccaacaattccccttttttaaaggttaattttaaccaaaatatccccccccattcccccttccaaaaatttccccaaccccaatggaaaatggtaccccccctttacccctactttaacctccttttgtttttttttctccccct

SEQ ID NO: 181365 - DNA, 559 bp, Zea mays
  unsure (1)..(559): unsure at all n locations
  Clone ID: MRT4577_96984C.1
cagaaggtacaccgcgctgacagcgacaagcacgtcaagctcaatcaccgggccgggcggctgcgtccatgttgctggtcgacaagctgcacgaagcggccactataggattgtcgaacaggtgtactgtggcgagcgcggctagcgagcctatatagacaccaggnatcttgggcagaaacctgcatatcaacatgagtaattagggggtgtttggttgctcctgctaaagtacaacctgtgtcacattaagcgtttaacttttaaataaaaattttagcggcgtgtaaccaaacacctggttaataaggttatagggtcgttccatcacattaggaagccctgtgcaaaacacacaaaaaatatgaagtaactttaatttgagtatatatgtacacatgatataatgaaaatataaatatgatcgataatgtaatctttatttagaacacatgatataaaaagtgttttttaaaataaattcactgatgatgttttcataagcagaagatgtgcctattagttggagaatgaagcaacatgagaaggtttttgagga

SEQ ID NO: 181366 - DNA, 734 bp, Zea mays
  Clone ID: MRT4577_96985C.1
gccggccgggctcgggatgcaaagggacaggcgcgagggggtatcagttcgtacgagtaggagcaggcgagtgtgatttcactgccactatgtcccctccttctcctctctctctctcctcacctcatcagcacgggctctctctcggcttcctcccctcctctcttctcgtctcgctctctcgcagcacgacgccattgtgtggagtgtgagagggagacaggtaaagagacgaggaggaatagagagacacgagacacacagccagccaaaggcggaagggagagagagaaaaaggtaaggggcgtgggtgtggtggtgtgccgggccggaggtgttcgtcggcttgtcgcattcctctgctcgcttcccttcccttcccccacccccgccttatttcttgcccacgagctggacgagccagctgctgcgtttcgttcatccgagcggcgcgtgcgccgtgctcgtttgctcttcctccacacgagacgcggacgcctcgctgagaacgggaggggctgctctgttgctgtgtagataccgggcgagggcggcgtgatctcggtttcgacgccgcgggcgggacgcgatggctttgtgaccttcttgtcctcttcttgacgccccccccgaccggtttcaggcggttgcgtccgcggcgtggcgtggggcgatgctgcggaggatggtgcccgacccgtcgtcccggactcctccggcgggggcggggacgc

SEQ ID NO: 181367 - DNA, 264 bp, Zea mays
  Clone ID: MRT4577_96986C.1
gaggagagtctatggctagaataacctcttgtgctataatttattacctaaggatatgagtctttagctaatgcactaatgtgtattgggtcgatcccagatttctcaaatacgaaataatacgggtttaacccggaaaaaaatgagatcccataaaaatagacagaatggatcttctcccctttccatgctatttccaaatttttccacaaattcgaaaatagacgggtcaattgtggaaaacgttatgggtcatacaaagaa

SEQ ID NO: 181368 - DNA, 341 bp, Zea mays
  Clone ID: MRT4577_96987C.1
tttttttttttttttttttttttttttttttttttttttttttttttttttttttttttttttttttttttttttttttttttttttgggccgcaatcccccaaatttttgggttttaaaggccaataagacagcaaagtttccattggggtacaaaaaccccaaatgggaatgccaacacacccctttaagcatttaaaaggggttttttcgaatttcccaaacatgggtggcagtccacaggacaatggggtattggggctaaacaacataagcctgaattgcttttgataaagcttgaaacaaccttttaaccgggggctttaaatttgggagggggg

SEQ ID NO: 181369 - DNA, 217 bp, Zea mays
  unsure (1)..(217): unsure at all n locations
  Clone ID: MRT4577_96988C.1
tttttcttttttttnnttntttttttttntnnttacgatgtctacctcgaggcgggcgggctttttccttctcacgggaagggcctgctgcccctccccgggaaggacagtaccggtggtgggggggccacccaccgccgactggccgcctgttcttgtaaagtacctagaccggggggccgacggcgtcacgatcgccaaccagaaggcgcccgtc

SEQ ID NO: 181370 - DNA, 258 bp, Zea mays
  Clone ID: MRT4577_96989C.1
tagggatccctggctcgacggcgccttgtagacgcgcaagcacgccgtcgtccgccggctgaagatggtcctcctcatgatgctcaggctgctcaagaagctcttcctggcgcacaagtccggcgccgccccgtcgcggaaagcgcctcccatctgacgcagctgcaaaaatcgagccttttgatgagtgcatgatgatgagtcaggtgtttatacggaggtgatcaatacaggcatgcttctctcgtctaggttgca

SEQ ID NO: 181371 - DNA, 877 bp, Zea mays
  unsure (1)..(877): unsure at all n locations
  Clone ID: MRT4577_9698C.1
gccggccgggccggctaggtgacactctctactagcaacaagtgactcaaagctctcttcatatggagagatagtacacccagcacatatatacacgctgcaacacatcgcaaagttgctaaagccactcgctgactcatctccatccacaacatcacatactcgctccaacagtcccacccacgctacctagacagtagacacgtgtaccatggtgttcttcaaggcgcgtcgcatggatcctgagttggtgttgccggcgcggccgacgccggccgagacgaaagcgctctccgacctcgacgaccagcggacgctgaggtactacgagacggtgatcgccttcttccgcagccggcgtggctacagcagccacagacgacggccagacgatccagccaaggccatcaaggcggccctcgcggaggcgctcgtgtactactaccccatcgccgggcggctcagggaggccgccggtgggaagctggtggtggactgcaccgcgcagggggtggtgtttgtggaggccgatgcggatgtgcggctggaggagctgggcaggcctctgttgccgccgtacccgtgtgtggaggaactgctgtgcgatgcgggtgaaacaagagcggtgattggcaagccattagtcctcatgcaggtgacgaggctcaaatgtggcggatttgtcattggattccacatgtgccatagcattgcagatggattcggcatggttcaattcttcagatgtgtcgccgaactagctcgcggtgaaaaagtgcccacacttttgcccgtgtggagaagagagctcctaacacgacacaggtcaaatactactgcatntaatcacacagccacggttaggtccgagtccgac

SEQ ID NO: 181372 - DNA, 153 bp, Zea mays
  Clone ID: MRT4577_96990C.1
aaactattcagcactagcaacaaccttttgttttcggccgcccagccaagaacgcgcgcgtggcgtatctcgcttgtcgccaccacaacacaggcacgccctacagcacgcctcaagggcactcctagtggcattattgcacagagactctca

SEQ ID NO: 181373 - DNA, 707 bp, Zea mays
  Clone ID: MRT4577_96991C.1
cattgggacctcgagccggccgggaccaacgttacatcacacttccacccgcagataacgcgtacgcccgcaccacacccgccgcgattccctaacggccgcggatcacgcgctgcccccgccgccacgattcccctccccctcacgcccgccccccacgccgagattccccaactgcccacggatcacgcgcacaaaccgccccatccgcgagccgaagcaaaccctagcgctgttggagtagtagcctacgaccgatggctgcgacggcgatcctgccggggctggggacgcaagtgcttatccggaccgtccatcaaatgtaccctacccccgcgtgcgtcgcccccagatcccctggtcgtctggcggcgcgcggaggccccggggcgagagttgacggcgtcggcgacctcctgccactgcggccggcggaggctcccacggttgaggtcgaggtagcgcgagccccaggcgtcgacgagcgcggccgtctcgccctcgctccagcagtcctcccggtacggcaggttcgggttcggcggcaacttcccgtccttcgctcctcctcccagatctctccgcgtcacgacgacgcggcagagaaagccaggaactccaaaggtgaaaggtccgagttcgggttcggaagccaacccacaccatgaatatgttcgcaagttcagcacgcgacgtaactatcctct

SEQ ID NO: 181374 - DNA, 349 bp, Zea mays
  unsure (1)..(349): unsure at all n locations
  Clone ID: MRT4577_96992C.1
actgtctccacctagtcatcttccaacaccnccgcacgttatccctagccctatctatccaacaacaaacaccacatcccgccgaccgagaactaccggaacacgccccaccgaatccaccactcctcgcactgaaacacgcacggaccacggtgcatttgatccgacccagccgcctacactatgtccaagtcagtagcgctacatacagcttctggcctatgatggaagatcaacaacgtgtaactcaagtctacactcgacgaatatgacaaatatcatggatactatccagacaaggatgaatcaagcaagtccaactatactcatattcttaataaatactata

SEQ ID NO: 181375 - DNA, 527 bp, Zea mays
  Clone ID: MRT4577_96993C.1
cgggcggcggggggtggtggttttttgatgaaaaggggcacagatcctcgatgggatcgtgttctatttatagctcaatcaagtttacatcagagtacaacagatcgtgataagatcgcggggagcgtgcactagtgacgcctgaatactcgggcaccgggggcgcggccttaacagaacgagacacagtcactgcgtgccgaaccttacgccctaagccagccacgtgcacagggggtgaaacacattttctatcagtccccctcaatcacaacagagtacctatgtggagattgctgcaattcttgacaaatggggcctttgacagaggtgtagtcatgacatctgctaactgagctttagaggaaatgatcctgacctccattgccttcctagcaactgggtctctgacaaagtgaaaatcaacttggacatgtgtttgttctgccattgaaggggggatttgcagtcaggtggggtgctccaacggtgtgacaccacatgcttggtgggctatgcaaataaat

SEQ ID NO: 181376 - DNA, 1539 bp, Zea mays
  Clone ID: MRT4577_96994C.1
atggcggcattcgcagtcccttccttgtcctcgcgcatcctcctcgcctcgccccactccccgcccactctcctccgcctgcgtcgcgcgggcggccgctctctggagctgtcgtcacggcgcggcgggagcgcgcgccttcgggtcgttcgacgagcggtgacggaggaggatagcggggccgcgcgcggagacgaggaggtggaggaggacccggaggagccagtggctggccgcgacctcgtcacgctcgccgcctgcctcgtgggcctcctcaccggtgtctccatcgtgctcttcaacctctcgattgatgtctattcgtttggaattgtcatgtgggagtttcttactggggaagagccatactctgggggcattgtaaacgattccctacgtcctcaaattccttcatggtgtgatcctgagtggaaggggttgatggaaagttgttggtccagtgatccagctgagagaccgtccttcacggatatatctcaaaggttgaggaaaatggccgccgcaatgaatgtgaacatcgcagttgatgaccctactccaagtgataatttatcaagtgctgacttcatgggagaaaatctatgtcatggagattccaaagcatgttttagatatgaaattcttgaatctatataccaacatctcagaaaggtgctcctgggtagatttctcattgtattggacaatctctgggattcagttcacttagccaaactgcagggtgaactaggaagcaatgtttccatcttagttacttcacgcagagaaattcaattgaatatgcccagatcgacattattccatttggatccattgtcagaaagatttagccttgatttagttaaggaagttgcatcctcatattttcctgcaggtgatattccagaaactgcaatggaagaaattgtaaagatgtgcggaggtgtacctttggcccttaaatctgttgcgtcacaactgagaccagaaagaagcgttaaagagctgttgagtttaataagagctatctctccgcccaaatcagattatggaacaacggatatccaggaccgtgttcttgcatcccttaagctgacatatcacttaatgtccccgagtctcaagttatgctttgcttactgtgcaattttcgctaaaggctatgaaattgatcgggaaggcttatgccaccaatggatcgctcttggactaactgaaaagatgtatgcagaggacagagtccgtgacttattgatcatgtcatttcttcgggatccagagccacctgcgatcacgaggagcagttctggtggttcatccaaacttaagatgcatgatctggtacacgaccttgctatgttagttgctgatgatgaattgctagttatcaatcaggagtgtgtggtatttaaatctgattcacctcgttatgccatggtttttgcatgtaagttggaaaacttgcataagaataaattgctagcccgggttaagggctcttcatataaaaagattctgatggactgaaatttaaatggg

SEQ ID NO: 181377 - DNA, 868 bp, Zea mays
  Clone ID: MRT4577_96995C.1
ccaaaatccaaataaaataaaagaggtgtttaaatacactagaattaatagtaaaatattaatattagctatatgcattcaaacagtccaattaaaagtgtaactaatagttagttatatcctaaatatttattagttgcctagctacccatacctggctaaaagcagctaacgagttttctgttcctccccaccgaaaaacaaccgcatgaggcaccaggtgccgcacttcacgccgatgccgggccggtagggcagggcggtgcgctcatctccgttgctggtcccctccactgccatcgctgataccccaccaccgcagccaccaatcccctccatcgtcgctgcaccccgtcgcgattactggtgccctgcgctgtcgccggtcccttacgccgccatcgtcacctacgccgttgtcgtcccctgcatcgccaacgcacaagccatgttcttcgattccgacgaggctgagtaccacacaacccctattaggtcgccctatgatcgtgtgaacatgggtttcttctcagatgaagtggcgctgagtcttcataaggagcagtttatcccttctccgcgatctagtagagtggacgggttggacctcaactctagtggtgtggaattccagaacattgcatcatttcaagaccttcgtcagtcctagtctactgccaactactctgctactctgattcgtgatggccacaggggtcgcagtcattttcgatcaattggtattggtcgtggtgttacaggtagaggcttccgagttccacggatggccagtgagggtcctagaggtggtcattgagcacgaagcatcttctctcgtgcatatggtatgccttgatctattggtgct

SEQ ID NO: 181378 - DNA, 1041 bp, Zea mays
  Clone ID: MRT4577_96996C.1
cggctggccccaccgagctgcagaggatgggcctcggcctggtcgtgggtgccctggccatgaccacggccgggacggtcgagcacttccggaaggccagggccaccgcagcgatgagcagcgacctgcatatcatgtggcaggtgccgcagtatgcgctgatcggcgtgtcggaggtgatgatgtacgtcgggcagctcgagttcttcaacggccagatgcccgacgggctcaaaagcttcgggagcgcgctgtgcatgatgtccatgtcgctcggcaactacttcagtgacatcatcgtgagcgcggtgaccaggctcaccacgacgcgagggcggtccgggtggatcccggctgacctcaacgaggggcacctcgacaagttctacttcctgctcgccgtgctggccgtcgcggacttcgcggtgtacctcgtatgcgcgagccgctacgggagcggcaaagtggacgggaggagcagcgacgacgaggaggagggagcggccggtcaggtgacatccccggcttacgcatgaccatcaccggccgcccggccggcgggcatcgtacgtatgttgttcttgtcttcttgaggtggaggctggcaggctgcaaatctcgagggccattggttatttggttgacggagttcttccattgacgacgatagcacaagcatggggcgagcatggacatagtgatatgactaattaaagaataagcacttaagcaggactagctaaacactacatgctgcagcatcatgctcgcggtttttggccagtgtaacaacagacgacgattgttactgaccacgactgttctttgcgtggtctacagagttcgcttctgcaaaattcaataatgggcgagtgctgtatcatataaagtcgcaggttgcgccacgtagctacgatgtgactaacaaacaaatatgtattcaagttatgtattaaacggttaaccgtgtctttttaccgtttcaaaaaaaaacccacgcgtccgcggacgcgtgggcggacgcgtgggcggacgcgtggg

SEQ ID NO: 181379 - DNA, 196 bp, Zea mays
  unsure (1)..(196): unsure at all n locations
  Clone ID: MRT4577_96997C.1
tcngggcgttgttgttgttatcgctgccgttaccattgccgctgctggcgtttgtgttgccgccatcgtcggggtgaccctgctgctgctgcttcttgagtttggcgcgcttcttggcgcccttcggcatggcggagagggatttcgattcgacagacggcggcgtggacagggagaggagcgagcggcgagcgat

SEQ ID NO: 181380 - DNA, 788 bp, Zea mays
  Clone ID: MRT4577_96998C.1
ctccgattcgtcactccaccctcgtcgcgccgccgcctgccgcgtccccggccagcctcgcagccccgtggtctgctagcggctagccacagaatccgtgatgatgtgttacgaatttactgcttcgagactggtttgtacactgttgtacttctctactctgtatttgttcccacagggttattataggaaatgcagtcatgctgtgcttctctagccaataagcctttgttgctcctgttgacttgcagcggagagaccaggagccatggtgatccctccaccagcaagggcagctagagtcacccgtttcctcaagccctacctattgaggatgcatttctcaaacaagagaagctgttgagaccaaacatggagtcgacccgcgacgtcgcagcagctgcaaagattggaaagttgctcggcgagcgcctgctcctcaagggaatacctgcagtgtccatccacatgaagagagaacaaaagtaccatgggaaagtgaaggccgttatagattcagtcagagaagctggagtcaaactgttgtgattgcgatgttgaaaacattggacttagcatttgtgcaatggctgagctgtaatttttaagtgtttatcaatgcaaaatggctggacgttgctgttctgaaattctgggccaattgttactcaggtcaataaaggactttgtttggacttgatgcattgtttcctttgtgtattggtgtgcggcatggaccaggaatgttatacatctgaatatatggctgttttcattttttaggcagt

SEQ ID NO: 181381 - DNA, 345 bp, Zea mays
  Clone ID: MRT4577_96999C.1
ccaactagcaacatagatagcactatgcttttctaactacggccaacataatatgaagcctgcttattctccttggtctttgtgcaagttctaataccgctaccattttccataaatgctcacatgctcctatctcttacctttttcccccgtacctctcaccagcagcgatttgtgtatgtgaaaacccaattcctcatccttacacgatccaacatgcaatctcagttggcatcttacatttatcacccttgttccttcaacattcatcaaccctattacatcattcacctttggcgcatttatcggcactaaacataagggctcaacaactaccacctcctg

SEQ ID NO: 181382 - DNA, 505 bp, Zea mays
  unsure (1)..(505): unsure at all n locations
  Clone ID: MRT4577_9699C.1
ttcgcagacgcaccgcaaagagatcatcgagcgcctggacgtgatgaccggcgagctgctcgacgagttcgtgaaggaagtcggcaagctccccagcagaatcatattcttcagggacggcgtcagcgagacgctgttctacaaggtgctgacggaggagctgcaggcggtgcggctggcgtgctcgaggcacccgggctacaagccggcgatcacgttcgtggtggtccagaagaggcagcacaccaggctgttccacagggagaagaatggcggcggtggcggtggcggtggcggcggctccacgcactacgccgaccagaatgtgccgccgggacggtggtggacaccgtgatcacgcatccgagggagttcgacttctacctgtgcagccactggggcaccaaggggacgaccaggccgacgcactaccgcgtgctgtgggacgagaacggcttcnggtccgacgagatgcancaactgatacacaanctttgctacacgt

SEQ ID NO: 181383 - DNA, 211 bp, Zea mays
  Clone ID: MRT4577_969C.1
gcccgcggacgaaagctcggaattcggctcgaggcgagaggccacttttttacatggcgaccacggcgcttctaccggggggcattctagagatgcaggggcgtaaaaaccctagccccaaaacggcgggacgcatcaccgtcagggtccctccggcgcgagcgcagcaagagcagcatgtgaaggaggaggaggcctaggcggcaagcgc

SEQ ID NO: 181384 - DNA, 421 bp, Zea mays
  Clone ID: MRT4577_96C.1
agctcgtttgattctgattgccagtacttattttaacagtaaaacctttgtctattgagcggttcaaccttcgtattcggaatctcgacctgtcacataaattaccacaacaatatctggctatcctctatcaagcctttattgtgacgatgctttctcatccttatatatctacttttactattattgttatccataactcatctactgttacatttgtcacccaccaatttagaaccaaatctccgtatacacctttgtcacacatgttagatttacattactgctcacctgaccctgatagttatagcgcttaatactccaggatatcgacgcgaacggcacgtacacgatcgagctcaaggacagccacgaggaggacatctgcgaggtggtcttggtggaaagcccgcgcaaggac

SEQ ID NO: 181385 - DNA, 290 bp, Zea mays
  Clone ID: MRT4577_97000C.1
gtccacatcgacgtgggcggccacatgtacaccagcagcctggccaccctcaccaaataccccgaatcaagaatcggaagactcttcgatggcacagagcccattgtcctggacagtctcaaacagcactatttcattgacagagacgggcagatgttcagatatatcttgaattttctacgaacatcaaaactcctcattcccgatgatttcaaggactacactttgttgtatgaagaggcaaaatatgtccaactccagcccatgttgttggagatggagcgatggaa

SEQ ID NO: 181386 - DNA, 518 bp, Zea mays
  unsure (1)..(518): unsure at all n locations
  Clone ID: MRT4577_97001C.1
agaacagcaacgtccagccattttgcattgataaacacttaaagattacagctcagccattgcacaaatgctaagtccaatgttttcaacatcgcaatcacaacagtttgactccagcttctctgactgaatctataacggccttcactttcccatggtacttttgttctctcttcatgtggatggacactgcaggtattcccttgaggagcaggcgctcgccgagcaactttccaatctttgcagctgctgcgacgtcgcgggtcgactccatgtttggtctcaacagcttctcctgcgagcttgcagaacatgcaacagttgctgttggggtgtggacgacctgagcagatacatacttgtttgagaaatgcatcctcaacaggtagggcttgaggaaacgggtgactctagctgcccttgctggtggagggatcaccatggctcctggtctctccgctgcaagngaacaggagcaacaaaggcttattggctagagaagcacagcatgactgctt

SEQ ID NO: 181387 - DNA, 867 bp, Zea mays
  Clone ID: MRT4577_97002C.1
ggccattgggtccctcgaggccggccgggttccttttgcaaccctgctccactccgattcgtcactccaccctcgtcgcgccgccgccgccgccgccgcctgccgcgtccccggccagcctcgcggcccggtggtctgctagccacaggtcgggcgcctcctcctcttcttgcggagagaccaggagtcatggtgatccctccaccagcaagggcagctagagtcacccgtttcctcaagccctacctattgaggatgcatttctcaaacaagtatgtatctgctcaggtcgtccacaccccaacagcaactgttgcatgttctgcaagctcgcaggagaagctgttgagaccaaacatggagtcgacccgtgacgtcgcagcagctgcgaagattggaaagttgctcggcgagcgcctgctcctcaagggaatacctgcagtgtccatccacatgaagagagaacaaaagtaccatgggaaagtgaaggccgttatagattcagtcagagaagctggagtcaagctgttgtgattgcgatgttgaaaacattggacttagcatttgtgcaatggctgagctgtaatctttaagtgtttatcaatgcaaaatggctggacgttgctgttctgaaattctgggccaaatgttactcaggtcaataaaggactttgtttggacttaaaaaaaaaaaaaaaaaaaaaaaataagtgcggcatggaccaggaatgttatacatctgaatatgtcgttgttttcatttttttaggcagtaatgaaagatagtgcaggagccaggagataagcccctggtggtgctatggtttggagaagccatattttggtatatgcaattgttactttacg

SEQ ID NO: 181388 - DNA, 201 bp, Zea mays
  Clone ID: MRT4577_97003C.1
attcccgctgcacctacgcgtacgcctactcgtactcccactcttacaccgtatcacttccgcgatctgtcgcttttcttggtgcagtgctcatcgctcgatcgctcagaacaaaaaatactagattttcgcatagaatctttcgccttccaaaacaccgtacacagtttgtcccctacccgaactctctgacgaacccct

SEQ ID NO: 181389 - DNA, 260 bp, Zea mays
  Clone ID: MRT4577_97004C.1
attccactccgacattacgtgcagcctgtcgtgagcaggcaatggcgccggatctaagcgaactcgccgccgccgctgcagcccgtggcgcctacctcgccagtcgatcggtgtgatgcacatcctcaccaaggcggtcttcaacgaaggcacgagcaccaccgtcttcgtcttctaccggcacgccgtcgcggccgtcttgctgctgcctttctctttccttgaaagatggaagcatatgtcaccatctgggaacctca

SEQ ID NO: 181390 - DNA, 390 bp, Zea mays
  Clone ID: MRT4577_97005C.1
aaaagagaaaaggggggggggtaaaatttaattgccgggggcccccccagggcggtaaaggtggttcaccatcacctttaaaaggaaacccttatccaaacaaaatttttcctgcccaggggaggaaataaacaattttccaaattaaattttccccatggttgaggccacaaggaccaaatcctttaccccaaagggtttcccgttttgaaccaaaaggccccactgttttttataataatcgaaccggttttgcaaacccaacaagcccccccaccaagtgggccccgccagttttccgggtggttccccccccaacccactattttgcccgaacttgaaaaaggggaccaaccataaatagtcccccctgcccatctgtgggatttg

SEQ ID NO: 181391 - DNA, 251 bp, Zea mays
  Clone ID: MRT4577_97006C.1
ggtgagtggggaacacaggctgagttcagagtgacagagagctgggtttctggtgaatgtcaaaagactaaacgattgctttcacaggcattgtgctcagtacctgtttcagacagaggtcttagcagcagagagttgagttaatacaaaatgtaaatgactaataagggctggccatgacattgtgctccatacatgttttatacagttctgaattttgtttcaagtaattggcacccttaaaaaatcaa

SEQ ID NO: 181392 - DNA, 413 bp, Zea mays
  Clone ID: MRT4577_97007C.1
atgcccccgggcgcgagcgtcgatcctctatagcgcgcgccctcttttttttttttttttttttttttgcgaggaattatgggggcacttatatattttatgggacaatcccataaccgggaaaaaaattccacattccaaaggccattggagcgttccatgtccatgcatgcaatttaccctacagcaaaatggtcgaatcaacctcaaaacccaagcaaactaattaacgcgcgttaccaatagctagaaattttatggcgtggaggataagacccaaagcaaataccccgggaggaaggcctttgctttgctgctactattataggaagtggggatcgcgcaaccaccattgatttggcaaaatgcatggcactgaccttttaggtacatgcactgttcaagcaaatagt

SEQ ID NO: 181393 - DNA, 1336 bp, Zea mays
  unsure (1)..(1336): unsure at all n locations
  Clone ID: MRT4577_97008C.1
agaaaacccaacctgctgatgtcgcggtgaccaccaggtatacttgctgcgggcgagcgggatcctgcttccgttctacctcggcctgaggcgcctctccctgatacagcacgggcgcaggcagtaccgccgccggcggctccaggagcacaggagacccgcgttgaggtcgggccggctgcacggccaggaacaccaacaacagcatggcatccgagagaggggatggtgtgagggagggaagggagcaaaggcaaagcagccaacgaccagagagacacggaggctcagagagagagagcaaggaagaagaagagaagaagaagatggagcaagaggaagcgtgctcctcctcgctgcggcagtgcaggatttgccacgacgaggaggacgagcggcgctccgccatggagtcgccctgcgcctgctccggctccctcaagtacgctcacaggggatgcgtgcagaggtggtgcgacgagaagggaagcgccgtctgcgagatttgcctccagaactttgagccaggctacaccgttcctcccaagaaaacccaacctgctgatgtcgcggtgaccatcagagacagcgtgggggtgcccaggccgcagcacgagcctgaagaggaggaggagcaggagctggtggacgtggcgttgatcggagccagcgacccggagtacgccgagtgcgcgcgcgccgccggcaggagcgcgtcctggtgccgctcggtggccgtcacgttcacggtcgtcctgctgctgaggcacctggtcaccgtggtcacggtcggggcggccaaccagttcgccttcggcctcctcacggtatacttgctgcgggcgagcgggatcctgcttccgttctacctcgtcatgaggctcatctccgtgatacagcaggggcagaggcagtaccgcctccggctgctccaggagcagaggagacacgcgttgaggtcgggccggctgcacggccaggaacagcaacaacagcatgtcatcctggttcgctgaggaacgagccattcattcaccttgccttggtgtccatacattccattcatccgtcgtacgcgtacaaggttgtaagatgtaccgctccatttttttctttttgttcaggcctttacaagcctaaaaaaagcttatatgtaccaccacttcatttgtaaaccctcaaaatttgttgctgagaagatcgacatatcatgtatagaattgtaaaaagaaacaaacaaaaaaaaaggggaaaagagaactggcgcaatgttcgattaaaaaaaaaaaaaanaaaaanaaaaannnnnannannnnntaaannannaanattttt

SEQ ID NO: 181394 - DNA, 451 bp, Zea mays
  Clone ID: MRT4577_97009C.1
aatacaaaacgccgagcgtgctccggtagtgcccctccctccacacgttccttccttcgcatggctgaccaccacagagacaggggcgtcctaggcggcggcggcgccttcggcgaccgcagtggccacggaggctacggcggcgaccaccacgagcagcaccagcagaagcagcccgcgatgatgtgcgcgctgaaggccgcgacggcggccacggccgccgggtcgctgctggtgctgtccgggctgatcctggcgggcaccgtcatcgcgctcaccgtggccactcccgtgctggtcatcttcagcccggtgctggtgccggcggccatcgcgctggcgttcttgtccgcggggttcgtgacgtccggagggatgggcgtggcggcgctgaccgtgttctcgtggatgtacaagtacctcaccgcgcagcacccaccggggcgccgac

SEQ ID NO: 181395 - DNA, 181 bp, Zea mays
  unsure (1)..(181): unsure at all n locations
  Clone ID: MRT4577_9700C.1
tcgaccccgcgtccgctcctctcctctctccggcgcaactaccgactgccagtcagcctcagccatgncggcatttttatgagcatggcttgcgccctctttacgaggcgtccctgctctcctacatcaatgccactccggctctcgcctccctcctctgctgcttttgctatctagactc

SEQ ID NO: 181396 - DNA, 1103 bp, Zea mays
  Clone ID: MRT4577_97010C.1
cattgggtacctcgagccggccgggccgggagggtagagagagagagggatggtgtgagggagggaagggagcaaaggcaaagcagccaacgaccagagagacacggaggctgagagagagagagagagagagatttgggaatcgagaaagcagcgaggaagaagaagatggagcaggaggaagcgtgcacctcgtcgctgcggcagtgcaggatttgccacgacgaggaggacgagcggcgctccgccatggagtcgccctgcgcctgttccggctccctcaagtacgctcacaggggatgcgtgcagaggtggtgcgacgagaagggaagcgccgtctgcgagatttgcctccagaactttgagccgggctacaccgttcctcccaagaaaacccaacctgctgatgtcgcggtgaccatcagagacagcgtgggggtgcccaggccgcagcacgagcctgaagaggaggagcaggagcaggtggacgcggcgttgatcggaggcagcgacccggagtacgccgagtgcgcgcgcgccgccggcaggagcgcgtcctggtgccggtcggtggccgtcacgttcacggtcgtcctgctgctgaggcacctggtcaccgtggtcacggtcggagcggccaaccagttcgccttcggtctcctcacggtatacttgctgcgggcgagcgggatcctgcttccgttctacctcgtcatgaggctcatctccgtgatccagcaggggcagaggcagtaccgcctccggctgctccaggagcagaggaggcacgcgttgaggtcggcccggctgcacggccaggaacaggaacagcatgtcatcctggttcgctgaggaacgagccattcattcaccttggtgtccatacattccattcatccgtcgtacgcgtacaaggttgtaagatgtaccactccatttttttgttcaggcctttacaagcctaaaaaaagcttatatgtaccaccacttcatttgtaaaccctcaaaatttgttgctgagaagatcgacatatcatgtatagatttgaaaaaagaaacaaacaaaaaaaaaaggggaaagagaactggcgcaatgttcgatt

SEQ ID NO: 181397 - DNA, 373 bp, Zea mays
  Clone ID: MRT4577_97011C.1
catttgagcaaatcaagggcaagcactagattggttattttctaaagtttagaattgttagaggaaataaaaccctaatctgttgagtgagctgagtattacatatgtcagatttacatggactgtgctctatgcccataacacctccgtagttgaaagtcttgctacaacagccgttgagaatggaccgaaactctgagaacagcgaagagggaagacccttagtgaagatgtcagcaatttgtgagctcgtctagacgtgatgaacgcggacttccctgacagcaatgctctcacggacgaagtgaagttatcaacatgcttcataccttggtgctgtgcacggttgacgaagatgtagatggagctgacg

SEQ ID NO: 181398 - DNA, 451 bp, Zea mays
  unsure (1)..(451): unsure at all n locations
  Clone ID: MRT4577_97012C.1
tngattgaccanncatgacctttattgtgacgagttgacataggagggactgagtgaccgnnatcgagattatattaatatatannaagggtacgaaaagatatattgattcgaaagcaggcaattgcttagtaaggtaagcctgcttgttcaagaatctaaatcaaagtcggcggcaggtataacaccaanngcgctagcgacgagctctgtctgtgtcgcgcccgtccataagannaccccacgatgcttgctttgccgnatccgggcgcggtgatgcaagaacctgcgtcctcgttcttcgaacgccccataggcccccatgtctctggctgctggtgaagaattctgaacgaaggtcagcgtnnggtggcgccttcaaatgtgtnccgtacgttctctgagaactctccctgacattctctcggcgtcgccaaagatcgatcgttcg

SEQ ID NO: 181399 - DNA, 198 bp, Zea mays
  Clone ID: MRT4577_97013C.1
tcgttcaaatcgaagcatgcatggtcatggcggccgtgggcgtgggcggcgcagtggcgttcctcctcccgcagcgccggctgggcgccttttccctggagcggcggtcggtggtggtcgcccgtggcggtgcgcgcgtcgttcgaggccggtgtgtgcgtgatggcgacctaggtggtgttgttgacttatttcgat

SEQ ID NO: 181400 - DNA, 1004 bp, Zea mays
  Clone ID: MRT4577_97014C.1
cccagcgtccggttttgttgttccttcagctaggagtacatctgaacagactctccatccattcaatacaaatccatttgatttggatggacaagagatgacaagtgaagctcaatctgtatcagctattcatgaagcaagagagggagaaggtagcaaaagtagaaagcgtaagcagagccatgttggagcagctctcgaagactatgtggagttcaaaaagagccaaactaacaaggcacttgatgctcttaaagaactttccatgaggaagtgtatggaggaaatggaagcaataggtggattcacagaagaggagaagtcatatgccgtggaggtctttgagtctgggattaatagagaggctttcatgtcaacaatgaaccacaatgttcaaagaatgtggctaaagcgcaaaatcagagtgctgagtggaagcaacatatgaagctgacacggaaaaggaaaatggatgattttgtgacaaatatatttgattccatgtggcagtggagcagatagccgctgttgatttttttgtatgttggcatggacagctgctatgctacaatgcactgcgtttttaatagtctgtttatgtgactaaagctatttcttcaaagaaaatgatatgtgttttatgaggcttgaaaatgtttgatgtgaaatgctaaagctactgaagtaagaagtgcaattgttaatgaaactgtaatgaataatgagataagaatattgagatctcttgtgcttgatctaatgtaatagctattagcttctatatttggatgacattgtctttgtataatttgagcacttggtactttctatagtctggaatgatctaataatttagcacttggtactttctatccctggatggcatgtctctatgctgtggtggtgttgaactgaagttgagcatgcataatggagaaccaggagaatcagattgtggtgttgtattgttgttgctataatttttcatttgtgagcttttgtcc

SEQ ID NO: 181401 - DNA, 269 bp, Zea mays
  Clone ID: MRT4577_97015C.1
cctttatatttttttatttttttttttgatcgccatggaagacttacagaacgtgtgggcaggtgcggaaaccctacaaatgcagatcaaccgaggctgcttcctcccggatgacaataaaaatgaaggaacgaatgttatggcaatcggattcccgaaccttgataaaaatgtatactgatacagtccattcctggctgcacttcgcggtcatggccatgaatatggatgtgggagtgccgctcaaattctgcatcaccgtgctcggc

SEQ ID NO: 181402 - DNA, 284 bp, Zea mays
  Clone ID: MRT4577_97016C.1
gtaaaaactgaaggctctcttggggcgtcgtattctaaaaggagatgcgcctaatcctcacccttctacaaactgcaatggatccttctaacttgcttgcccatgaggctgcatctgtacttgtacaaattcatgatgctgaagctattcctgcactggtggctattctcaaaaatctttcactacatccatatgtccttcatgatgcatcataaactctttgagctattattctttaaaataacattcctgtgttggatgaaattttaacaactgatccttct

SEQ ID NO: 181403 - DNA, 432 bp, Zea mays
  unsure (1)..(432): unsure at all n locations
  Clone ID: MRT4577_97017C.1
ttggtggggcccccttttagaatgcttataagttgtaattcaaaaaaaaggtttttggataatgtatgtggccaaccaaaaataagaagttacatttgcaaattttaaagtaaaaaaaaaaaaaaaaaaaaaaaaatcgagcggccgcccgggcaggtacaacgccgacgatgaacacactctggttgttgttgttgttgttgttgataacttgacgtggaagtggaacggccctggtctttaattagcatccttttactgctgttgttacaataatatactgagaaacgagaatcagctagatataatccagtgtatattttctccttgggagccaggtcatgtggcagcacgcttgacatccaaccgtgctgttggaatggttaagaattgaaagattttccaaaaaaaaaaaaaaaaaaannannaaag

SEQ ID NO: 181404 - DNA, 572 bp, Zea mays
  Clone ID: MRT4577_97018C.1
agcgcgcctgtaacactgatgcccgcggccaccaccgctgcgtgtaaaagtgagggacggagggagaggtactgaatagaaggatgtggccgaccaggttaaccaatccactggcctgaataagctggatgttcgatttccacctgggctagatcatctatgaaggtgttcgggcccggaacatattctgattttggtcattttatgaaaggagacttgccactagggaattacattacccttatccttaggctcccttgaatgtccgttagcggtggcattaatgtaacagcgatgcacactacgctctgggcttatgcctatgcactacaatagacgcaccaactagatgatcgagtggaagacgtgcggtgggccacgctgctggtctgaaagactgatgctgctatgatggagcgagataagctgttatcttaatcagatgagatgatacaacatgctaggctataagagactcacaaagatgttgctgactacttcaaactaaccattgacgatgaaggattctcttagctgtgcacgtggaacactgctgatgaaggacgctactt

SEQ ID NO: 181405 - DNA, 287 bp, Zea mays
  Clone ID: MRT4577_97019C.1
actacatataacaactagtaaggcttatcagggaaggctatgtcgctaccttatgcggccctaacctaggaaggtagtgtcatgctacagtcgcagtttcccgcaaagattcgatggcattcgacaggacatgagtcgatagtgccacccaagaacactggaggggttttgaatactgaacatcaccagtggaatgatggttattcagggaacgccttgatgcaccgaactgcaatgcgttttcaacctgaacagcatatatactggttaatgagcacccccaatta

SEQ ID NO: 181406 - DNA, 179 bp, Zea mays
  Clone ID: MRT4577_9701C.1
gtgtccactgcttatgtttatcaccaacaatgagctaggacaacatggcttggaggaaaatgtaatgaagatagacaacctgacatcaaaacttgcattgatgtgggatgtggattcaggttcatgtattaggagagcgctatcaggggactgttcatctctgacgcagtattttgtca

SEQ ID NO: 181407 - DNA, 364 bp, Zea mays
  Clone ID: MRT4577_97020C.1
ggtaaaaccttgggggggatacataatattttttgtttttaagcaagactgacattacattaaatacgcgccggcaaaacatgcattgggggaaaagattgtccagggctacccataccaactaggacctcagtactatttactaggagtgaccggacatattttactcacttcataacatagggcaaattaaacgggggagacccccgtcgaacaagaacaacctttcacaaacacaagtatgtttttgggggtgacttgctatattaaaggatgggtgcgttttatataaccccaagggcccgcaaacatggcctttttacggtccaaccatatggcccgattagcggggggagctcctggt

SEQ ID NO: 181408 - DNA, 306 bp, Zea mays
  Clone ID: MRT4577_97021C.1
acaagctttctttttcgatgtaccagtaccagttttccagttaccgtatccaacacctgtggcgttttcgttgcaattccgccctactactgatacatgatatttaaaacaaaaacctttatacaacccttattatataggtatgaccaaacgcagtaagacgacacacattaaccggatgtggactgaccaataatagagggggcaggataaaggagattttccaaaaattatgtatcataaaaagggcggaatggcagcggaaaccccaaatgggttggtgcggaagctgggcaactggtactg

SEQ ID NO: 181409 - DNA, 637 bp, Zea mays
  Clone ID: MRT4577_97022C.1
cggtcgagcaagatgggaggaggatccatggtgttgttaacaagacccaagctttctcaaatgtgtttgtgggatgctcactgatagatatgtacatgcggtgtgggaaagttgatgaagctcgaagagtcttcgacgccatgccagagcacaacttagtaacatggaaagtaatgattacaggatttacacaaaatggccgcagtgaagaggctttgaaatacatgttcctaatgcaacaagaaggttatgttgttgatgaatttgtgctttcgacagttttgtcgtcatgtggagattttcagttgaaatcagaccgcatctcgttcatagttcaataaccagtctactttcagtgaagttttagactagttagcgaatatcagcaaaatgctggtaaaactgtacaaagtcactggttggtctcaggatgctgcaacaagtttctttgtctgattgcgcattggaaaatacaatcagaagctggtgatttcaaggtgtgggaatatatctgtacttcaaagcaacctctactaaccatttttcttcgctttcttttccttacgaagctgtatatacaccataattcaagcattgttagcctgttgcaaccagcatagttcttgcagtttactat

SEQ ID NO: 181410 - DNA, 206 bp, Zea mays
  Clone ID: MRT4577_97023C.1
atgacacaaagccttgactgaagctgtcttgttcaactgaaaatgtacacattgttaagatctgttgaatctgtttcttgacctcccaccataatcaagatcatcactgaattttttactaaagagccaaggcaaaccatgaatgcaactgagtgtgttgcacaacgatgtgctcttcaatatgctattctcagtcccactttcaa

SEQ ID NO: 181411 - DNA, 347 bp, Zea mays
  Clone ID: MRT4577_97024C.1
ccacgcgatcgaccctccctctatggcgatggtgccattgttgcagtgtgcgttgccgataacggctttgacaggtgcgatcccctaacgcactcctggggccccatctcaggggaaggtgaggggcccaccgcttacgggacctctcaccgtcgggctcactacccagtggaggcaccacgtccgtctaccacgatctcatccctgccacctggtaatgcgatcaccgcataccccgcccaatagttgacttctactggtgacaatcctttacgccggcgcatgtctaccactaccacaattggttgggtcccacccaatgcattacacctgcatccattggcccg

SEQ ID NO: 181412 - DNA, 822 bp, Zea mays
  unsure (1)..(822): unsure at all n locations
  Clone ID: MRT4577_97025C.1
ctttggtcaacgtggccgactcactcgtggaagtagaaccttaggcagcgagcgcgcgagcggcggcggagaccgcgaggggagggtcccggagggtgatggaggcgaggtacgaggcgctgcggcgcgcgacggaggaggtggccgcggtggacgcgcacgcgcacaacctggtggagcacggctccgcgttcccctttctccgctgcttctcagaggccgagggggacgcgctcgcgctcgcgccccactccctctccttcaagagaagcctgagggacattgctgcattgtacaactgcgaggccttacttgagaaggtggagaagtttagaagtgctgaaggattgaaatcgattggctcgaaatgcttccaagctgccaacctatctgttatacttatagatgatggcatagcattcgacaaaatgctagacctagagtctcacaaggcatttgctcctgtagttggcagaattctgagaatagaaaggctagcagaaacaatcatcaatgctgagtcattcagtggatcaaggtggacactggactcattcactgaaagctacatagctaagctgaattcagtttctaatcaaattgttgcattaaaaagcatagctgcatatagaagcggtttagagatcaatcccaatgttagcaagactgatgcagaggatggtcttcgtaaggagctaacaggtcctaggccatttcggattacaaacaagaacctgattgactacctatttacctgcagtcttggaattgctgtttcacttagcctgccagtnnaaattcacacaggtttggagataagga

SEQ ID NO: 181413 - DNA, 512 bp, Zea mays
  Clone ID: MRT4577_97026C.1
gatacaaaatcaaatggagcaattgcagaatcgattgtagatcaattcgattgaatcgaaagtttgaacacatcgattgtttggtttgatttacatcaaatctatttgtggtaagcaccgctaagtccgtggagaccatgaagaccatgatgaccatgagcaatcactggggcgatggcaactttagctgggacggcatgcaacacgcttgaagcataaccagagactgccggagcaacagcaattttagcataagctggagccaagtaggcaccgtgtccgtagccatggctcaaaccgtgtccgtaaccatgtcccaaaccatgtcccaaaccatgtccgtaaccatgtcccaagttgtgtcccaaaccatgtccataaccgtggctcataccgtgtccgtaaccgtgtcccaaaccatgtgcgagtggcaaaccgtgttcgtaaccgtgaccataagtaagtggcaacaagccgtagcagaggcaacagccatcaaagcagcgagaact

SEQ ID NO: 181414 - DNA, 279 bp, Zea mays
  Clone ID: MRT4577_97027C.1
gggtaggggttttttttatgtggtttttttcttttattttataaaatttttttgattaaacaagaggcttattcaaccatttgtatagttttacattttttcctatatttaaccacatttgtttgggcaggtgggaacaaaaacatttacaggaagcccacacgctttatcagcctaaaggaaacacaccggaaaaaaaaagaaaaagaataccggagtggtctatcgtgtttactccttggaatggccttgatgcattggtggcgttaccgggaccat

SEQ ID NO: 181415 - DNA, 2123 bp, Zea mays
  Clone ID: MRT4577_97028C.1
ttgggtacctcgaggccggccgggaatatgcctccagaaaggctattctgcaaaaaagaacacaccgtaagctcccgtcccggacggggaagacctcgtgctgccgccagatctaaccaaaccccgcgccctcctcaccgtccggcgagctacggactcagcagatcaccgtcgctcgagttgtacctgaaggcgcgcccgtggaaccggccgcgagataagggcggcgggaaggcgggcgacgatgccggtggcagcgtcggccatctacttcctcaaccttcgcggggacgtcctcatcaaccgcctctaccgtgatgatgttgggggaaatatggttgatgcgttcagaatgcatatcatgcaaacaaaagaacttggcacatgccctgttcgtcaaataggaggctgctccttcctttatatgaggatcagtaatgtttacattgtgatcgtagttagcagcaatgctaatgttgcatgtgctttcaaatttgttgtcgaggcggtggctctcttcaagtcctacttcggtggagcttttgatgaagacgctatcaggaataactttgttttgatatatgaacttcttgatgagatcatggattttggttatcctcaaaacctgtcacctgaaattttgaagttgtatataactcaagaaggtgttcggtcaccattttcctcaaagccctcagagaagcctgttccaaatgcgactcttcaagtcactggcgctgttggttggagaagagagggacttgtgtacaagaagaatgaggttttcttggacatagttgagagtgtaaaccttcttatgtcttcgaaagggagtgttctaagatgtgatgtgacgggaaagattcttatgaaatgcttcctttctggaatgcctgatctgaagctgggattaaatgacaagattggacttgaaaaagaggcccaactaaagtccagaccagcaaagagtgggaagactatagaacttgatgatgtcacattccaccagtgtgtcaacttaacaagatttaactcagaaaagacagtcagtttcgtgccacctgacggtgaatttgagttgatgaagtatcgaatcacagagggtgtaaaccttccattccgtgttctgccgacaatcaaggaattgggccgaacacgcatggagatcaacgtgaaagtcaagagtgttttcggtgctaagatgtttgcacttggtgtcgttgttaaggttccagttccgaagcagacagctaagactagtttccaaacaacatcaggcaaagcaaaatacaatgcttcgattgattcactggtgtggaagatcaggaaattccctgggcagactgaggcaactatgagcgcagaggtggagttgatttctactatgggtgaaaagaagtcatggaacagaccacctatccagatggaattccaggttccaatgttcactgcttctggtttacgtgttcgcttccttaaggtttgggagaagagtggttataacactgttgagtgggttcgctacatcacaagggctggatcatatgagataaggtgttagcaacaaatccatacaagatcaagatattattgacaaatgatattcattggtctccattgagcagctatccacagagatcaatctgtggcatcatgcatgatcataaagcgcatatattgtgacacaagtatctgaaactttgtacttcaacagagggtggggcagggcagatcagacaattttctgtgtttcttatttccattgtagtctgggatctctgttcttccctccatgccctgtttgtagtagggattattttttgctcgtatatttggctgtagctttccttgtttgttgatcaatacacctgttcagtttgtattgttttctccctcaaatggatgtatggattcacttgcataacagtgtgaacaaacattcgctgccaaagatctggtacgttgttagtgtttgacaattgtagtgtctgataggaaggtacattgtgcccttaaatattgctgtatataaagtttatttgattgtgatgattgccggttttggcgcttatgagtcgagcactgcctcggcaagatattaatgtgaatttcagttggactgc

SEQ ID NO: 181416 - DNA, 308 bp, Zea mays
  Clone ID: MRT4577_97029C.1
ggggggcaaaaaaaaactggaattcccaaacaggttaacagctacaatcaaagggaaagggtctttttttggggcggcccttaaggaaaactaaggggccagcattatgtacatgtccaaaaaagggggtccttttttggggaaagcaaccccgggaattcattatccatccctccctatttttttggaagagtgggcggggacttccgggcttttggttactggcagggccaagcaaaagcaaatataaacttcctgtttttccagccgagcagaatggggccatcctttttttccagggggtactt

SEQ ID NO: 181417 - DNA, 512 bp, Zea mays
  Clone ID: MRT4577_9702C.1
ggcgttcaggctgacggccacatgcccggtgacgagacccttgcgggaggtgatgatgctttcaacgccttcttcagtgagactggcgctgagaagcacatcccccgtgctgtttttgttcgccttgatcccactgtcatccatgaggtgaggactgggacctaccgccagctcttccatcctgagcatcttatgagcgtcaaggaggatgcagccgacaactttgcttgtggtctctacaccatgggcagggagattagcgacctgggccttgaccttatcaggaagcttgcagatgattgcactggtctccagggcttcctcgtgttcaacgctgttggcggaagaacggactctgggctgggatgtatcctcctggagcgcctgtctggtgactactggctagaagtccaagctcggattcaccgtgtacccatccccccagacgtccacatctctggttgagccatacaacagtgttctgtgcacccactctgtccttgagcacactg

SEQ ID NO: 181418 - DNA, 375 bp, Zea mays
  Clone ID: MRT4577_97030C.1
gttacatattgttttgtcatacatgttatgctcatgcataccgttgaatctatctttgtttcattcgatctcggttgcttgctagtccagactccagacatggctatatatatatagctggggggggggggtaggagtattttcgccggtttggccctttctggggcaaagggggtttccccgggcaagtgggggccgggtacgcctccccccagcatatgacccggacggcctaggggggcggggcgggggccccgagggggggcccccccgcccttacccggggggggggcgctggcccccccctctgtcgggctccgggggggccgggcgctttatatattgggcgggcgcccggggggcggggggggcggc

SEQ ID NO: 181419 - DNA, 699 bp, Zea mays
  unsure (1)..(699): unsure at all n locations
  Clone ID: MRT4577_97031C.1
aacctttaaataatttgtttttattatatttacatggaccagcagaaagggggccgctttttttgctttttttttctttgcatccggatgcaaataatttttttttccaacaaccagaccaccaaccgggaacttagggtaaacaacgacagcggcttgatgaatgaaaaacacaaacgaaaaggcgaccagacgccaaactcgacgaggacgactcctctaccataaggtcaggccgcagcaccggttggtcacttctcacttccggtgtagaaactgcttcaagatccggatcagctcctcgttcgcctggccccaccgcaggaccgagaagccgtgctgctcacccgggaactcggcgagctccacgtccttgcccatctccctgagcctcgccgcgtagagcaggacgcggtcgcggagcacgtcgaccccgggcgcctcgacgagcacgggcggcagcgccacgggctccaggccgaggctgccggggccgaacgggttggccagcgggtggtccatgctcgccccgaccgggagcgccatgcgccagagctggtcggacatggcgaccgtcagcgagacgccgtccggcggggccgactcggtcgccgtgcgctcgacgccgccgaggaacagggacaggaggacgagccccnggaggcgcgccggcgccaggncgacctgccccgagccggc

SEQ ID NO: 181420 - DNA, 1123 bp, Zea mays
  Clone ID: MRT4577_97032C.1
atctatcatagtgagtttgaggacattggaccgcaccctgcagaggccaagcgtcgaacacatggcgtgcaccttcctccgccgcgcgttctccctcaccgccgccggcacccacgcgaccccccgagttgccgccgccttcgcttccacttcctcctcatcctccgtcgtcgtgcctctgcgctccccactagaccaccgtcttctccgccacctccgctccgagatcacctacctcgcggagcgccgccctccccacgtgccgccgagtagcttcaagtcgttcgccgtggaggaccgcccgggggagcagtgggtgcgcctccgcgccagcgcgggagggggaggcgaggaggtgaaggtcgaggccaccatgttcgacggcgctgcggagcctgtcccggacgacgcgcccctcttccgccgcgtggagtcgctcgagcgcgggccccgcctccacctcagcctcatcgtcgaggtcgcccggggcgaccgcgtcctcggcttcgtctgctccgcctggcccgacgacctcgccgtccgccacgtgctcacgctcgcagctggcggtggcagcagtggtggtcgtcgtggtgggcgcgatttcgagaaactggggggcgaggagagggaagcggtgacgaagttcttgaaggagagggaggtggacgccgagctcgccggattcttgcacgactacatggcaaacaaggagaagatggagctgctccggtggttgaagactgtcgaatcattccttaacaagtaggataagatcgcacacagaagacaccgccgatgttactgcctggtttgggaacgggtacgctccaacaacaactcgtgacggtctcctgcagtctctgtgatcatccgcatctacccctctgctgacaattgtgtgctgaagatgtttgtttttaatcagcttagatagctcagcgcacagcgctcttggaaactggtgatctgaatatcctactggtactttcatttctttgtgataagattgttctcaacggtgtatcttttaagatacaccccattggggtttttttcccttttgcaatataccaaatctcattttggatttccaaccagttgctatgtgcgtgcttagagt

SEQ ID NO: 181421 - DNA, 217 bp, Zea mays
  Clone ID: MRT4577_97033C.1
aaaaaaactttgattagctcgaacgattgcccataaaccaattagggctgacccaaggggcaaaccaacgatttccctggacaacccctggttgccaagctttggggcggaaagctttgtttatttcggaagtagtcggtcggatccaccacccctttcaccgcggagagcctttggaagttttcggcgaaattctttttttcccacaccctgcccc

SEQ ID NO: 181422 - DNA, 192 bp, Zea mays
  Clone ID: MRT4577_97034C.1
ttggttttgggccttgaagagctagaagcccagagtgggtctacaggtatcaccacttcgaaccctggtaaactagaagtgccagacagtaaggaaaagaaaaaggtcaaggtagctaagaccattaaatctgtagagtcgctccaagccaataacagtagctttaatgatcacataagttcatcatttatt

SEQ ID NO: 181423 - DNA, 1886 bp, Zea mays
  Clone ID: MRT4577_97036C.1
gcgagtagctaacacagccgccgagtagcttcaagtcattcaccgtggaggaccgcccgggggagcagtgggtgcgcctccacgccagcgcgggagggggaggcgaggaggtgaaggtcgaggccaccatgttcgacggcgctgcggagcgtgtcccggacgacgcgcccctcttccgccgcgtcgagtcgctcgagcgcgggtcccgcctccacctcagcctcatcgtcgaggtcgcccggggcgaccgcgtcctcggcttcgtctgctccgcctggcccgacgacctcgccgtccgccacgtgctcacgttcgcagctagcggcggcagcagtggtggtggtcgtcgtggtgggcgcgatttcgagaaactatggggcgaggagagggaagcagtgacgaagttcttgaaggagaggcattgaatcaattcttggttgtgtaatgttgttttagaaaaaaaaatgggtttcttaccagttccacaagtcgttgaaaaaataatttaactgtttactacatggtgaaccacaatcaatctttttttcctgaaatgacttcaaagtttctaaaaatactaaaaaaagtgctagctacaggtcatatagagcaacatcttccatcttatggagcataatcagtttcactaatatacggccaaccatactatggcaatttatttccacatctgttagaccaagagagtcatcttctccaatgactgaaatgagatgagggagagaaaaattccagttcttgtcgggattacaatattatttgttgttcatgtatctggattttactggtgttacaagaacggggatcttataagacctctcatgatgcttcctccaaaagaaataccaccattttggcacgcaatattcatcatcttggtgaacgatacaatggtgcgccaaactgctatggttgtcaaatgtttactgctgatgtactataagaacagcagaggccgtagctatcgtaggcagggtcaaatgttgacgattgtggaatattttctacttttgtaccgtgcattattgcctacacctgtgtggtaccgttttttcctgaacaaggagtatggaagcctattttcgtctctaaccactggcttgtatctcactttcaagttgacatctgttgtggaaaagattggaaaaggatggtgcgtagctgcaaaagagaggacatcttgcttgtgtgctcgcaagaaggatgcaaaggatctgtgatgatcagctgctgttttgggttcttgtcatgtaacatctcctatttttaaagagcaaaactgaaaatgcagttccggtcttgttgatgaaccgctagagacttaatgattttatatggtgctgtcggttgtctgttgtcttatatcttactgtatatggtaatcatctttgtttttctagatcttcatgtaattgttgctattcaattgtttttttaatggttgaaagggcgcgccggattcttgcacgactacatggcaaacaaggagaagatggagctgctccggtggttgaagactgtcgaatcattccttaacaagtaggataagatcgcacacagaagacaccgccgatgttactgcctggtttgggaacgggtacgctccaacaacaactcgtgacggtctcctgcagtctctgtgatcatccgcatctacccctctgctgacaattgtgtgctgaaaatgtttgtttttaatcagcttaaaaagctcagcgcacagcgctcttggaaactggtgatctaaatatcctactgggactttcatttctttgtgataagattgttctcaacggtgtatcttttaagaaacaccccattggggtttttttcccttttgcaatataccaaatccattttggatttcc

SEQ ID NO: 181424 - DNA, 636 bp, Zea mays
  unsure (1)..(636): unsure at all n locations
  Clone ID: MRT4577_97037C.1
attgggtacctcgaggccggccgggcagcgcagaccgcagagacaccaccgacgccaccaacgcatcggcatcggcatcggcacttgggcagcagctcaggttcatctaccctcgcaacgccgcaagggagcgatcacatcgatcgtcacccagacagaccctgttcttcggacgcatatcaccaccaactctccaagccagcccggccatggcgttgtcgccgtctgcgcaagcgacaagccctctcgcgcgccagctgctgcgccacgtgtcgtccggcctggtggccgccgccttccaccgcccagctccagtcatcagtctgcaggcgtgcagcggngagcggacgacgtggccctggcggcgtctcaccaccagcggctccgtcccgctccgtcaccgaaagggcgccccggcatcccgaggcaggggagcggcgggcaagtccaccacgcagctccaacgatggcgacgatagcaagcgcggttatgctgcccacgaacgccgtgacggcgtcggcggtgaccacgcacatggtgacgcgaggacccgcccggnctggtctcccggcacaaggtggtggcggcaaaacgcatggcgcaccggcggcggcgaaagcgcgcgcgggcttgcg

SEQ ID NO: 181425 - DNA, 594 bp, Zea mays
  Clone ID: MRT4577_97038C.1
atggcgttgtcgccgtctgcgcaagcgacaagcccgctcgcgcgccagctgctgcgccacgtgtcgtccggcctggtcgccgccgccttccaccgcccagctccagccatcagtctgccaagcgcgccgcggggagcggacgacgtggccctggcggcgtctcaccaccagcggctctggcccgctccgtcaccgaaagggcgccccggagccccgaggcaggggagcggcgggcaagtccaccacgcagctccggcgatggcgacgatagcaagcgtagttacgccgcccacgaacgccctgacggcggcgaccacgcacgtggtgacgcgaggacccgcccggcctggtctcccggcacaaggcggcggtggcaaaacgcatggcgcaccggcggcggcgaaagcgcgcgcggttatgcgaggacctgctccgccggcccgccctaaggaaggcagcggcggaaaggttcatgtcgtgtccccggcggcgatgtcgagcgcaagcgtgcttatgcgagggcccgcaccgcctggtcacccggcagaaggcgccggcggccgtggtggaagcatccacgctatcgcttcttga

SEQ ID NO: 181426 - DNA, 518 bp, Zea mays
  Clone ID: MRT4577_97039C.1
agcagtggtaacaacgcagagtacgcgggatcataatataaaaaaaaaatttaaaaaaaagaactttgagaaggaatatagattattaataaaaattttttaaaaaataattaatgtagggtttttacaatgcctttagggtaccgcgctccgcatttcctaatttcagaatggggtgcgggggggcttttttagtccgtttgattgccatcgatgcaaatacttttctaatatgatgcccaagaaagggtcaggatagctcatttggtagagcagggggctgcaaatcctagtgtctcccgttcaaatctggttcctggccccgaaaaaatggatctactgaatggatcttgttgcacttcttttgcgatggattggggtaattttttattaaaaatctacttagtctttagtctagagtaagtggataaatgtgtaggttaagtggatatgtctctaatcacttcttttttttttaaaaaaagggttcttttctttgcttcttttttggtttccaa

SEQ ID NO: 181427 - DNA, 655 bp, Zea mays
  Clone ID: MRT4577_9703C.1
gggtaccttacccagccttcttcctcgtcgccgggctcgccgccagccatgtcggcggcgttcaaggcgttcctgaacagcccagtgggccccaagacgacccacttctggggacccgtctccaactggggcatcatcctcgcggtacgtgctcctgtcgactccatcggggttagttcatctcattctttgccgggcgtgctttttgttcttacgactttggcctctccactcgctgcgactcgagagaattctagctccagatcgtgaaccgtctctcttcaggcatgagcgtctcggtctgtctcagtcgcacttgctgagttgctggtgtgttttgaatcgaacagttcaagttcggaaatggatgctgagcatgcatgccccctcccctctatacggatcgaatcgagtcctgctggtcggaatgaatgaacgctcactacagagtacagacgcaccatacaatagctccacaaaactctgcagcccactgttgacacttgacagcgccgacagaatctcttcttttattttcatccttttcttttaattcatcatctcctgtaatgtgccttcttcaacaagcgtcttttggacttccattaaaaaaaaaaaaaaaaaaaaaaagaaaaaaaaaaaaaaaaaagcggcc

SEQ ID NO: 181428 - DNA, 287 bp, Zea mays
  Clone ID: MRT4577_97040C.1
gattgacgcggggtgtttttagcatttcagagccgcggtaggtccacacagttttccgatagatcttggtgcacgggtacttagcgcgctggggcttctgttttgtgcgccacccgtgctcgccagcggggggggtacgcaggggggtgctggtgcgaagcgacacacaactgtgttgtcccttggctgggggatgggcgtccccgcgggggggtggcggggtctcccctaccacgagttgttgtggccaaagagcctcgcctctctgttcggctcctcgccgtgct

SEQ ID NO: 181429 - DNA, 488 bp, Zea mays
  Clone ID: MRT4577_97041C.1
ggggaaatggctggttccacaaacaacactcttaaggtgctgttttccctaatggttgtatgcgccgcacgggggacagccaataagactggatcgaacgcaggagacttggcgccagaccctgctaccttaggagcatgaggcgccaccgcatccccagaacgtgcggcttgagccagcaagacgtgcgacatatcgaaggtcggcgcgaccagggaccgttagacagactctacacaggcaatccacgacacgtggacgttagcgcgctgtgcgaggggagagacatcgatgctcattcccaaaggccactacctgtagggcactctttactccagaggcccgggcatgggggacataatcatccaactcgacggcattctgctgggatccaacgacctgaccaagtacaccgtgagttggacccaggtgtcgcacggtaaccacattgtcatacacggctccggcacgcttgatggccagggcac

SEQ ID NO: 181430 - DNA, 457 bp, Zea mays
  Clone ID: MRT4577_97042C.1
taccctcggagctttccgggcatacgatgctatggacccagtctgacctacagcgttaatatctgcctatcttatttctcgatcgagatatgacgaaggcgatgatattggcggaccggtctatacgggtgagtactgggacgactccaatgctccacttatggtgcgtctagacacacatcctgcgttggactgatacccccatacattggctagttaactatgctatggctaagagctgtgctggctcatatactaggatacccatcaacagctcagaacttttccagaaagacttgtacttaattgcggacctacgcttctgactctccgaagacataccagctggactttctgtacaggctccgacgacatatccggacaatatacgtattgccttgctaaactcgcaccctctttgtagaagatgactggttagttcacaatgctatgtcca

SEQ ID NO: 181431 - DNA, 223 bp, Zea mays
  Clone ID: MRT4577_97043C.1
atgaaattcagctcatcagccacaggaggtggcgctatccattgcaccctattattgttaccgctgcgggaacctggcatgcatgttagaattggataggctcttacgtccttctctcatccagaatggagccatccgcaataaggagactgccataagttcctcatagcaaccgtgggtgtcacgtgagtttcaaaggagatgtcggacaaacgtacctaaa

SEQ ID NO: 181432 - DNA, 403 bp, Zea mays
  Clone ID: MRT4577_97044C.1
agaaatgtattttcttatttctgggttgccacaaacatcttataaaaaacaggaaaggcgcactataacccaaaaacaccctaaaagagggctccacctttgatgcggtccaaaaaagaacactgccaaggttggcaaggcccgttggacgaaggggggccattgaaacaaatgtgggagggtgccaacgataggcgcaatgtgcagggagaacggaaacaaaggccggtgggccaagaaggcggcaaggctcacagcagctacctggatgaatggggggaggcaaaaggggtccccctaaccacgaaagttcaatggtgccagggggtttgtttgggtaaaagcgccaaagattggggttgcaatggggtaattgggtggtaaaagacacccaccccaagcg

SEQ ID NO: 181433 - DNA, 578 bp, Zea mays
  unsure (1)..(578): unsure at all n locations
  Clone ID: MRT4577_97045C.1
tcgcgatctagaacgattttcgntaaagatgccaaaaaaaatcgtctagttctcagcaccagcaatgactttacagttttgacatagacccagaactgcacagctgtggacatctcagcacccttgagttgattcgcatgctgttcttctcctgaaagcttgttttatgcgcgtttggctttatgctcacataggcaggtgtgatgaactcagagcttcagattcagaagcaaaagctcagtgggactagcagtcgtttttgccgggggtaaatccatgttactctagaaaaaagtagagttctaccatcgttagattctcgctccatggagcgtggagtaacacgattctactactccctccgtttctttttatttgtcgctggatagtgtaaaattgcactatncagcgacaaataaaaagaaccggagggagtcgttgactcgttatacgccacgctccatggagcgagaatctaacgacggtagacctctacttttttctagagtacttggatttacccccggcgtaacgactgctagtcccactgagctttggcttctgaatctgaagctctg

SEQ ID NO: 181434 - DNA, 497 bp, Zea mays
  unsure (1)..(497): unsure at all n locations
  Clone ID: MRT4577_97046C.1
gactagttctagcccacgcgtccgaaaaaaaaaaattataaaaaaaaaaataaaaagagaaaggagaatcaaaataaaagatggtgtgcttactttactcattcttcctacatcttctcccttctttttatctctctcttttttcttttctcctccccttcatttaaataccctttctctcctttttaaaaacctttaatccttcctaaaatcatgtattctttcccctaccatttatttttttttcaactttatttcctttattaacacaattttccctctttttcttatttttccccatcaccatatttccccccttcaaaatacaatcctcacacccctctttttacaattccatcaacaccccctttggattttcatttattcctccccaccttntnctctttaaattttcaatatgacccctctccccctctccattttccctaactttccctttcctttctctttctcttccctcctctttttctcccctt

SEQ ID NO: 181435 - DNA, 578 bp, Zea mays
  Clone ID: MRT4577_97047C.1
tccgaggtctgccactgggagtctcgttcccgcgatggcgtctacgatggaggtctctatccacgaccccgtcgtgaccgagcgccgccggggacgaactccccggactggcactaggatgggggagctcgaccactactggggggggcggcacaggcgcgaccccggggccccgcactccgacccgcaccgagtcatctccacctggaccgatgcctttgacctcggtgaggccgcctgtgtacaccaccacgtctcacggcatcgcatcccacctccagcgcctacaggagacttggcatgacatgacattggcccttgatcctgatagatgaaagaaagattgatgtagaaaaagaggcaactacctgaagatcattgatctttccaacttcttggaccagatggatgagcactgcttctggatcatcaatagaggcgcatgaaggttcctagacctctctatatacacatgatgtattgactgaggagctacttcgtgggctcttgaaaaccgcccgactgtctcggataacgtctcggtcacgtctcgggacgaggggtgccatgctgaatga

SEQ ID NO: 181436 - DNA, 436 bp, Zea mays
  unsure (1)..(436): unsure at all n locations
  Clone ID: MRT4577_97048C.1
ggacgacgggaccaagagcggcgccggcgggggggaggnggccgccaaggactacacgcaccctgccccggcgccgcggaacgacgcgggccgagcagagggcccgggcggtggaccgcgccgcgacgggcgagcgcagggccacgccggggcgcgggaccaagacgtttttttttttgatggcggtcatggagcatacgaaggcgccggagttgtgcgccagctcggccctcggccgcgcgggggtgctggtgatcgcctgtgccttcggcacggtgcatctgcgtgactagtctactgtaacgaaccagatatcagagggccacatcaaccccgccgtgaccttcggcctcttgctggcatgcatgggatgattagagcgcgcgctgctctagctgtggggcatcgcttggtggacgtacggggcgaaggcctc

SEQ ID NO: 181437 - DNA, 230 bp, Zea mays
  Clone ID: MRT4577_97049C.1
attcggttcgagaggccctcttggccggcattgtgtttcacacagtctactcagggagcaagtcggggagtttagacttgggtgtggcgtatacacacaaggaggatcgggacgccattgacctcatggtgatgcctgatgctcacactgaaactgtgctactggaagcagtaaatgacaggagggcccaattgactaacctgacatcgtgaattgactgaggcaaagaa

SEQ ID NO: 181438 - DNA, 243 bp, Zea mays
  Clone ID: MRT4577_9704C.1
ggctgcaaaccacggaagcagaaagaagcccgggggagagttaaaaaggcaaaagccgttgttacaccccgagggaggagaggagagcggacgggacggaacacggcggggaccggacgcaaacaaggccgaagagcaggcgacacgaagggaaaggcgacaggcacagggagggccggggggggcacgggaagagaaaaggatgcgcagcaaaccagcgagagaggacaggaacgcgagagg

SEQ ID NO: 181439 - DNA, 1087 bp, Zea mays
  unsure (1)..(1087): unsure at all n locations
  Clone ID: MRT4577_97050C.1
ccggaaccgccattcccgggcgcggcataactttttctgcttatgatcatcgtcgccgacgctgggggcttcctcccggcgctngaccactctccctgggacggcgtcacagtagctgatttcatcatgccgttcttccttttcatagtcggagtctcactaacactagcgtacaagcgggtgccggatagagtggaggcaactaggaaggcagtgcttcgtgccctcaagctgttctgccttggtcttgttctccaaggtggatttttccatggcgtccacagtctcacgtttggtgttgacctaacgaagattcggttgatgggcatacttcagaggattgcaatagcctatctcctagctgcagtatgtgaaatctggctcaagggagacgacgatgtagattctgggtatggtttgctgaggagataccgctaccaactgtttgtaggattggtcctctctatagcgtactctattcttctgtacggcatgtacgttccagactgggagtaccagatagcaggccctggttccagttccagaagtcggatctctgtgaaatgcggagtgagaggagacaccagaccagcttgcaacgcagtcggaatggtcgaccgtacgatcctagtgattgaccacctctatagacgaccagtttatgtgcgcacgaaggaatgcagtatagattatccagagaatgggcctcttccacctgacgctccatcgtggtgccaggcgccatttgatcctgaaggcctcctcagcttcgttatggcgattgtcacttgcttgatcgggctccagtttaggcatgtaattatacatttcgaggtataatgaatgctgaagcatcggggaagaatcgccagttggttggttccttccttcagcatgctagctctagccttcgtaatggacttcgtcggaatgcgaatgaataaacccctatacatgatgagctacactccagctactgctggcggtgcgggtcttctcttccgtggaatctatgttcttgttggcccctcttgaacctgagaacatgcatgcgaagttctgttaaagttagtcgaaccattttatg

SEQ ID NO: 181440 - DNA, 300 bp, Zea mays
  Clone ID: MRT4577_97051C.1
ggtaccagttaggaattcccggctcgacccacgacgtccgcccacgcgtccggtacgacccttcgacagtgatgttcttcttccggaacaagcacatcatgattgatctcgggactggaaacaacaacaagatcaactgggccctgaaggacaagcaagagttcatcgacattgtggagaccgtaaacaggggcccccgaaaaggccttgtccggttaatgccccaaaagaataatccaacaagttccgttaccaagaaagcaagcaatccccctaagcaatccaatggggaagtttaaa

SEQ ID NO: 181441 - DNA, 189 bp, Zea mays
  unsure (1)..(189): unsure at all n locations
  Clone ID: MRT4577_97052C.1
gngctcaacgangcgcacaagaccaaggacaacgcagagaagannggcaagaggcaggncaggancaggccgncagccaagggcagcagcaagagccggacgggcaagcagcgccanggcnacagaggagagagcgaggacgnngangaccaccgancgggcaagaaggagggcgaacccaacgggagg

SEQ ID NO: 181442 - DNA, 325 bp, Zea mays
  unsure (1)..(325): unsure at all n locations
  Clone ID: MRT4577_97053C.1
cgcccacgcgnccggcaaggagcgggagggttgtaacaagaccgccaacgaggcccacccccgcggcggccgaggaggcggcggtggcggatacggtggcgggcgccgtgacggaggcggctacggcggaggcggcggaggctacggcggtggtcgtggaggctacggcggcggagggggatacggtggagcaaaccgcggcggcggctacggcaacaacgacgggaactggaggaactgagcggtggggtccgctgaggcctagacatctagtgcgcggctgctaccgcgttcaccctagactagagggggtgtatcttcgact

SEQ ID NO: 181443 - DNA, 537 bp, Zea mays
  Clone ID: MRT4577_97054C.1
aagcttttttttttttttttttttttttttttttttttttttttttttttttttttttttttttaccggcccggccggccgcccgaaggggggaagcccagcacacgggcggccggcccaaggggacccgagcccgggcccaagccgggcgaaaccaaggccaaagccggccccggggggaaagggaaatccgcccacaatcccaaacaacaaaaaacccggaagcaaaaagaaaaaagccaggggcgccaaaggagggagccaacccaaacaaatgggggggggcaaaccgcccgccccccaggggaaaaaccagaccccccagccccagaaaaaaaaaggccaacccccggggagaggcggggggcgaaaggggcgccctcccccttccccccccacggacacggggcgccggggcgtgcggctgcggggagggggatcagctcacccaaaggcggaggggcggttacccacaaaaccgggggacaacgcagaaaaaaacaagaaaacaaaaggcacaggaaaggccaggacccg

SEQ ID NO: 181444 - DNA, 325 bp, Zea mays
  Clone ID: MRT4577_97055C.1
ttgtgctaccggcaacgcggacgcgaccgcggggggggtgtttacagtagcagcgaggtagccctcgaacatgttaccggagcacaggacagttcccggggccccggcgcgcgggaggaaacacccacccggtatccaaggtgggcgacaaggccaaaggcgagcgcaagatgcgcgcttgcgaagacggaataaaccacctgcatgagttgtggcgcgcggaccaccagggacccgacagcaactgggggtcaccgtgctcgctgctggcgtaccaggcaggaggcagcacttgtctcgagtaggagccagacaacatctaggg

SEQ ID NO: 181445 - DNA, 215 bp, Zea mays
  Clone ID: MRT4577_97056C.1
gggggagggccgcccgcagggaccggcccggaaggaccgggacgacccacgcgacctcgttcacgaggaacgacccccggacggaggcgggaacgacacacggggccagcaggacagcacaaacgcaagggacagccgacaacagggagccgaaaaaccacgcaacaaacaacgaggaggaaggaccaaggagcccaaagcggagaacagagacc

SEQ ID NO: 181446 - DNA, 534 bp, Zea mays
  Clone ID: MRT4577_97057C.1
gcatgtgccgcacacgctagcttagctaaccagcagcagcgcatcggtcgtgtcgtctcgtctccgtgtttcttccaccatgatgagctcgctgaagctgacggaggtcgtctccaagaggtggggcggcggcggcagcagcagcaaggtgacctccccgagcgcggcggcgtgcccgcgaggccacttcgcggcctacacgcgggagggccgccgcttctttgtccccatcgcctacctcgccagcgacaccttccgggagctgctcagcatggccgaggaggagttcggcgagcccggcgcccgccccatcgtgctgccctgctccgccagccatctggagcagatcctcgacgccttccgcagcggcggcggcgccaagaagaagaagaaggagaaggagagcgccggcaggatcagcaagatctggtagcagcctagcaggtactacgaagaatgcagttgcattactgcactctgctgctagctagctgttgccgtcgctagcagctgcctgccgcctgatcgatccat

SEQ ID NO: 181447 - DNA, 412 bp, Zea mays
  Clone ID: MRT4577_97058C.1
gctcggaattcggttcgagagtacacctacaatgcaatttttggatccaatgcttgctgcaccacaatcggggtggctccaaaagataaggtggggcatgacaactgtggcattattgagggcttgatgacaactgatcatgccatcactgacacccaaaagactgatgaaggaccaccagccactgactggagaggtggcaggactgtcagctttaacatcattcacagcagcaccggtgctgccaaggctgtcggtacggttctcactgaattgaatggcaagctcactggcatgtgcttccgggctcccaccgaggatgtaccagctgttgacatcactgctagaatcgaaaacggggcctcttacgaggaaatcaagaaagctagtaatgctgcttctgagggcccac

SEQ ID NO: 181448 - DNA, 591 bp, Zea mays
  Clone ID: MRT4577_97059C.1
ttcgatggattgaattggatttgattcgtttagtggaggggggtggggagatttaaattaggttctgcggttattagcttaatcattgatcagataaagtgacttctactctggttcctgagactctctctctctctctctctctctctatgtctattggaacatcattgcatactttactgggggggggggggtcccctttaagttttgctcagtcttgcaaatcagaatttctaactgcctcttgttactagcttttttcaacacgattgaattgtacactattttcgtacactgctgtaactgttcttgccttcaactttccttttcctttcctttattagtaaggcctttcttctcgatctctctctcttgccctctgtctgctcacgcctaaatgcgattttcttctggaattttttcctcactctcttcagttacgtgattgtttctgttgattgaatattgatttataatttgtgccttttgaggactcttcttctagtataattggggatttggtccatttagaattatccattgtggttgcagctctggatttctggtgtggatttatctgggggaaacaaa

SEQ ID NO: 181449 - DNA, 321 bp, Zea mays
  unsure (1)..(321): unsure at all n locations
  Clone ID: MRT4577_9705C.1
aataattaaataaaacacttttttacccacccncactcancattcctgctcgataaaaaaaaaatttttggtcgtaactntacaaaaaaatttnatncactttnttccaacatcaacaccattttttcttcatctttttcattgactattctaaaaactttttaaaatccacccactttaatatttccattcaacttattttcaccttaattaccctttttcccttcctactccatcaataacttctcatacaaaattttttccactcaacccaactttttattactttacttccttttctccccacttaaccttactttt

SEQ ID NO: 181450 - DNA, 288 bp, Zea mays
  Clone ID: MRT4577_97060C.1
caagattggagagaagtgggaccgtcagggagaaaatggccagatgatgagctgcacatgtcttgggaacggaaaaggagaattcaagtgtgaccctcatgaggcaacgtgttacgatgatgggaagacataccacgtaggagaacagtggcagaaggaatatctcggtgccatttgctcctgcacatgctttggaggccagcggggctggcgctgtgacaactgccgcagacctcggggtgaacccagtcccgaaggcactactggccagtcctacaaccagtattc

SEQ ID NO: 181451 - DNA, 198 bp, Zea mays
  Clone ID: MRT4577_97061C.1
gacactatagaagagctatgacgtcgcatgcacgcgtacgtaagctcggaattcggctcgagcgcttatcatgtttcaaattctggtgttctcaaaaggctaaccatgttacagagctactattttggaaccccgtttaagggggttttcttttaggggttgcgcgacctaaaccaggttttgaagaaaacttttttg

SEQ ID NO: 181452 - DNA, 524 bp, Zea mays
  unsure (1)..(524): unsure at all n locations
  Clone ID: MRT4577_97062C.1
cgcttttcttcaatgaggaccccaactctaaactgggggcaggatctgcccgaccagggccttccccttgtccccgacctagatcatggcgctgccaaaccatgaaccacctatttgcggggctcccgcgcgctctagggcctgccccggtgcccgtactgccccctcgccccatgggaatcggcaggggtctgggataagaaccaacatcttaactcagaggaacacaagtaatacctggccgggcttactaactggccttcgaaggatctcaggagcaaaagttacactanctcttgagacatacaattcagtggagaaatgaaacaggctgngtacacggcatatcaagctaggaaaccacaccaaacggtggggcgaacacacctctagcaaacagctatccgctaaaccttacaagtagcaccccataacaagtngagagttgctaaagtcaggacgataaacatatagcaacccaagagagcgtttacatgatcccagccctgcttcttgtcttcaag

SEQ ID NO: 181453 - DNA, 1047 bp, Zea mays
  Clone ID: MRT4577_97063C.1
cttcgacgccgacggcagcggcgccatctccgccgtcgagtcgcgcgccccccccgcggccgcggccggccccccgcccgcccgcggccccgccgcctgcgccggggcctcggccaggacgcccacggccgcagccccctccgcgaggtccgcctcgggatggccaggggccctcccccagccccttcgatccccctgctcctcccagcccccctccccccctcacacagcagccgagcgtatggcgtcgtgtgcggtcttacgtaaagtgtatatagaagccgagagcgtcgtcgagtcgaaactacagcgatgtgtatttctaattcgtgtgtatcggggagaagcaataggtgtagatttttttatatgttggtctgttagaattcggcacgagtgtaaatctggtaatctcagcgcggtggaatccgtaggctgttaatttagctcgatccagataaaagctgtagtaatcttttgaggaatttttttttaagatctcaaacatggaacaggaatattcttgcgaaggtggggaggagcttgaggaattgtcctgattgcgtacctatcaatcattggcatcatcagggcgcgatgggagctcgaatctcttcattagtttatatctactggttggaattggaagcagaacatgcggaggccttgggttgcatctgtctgctccagtatactagtagaagatacgtacgtacacctgtcataggaaatcctgtcacaggttgcgtagtattactactaaatagttgtatgttttggtagggatacttaattctagtccttagagaactgtttagcgcggctcatgggatggatgacagacagaaacagctgatgactagcgttggctgcttggctccaatccaaggaagcgtgcgtcagccactcacatgtgtgctcgtggtttacgcggtgagtatctgtgctgtgccacctggatccaatttggcaccgcgtgcattgcatccgattccgaaccaactctcgtcaagttcggcatcatcaattcatcaacatctctacgaa

SEQ ID NO: 181454 - DNA, 1874 bp, Zea mays
  Clone ID: MRT4577_97064C.1
ttgggaccctcgaggccggccgggccgggacagcagtacgcagcaacaacctagctatagctagccaagtcgcaagagccagtacgtgtgtgctgctgtgctagtcggtgcgatcgaaatggctcctcatggtgacatcgaccttgccaaggcctaccatcacgtcactgtgtcaatgagggagcacacggagaaagtgatggtgaagctcaccgcgccccacaccggcaagggcgacacggcgccgctcgacatcgtggttgtcctggacatcagcgggagcatgcgtgggacgaagctcgagcacatgaagcacgccatgaccaggttcataatcgagaagctcggcatccgcggtgaccgcctcgccatcatcacattcgaatcgaaggcacataaagtgttcgatctgtcgtccatgctcccggaccaagtgaagaaggcggtggccgttgtggaaggtctgaaagccggtggagacaccaacatcaaggccggcctcgaggctggcctcgatgtgctcaagacccgtagggggcattcgcataatgcttcctgtatcttcctcatgtccgatgggcatgagaacgtggacaaggcgaggaccctccttgaccgtgtcggcgagcactccgtggtcacgtttggttttggtgagaagagcgacgaacagttgctgtacgacatcgcataccacagccatgcaggcacgtaccaccatgtccgggagaaggaggatgagaaccagctgatgaaggccttcgcgttcctggctatctaccgctccatctccatgttggatctcaaggtgacagtgagtgcccacaaagaagctgcaggagccatcatacggggagtggatccttgccgctacagggtcgacggtccgcacggtgacgggtctttcacagtccatttcggtgatctcgcccgcgaggagagccgaaggatactggtggacgtgcagctccctcaagtacagcatgagcaaaaagataagccggtcattcatgtcaaatatgaatatagttctcccaagaaggtgaaggtcaccaacaccctggacatcaagatgaaccgcgtccagaatccgggacaggctgccatgaatccaaatgtgagccgggagctggcccgtcgcgcacaggtggagcacctgagaaaggtgatggatctggccaacaagaaaaaccttggtgcggccaaagatgaggtggagagagccaggaacgccttgaactctatcacccacgacacagatgacgccgtcgattccctcttcaacgagctggacaatatcgaagaatttctggagacgtacgacatctacaacaagctcggccgctcctacctgctggcctgcatctcctcgcatgaacgccagcgctacgcagagagaggcggtgccgctcccgtcgacctctacctcacgcagcgcatgaacaagtacttggatcaagcccacaaagttcacaagaatcccaaaaccaaaatctgatctcatgcatgcgatgatcagctagcaagacgatgattcatccgcaccgcgtgcactcgcatcgatcatccaccaataattcccctttactttctttgcttatataataacaggcccagttctatatgttctagtaggccctggattatttactgctgcatgctgctactaaagtttgcttttgcttcttaatttcccttgttcgacattttcattttatcctgtatctttgtaataactgctctgacgagatggctagcgcgctgcccaagtgtccaatattgtatctgctagccaactaaccagagggggttatggcattttaattaattttctttgatttccaaaaaaaaaaaaaaaaaaggcccctagggcc

SEQ ID NO: 181455 - DNA, 595 bp, Zea mays
  unsure (1)..(595): unsure at all n locations
  Clone ID: MRT4577_97065C.1
gaagtgaaactcgaaacgagccttcattgcatcaggggaataaaggatagatactttcctcatgtcgttttatgcatacagtatatgtatgatgttttaacaaatgaattgaaagctgcatacatacatatgcgtatctggtcttacgtacatggcagactcagctgctggaggagcaactccataagctgaaggagaaggtaagtcagcttcgtgtcctacaggctacatcgggcattgaaacatcagaatacatcctaacttgtgccttgttgcgtcaaccaccaaacaggagatgaatctcgacttcctgtgctgtgatatcttatgtgcatacagtctccccatttctgcaacatcatgatgcacgcatatggtataatcctgatccaagccatgcgtgcagtgcaagaagcagccgccgccgccgccgcctatgctgatggctcctccgccgcctccagcgccggcagccatcgatcacacggggccgaaggatgtcgggatggacgtggagacggagctgtccaccgtccgtcaaaggggctcgagccagaacgnccgncagagaacactaaccccctctncaccccgg

SEQ ID NO: 181456 - DNA, 177 bp, Zea mays
  Clone ID: MRT4577_97066C.1
gaggcttcttccgctcgctcaggtaggtgtactgtactgtactgtagtatgttggtacttttccctgttgctcacgtacccttgaaactcccagctggtttcctcggagcaatacttgtaaatcttctttgtattcttcctgctgatgctcttggacttgttggatagcagtggcat

SEQ ID NO: 181457 - DNA, 395 bp, Zea mays
  Clone ID: MRT4577_97067C.1
ccggaatttttgggtcgacccacccgtccgggcttatgggcggaacgcactattgctcaagatggacagttttacagccgagatggggtctgacctcaactggtctgtttgacatatgaccagataatgggagggtactaagggccaatgcatcatccacacctcgatttcagtgtgagaagcacttacgtgctttggcaaatgcaccgctgctgcgaggaactcttactagcgaatagatcgacataatggtagacacctattccgctacgaaccccaacttggcttgcaggaccagggagttcgccctaactcgaaagaaaccgttgatggatccagatgttacctactgggcacagtcaactggtgtgctggcaacggcatttacatgagcc

SEQ ID NO: 181458 - DNA, 190 bp, Zea mays
  Clone ID: MRT4577_97068C.1
gcgtcaacggacacgtggggtggtcagctcctgcggccacgatcggcccgtcggcgccatcggattaaagaggcgccaaaacatgggaacgatcagcgccgtacccgagatcagggatcgccacatcactagcgacgacgacgatattttacgcaacaagctcgaggttctgcctcgcaagatcgtcagc

SEQ ID NO: 181459 - DNA, 572 bp, Zea mays
  unsure (1)..(572): unsure at all n locations
  Clone ID: MRT4577_97069C.1
tcgcccttaagcagtggtaacaacgcagagtacgcgggggatcctctgatgaggccaatggccagcaatggcatggcgtcctcaccctcgcccttcttccctccaaacttcctcctccaaatgcagcagacgccctccgatcatgaccaccaccacttcctttgatcgatcatcgtccatcacaaacgatggcgatcgacaatgtagcgagaagaaatatcggagggaaggaatttatttggacaattctggcggtggcgagtgcatgcagcaagggaggagaaaagaaaaggttgtaccgttgtaaaggggaataagtggagaggcggtgtaatttaattaggtagattttggtttgagttttgatagtatttttatcttttttgagtcttcatttttttttgtcttagcgatcttcttttttctctttttggttgttgacacatataaatttgtgaatcggcaagcataccagcaaagttgtaagtttcaaaaaaaaaaaaaaaaaaaaaaaaaaaaagtactctgcgttgttaccactgcttaagggcatnttccagcacactggcggc

SEQ ID NO: 181460 - DNA, 744 bp, Zea mays
  unsure (1)..(744): unsure at all n locations
  Clone ID: MRT4577_9706C.1
cgggacacagcaaccaaacatccaaagcaacatcttcagtcttctacttccatttcncatatctccttacaacactcactacattcttcatcaatcaacgccaaccgacttcacaaccaaaatgaaggcctcaatcatcgcatcaaccctcgccctcgccagctcggccttggcctaccccggcgccgcacccccagcacccctcttcaccatccagctcgccaacgacatcagcggcgccaacgccatccgctctgtgcccgccaacggcgttgcgaacaccttcctcaacgtgtttgccaacaccgtgctcgtcaaagacggcgccatcaaggctaccagcctgcagaacgtcgctcccggcggcgcagccatcaactgcgtcgtcaacaaggcggacggaagcttccttggcaacatcaacaaccaggtcactttcttggatctcgatggcactgacaaggcggttgagactgatgtttctgctttcactatcaagtgcaaccccttgtaatcgacccgccttatgaggctctggaagaggcggcaacgagaataggtttgaggtggaggatgagcagtctttttgcatagcgatttggtgttttctcagcattcttattcgaggcgttcgagcacactccttcatgggcatatagaggctaattagctaatatcactccttcatccaggatcacctgatcttggatactccattacaaaaaaaaaaaaaaaaaagcggcc

SEQ ID NO: 181461 - DNA, 1685 bp, Zea mays
  Clone ID: MRT4577_97070C.1
ttgggtacctcgaggccggccgggccgatcctccgatgaggccaatggccagcaatggcattgcgtcctcactctcgcccttcttccctccaaacttcctcctccaaatgcagcagacgccctccgatcatgacccccaagaacaccaccaccttcctgctcctccccttcatcttcaccacaaccccttcctcccctcctctcaatgcccctccctgcaagacttccgaggtcacgcgcagatccatccctatagcgagctagctagctagctagtcaacagcctccgacgcctaatccgatcgatccatcggctggtcctgacacatgcgctggcgcctgtggttgatgcgtgcaggtatggcgccaatgctgcggaagcgcccgacgatgtactgcggcgcggacgacgtcggcgtcggaggcgaggaggcgagctgcggcgcgacgaacgaggacgaggtgtcggacgacggctccctgcaggccgtcgggcccggggagaagaagcggcggctgaacgtggagcaggtgcggacgctggagaagaacttcgagctcgggaacaagctggaggcggagcgcaagctgcagctggcgcgcgcgctgggcctgcagccgcggcaggtggccatctggttccagaaccggcgcgcgcggtggaagacgaagcagctggagaagaacttcgacgcgctgaggccgcagctcgacgccgtcaaggccgatcactgattacgcgatcatctcctctccggatacttggcatatcaacagaacattttggttgggcgggccagaacatttgtacactgatatatactaacagccagcgattaatcaatcgatcgcttctgatgcatgcagatactggcactgaagggcagggaggcagcaggggggtcgtcggagctgatcaacctgaacaaggagacggaggcgtcctgcagcaaccgcagcgaggacagctccgagatcaacctcgacatctcgcgcacgccgccggcgtccgagggccccatggaccatccgccgccgccgccgccgcaccacgccgccggcggcggcttgatccctttctacccttccgtcggcggccgacatagtattgccgccggcgtgggtatggaccaactcctgcacgcctccaccccgaagctggagcaacacggtgacggctgcgccgtcgccgtccaggccgcggagaccgccggcagcttcggcaacctcctgtgtggcgtcgacgagacgccgccgttctggccgtgggccgaccaccaccacttccattgatcgatcatcgtccatcacaaacgatggcgatcgacactgtagtgagtagaaatatcggaggaaaggaatttatttggacaattctggcgagtgcatgcagcaagggaggagagaaaaaaaaggtcgtgtactcgtgtgtgatatctggtccatattggcggggtaggcgggtagctgcctgcctagctggtcatgcatggtgggaactgggaaggggttgtaaatggggaataagtggagaggcggtgtaatttaattaggtagattttggtttgagttttgatagtattttttttatctttttgagtcttcgttttttttttctttgcgatcttcttttttctttttggttgttgacacatataaatttgtgaattggcaagcatacaggc

SEQ ID NO: 181462 - DNA, 294 bp, Zea mays
  Clone ID: MRT4577_97071C.1
cggcgacatccaatgcacacccgcccgcctctcctactacttcaaccctgtccgcgtcctccgcctcgacgcgacctctctcgaaggcacctacaccaaggacctccaagacgccatcaacgactcctcccgcatcggccgcttcctgatctacgggtacttcaactcgtcgctcctcactttcctcgccccgctcatcgccatggcctcctccaccttcgccgccgccatcagcggcatcgcgaccctcaccctccttgccgtcagcatcgctagcgtcgtcatcttcaaccg

SEQ ID NO: 181463 - DNA, 583 bp, Zea mays
  unsure (1)..(583): unsure at all n locations
  Clone ID: MRT4577_97072C.1
caaagttgacattgaatatccgttcacatttgaaggtccntgaaatttataaatgtgtcggttgtaatattgattggcacaaaggtaaaaatttgacagtaaaaaccatcaaacggaagcaaaagcataaggcacgtggagcagtgcgtacagtcaccaaacaagtaccggctgattcattctttaatttcttcaaaccgccagtaattcaagaaaatcaagacgaaagcaaaatcgatctcgaagatcaagcaatcttaagcactgactttgaaatcggtcactttttacgtgcgcgagttattcccaaagctgccctctattatacgggagacatagtcgaagacgatgatgatgatgactatgatgaagaagaggaagaagaagaagaagaaggtgatgaagaagaagacgaagaatcagaatcggaccaagaaagtcggccaactgggaaacagcaacaacgtgttcacggcgttgcaaataaaaagaaaagtggtagtggtgccggcggtgctaatcaaactccagccgaatgcaaacaacaataagaggaaaaccaaacaaatcaatataaaattct

SEQ ID NO: 181464 - DNA, 1227 bp, Zea mays
  Clone ID: MRT4577_97073C.1
attgggaccctcgaggccggccgggcttctgtccagtcctctgtcctcacctaccttatccccaaaaccctatcagcccaaaaccgaacccacacctctgcccttcccatggcggccacgctattctccacctccctcttgccccagttcctctccctctccgctaagcccgccgccgccgccgccgccccgtccgccgccgccttcccatcggggctgccgcagctccacgcgctgtccgccgcggcggtgggctttaggccgctcgagcccgtgcgagcagccgcgaccgcggccgtgacggaggagctcgaggcggaggggcgttcgggcggggacgagttttcagatgatctcagggtcttcgtcggtaaccttccgttcagcgtcgacagcgcccagctcgcgggacttttcgagcaggccggctccgtcgagatggtcgaggttatctatgacaaattgacgggaagaagccgtggattcgggtttgtgaccatgtcttcggtcgaagaagttgaggtggctgttgaccaatttaatggctatgtgcttgatggaagaagtttgagggtgaactctgggccgccaccacccagagatcggtcatcaccgtcaccgcaaagacccaggggtgatgccaacagggtctacgtgggtaacctttcctggggagttgacaattcagctctcgcaaacctgttcagtgagcaaggtgaggtactggaagcaaggatcatctatgacagggagagtggaaggtcaagggggtttggttttgtcacgtacggttccgccgaagaggttgagaatgcaatatctaatctcgatggcgctgacttggacggcagacagatccgtgttacggtagcagagtcgaagccacctaggcagcaatactgaaattcctcttgagatttttgtaggtgtaccggtagcccaaactctggattatagtgacgccagtcctggatttggtctcgagattcattgaagttaaaaagccctcatgtatatggctcactatttatatacatgtaatattggattcccgtgttcagtgtccttttgtatcaatttggctgcatagtgtcttgtggcacttcaaaggacatagattgttgacgggcaaccaaacctcaagaaagtatcttgtattgtttcttgtctaaaaaagaaaaaacactaaatttacttttgaaatcaaaaaaaaaaaaaaagggcggc

SEQ ID NO: 181465 - DNA, 600 bp, Zea mays
  Clone ID: MRT4577_97074C.1
ccggaccggccttcccggggttgcggcgagcgtggcggcggccaccggcgcgcttctgctgtgctggctgcagtgccggcggcgcaaggccgggcgctcggcgtcggagcggctggcggcgatgcggctgctgtcggaggcggcgacgtcgagcggcgtgccggtgtactcgtacggcgagatcgcgcgcgcgaccaactccttctcgcacacacaccgcctgggcacgggcgcgtacggcaccgtgtacgtgggcaagctcccgggcacgggcagcgcgccggcgctggtggccatcaagcgcctgcgccgacgccaccaccacgacgaggacgaggacgcggctgcggaggcggcgctgctgctgaacgagatcaagctcatctcctccgtgagccacccgaacctggtccgcctcctcggctgctgcctcgacggcggcgagcaggtgctcgtctacgagtacgtgcccaacggcacgctctcccagcacctccactccgcgggcgccagcaccgggggccgcggcgcgttgacgtggcgcgcgcggctcggcgtggcggtggagacggcgggcgccatcgcgcacctgcacggcat

SEQ ID NO: 181466 - DNA, 317 bp, Zea mays
  Clone ID: MRT4577_97075C.1
aaaagggcccacttgctttttgtaatgcccttaaatttgaaagtgggtccagtttttaaaaaaaagcgattggaaatggttgctaaaaatgatttgcaaataaaaaagaccgcaaaaaaaataaaataacttctaactattatttccctaataattctattaagcactaatgactttccaatctggcaggcacgtccttaacttaattttttttatattttataacaaattgataatacccaaatcatcgctagggtatccaagccatcagcttgtttttgaaatcacactttaccaaagtttgtgttcattttttt

SEQ ID NO: 181467 - DNA, 523 bp, Zea mays
  Clone ID: MRT4577_97076C.1
cgcgattcgtggcctcccgactggagaccgtccgcctccgacgagggacacgccggtgatctcgcctacaggccgtctgatacctcctttcatctccgccctaatccgttcgcgctcgtgcacatcgaggtcgcctcaatgcatggcccctccttaaacctgatgcacggaactcgcccacgactgacactcttaaatatcggccgccagctgctagggctcccaacgtgtctgctgcatattcgacgtgcaggaacaaggctgcacgatatctgcgtcgtcagctgcttctccgatctaaagcacttgattgacatgtattactgactcatggacgacacacctctgtctggtcagtctgcgctggacaatcagaacctccccaacatcttatccatctagatctctgtgccctgatctctaacgcaaactgttcttctgtatggcatgataactacgtacgatatagacgtgatctagaatattgcagatagcaatctgctttatgatggatctatgatcg

SEQ ID NO: 181468 - DNA, 358 bp, Zea mays
  unsure (1)..(358): unsure at all n locations
  Clone ID: MRT4577_97077C.1
gccgnaaaaaaaaaaaaaaaaaaaaaaaaaaaaaaaaaaaaaaaaaaaaaaaaaaaaaaggaaggaaaaatactaaaagaaaaaaagataagaaacacgaaaaatacaaaaaaaataaactagaataaaaagagaacaataaaaataaattaaaatggacaaaaaaaaaaaaaaaaaggggggggggggtccctggcgttacccactttcttccgcctggcatggcactcctcttttttttttttgggggccacctcataataggtccgggccggtcgtttttccccacagttgctgcggacgatcctggctgtttgccgccctttctgtatcggcgcattatcccctttttgtgcgg

SEQ ID NO: 181469 - DNA, 495 bp, Zea mays
  Clone ID: MRT4577_97078C.1
gggcagggaacatataaaccgggacagaaaaaattctccgcaacaaaaggggagcaaagtttaaaaaggccccgaaacaaccaaactgggcccaaaagttggggtatggtgggacacataagggctaaaagcctacccggaaacacttttcaaaagggaaacaaaaccagggctttgcaaactggagggcccaaaatttgggaggtttttcgaaaggaatcggccgggaacacaattggggagggggttgggctggaccacccctaggacgacgagggagggggggggggccaaccaatggggagccttattttttggaacagataaaaatcaccccggggggagggatccccaactcaaccacggaattcatccaggaacttctgggggaacccctggagctgggaaactatcgaaggtatctggccccccggggggagtttcgggcaccggaagggccacgttccagggacctggccaaacccaaaaccgggg

SEQ ID NO: 181470 - DNA, 552 bp, Zea mays
  Clone ID: MRT4577_97079C.1
ttttttttttttttttcgaacaaactgctgatgcattgaactgacagcaagtaacttttgctgggacttacatctctatctcagtatctcactatctcttgagttgagaacccatgggaggctcaaagcgaaagccaaaaaaaaagagatatatggagaggtaaacaaaccaaagaacccctagctacaaacaattactccaaggtttcaactttgacccttgcggtacgtgttcagtcttcagtgccccgcgcctccgtcgctaggcccctccgggagcatcgccatcagcgtggacaccagcgactcgtagtacgcggggctcgccggcacgggcctcgcggcgtccgcgcaccgcgccgccaggctcagcgccgccacggcggcgagaaggacggcgacggcgacgaccgttgcacggtggcccatatggctgctggtgacttaatctctgccggctcagctcgctgtacgcgtctcggtcagccaggctccttgacgacgacgaacagagtgcgccgtgtgctatactccgcccccctcctcgtgccg

SEQ ID NO: 181471 - DNA, 437 bp, Zea mays
  Clone ID: MRT4577_9707C.1
gcccggtcgggtcagttgccaccggccctgccacgacgagaccaccacggcactgatgtgatcgatatccatacgtccgctagtgaatactagtgtgctagggaacgaatagaagacgcaatgaaaccagtaaaagaaaagcttgtgttgtcctgtcgtggcagggccggtggcggtgagcgggcccggacctccctgctttctggggccggccggtcgggtcagttgccggaaatgcccccgtggtagactagtagactgtagaccggagcagagttttggacttgacgatggcgtggaagaacaccaagaaatcaaccccacatctgctgtcgtgtcgggtcgggtcggttccatctgcggctactacctgcgtccagctatgcatatgtacgtgtacaggtttatttatttacatacaacagttttggcagtat

SEQ ID NO: 181472 - DNA, 365 bp, Zea mays
  unsure (1)..(365): unsure at all n locations
  Clone ID: MRT4577_97080C.1
cctctacacggccgcccggtgggtgggttcttttttccttttcctgggggggtgctgtttttttcttcttttttttctgttgtatctttcgtaggtcgagctcgcggcgctggtggcggcccaggttgcgcagccgctgacggcgatgtgcggcctgcacctgcagggggggggggggggcccttgcaacgcanctgccggcggtgtctacgtactgcggaaactctgttctgcggtcatcgtgcngtggcgccgctggcttgctgcctagctcgctcgttgcctcaggtggcggccctgtgttccgtcgtgtcccccgtcccctggcgtggccgtgtgtgccttggcctgcgtggccccttgtc

SEQ ID NO: 181473 - DNA, 327 bp, Zea mays
  Clone ID: MRT4577_97081C.1
aataaaaactcacccctaaaagaggctacagtttgagggccccaaccatccaaagttaacaaaacaaataaggctgggggcagtctaaaaggtcaaaccctcctattcctcctcgttctaagaaaggttaaagacccgaagctaatataccctggggcccttgtttgccgttacaactgggagccagtcacggacattgggctttttaaggtccttttgggcaaagtccttaaggtccctttaaaaaaaaggcccgtcggagggaacggggaccttggacttatcgggggggacggggaccccctccccaagctggccggccttgcc

SEQ ID NO: 181474 - DNA, 338 bp, Zea mays
  Clone ID: MRT4577_97082C.1
aaattgttttttttcctaaaaacataaaaaaacaaccaaggggggggtttgattaaaaagacccgggcttaacaaggcaccagaagggacaaggagcaccacaaagctcctgggtggagaggagccccaaaacaagcatacaaaaaaactacacttgacaacatgagcaccaagcgagcactaatgaaagacaagtgaacaccagcggccggtgagaggccgaccgaggtcataaaagcggtgccggccctgaaaacagcggagacgcacatcgcggcggagcgatacccacccgacttgacagcaaagcagaagcaaacgggcggctggagcggggc

SEQ ID NO: 181475 - DNA, 481 bp, Zea mays
  Clone ID: MRT4577_97083C.1
ctcaaaatagtataacacatatttgtacataaattattatggtattatatgtttccgttgcaacgcacggacactcacctagatatcgacaaaaacttgtgtgatatgtaaacgcaacagataatttcccttatattttccacacggattttgcatattatagtgatgtttgttgttccgtatcaatgtttcatacaaatcttttacttccgtcgcaacgcacgggcacatacctataacaatacaacacacatatgtacataagttatcgtgttattatacagttccgttgcaacgcaccggcactcacctagtgattacataagttggtatctagataaatgatagctagagaaagattttatttttagctaagatgaactctattagatggttatagtgatattgatgcgggtacatttacccatgtgtagacaagtggtatgaataatataacccatactcataccaacgggtagag

SEQ ID NO: 181476 - DNA, 729 bp, Zea mays
  Clone ID: MRT4577_97084C.1
ttttttttttttttttttgtgatgtcagtcatgtcgtgattctttattcgtcggccgtgcggccgtgctgcattatctaccgtcatggcgcgtgggctgccctcttatagcttttgcacgccgcccatcctgtagggcggagacagcctcaccgctgctgacctcagacgtcttgcttcagccctcgtgcctcgctcaagcggcccagacgtccttgccgacgccctcgatccagttgcccagctggttcacgctggcatcccactccttgagccgcgccctcatgccctcgatctgcttcatgtccaggaccttgggctgcacccagttgatgcgcgcaatctccgccacctggtcgatttgtcccttcaccagccccaagctcagcgccttcatgatcaggtgctcgatctccttcggctgcacctttgtctcctgcgagatctccgagaaggtcatggctcggtcgtgcggcggtcggcggaagatggtctcggtcagcgctgcgagggagatcttctggtagaggaacgtctggtggtccttcaggagcggcaccttcgagatgttgcctgagaggacgtcgtatgcgctgaggtcgccgcggttgaaggcgaaaaggaggtcgcgcagccacgagtgtggtgtgttgacgagcgaatcgaggatggggtggaggagcagctcgccgaagttgtagatggaatctgagacaagggcggcgatgct

SEQ ID NO: 181477 - DNA, 326 bp, Zea mays
  Clone ID: MRT4577_97085C.1
aaacaagacagcctaatgttgcagttcaaaggaacttggcgattcagtttctttacaatatgcccttgtcattttaaactttggacgggggtaacactaaaacatttttggggaagagtggttccagggttgagactttcctgacaagacaataatagcataagcatagcaggcttgcattccaaaacaacaaacttggtgatactcagtccacgaatccatccattaatatatatattaaataaacatctttcatcaactacatagctttttacccaaatacaaaaggttctggttcagacattgaaaaccccagcccccaaaat

SEQ ID NO: 181478 - DNA, 229 bp, Zea mays
  Clone ID: MRT4577_97086C.1
tgtttcggtttggtggaccgcatgttgccttaattgcctgttaatattcagagcagcaaggtgcttcatactaacaggcaattaaggcaaggtgctgtttcggtttggtggaccgcatgttgcagataataaattagttgttttgtcaaaaaatacaaaaaataaaaaatagaaaaaaaaataaaaaaacacaacatataaaacataaaaagctaaaacaagcaataaa

SEQ ID NO: 181479 - DNA, 274 bp, Zea mays
  Clone ID: MRT4577_97087C.1
tttctttttttttttttttacccttgtggccctttttttaaaaaggtccccgtgtgggtacattaatcacggcttgaaaaatacctgtgccccaaaataaccttattcaaatagggaaacaataatttggggtctctatctagtggggaaacaccattatattagagagaccctcgcgtgtgaacactctaatacggggcacctccttcttctgaagggggcataaactgtagtttttgtttaagaagaacctcttttttttctttttgaagac

SEQ ID NO: 181480 - DNA, 440 bp, Zea mays
  Clone ID: MRT4577_97088C.1
attaatggtattgcttagaaagacacggccaaccagggggaagggggggacaaaaaaagaaaaaaaacgccggcaagggagggaaaaagcaagagagcaaggggggaaacaacaggaaaaaaaaactacaaagggggagaccaccggacgcagcagaaggggacggaaaaaggccgccacaggccgcacaaaaggggcaggaaatgacccatcaacggggccaacaagcgggggacgaggggggggggggggggggggcgaaggaaggaccggaggggcacgccggggagggccccccacccgaggcggggggccacccggctgaggggccggcaacaacacaggcgaaaagaagggcgccgaggggagcaaaaaaagggcccccacgggcgggaccgatggggccagaaacagggggactggcccaccaaaagagggct

SEQ ID NO: 181481 - DNA, 615 bp, Zea mays
  Clone ID: MRT4577_97089C.1
ggccgcgggttttttttttttttttttgacaaacgcgcatattataaggcaagcggctacataaaacagggcacacaggttacaacaacgagggttgtaagcccattaagccccaaacatcagatcaccacaagcaaatgtctcgaagacacacgcacacggcaacaggataactccacactggcagatcatgggatagcagcagttatcaatcaggccttgacacacagaacatcaagcccccagacgacgacgactcctctagcactcgtcaccatcatcgccatcctcattctcgtcggactcagcgccaacctcctcgtagtccttctccaacgcggcgagatcctcacgggcctcagagaactcaccctcctccatgccctcacccacgtaccagtggacgaaggcgcgcttggagtacatgaggtcgaacttgtggtcgatgcgggagaacacctccacgacgctggtggagttggagatcatgcacacggccctctgcaccttggcgaggtcgccgcttgggacgacgctgggcggctggtagttgatgccgcacttgaaccccgtcgggcaccagtccacgaactggatggtgcgcttggtcttgat

SEQ ID NO: 181482 - DNA, 316 bp, Zea mays
  Clone ID: MRT4577_9708C.1
ccgcgggaaacccaaaatagttcagcccaaaatttcggcccatttttttgggctcccgcggaaattctacatatgggaaatcccaaggggaaatcccacccctgggttaacgaccacaattatgatgggggtttctgggcaaacctctgcagggccttggggagttcacctatccgttgtttttgggcaggccgcccatccaccttatcagattgctccaggaggggcctttgggccttgaaaacgttttccttttttttttgggctcgcttgctcggttggctcctgccctgggtcttttttttcggacgcgggg

SEQ ID NO: 181483 - DNA, 338 bp, Zea mays
  Clone ID: MRT4577_97090C.1
ggataggaactgccaaaatgccttttaattattcccctttcaatcattgaaaaccccccttttgctgaacatttcctttgaagttccttgaacggtttttttggaaaaaaacaattagcttaaaaaatgccaaattaataggaatccaatttatagttccgtccattttaaatggttatcgaatgcttggccaaccggtgacaacgtacgtttaaactcgtttaaggcctgaacttaacgccacgttaccccggcgcatgcatacatgcatgcatgcatgggtcattcatttcaaggggcttcgcttcaagaaggaggatgggtgcaagacctcttgc

SEQ ID NO: 181484 - DNA, 568 bp, Zea mays
  Clone ID: MRT4577_97091C.1
cggttcccatacgacgacacgctgtgcggtccaggctccaagcatgtaattctcggccgtgccggccgacggccgagcgcggcgggttagcgtctgttgttccctgcgaccggcctgatgaaacctcatcctgctccgcgcctgacactgagtgctcaaggactctatgccatgcctgggtagcgcggaggtcgacatcaacgagctgtccataatgaacagagacctaaacaccgacatagacctcaaggaccacatgccacacgcaaaggaagtgttaagcctcaagacctgtcacacacagtgttcaactcttggaagcagaccttctcatgacatggtgaagccaccgcctcaaacactgctggactttgtctatacgaagaaagaaccgggacgcagacaaaaatcgcttccagctggtgttccggcggcgccttagataaacggaggcaaaactaacatctgatcgagacgctattatttcactgaaatttgatgctatcaactggcactaacaaaccttacatatataactacatgcacataggtttgacattgaatgaaa

SEQ ID NO: 181485 - DNA, 452 bp, Zea mays
  Clone ID: MRT4577_97092C.1
gccgaaaggtgattatactattggattgatggacggaggtggcattattctgatgagagaagggaaggcgggcggcggcagcgcagcatggcaattagcaaggctggcgcaagaagatcacggggaaggcaagtttgacaacgggggcatctttttctggggtccccagcaggaagcatatacaggcccaccccttccctagtccctatggcacacacgacgcggtgcatggtgcagcaggcatggatgcctggtcccccggcccctcctctttttgaacatcgaattgtggagcgagttttgcaggaggcactcgcgttggcgtcgctcatcgatgacgagaagaagcttgacgactgtcagttcgacctctagaagcagtcctacgtagtcgcatgcgtcgctgtgtacgacaagctcccgtgaagccgccgcttggacgtggtctaaag

SEQ ID NO: 181486 - DNA, 274 bp, Zea mays
  Clone ID: MRT4577_97093C.1
ctaagctgtgcttcgcagtcacctggctcgtgtcctcttcatagggagcaaggtctttgggatatgataataagactcggtatagatatgtgccttgcgaatgtatcataattggattaggcgcacccctcacctgatcaactgtaactgccttataaattcaatcaaattgctatataatggagatttttcttcaaacaaaaaaaaaaaaataaaaaagaaattataaaaaaaatattataagaaaaaaaattgctttcttccattggggggg

SEQ ID NO: 181487 - DNA, 352 bp, Zea mays
  Clone ID: MRT4577_97094C.1
gacacacgcacgaccatgactggaatgcctcctgcgtctgaatcacctgagacgctggggatcatatcagactgaatatgatgctctcatcagaagatccacctttacaaggtatgaaagcttattcgtggatatgtacaacgggtacatgccctgacagaagccaatactggattcgacaaaactctgactacagtggaagcaactccaagaacaattgaagcgcatgtcagcaagtagcatagcctgctgacatggaacaaatctgaagcgtttttccctctttaggcgtgacatttctgctgccatgcgaaatagacttgcggcataatactgtagaacttctagatga

SEQ ID NO: 181488 - DNA, 543 bp, Zea mays
  Clone ID: MRT4577_97095C.1
aaaccggaaagggacccccacatttattgggcctttcttccatggccggttactggccaccccaaaacccgcattcagggccaccccggccccggccccaaaaaaaaggcaggtccttcaaacctttaccaaatgggggccacaatccaaacccaaaaccagggttgctgggggggcaccggaacccaattattagggccggcttccaaagggcttacttacaagtttggggggaccgggttaaaaggcagggaccaaaaggatttaccatttttgaagttggaatgccgaatgggacaattggaattgcttgcccacttggttactgggcccactgggaggcttgggccggaccatcaaaaaaggcccggaaaccgtccaaggttccttttgttggttcattttttaaaccatttttcaagggaaaaggaccttgtatacctggcaaaattttcggaaacacccaccttattcccttttggatttaaaccacctgggttcctcgcataaccagtaaaaccatgccctggttgggttggtggt

SEQ ID NO: 181489 - DNA, 1611 bp, Zea mays
  Clone ID: MRT4577_97096C.1
cctcgaggccggccgggggcaagtgtgggtggccggcgggaacacccgcctcaaatcaccggctcggaaaccaccaccaattacatcggcgtcaccgtcaccgccgctttccgagctctcatggcggcgtccgcgtcctccctccttgccgcccccgcatcctcatcctgtggggccatctccccccagctccctcgtggagctccggccgctgcctccgtcgcttcgccgtcgcgtcactcctgctacctcctccgcgcttccccttcgaggcgccatcggagtcgcttcgtagccaacgccgctcccaccatgcagcctccggcggagtccagggtctccacggtagtcgatgtcgacctcggcgaccgtagctatccgatctacatcggcgcaggcctcctcgacgagccggacctgctgcagaggcatgttcatggtaagagggttctggtggtgaccaacacgaccgtcgcgccgctttacctggacaaggtgacatgggcactcacccacaacaacctgaatgtatcagtggaaagcgtgatcctgcccgacggtgaaaagtacaaaaatatggacacgctgatgaaggtgtttgacaaggcagtcgagtcccgttttgaccgccggtgcacatttgtagcactgggtggtggtgtcattggggacatgtgtggttttgcagctgctgcattcctccggggcgtcaatttcatacagataccaactactctgatggcccaggtggattcatctgttggtgggaaaaccgggattaacccactaagagagctagcttcaggcattgccgaggtagtaaaatatgggctcataagggatgcaccattctttgagtggcaagagaagaacatgccgaaattgttagcaagagaaccaaatgctttggcatatgctatcaagagatcatgtgaaaacaaagctgaagtggtggcacaagatgagaaggaaagtggccttcgagcaacactaaacctgggtcacacatttggccatgctattgagactgggacaggatatggagcatggctccatggggaggctgtcgcagctggaacagttatggcaactgacatgtctcaccgcctggggtggatagatgactccatcagaaaacgtgtggttgacatactaaagcaagccaaacttcccattgcacctcctgagaccatgaccgtagagaagtttaaaaacatcatggctgttgacaagaaggttgctgatggtctgttgagactcatccttctgaaaggaccactagggtgctgtgtatttacgggggattatgaggggaatgcactcgatgaaaccctacatgcattctgcgacaactgagacatcccagttttggacatcacttctgtatgctagtactaggctatgtatcaatcagagaaaatattgtggtgtacattatcttcactgcctcattggtatatttttgtcagaaataatggtatattgttttaagtgctggtttgagtttgtagagaaccatggctaatcaactgcggtgcggtcagttgttctctagtaataatagtaaagaagcttcactaaaaaaagaaaaaaaaaaaaaaaaaagcggcc

SEQ ID NO: 181490 - DNA, 101 bp, Zea mays
  Clone ID: MRT4577_97097C.1
cgtctcgagccttttcaaactactatacggctatgagtcgcagataccctgcggtaccatggacgatggatgcactctatgcacgacggcaaggcgcatac

SEQ ID NO: 181491 - DNA, 330 bp, Zea mays
  Clone ID: MRT4577_97098C.1
ggggaagctggtgcgcgtgccggtaccgaatcgctaggtcgggctcgacccaccctagattttgagggtgatgcgctcgcccacaggcccatctgcaaactggatgccactgtttagacgcacagccgttaaatatgggcactgcactatattcagtccgctatggactcgagaacgctctcactggaactggatgagctcctggatgtataaacatgctaaacaaggttctgccttatgggagactgcctgagcacgaactttctccaactttgatacccaaggcgtgaagtgtcagattgcgcgttcagtcggtccatgacctcatta

SEQ ID NO: 181492 - DNA, 1886 bp, Zea mays
  Clone ID: MRT4577_97099C.1
gttatgcctccggctggtatggtgtgcggaaatgtctgtcaaaaataattcaatgaggcaatcaacataatctatctctaatccgactcccattggcctcgaggccggccgggcccgcgctcgagacccgccgggatacatcggcgtcaccgtcaccgccgctttccgagctctcatggcggcgtccgcgtcctccctccttgccgcccccgcatcctcatcctgtggggccatctccccccagctccctcgtggagctccggccgctgcctccgtcgcttcgccgtcgcgtcactcctgctacctcctccgcgcttccccttcgaggcgccatcggagtcgcttcgtagccaacgccgctcccaccatgcagcctccggcggagtccagggtctccacggtagtcgatgtcgacctcggcgaccgtagctatccgatctacatcggcgcaggcctcctcgacgagccggacctgctgcagaggcagtcaaattatacattttttctttaactgttagactggagtggtcagcctgtgatccttatttatgttttctcaggcatgttcatggtaagagggttctggtggtgaccaacacgaccgtcgcgccgctttacctggacaaggtgacatgggcactcacccacaacaacctgaatgtatcagtggaaagcgtgatcctgcccgacggtgaaaagtacaaaaatatggacacgctgatgaaggtgtttgacaaggcagtcgagtcccgttttgaccgccggtgcacatttgtagcactgggtggtggtgtcattggggacatgtgtggttttgcagctgctgcattcctccggggcgtcaatttcatacagataccaactactctgatggcccaggtggattcatctgttggtgggaaaaccgggattaaccacccactaggaaagaacttgattggggcattctaccagccacaatgtgttctaattgacacaaatacacttaacacattgcctgacagggagctagcttcaggcattgccgaggtagtaaagtatgggctcataagggatgcaccattcttttgagtggcaagagaagaacatgccgaaattgttagcaagagaaccaaatgctttggcatatgctatcaagagatcatgtgaaaacaaagctgaagtggtggcacaagatgagaaggaaagtggccttcgagcaacactaaacctgggtcacacatttggccatgctattgagactgggacaggatatggagcatggctccatggggaggctgtcgcagctggaacagttatggcaactgacatgtctcaccgcctggggtggatagatgactccatcagaaaacgtgtggttgacatactaaagcaagccaaacttcccattgcacctcctgagaccatgaccgtagagaagtttaaaaacatcatggctgttgacaagaaggttgctgatggtctgttgagactcatccttctgaaaggaccactagggtgctgtgtatttacgggggattatgacgggaatgcactcgatgaaaccctacatgcattctgcgacaactgagacatcccagttttggacatcacttctgtatgctagtactaggctatgtatcaatcagagaaaatattgtggtgtacattatcttcactgcctcattggtatatttttgtcagaaataatggtatattgttttaagtgctggtttgagtttgtagagaaccatggctaatcaactgcggtcagttgttctctagtaataatagtaaagaagcttcactacatcaattctgtctgttactgtcaagtaacaatactcgtagagatttaaaccaaaaaaaaaaaaaaaaaaaaaaaagggcggacgctccgatctaga

SEQ ID NO: 181493 - DNA, 677 bp, Zea mays
  Clone ID: MRT4577_9709C.1
cattgggtacctcgaggccggccgggaaagaaatacaaaaaaaggagaaaaaaaaaaaaaaaaattaacaaaaaaaaaaaaaaaaaaaaaaaaaaaaaaaaaaaaaaaaaaaattttaggaaaaaggaaattttcttggggggttcttcggcttcattggcccaaggttcgagttcgtccccgtctaaaaccactgggcgagggaggaaaaggggaggaaaaaatgcaaatcttcgggaaaaccctgacggggaaaaccatccccctcgagggggaaagcagcgaccccgtcgacaacgtcaaggccaaaatccaggacaaggaagggattcccccagatcaacagggactgaaattccctggcaagcattttgatgagtgcccccccccccccgactacaaaatccaaaaggggtcaactcttcatttggcccccaggcttaaggggggaaccctggtcaggggcaaaactctccctgggaaagaaatcgagatcgacattgaaccccctgactccattgacaggatcaaggagcgggttgaaaaaaaaaaaggcattcctcccgggcaggaaaggctcatctatgctggaaagcagcttgctgatgacaagaccgcaaaggactaccacatcgaggggggatctggcctccatcttggccttggtctgagggggg

SEQ ID NO: 181494 - DNA, 284 bp, Zea mays
  Clone ID: MRT4577_970C.1
gaactgagaaccctgtttttagctggaaagatgcgcgtgccaacaccgatttctcttatgcgcgcaccggacacgagggcaccaaaactcgaagccagcacacacgtgaggtggggaaacaacaatccgggcaacctcggtgatgtccatgttagaggacttgcacgacttgcccatcactgcctcagagaaaaaggcccattatggcgcacactcaagatagcacacacgccccccttacaatggggaacaggcagctttggccctgtagataaaggatattt

SEQ ID NO: 181495 - DNA, 136 bp, Zea mays
  unsure (1)..(136): unsure at all n locations
  Clone ID: MRT4577_97100C.1
annnnnncaccnaatctattgtatttaattccnnatcataaacatggcatggaaactttacatatggggcatgctttacatcctcctctctatatcaaaaatagacccatacattatttattactccactacactt

SEQ ID NO: 181496 - DNA, 1658 bp, Zea mays
  Clone ID: MRT4577_97101C.1
cggaaaaaaaaaaaaaataaaaaaaaggccgacagagtacgcaggcaggacgcgacgcagcgccgaagcaccaaggatggcgcccgagattcagagcctgtgtccgagtacgacggccgcgctcctcctgctggccgcctgcctcgccgccgcggtggcagcgctcgacgctgcggactacgccaggccgccgctgcctgcaggcggaggcggccggcgcgtcctcttcgccaacgggctcgggctgacgccgcagatggggtggaacagctggaaccatttccagtgcgacatcaacgaggcggtcgtccggagcaccgctgatgcgctcgtcgccaccggacttgcaaaggctggctacacgtatgtcaacttagatgactgctgggcggattccgagagaaccaaagagggatacatggtcgctaaccccaagacattcccatccggaatcaaggccctggcagattacgttcacagcaaggggcttaagcttggcatctactcttccgctgggacaagaacttgcagcaacaggatgcctggatctctgggctacgaggagagggatgctaagatgtttgcgtcatggggcgttgactacctgaagtatgacaactgctacagagacggcacgcctgaaaccgtgaggtttgggcgcatgtcccgagcgctggtgaactctggccgcccaatcttctactcgctttgcgaatggggcttcatggaagttcccaaatggggcggcatgtacggcaacagctggaggaccaccggcgacatcaacgacacatggtcaggcatgctggacaacatcgacctgaacgacgcctacgcccggtacgccaagcccggcggctggaacgcagaccctgacatgctggaggtcgggaacggaggcatggcgtacaacgagtacgtcgtgcacttcagcctgtgggccatcgccaaggctcccctgatcatcggctgcgacgtgacgagagtctccaatgagacgctggggatcctctccaacgcggaggtcatcgcgatcagccaagatcggctgggtgtccaaggacagaaagtgagcaagtacggcaacgatctcgaggtatgggcagggcagctctcggggcacaggaaggcggtgctgctgctcaaccggggggccacgcgctccgcgtccatcaccgcggcatggccggacgtgggcatccgccgcggcgtcgccgtgcaggcgagggacgtctggaagcacgagacgctaccgggctggttcaccggcagcctcacggcggtggtcgggccgcactcgtgcaagctcttcgtcctcacgcccgttcctagctgacggcgccgctggagatctgtccatccaatatctgcccgtggatccagctagagttattaattgtatgatttcagatactgtaactgccttgtgactgctccgacaacaagagctcatcaccatctgtctaatgatttgacatggtgcaacgctcagtttggcctagatttgagatccgaacgtggcgaataaaataataaaatgacgtctcctgacttcttttagccgtttaggcagactggttcacttatactgtaaaaacgccatttcttcgttcttcggtgaaagtaacgtgtaaacttcgcttacaaatctagctagt

SEQ ID NO: 181497 - DNA, 1651 bp, Zea mays
  Clone ID: MRT4577_97102C.1
cggatcgtgaatcttaaatcgagcaagaactggtttcggatcaatcaaggtagcttccaggttccaaggttttgcaagacaagcgtgtgtgtgagagagagacctgcattgtttggtcgccactactaccatgcgcgatggccgcgtcgctgtcctcggcgctgagctccatggaggtgatgctggacgcgctcatgcagcgagggataggcaagccggaagaagccagcagcaagcccaaagaagaggagccgccaccggcgctgcccagccgcccgacggggcgaggcagactcccggcgctgcataggcccggcggcacagcagcggctccgtggatccaccggccatccccggtaccgcagccaacgcaggaagacgatgaggagaaatgtctggtcggtcgggagctggaaagacgggcggtcaaggcagaggaggaggtgaagcagaaagacgaggagatgaggcagaaagagcagctcatcgccacgctgcaacggcaggtgcagcactacgaatcccggctctcggaatgcgaggtcaggatgaaatctgtggagaggcagatcacttcgttacagatggctcacagtcacagccagaccgctggcgtaagcgtaaggagagatggatcgacgaggcacatccagggatcatctcgtggaggccttccgccgtcgtctcagccatcgtcagtgaggcgccagcagcgcggttccgagcccgccgctgccgacgagagcgagaggacgacactggcggagccggtagtgaaccagctggccagggagttccagacggggagggaggcgttcgagcacaacgcgcgcgcggtggcggaggccagcaggctgccgacgtcgtcgtccactcctggcagcgccaggtcggtggaagagctcaagacgctcaagagccagttcgccacgtggaaaaaggagtacgaggcccggctgaagaagaccaaggccgagctcaagaggctcgtccacgccgagaagaggaacggcgccggcgaccggcacgcgcaccaacggcggtgcgggtggtggaggatcaaagcgcccaaatgctgcagggcgcccaagtgctgcagcagcttcaagctacccagccccaaatcgtgctgctgctgcttccgccgctgatgcatacatgattcactgcaaatgcatgggttggctcttcgcatgctcagggttggatttgacgccccaaaaatcattggaatatgagaccatagtgagtgaacaagaagagaattactggtgtcttttactcgttgttggtaccgatctagacaccaatctagccaggtgtaccgtcatcggtgctttctgctcaggcgtggatagtccgcgacctgtgacaggagcgggatcttgtctacgccgaagccggacggtccacgggtgcgcagaggcggtggcgttcgccaacagcacctggatctaacctcccgaaagggaccccatcacgaagaagagatcatagggtttatcttgggattaacataccacccaagacacctttagacgacgtgaagccgaagagaggtgaaaataaagatgagaaggctaagttactgctactccgagggcataaaaagtgaaggcatgataaattaattaattggttcaaaaagagg

SEQ ID NO: 181498 - DNA, 506 bp, Zea mays
  Clone ID: MRT4577_97103C.1
ggttcattctgggggctgaatttccttccaccagtagtgtccatatgcgaagagcacaaatatggggatatgatctcatggaactgatttcccacacacacaatcttaaaaaagtatgcaaaaaaaaaaacccaggggatggataccccagaaaattgaataccttaaaaaaaatacaacgacgggagagataatgctccaaaagggggggccttggattctaattgtttttatcatttccacagctactacattggaataccacctcctcagggacatccttgaactgctttatgatctgcgccgccttgatagtggctaggacgttattcagggggtttttgctgcgcacatgcttgcccacagcattttcaacatcagccatgtccaacaccacccttacagatacaccagcaataacagcagatccagggcaagcagcgctcaacatcaccttggctgctccataacccgcattacctctgctcgggaatgggaagacttac

SEQ ID NO: 181499 - DNA, 833 bp, Zea mays
  Clone ID: MRT4577_97104C.1
tctccatcccggctccgtcgtcgcgtgccatcctagggtttctttccccgtcggcgcctccccagatttggccgccgccgccgctgacccagcaacggcggcgctcacttctccgattaaccttgccgcgtcccgacgccacgtcaacaaatacgcgggcgcgattcaaatcccgactgacgcctgcctgcctggcatggttgtcttgatggcgcccgctgtagaagccgtgaaggagacaggcaccttccagaaggttcctgccttgaacgaaaggatactgtcatccatgtccaggaggtctgttgctgcacacccttggcatgatctggagataggtcctggtgctccaaccatattcaactgcgtcattgagataccaaggggcagcaaggttaaatatgaacttgacaagaaaactggactgatcaaggtggaccgtgtgctgtattcatcagttgtttaccctcacaactatggattcattcctcgcacgctttgtgaagacagtgatcctttggatgtactggttataatgcaggagcctgttatcccaggctgtttcctacgtgcgaaggccatcggccttatgccgatgattgatcagggagaggcagatgacaagatcattgcagtgtgcgctgatgatcccgagtacaggcattacaatgatatcaaggagctcccacctcaccgcttggctgaaatcaagcgcttcttcgaggactacaagaagaatgagaacaaggaggttgctgtgaatgactttctaccagcgagcgccgcttatgaagccatacagcactctatggacctgtatgctacatacatcg

SEQ ID NO: 181500 - DNA, 455 bp, Zea mays
  Clone ID: MRT4577_97105C.1
ccggccgggtctcgaatgggtacgaccatacatggatacaatcctccgtattcccaatcgaaaagatgtccttcgcatccagatcttcgtcacccgtcctcagaacccacgcgatattgtcagtgctagcgccacggtgcgcatgttcccaggacggccaaacgttccccttattctggaaagggaggtccaagagcagatgggcgccatgtgtgtcacagtatgtggacctggcgctcttgctgacgacgttcgcggagctgccagggcggtgcaaggttcgagtgtggtggactttgtagaagaaagtttcacctggtagactatggtcacaaagcagaggcggaagtaatcaaggggtcccattcaaacagtatatattttacgaaaatggtagtttatgtcatcaagacatccgtgaagatgtatatatgcccaggacaatcatagcatca

SEQ ID NO: 181501 - DNA, 1173 bp, Zea mays
  unsure (1)..(1173): unsure at all n locations
  Clone ID: MRT4577_97106C.1
atacgtangcgtggctagagctagagacgcggttattacgagaggaggggcccaccgaacccacacagcgcgaggaagcgggaaggacgaccgtgttcccgattcccgttccaccatgccaccgtgacaccgtctctctctgtcggtcctccgctccgccgctttaaaaccaaagccgaaccactgctccgcccactccatcccggctccgtcgtcgcgtgccatcctagggtttctttccccgtcggcgcctccccagatttggacgccgccgcctgacccaggttgtcttgatggcgcccgctgtagaagtcgtgaaggagacaggcaccttccagaatgtcctgccttgaacgaaaggatactgtcatccatgtccaggaggtctgttgctgcacacccttggcatgatctggagataggccctggtgctccaaccatattcaactgcgtcattgagataccaaggggcatcaaggctaaatatgaacttgacaagaaaactggactgatcaaggtggaccgtgtgctgtattcatcagctgtttaccctcgatcctatggatgtactggttataatgcaggagcctgttatcccaggctgtttcctacgtgcgaaggccatcggccttatgccgatgattgatcagggagaggcagatgacaagatcattgcagtgtgcgctgatgatcccgagtacaggcattacaatgatatcaaggagctcccacctcaccgcttggctgaaatcaggcgcttcttcgaggactacaagaagaatgagaacaaggaggttgctgtgaatgactttctaccagcgagcgccgcttatgaagccatacagcactctatggacctgtatgctacatacatcgttgagggcctgaggaggtaggattctgatggctaggaaaggtggggaggatgttgacgaaaaactgggagaccatttaccgcatggaacgagtaccgttattattttatttgtgtcgtgtatactgctagtagtgaaccctcaatcaaagaccgaaatcccctggggagtcggagtcggtagtaggtgaagctagtaacaaggttggcgaaatattattttctggcctgactgcctatatatgttgtacgtgattggtatcgtaatattcattcgcttttgtgatacataattcgtt

SEQ ID NO: 181502 - DNA, 3026 bp, Zea mays
  unsure (1)..(3026): unsure at all n locations
  Clone ID: MRT4577_97107C.1
cattgggtacctcgaggccggccgggactccatcccggctccgtcgtcgcgtgccatcctagggtttctttccccgtcggcgcctccccagatttggccgccgccgccgctgacccagactgagcacacgccgcgcgctttaccggggtccggcacgctacttcacatcccactactcctccaggttgtcttgatggcgcccgctgtagaagccgtgaaggagacaggctcgttccagaaggttcctgccttgaacgaaaggatactgtcatccatgtccaggaggtctgttgctgcacacccttggcatgatctggagataggtcctggtgctccaaccatattcaactgcgtcattgagataccaaggggcagcaaggttaaatatgaacttgacaagaaaactggactgatcaaggtggaccgtgtgttgtattcatcagttgtttaccctcacaactatggattcattcctcgcacgctttgtgaagacagtgatcctttggatgtactggttataatgcaggagcctgttatcccaggctgtttcctacgtgcgaaggccatcggccttatgccgatgattgatcagggagaggcagatgacaagatcattgcagtgtgcgccgatgatcccgagtacaggcattacaatgatatcaaggagctcccacctcaccgcttggctgaaatcaggcgcttcttcgaggactacaagaagaatgagaacaaggaggttgctgtgaacgactttctaccagcgagcgccgcttatgaagccatacagcactctatggatctgtatgctacatacatcgttgagggcctgaggaggtaggattctgatggctaggaaaggtgggggaggatgtgacgaaaaactgtgagaccatttaccgcatggaacgagtaccgttattattttatttgtgtcgtgtatactgctagtagtgaaccctcaatcaaagaccgaaatcccctgggggagtcggagttcggtagtaggtggagctagtaacaaggttggcgaaatattattttctggnctgactgcagatatatgaggggcagcaaggttaaatatgaacttgacaagaaaactggactgatcaaggtggaccgtgtgctgtattcatcagttgtttaccctcacaactatggattcattcctcgcacgctttgtgaagacagtgatcctttggatgtactggttataatgcaggagcctgttatcccaggctgtttcctacgtgcgaaggccatcggccttatgccgatgattgatcagggagaggcagatgacaagatcattgcagtgtgcgctgatgatcccgagtacaggcattacaatgatatcaaggagctcccacctcaccgcgtgaggtgggagctgaaatcaggcgcttcttcgaggactacaagaagaatgagaacaaggaggttgctgtgaatgactttctaccagcgagcgccgcttatgaagccatacagcactctatggacctgtatgctacatacatcgttgagggcctgaggaggtaggattctgatggctaggaaaggtggggaggatgttgaacgaaaacagggggagcttttaaccgaacgaaaaaataccagtatatttttaactgtgaacggtttactgtttgtattaattcgtgactcaaagactgaaaggagttagggctcgatcatagtctgaagtcaagggttgtatcggatttggtggtatattatcatcagacttaattgcaggtattttttacgtgtgattggtatcgtaatattcattatgatttatgatacagaggcagatgacaagatcattgcagtgtgcgctgatgatcccgagtacaggcattacaatgatatcaaggagctcccacctcaccgcttggctgaaatcaggcgcttcttcgaggactacaagaagaatgagaacaaggaggttgctgtgaacgactttctaccagcgagcgccgcttatgaagccatacagcactctatggatctgtatgctacatacatcgttgagggcctgaggaggtaggattctgatggctaggaaaggtggggaggatgttgacgaaaaactgggagaccatttaccgcatggaacgagtaccgttattattttatttgtgtcgtgtatactgctagtagtgaaccctcaatcaaagaccgaaatcccctggggagtcggagtcggtagtaggtgaagctagtaacaaggttggcgaaatattattttctggcctgactgcctatatatgttgtacgtgattggtatcgtaatattcattcgcttttgtgatacataattcattattggatcttcaattgtgatacataattcattattgataaatgcaaaggcgtcagcgttcttgtttgttaaaaaaaaaaaaaaagaaaaaaaacaaaaatatgccgatgattgatcagggagaggcagatgacaagatcattgcagtgtgcgctgatgatcccgagtacaggcattacaatgatatcaaggagctcccacctcaccgcttggctgaaatcaggcgcttcttcgaggactacaagaagaatgagaacaaggaggttgctgtgaatgactttctaccagcgagcgccgcttatgaagccatacagcactctatggacctgtatgctacatacatcgttgagggcctgaggaggtaggattctgatggctaggaaaggtggggaggatgttgacgaaaaactgggagaccatttaccgcatggaacgagtaccgttattattttatttgtgtcgtgtatactgctagtagtgaaccctcaatcaaagaccgaaatcccctggggagtcggagtcggtagtaggtgaagctagtaacaaggttggcgaaatattattttctggcctgactgcctatatatgttgtacgtgattggtatcgtaatattcattcgcttttgtgatacataattcgttattggatcttcaattgtgttctgctctcggaacacggtggcgatgtgcctcgtag

SEQ ID NO: 181503 - DNA, 439 bp, Zea mays
  Clone ID: MRT4577_97108C.1
aagctcggaattcggctcgagctggcgggagcggcggccttgtcctagaactgccaacttcctggccgggtcgttatgtacggcgtgcgtgtttcccgtgtctggatccgtatggacatgttgttggacgacgacttatttgattaaaccgtcgtttatcctatggccaccgagtgcatcatatactacacttagagcgacaactgcgttatcgggaccacatattatatcaataacacgcgtgtatgtcatggctaaagattgcttcataagttgtgaccatggatgcattctgctagattcttgagaaggcatttcattttgctgtacccttatgtttctgaggccatggtgactataatgccatcgcccatgggagcgtgtttatgtcgacgggatgcctcattcacatgggttaaatgtccatattgagaagtaa

SEQ ID NO: 181504 - DNA, 632 bp, Zea mays
  Clone ID: MRT4577_97109C.1
actaaaggaacaaagctgagctcggggccgcttttttttttttttttttaatttgttttcctggtgtttttttttttttttttttatttctttttgaaaggaaacttcacaactttgtaaccttttgcccttacatatggggtgcacagacacacacgagaacaggggccgttattaaaccaccactcacccctttaatggatcaaaccggcgcgccctcaagccaccttcatgagcgtgagaggcaaccaaaagagtacacaacttcgcaagagctaatatacctatgacttactgtccacctgcgctaacagaacagcatgggggggggagcaaggcctttggaatgctggagattgttctggatgcgcctacctgcaccttttttccccccaagacaaatcgctgccggtgcgaacaaatccccaacgtcatccttgccttctgcctcacattgcaccgggcagcccggctctcaacctccactgttatggtgcctctccattatagggctttaacaaagatctcggatcccacccttgcggcggagaacaagggcaacggacctttccttgtggatggtgcagtccgggggagtgcggccatccttcagctgattgcccgtaaagatc

SEQ ID NO: 181505 - DNA, 373 bp, Zea mays
  unsure (1)..(373): unsure at all n locations
  Clone ID: MRT4577_9710C.1
ggcggggggttggtttttttttttttttcctttttttgtgcctccgnccgccgggggctcctgagtgctcgtttgcggtccttcccgctcctctgttcgggcttgcttgcccccccttggctcctcccccttccctttttccttcccgtcggggggggggcggggcccccttttcgccctttccttnttccattggccttttcgctggggcccccgcttcgcgcttgtgccgccctgtgttcggctgccttgttgcctggctgcctctcccccnggccggcccacctgcccttgccctgcggggttttgtcgtgcgccgctgcgcgggccttcgtgccctgcccccgggtttttcccgcccggttcctgcggg

SEQ ID NO: 181506 - DNA, 918 bp, Zea mays
  Clone ID: MRT4577_97110C.1
accggcggtccaccatcccattcccgtaccacccgcttcttccaactccaactctccaaggcgctgtgctggctgctggcctgctgctaccgactgccgcaactgctccgcatcccggccttgattagcagcagttacgcccgcgcaggacagcggccttgattagcgaagtattcctttgccctacctctctccctaccccgttccgacgcggcggccgttgagcacctgcccggaagctatagcttcggccatggcccaagatgccggcgacggcggtggggaactcccgccgcccgtaaagaagaagtcaccggcggaggaggaggccgagaagaggaggaagaagcttacacctgggagcttaatgaagggcattatacggtctgggagcggtgatgccacccctgcagagggcgatcaggttatacttcattgcactactcggacaattgatggtatcgttgtaaattctacaagaagggagcatggaggtaaaggaatcccactcagatttgttttagggaagagcaagatgatcctaggctttgctgaaggcttcccaacaatgctgaagggtgaaattgctatgttcaaaatgcagcctaaaattcactacgctgaggacgattgtccagttgcaactccagatggctttccgaaggatgatgaacttcaatttgagattgaaatgttggatttctttaaagccaaggttgtggcagatgatttaggggttgtaaagaagatagttgaagaagggaagggatgggaaacacctagagagccatatgaaataacagcacggataactgcaagaacagcagatggaaaagaaattattccgagtaaagaaaaggcatatttcttcactattggtaaatctgaggtacctaaagggcttgagatgggcatcgg

SEQ ID NO: 181507 - DNA, 269 bp, Zea mays
  unsure (1)..(269): unsure at all n locations
  Clone ID: MRT4577_97111C.1
aatactatagtgaattcgtannagttattatatttttaaaactatttacatttatggggagctatgtaacacccggctactgcgnttttttttctatcacgcttactcattttaaccgtttccttcgatcacctgctgctacttgggtcactgctacatcaatttgttaattcgtccttaatatgttcattgaatttaaaactgaacgccaggtgtctttatttggtctttgtttttgtatgtacccgtcatcttgtaatattttttga

SEQ ID NO: 181508 - DNA, 373 bp, Zea mays
  Clone ID: MRT4577_97112C.1
ggaggcggacaaggtaagcagcactagcaggaaccctagcgccgccgcgacccgtgggaatgggtatcgacctagtcgacggtgggaggactgagacgaccaagcgcactgggcctaagtctgactatgtctacctcaagctgctggctaagctctaccgcttcttgttgaataagacccagatgatttgtcacgctgtcattctcaacaggctcttcatgagttgaaccaaccgatgaccaatctccatgcactgccttgtgaagattatggcaggtaacgagaagaacattgctggcattgatggcacacgctcagtatgaccaaatgatccacgtagctgcagcaatgaatgttactgccctttggttca

SEQ ID NO: 181509 - DNA, 295 bp, Zea mays
  Clone ID: MRT4577_97113C.1
tccgatctggcactttgttttttaggacggctctttgcgaagtttcggcgcgctctacacgcctttatccagacccagcttgttcattcatgggtctggtgaaggaaggcgttaacatggaggagggaaccctacagatgggcatgcagtacaggactgtatctgctgtggccgggcctgtggatatctcggattatgtagggggcccatagtgccaacaactcgcaagacataggtctggcaaatatatccgctcgacggaaagagcttcatgaccgtgttggcacatggtctt

SEQ ID NO: 181510 - DNA, 203 bp, Zea mays
  unsure (1)..(203): unsure at all n locations
  Clone ID: MRT4577_97114C.1
ggtcgcgccccgcanatcgccatcgactggngagagtgacgcgagctgcggcggaggcagggaggaggactgctgctgcgaggccggcggcggcgcgggcgcgtctgtggagagggagagcgagagctggagctagtctatgcggggcttcttaccccggaccacggaggagtcgtcgcctgggggatccccgcgcttgggcg

SEQ ID NO: 181511 - DNA, 184 bp, Zea mays
  Clone ID: MRT4577_97115C.1
gaagaaacacatatccatctctattctcattgccctgtgttctagtgttcctcttctctcactaaaaatcaatatatctgttttcccttcatcttacatgtacccacattctctcatattctagtactctgctcttgctggctgcatttaaatattatccgttcctaacatttgctatcaaatt

SEQ ID NO: 181512 - DNA, 121 bp, Zea mays
  Clone ID: MRT4577_97116C.1
ccttaatgctacaaatatcataaattaggaagggaacgtattaggtgggggcatgtgccctttttagggatgcaccaaaagttgatgcaattatatattcccctgagaacgattaacagaa

SEQ ID NO: 181513 - DNA, 330 bp, Zea mays
  Clone ID: MRT4577_97117C.1
tacaacaccctgacgtgagtcgtattacgtcagacttcgtcgccatctcaaatggacatgttctctgggctcaatctttcatatgtatgacgaggtcgcatcttcgtcaccagcactcggggcggatttgggtgacatggactctcatcgggaagaatcaccacgtccatttgacataggatttgcctccgacgttgatgccaacgacacgttaatagttctgccatcactgcaacatgcataactacatcaacgcattctcaaagttctactctgagacctctaacacaccaatcgatttctgtacattccacaatttcatatatacct

SEQ ID NO: 181514 - DNA, 1635 bp, Zea mays
  Clone ID: MRT4577_97118C.1
cccacgcgtccgattacatgtggggcaactcctgcaatggaaatactgagttggtgtggggctgatccaggaaatgcatttcttgtgccatcaccttactacccgggttgggatagggacataaaatggcgaactggtgttgagttgatacctgttccttgtcgtagtactgataactttaatgtcagtgtcactgctcttgaaatagcttacaaacaggcaaaaaagcgaggaataagagttcgtggggttctcatatctaacccttccaacccaacaggaggcattgtgccaaaagaaatactgcatgaccttctacagtttgctgcagagaagaacatacacttaatttctgatgaaatatttgctggttcaacatatggaagtgacaagtttgttagcgtggcagatgttgtggatgaactagaggactttgataaaggcagagttcatatcatatatgggctctcaaaagacctatctcttgccgggtttcgagttggagtgatatattcctacaatgaacacattgtatcggctgctgctaagattgctcgattttcatctgtctcaagtccaacacaacgtttgcttgtttccatgctttcagatcaaaagtttatttcagaatacataaaggttaacagagagaggctccggaaaatgtaccttctgttttctgatgctttgaaacaacttgggatagaatgcttcaagagcagcggcgggttctattgctgggcagacatgagcaggtacatccgatcttacagcgagaaaggagagcgcaagctctgggataggctgttggaggaagcaaaggtcaacgttaccccaggttcttcttgccattgcattgagcctggatggttcaggtgttgcttcacaacattgagtgaggaggacattcctgtcttggtggaaagactgaggagggtcacagatagcttcaaatccaaacgttgaaacgctagaatagtttattttttggaacccctgcggtatcgaaataaccatatctcaccaggtgctctatagtggattgcagggggcactcaggaaaaggttggacaatctatttattttagaccatagatattcaggggcttcttgctatacagctgcataacaattgctggaagcccctaggctggtggaaggataagtgggggatttgggggacttgtccatgactccatgctggtcagctgtcttcggtttcttacgagccatgatgccgtagcattctggatgtttatgtcctgttggtctggcgatgaggctgatgtgctgagcattcttttcatccagatccgaccatgttctacttttcctttttactcttccttttttttctttggtcacataagctagtgttcaggttcagggattgtaaagcagtggatcctgcatgtgctgccagggttttggacgctgtccatacgtggagtgaatgaacatgcagtcatcatgttttccatcattttttttctttagtttgtttgcgggtatgacattttgtcaaaatgattttgtgcttagttactgggaagggaataaaagaaaggactttttgaggcaaaaaaaaaaaaaaaaaaaaaaaaaaaaaagctcctctccgttgttaccactgct

SEQ ID NO: 181515 - DNA, 344 bp, Zea mays
  Clone ID: MRT4577_97119C.1
ccaacacaacagctgcttccacctacctcaaccaccccgtcccccccgaacgccctcaacatcccggagcagctgccacaatgggacatgtgcaactttctggtaaacttacagtaccgccgtctctaccgaagcatgaactcccagtatctgaagctgcttagctcacagacataccagatcctattatataatggagatgtagacatggcctgcaatttcatgggggatgagtggtttgtggattccctcaaccagaagatggaggtgcagcgccggccctggttagtgaagtacggggacagcggggagcagattgccggcttcgtgaaggagttctccca

SEQ ID NO: 181516 - DNA, 342 bp, Zea mays
  Clone ID: MRT4577_9711C.1
cgctgcctcgtaggagcccgcgctgctcgcagaccttttccacatgctggtctttcaaggagcacacagcggtagctgctgctgacacaaaatatctcactgtctagctgcctgctgagcatgaaacggctaggttagactagatgaacctgctggatgctagcactgcctgtgtgaccaggacaaagtactgctaggtatctatctgatgagatgttccgggttgacgtgattatggcctctgttaatacatgagcgtctcctttattgtcttacgtgctctctagactgatggtagtacattttctctaagcgcgcgggtctctctagcttcgtgtgtga

SEQ ID NO: 181517 - DNA, 272 bp, Zea mays
  Clone ID: MRT4577_97120C.1
cgacgatcctagttgtcatcatgggccgccgccccgcccggtgttatcgctattgtaagaacaagccatacccaaagtctcgtttctgtcgtggtgtccctgatgctaagatccgcatctttgacttgggacggaagaaagcaaaagtggatgaattcccactttgtggccacatggtgtcagatgaatatgaacaactctcttctgaagcactggaggctgcccgtatttgtgccaacaaatacatggtaaagagttgtggcaaggatggc

SEQ ID NO: 181518 - DNA, 790 bp, Zea mays
  unsure (1)..(790): unsure at all n locations
  Clone ID: MRT4577_97121C.1
ggccgcttttttttttttttttttgcacacaatcacataataatatttaaatccatagtctcatcaattacatcacaaaagtctcatccatagtcataataagacactagaattctatgagcgagcaacttcacaaaatcagattcagttacctaggaaggtaccacaaagaagtaaggtggcatcatctatactaatggtaagatttaagaacatctttttttggcgcttacaatacttgcagcaatttcaatggggtcattaaactcattcttaagctttgcaagaactagattcattgcagcttctgcatcctttaagcaattatgtggttctccttcttctcgaactaaatactccaaaacagccttgcacagactgttcaaggaaggtgatgcagtagtcggtaaatttgcatacttaaatatgtatgttgtatcaataacttgagagtaatcaatctttaaggcgcataaatctctatgtaagctatggccaattaaaatatttcctttggataacattctctccaacgatttcttgattcaaatccttccacttcatctccaccaacgacctgtacgccatgaatctccggttcctggcagcggacacgctgcagaagctggtcgtcctcgcgaggctgcccgcgtgctcaagcctgcccttcagtgcatcatatggtacacactggctgctgttcctccttcaagntctgcgccgcgcggacgctcatcgtggaccagttccctgacaccacggcagccatcgcgtcgctgcatgtgggccc

SEQ ID NO: 181519 - DNA, 104 bp, Zea mays
  Clone ID: MRT4577_97122C.1
cttactgtttgtttggtgtctatacagtcctaatttctcccatcttgcaaatttcgggctaaacttgaaagcagatacattaaacaacctagatactgcagaat

SEQ ID NO: 181520 - DNA, 1370 bp, Zea mays
  Clone ID: MRT4577_97123C.1
cctccacctccacggatgtgcgctctgcctccaaccctccatggatctaggtcatgtcgtccgacgtccgtagtccaccccagcccctcgccggctccctggctcccattgggtccacgtccacctccactactcggcagcggcgcagccgctacagtctaccttgacgctcacacaagacgcgaattggaccagtcaaagtgccgaactgccgaagtgaactggattgctgcactgttcttgcccgttggtcactgcttcatgcccacgcgagacgccacctcctcgacaacctattggcctgctacacaatgatgcagtgtcgtacaatgtgagttctcatgtttctcccctttccctacattatgattttagtaatgtactcctctatttcaaaataaaattcgttttggcttcttagttgatctatatgtgcattttatatatgtgtctatatttattattatttagttgaatataaatataaaatcaagagttaaaacgaatactattttaggacagaaaaagtatttagcttgaagagcttctcaaaattaccttcaatttttataaaatggcccgagtcgtcaattttatggagctccgccactgagcgtgatggaccagtccagccgcagcgccgccagcctgaagggaaggcgcgagcacacggccagccccgcgaggacgaccaacttctgcagcgtgtccgctgccaggaaccagaggttcatggcatacgagtcgttggtggagatgaagtggaaggatttgaatcaagtgatggcacagaggctgtggtcagagtatgtgttgtagatgacaagcttaaggctaagttggacatacttgtaaacccatcgaagactgttgctgactataggacacacatcactggtgcatctaagaaggatttagaaggagtcacatcatcattagttgatgttcagaaatcgctgaagagaatgttatccaaaggaaatattttgattggccatagcttacatagggatttatgcgccttaaagattgattactctcaagttattgatacagcatacatatttaagtatgcaaatttaccaactactgcatcaccttccttgaacagtctgtgcaaggctattttggagtattcagtttgagaagaaggagaacgacataattgcttaaaggatgtagaagctgcgatgaatctagttcttgcaaagcttaagactaagttttatgactatgtatgagatattgtctattattagtactggatgagatgtatcttattatgactatggatgagacttttgtgatgtaattgatgagactatggatttaaatattgttatgtgattgtgtgtgtgatgttttatgtg

SEQ ID NO: 181521 - DNA, 445 bp, Zea mays
  Clone ID: MRT4577_97124C.1
atacaacatacatatttaagtatgcggggggaccgactactgcatcaccttccttgaacagtctgtgcaaggctgttttggagtatttagttcgagaagaaggagaaccacataattgcttaaaggatgcagaagctgcaatgaatctagttcttgcaaagcttaagaatgagtttaatgaccccattgaaattgctgcaagtattgtaagccccaaaaaaagatgttcttaaatcttaccattagtatagatgatgccaccttacttctttgtggtaccttcctaggtaactgaatctgattttgtgaagttgctcgctcatagaattctagtgtcttattatgactatggatgagacttttgtgatgtaattgatgagactatggatttaaatattattatgtgattgtgtgtaagatgttttatatgaaaatatattgtgct

SEQ ID NO: 181522 - DNA, 1267 bp, Zea mays
  Clone ID: MRT4577_97125C.1
ccttttctgtgttgttaatccacgaatgatgataagccctttttggattgtacactttcgttggtgatcttcctttgatatgtcctgttcatgttttcgtgaccaattcttaaaacattggagtccactaatcttcatgatatactacctctgttctcgaatatttgtcatccgctagttcatttttgaactaaaacacgacaaatgaaaaagaacggagggagtactctgtctaaagttgcaccttgtcttgtactcttcacaaagacatgccttttgatactcgaaattctaaaacaaattgtgatatatattgtcatctccataatggatgaaccaattttgtatccatattgtattttcttgtctcgtaattgataacaatgaaacttatcaataacgagctattaatggtattttctggcgtcgaaagtgttgcagatagatgtctctagtttaacgagctcaagtgctatgttgtcaattgactgtgagatggtcctttgcagtgatggcacagaggctgtggtcagagtatgtgttgtagacgacaagcttaaggctaagttggacatacttgtaaacccatcgaagactgttgctgactataggacacacatcactggtgtatctaagaaggatttagaaggagtcacatcatcattagttgatgttcatgtatattgtctttaacatctatgtattttctatgaatatattatctcatggaagttatattccttttctagaaattgctgaagagaatgttatccaaaggaaatattttgattggccatagcttacatagagatttatacgccttaaagattgattactctcaagttattgatacatcatacatatttaagtatgcaaatttaccaactactgcatcaccttccttgaacagtctgtgcaaggctattttggggtattcagttcgagaaggagaaccacataattgcttaaaggatgcagaagctgcgatgaatctagttcttgcaaagcttaagaatgagtttaatgaccccattgaaattgctgcaagtattgtaagcgccgaaaaaaagatgttcttaaatcttatcattagtatagatgatgccaccttgcttctttgtggtaccttcctaggcaactgaatctgatctggtgaagttgctcgctcatagaattccattgtacctgccttgtcaagagctatgcaaaattttctctgggaaccccaatattgatgacaaggttaccttaaaagttttatttgttc

SEQ ID NO: 181523 - DNA, 426 bp, Zea mays
  Clone ID: MRT4577_97126C.1
ggggggggggggggttttttttttttttttgggggggttttttttttttttttttttttttttttttttttttttttttttttttttttttttaaagggcccccaggcttaaaaggctcgcgggggctgatgacttaagaaaaagggcggggggggggggggggttgaataatttttaagggaacaaaacaagagggggccttggaactaaaaactccaaccaagaaaacgggaaccaaatacccaaggggggttaagaacggggcgagcaaaagcacatgccaaaaaggcgggataacggaattacgggtttactcggcttggaaaacaacgggctttatccgggggttttcggggggttaaaaccatttgaaaagaaagccaccatgggcgggaaaaaagggggcgaaaaacaagggaataaac

SEQ ID NO: 181524 - DNA, 490 bp, Zea mays
  Clone ID: MRT4577_97127C.1
gattagagttcaaaatttaacttcaaatatttgtgtatggtaaataggtattcatgagctagaaccttaacttgcggtttctattaggtttcaactgtagctaaccacaacacaataaggacttgggactacaagaccatgttttacatgcctcaatctgcacttcaacaccgtgagagtgaggcccgtaacaccaagccaatgcacgaatcatcgcctgggcgtgtacgaccggcccccggaagactgcccagagcccttgtgatgctcctcggcggccattttcttcttggtcatcgtacctacgtcctgggcggaattggcaaccttgttgaacgccctggagacccatgacgcgcccgtaaagacgaacctgttgttcatgatgggagacccctaactgctaaccttttggtcgggcgcactgagtgcatactaggccttaaaccagacctggaacttgtggtacataatcttcaccttcccggta

SEQ ID NO: 181525 - DNA, 336 bp, Zea mays
  Clone ID: MRT4577_97128C.1
ggacaaagaaaacaattattccttggggattgaacaatagtttacattatgggacaaaccgaaaaccagggtgggcttacatgggtggtgggacctaaagggcaccgggggggccttccttatttgccggggacaaaattggtggcgtaggcccaagcgttgttgttgacggggtcggcaatgtggtcagggaggtttttgagcgggcccttcccggtgacaatgggctggacgaaaaatccgaacatggagaacatggggaggggggcgttcttgagctccttgaccttgagctcggggaaggcctcggggtcgtcggcgaggcccagcgggtcg

SEQ ID NO: 181526 - DNA, 355 bp, Zea mays
  Clone ID: MRT4577_97129C.1
gcaacatattaagcacaatattttttcttcaatggcagtcaaaatattttggcgggttattctccttggtctttctgcaagtgttgctactgcgaccattttcccgatatgctcgcaagctcctatagcttccctttttttctcgttcctttcaccagatatgttttctgaatttgtatacccaattttttaaccttacaggatccaacaggcttttacagttggtatttcacctttatcacccttgattctccaacaatcatcagccctattacattagttacccttggtgccattattggcacaaaacatcaagtcacaacaacttcaacaactcgtgcttgcaaatctttgc

SEQ ID NO: 181527 - DNA, 364 bp, Zea mays
  Clone ID: MRT4577_9712C.1
ttttggtcaggggcagcctgccggtgatgctgaacatgggcgccatgctggtggtccaccccctcagcagcgaggacacggactgcgagccctccgtgtactccaagatcaccagggtctaggaggagctccgctcggagctgccctaccaggtggagtccgacctcgtggcggacgccaagggcaccggccccgtggtgaaccggctcgtgaacagggtgtagtgcaccatgaaccgcttcctgctctaggagctcggctgcgcgttcctgaccgacgagaggcaggagcacttcggcgaggagagcaacagggtgttcatccggatcagccagggcgagctcggggaccgcatgctcgagtg

SEQ ID NO: 181528 - DNA, 810 bp, Zea mays
  Clone ID: MRT4577_97130C.1
accctgttccctgccgtcgagcgctgtcggctcgagctcccggccacgtcgcccgacccgttcccggcggctgccgcgcgcccttcttgacacccctagtggtcgtcccctcaccatccctcctcgctactcgcgctgttgcgcttctcccaccagtgctgcctctaccctcaccggtttcatgacgttagttaaggttgtttcagcaaaaatacgcgtacacaaacgagttggactggttggcatacctcgccgatgccggaggaggcgccggtgatgagcacgaccttccctgcgacgtcctctggcacggcagcagcgaacgcagacgtggtgagcttgtagatgtagtacggcgggaggaagatggccaggagcataagggacctgcgcgccgcccagtccatgaaggtgttgacgaggtctgtcgcgggcgtctcgctgcgcaggatggtgtaccccaccttcagcatgctcagcatctccatggctgctgccgaccttctgctgctgccgctcgcccctgtgctccatatgatgtgagagacgcgggaaggagaagcatgactgcgtggtgtcctcacagcttgacacgtcacaggctgcagggcacgtggagtgttgtcctggggatgcagagctctacctgtgagcttctaagcagggcaggtggcctctgctggtccattcgtcattgccttgtaaaaaaaagacaagttgaagcaatgctccatacaggtcttagagccagtgatcattacaggcaatcgatgtatcacaacagagcacgtgtatagaacacaacattac

SEQ ID NO: 181529 - DNA, 324 bp, Zea mays
  Clone ID: MRT4577_97131C.1
tgagcttgttgagcattttgatccttgccaccccattcttgttggggggattggccttggtgaggagaacacaggattcatgcaggctagtttgaagcgccataggtggcacaggaaagttctgaagacaaaggatccaatcatagtttcaattggttggaggcgatttcaaacaacccctgtgtatgcaatagaggatcggaatggtcgacaccgcatgctgaagtatacacctgagcatatgcattgctttgctatgttttggggaccacttgctccaccgaagagtggtgtattagcagtccagaatctttccaaacaatc

SEQ ID NO: 181530 - DNA, 248 bp, Zea mays
  Clone ID: MRT4577_97132C.1
cctgagcttttgtacggacggaaaaggaaaaacaggcggggttggttttgactggccactccgcccagcgcaacactcggcaaagaggagctttgccgacggtcaggaccataacactcgacaaagaactaagacctgggcacaggcctaggcttcctgcccactgcactggccctggaacttcggcaaacagacacgcttcgccgtgttgccatacaaagcactcggcacagaacctgccaagggct

SEQ ID NO: 181531 - DNA, 225 bp, Zea mays
  unsure (1)..(225): unsure at all n locations
  Clone ID: MRT4577_97133C.1
ggggggcattngctacaccaccacaccgcacaccccattttatcacacaacaagcagcgggggttacgggagctgctagcaaaacaatggagaacggtgctccgagcatcgtagtggccatcgccgcacccgtggcggcggagttcgtgaagctcaccttacgtgccctgaatatgcgccggactggacctggaagcagcaagaccacagtcccggggggggggg

SEQ ID NO: 181532 - DNA, 326 bp, Zea mays
  Clone ID: MRT4577_97134C.1
gaatactgtttgactttggctgttgcaagggcctactctagcagcttgctctgggatatgactcgcgtctttctagcgctacattctgcttctgttcgtttatggtttgctcagctgcacgtgcttgctcccctgctcggtttccctgtgggctgctcatgctctagcttgccactttggctttcggtcgtgcgagagctgcctattgtgctctctccctgtcccttggtactatggcccatctgtcgcgcttccgccgcctcctgctggtggtcaccgtggcttttggtgctgctggggcttcttctgctgccgttggccacggg

SEQ ID NO: 181533 - DNA, 421 bp, Zea mays
  Clone ID: MRT4577_97135C.1
aaaaaaaacgttttattggaagaattaattgggataaaaacaaagggggggaccccccccccgggtaaaagggaaaatccaaaaagggagggactaaattcaaaacaggggggggattcactaaggcagggaagctccattacactcaaaacgtacggaacgtaattttttgcccccccccccctgttggcggctttaaaccttcttttgggttcccgggggtttttgttaaaccttttaaacccccccgtttttcgggggtgacggtttcgcccccgtttcgttaacttggggccccgtttctttgccctgccccaaaactccggggggtttgggggccttaaggaaacccattgtgggggccgggcaactaacaaactaactttggcgaaaccctgccggaaactaaaatctgttggct

SEQ ID NO: 181534 - DNA, 377 bp, Zea mays
  Clone ID: MRT4577_97136C.1
gatgagaagctaggactttaatcgttagagcagaagtggcccatggaatgcaccatgcgtcaccaccctagctgacctgcgttgacagatatatgactcgcagcagacacagtctcaaaacaaatgccctttcatgcctgcccgggttaggtgtcaatgccgtcttatgcatttccacccagttcggggaccccactaatggagttgccacattagccctaggtgtgaactatttaccagctctgcaactcgcctttctggatgtacacgatcgcctgtaactcacattcctggatactgatggtacacggtctaatgtaagacagagtgcattattctttaatatactcaacattatccatgttgggaacttcatg

SEQ ID NO: 181535 - DNA, 225 bp, Zea mays
  Clone ID: MRT4577_97137C.1
ggaaagggaaaagctaagtgagggagactggcaaaacaaaagccggacgacccttacgagcgggcagggcccaagccatacaagcgggacctaaagggcctcctaaccgggagagaacagaataccagcccagccatcaacaataaacgagcatggggacaacagaatagctaactggcaacacctgccggaactggccggggaagagaattattagagctgcac

SEQ ID NO: 181536 - DNA, 1255 bp, Zea mays
  unsure (1)..(1255): unsure at all n locations
  Clone ID: MRT4577_97138C.1
aggccggccgggccggtccctttttcattacccccacctccgtggcgaggctcccccacctactaatacctctcctctctcgctcggccggggcctttgtattcgtcttgctccagccgccgtcggatcggatccgatccaaagcaagcagcagcagccggctcctcctccgcctcccgcagcagccacaccccgtccgtcaccagaggaagaggaagaggaggatgtcggggtcgaaggtgtacacccttgaggaggtggccaagcacaacaccaaggatgactgctggctcgtcatcggcggcaaggtgtacaatgtgaccaagtttctggaggaccaccctggaggtgatgatgtcctgctgtcttccactgccaaggatgctaccgatgatttcgaagatgtggggcacagcaccaccgcccgtgcaatgatggacgagtacctcgtcggtgagattgatgcggccacgatacccagtaaggtgaagtacacgccccccaagcagccgcactacaaccaggataagaccccggagttcgtcatcaagatcctccagtttttggtccccctggcaatactgggcctggctgttgctgtaaggatctacaccaagtcggaatctgcctagtcatctgaaccaagttagcgagggttgcatcttgtaccagagtcgcatgtcagaaacttgagtctttgctgtcatacggttatatttatatgagacttctatcggtaaaatgaaatggatgtcagaaacttcattgtaaaaaaaaaaaaaaaaaaaaaaagcggccaaaaaaaaaaaaaaaaaaaaaaaaaaaaaaaaaagacccaaaaagaaaaaaaaggcccggttttgaactttttagctctgtttgtctttactaactatgtagacgagtgcccggccatatggaggggttctaaaatggacttgtctacctccccactggattcatagaaaggcagcaagttcagttttcggacgcttgggcccggacagttcggtttcatttgggggatgccctgttctagctccttgaaatactccattatttgatcatactggtttcatagagcccaaaaatccttgttccaaattatgcggagaagctgccccaactttcagggatccttgtccagcttccacttcctaagcatatcaacgaanagaagatacttgagcgagatttccctcgnagaaagatgtggatgggcttccatcctctcaacattggcaagcttgcaatg

SEQ ID NO: 181537 - DNA, 188 bp, Zea mays
  Clone ID: MRT4577_97139C.1
gtcacaagagatctagccgacaattccatgtgagagtcggcaggacctgtccgttctggcagccagctgtctagcccagtgtatctgctctgcaacggtcggagctatagctcaaggcctgtttcgcctgtgctatgctgcgaccgtgcgggtcttcgccgacactgcctggcggcaggttttttcgc

SEQ ID NO: 181538 - DNA, 673 bp, Zea mays
  unsure (1)..(673): unsure at all n locations
  Clone ID: MRT4577_9713C.1
cggacgcgtgggcaagagtttcatggtaaccaaaatgactaaggaaatgaattttttttttttgggcaacctaccttgtcaacccgaaacgttttcagcaactgtttggttgctagtagtacaatatatatctcatatgtaaaagattgcagattccggtgaaggtgtgccttttgaaggtgtagagatttgctgcttcaatttggatggtgcacactatatgatttatacaccagttgatcctcttctttttgtcgcaatcaaggataaggatggtgtgctacgcatcgctgaggatgatctgatggaagaccctgcagttctggatgcggtagatgaagagacagaatttacagctctagtggaggaggaggaggcccttcttgaaacggtacttggtgaaaggtgatggatgccagggagtacttgtgcaggaagaggaagagagactcgtctgattgtagtagaatagaatggaatggaatggagtgcatttgcaactgtaagctggacaacgcagttgataagcaactgctgctgctaatctttgtctagtgtaggatagatagctcaatgggacgatcaaagctatttatgatgtgctcatgtgtttgaattaattaataaaattaccccaatctgaatagnnnnnnnnnnnnnnnnnnnnnnnnnn

SEQ ID NO: 181539 - DNA, 171 bp, Zea mays
  Clone ID: MRT4577_97140C.1
cataacctttaatttattattaacaaaaactacaaggcatctcttttaacaaacaaagttactctatgttccagagggagtgctctttgtgggtacaagaggcgcttatccgacaaactcacggtggggagactgtgatgcagaatctcaccaaccctcatcatttatccc

SEQ ID NO: 181540 - DNA, 566 bp, Zea mays
  Clone ID: MRT4577_97141C.1
aacatgaactgcacaacgtggaagagccatctatgggtctttgttaatgcgctcattgacaatccggcttttgattcacaaaccaaggagaccttgaccactcgtcagggaagctttgggtcaaagtgtgagctttctagtgatttcctcaagaaagttgagaaatctggtgtaatcgataatgtcctctcttgggctgatttcaaacttagcaaagaattaaagaagactgatggaagcaagaagtcaagaatttctggcatccctaagcttgaggatgcaaatgaagctggtgggaaggactctcacaagtgcaccttgattctgactgagggtgactctgcaaaagctcttgctatgtcgggcatagctgttgtagggagagattactatggtgtatttcctctcaggggaaaactattgaatgtcagagaggcaaaccacaagcagataatggacaacgctgaaattcagaacataaagcaaatccttggtttgcagcatggaaagcagtatgatagcaccaaaggtttgagatatggtcatctcatgataatgacagatca

SEQ ID NO: 181541 - DNA, 467 bp, Zea mays
  Clone ID: MRT4577_97142C.1
gatttatgtgcttgtgttctcgaaagcctggagttgttggtttccctgttctttctcttgttctttgcgtttaaggttaacagcccctaagcggtaacggtggattaggtcaattaatttatcgcttcctacaagtctggcggttagccttattcgtgtctgactactctcgaaggcgcatgggtttgcaatacacgtttactcgctctactccacgaaaggagacccgttataaggaatcatacgatttagagttcccggggtttcctaacgctcgccagtggcggtactaacgctttagcgacgtagattttgtctcgcgtcaacgtcttcgtcgagaaaggaggtaagaatcctacgaccgaccctacgacgggtggcgccctagtcgtcggcctaaagatcgtcgtcgtctttactgagtgcgcgaagtcgtccacctagaattaagacgagacgaccaagct

SEQ ID NO: 181542 - DNA, 513 bp, Zea mays
  unsure (1)..(513): unsure at all n locations
  Clone ID: MRT4577_97143C.1
tcgcccacgctgtcctggttgtgatatgatacctattatcttacaaaccagctgtggttgaatgtctcgctgggtcanntggctatgttgatacccaatcttgtcagaccgaagggagcctcttattgagtcttagtctattgggccattgaagccatccgagtaaggtctctaacaatgaaattctggagaattcatctttgtagaccaaatatgtaggtgggtccttcgtaatggtcatctcttatgtctgtttgtcaccaactcactcatcgtcgtgtgttcaatttaacttctgagtagataaccacgaatcgccagcaatgccttacgattcaacaagttgcatgcttcatacactcatgcgatcgccactcagcctggccaactcgtttcaagttgatgagttcgtgcccatgtcagtacgaatcaaattggtttttagtgccacgattatgaattgggaattactcttgttttctatttcgaagttctaatgatgaaatcaattgc

SEQ ID NO: 181543 - DNA, 270 bp, Zea mays
  unsure (1)..(270): unsure at all n locations
  Clone ID: MRT4577_97144C.1
accntncnggacggtgggcgccggaagcagcttgaggacggagcacacttgctgactacaacatncataagagtaacccttcattggtgctgtccttagggaggcatgcaaacttttnaagggggggggggtaagaaanacccttgagtgtattccttatacaccattgacaatgtcaaggtaaatatcatacaatgatgtattccacctgatagcaacttttaattttcctttagcatttgaggattttagacccttgctgatacaaca

SEQ ID NO: 181544 - DNA, 351 bp, Zea mays
  unsure (1)..(351): unsure at all n locations
  Clone ID: MRT4577_97145C.1
tttttcaacaactgcgaacagctgcatcctagctaatgggggctttttttgtgctgtgagcagcctactgttcaagatgatgttttcccttcttctgagaacaccactagatgggtggttcattaaaaataataaaatcacacgactatttttactatagagtactcctacgccgcaaaaaaaaaaaaaaaaaaaaaaaaaataataattaaaaaaaattatataataaaaaatatataattttttttattgtttataatataattttattattttaaatatanggggggggcggctttttaagatcaaaaatttttttcccctcgttgagaggaaaaaattttttttttt

SEQ ID NO: 181545 - DNA, 505 bp, Zea mays
  Clone ID: MRT4577_97146C.1
ggggcattgtatgagaatggattttaagcttatttttcttatcgttcaaaccagaacattcacattctacataggcaacaaaaagttacagcttagctatgaagtacatcgatcctgtcaaacgggaaggtttggtgtattagatactgatcctaggccgctatttagaaacaaagattaatttaagcagaaaattaaaaaaaaactttgggtttttatggaactgattgataccacctgcgctttacttcagttttcgaccgaacctccctgagcctcccatcggttccatagtctctctccatcaccaggttgataccttcttcggagtaccacccaactccgatacagagtatgccgtcttcgcttatgtcaacataggcagtacgccaccaggtaaccaaagcacgacatcctgcacgtgcatcctccccaaagaaaactgaactaggcagtttctacctctcgacaagtagaccaatgggccggctaccttcttcggagg

SEQ ID NO: 181546 - DNA, 421 bp, Zea mays
  Clone ID: MRT4577_97147C.1
ttttggtttcgatacaactatattccaaaacaggggcgggatatctaatagggcaatgacacttgggccctatttatcaacccagcaaactttttgctgggctgcgctggtccgccgagaacatcaacactatcacgggccatacataagcgatgacgggtggaggacactacgaagaacccgtgtaagaaggggatacctaacaaatccgtggacgctgcaggctgctcaattgctggtgaacttggtgacggccttggttccctcggagacagcatgtttgcggagctctcctgggaggaccatgcgcacggaggtctggatctcgcgggaggtgatggtgggcttcttgctgtacctggcagagctggaggactcggcgcgcagctttttgaatatgtcgttgatgaacgagttcatg

SEQ ID NO: 181547 - DNA, 339 bp, Zea mays
  Clone ID: MRT4577_97148C.1
gcaggagattaacatgggactcagtagctagggtgttgttagctgtaaaaagtcatgtgacgcaacgcaagagcagcggagcgtgttcctcatcttgtgtatcccccctctccatttttctttggtggtctaacttactaggaggctgtattgatccatcatcatctctcccgttcctcttccttatgatcttgtgactttcgcggtcctctgtattgatccgtgaacttttgtgacctctgctttgttttctgggatctttacctcagaaaaaaaaaagaaacaacaaacaaggctaaaaacaaaacaagaggccgatagcaaacaaatacgggcggg

SEQ ID NO: 181548 - DNA, 144 bp, Zea mays
  Clone ID: MRT4577_97149C.1
tagcctacctggatgcaaagcttatcatctggcaactcagaagtggtagtcgaaacgaagttaagcatgggcaatataaggtcttgatcggagttactcatattccagagcttaataccctcaaagctatagaagatggcatac

SEQ ID NO: 181549 - DNA, 365 bp, Zea mays
  Clone ID: MRT4577_9714C.1
ctcctccccgctcgagaccatcgcggagagaaaccccaaacccccaatcttgtcgactccaacgatgccgccgccgccgacgagcgccccgcattctctcgctgctgacgatttccacacctcggacacggctgccgccgcggccggggctgtggtgccatgcgcggcgtcccagccggggaccaacggcggcaagaagcctgcgttcgcgttcgggcgggtgtggtcggaggcggacgaagttcgcatcctcgagggcctcgcggcgtacgccgcggcccacggcgcagaaccgcgccggtcccagctccacgccgcgctcggcggctgcggactggacaagtccgagttcaccgtcacggaga

SEQ ID NO: 181550 - DNA, 1224 bp, Zea mays
  Clone ID: MRT4577_97150C.1
tgtccggggaggggagtccgtgatgagtgatgaccctaccagaaatcgacccgatacggctccagcgccagatcgtccatcaatagcccgaatcacactcatcacaagcctcaaacttttccaaaccaatttagatgcggcgtgagtgctaaagcgctctctggactctgtttcgcagtggccgcagctgcagcgtcccttccctttttgccatccagcatcacctgtgccgccggcgcgtaattgcaccgcggtcactggttagtaggaagaagggaaggaggaggggggagcggtgtcggggtatcgtctcgtgcccatgggcgtgcacgccaggtcgatgagctggtacatggggtcgccggcgccggggagcgccgccgagggcgaggggcagcgcgcgctgagaagcagctccggtggcagcgacggcagcttcgacaccaacatggtcatcatcctcgccgcgctgctgttcgcgctcctcttcgcgatgggcctcaactcgctcgcgcgctgcctcatccgctgggcacgccgcgcgccggccggggaggacggcggcgccggcgggctaaagaagcgcgcgctccggagcatccccgtcgaggtgtacggcgcgtgcggcgccgacggggcggcggctgtcgccgccgacgtctgcgccatctgcctcggcgagttcgcggacggcgagaaggtgcgcgtgctgccgcgctgcgcccacggcttccacgtccgctgcgtcgacacctggctcctgtcgcacgactcctgccccacgtgccggggctccgtgctcgacggcgcaaaggccgccgcctctgctcccgccgccgggggcaaccggcggcagggaagcgaggctgctgccatcgcaattgtcattggatgacgtggacgtgtgggggcccgcgtgcccactggtggtggagccacacggtatgcgagactagcttcgttccgtggtagtgagatattttgctgtgatgagaagccgacgagtcgcggcggcccatctctcagtcaagactacagcatggccttcaggatattatcccttcggtctgtacttgtgcatggtcgtcgcagctgatcctgtttgtgtatactaggagtggatgacggggtatgccgctataggcttgcaataatacagttttgtttgtacgctggcccacttgcctagttgaacgctacatgcttggagtgtactgctcgcta

SEQ ID NO: 181551 - DNA, 264 bp, Zea mays
  unsure (1)..(264): unsure at all n locations
  Clone ID: MRT4577_97151C.1
ggccgcagattntnntttttttttgttgggttgcttgccatagtgttttgatccggctgcgggcgtctggttgtagatctatcacgggttctgaacccgactgcggcctggggcgactgccgacagtggggggccctcgcaccctactcggactcctccgccgggggctccacccggtgcggggcggggggggcggcctcgccggcgggcacgggggcggtcatggtgggggtggtcctggnggtgtcggtcgggggggttatt

SEQ ID NO: 181552 - DNA, 372 bp, Zea mays
  Clone ID: MRT4577_97152C.1
atcggatcctgaccacgcccgcctttcattttaccaccaccaccaccaccaccaccgagaaattcccaatggggaggggcatagacattgcattcttatttcttgactctaacgcaagcattaaccaccacattgatttattagatatttcagaagctattctgcacgtgcatttcctttcctgttgtggcatttggtaggtacttactttgcacttgttcaagcctctgattaaagagactcaacaggacacgcttgttgaacatgcacattaacatttggtccaccagagtagagatgaaccactctcattttgtccaaaatccaaaccttgtcgtgaaaaaaagaggagggacacgctgaatgacaggt

SEQ ID NO: 181553 - DNA, 204 bp, Zea mays
  Clone ID: MRT4577_97153C.1
ccacgcgtccgggctctctagcagatggccaccacgggcgtcagggggcgctgtaccagatggtggcttcagccctgccataggacagactttccacccgtaactggcggtgctttgccatccatttgcgccgcatgaacggtaaccggccgtgcccggagggccctgatctggaggcgcacggaataccccaagccaccgggt

SEQ ID NO: 181554 - DNA, 132 bp, Zea mays
  Clone ID: MRT4577_97154C.1
atgacgaccgataggccacttgagttactccacatggatctattcggcccgatcgcttacataagcatcggcgggagaaaaatctcaaacccaagagaccctaaagagattcttgagatgagctcaaaatga

SEQ ID NO: 181555 - DNA, 526 bp, Zea mays
  Clone ID: MRT4577_97155C.1
tctcggcgccttattccctttttttttgttagccaccgcacagatacactggatttagtggaccggatgatgcaggatacatattcttcactcttaagtaggaagcaagctccaatctaaacgtacagagcacacttccaactgggccctttgtttatacacagtgtacacttatcagaccacaccgcatgatttgttcgtgtccataacagcgatacaaccataatatgcaacccgcatccttttcttagaagcagaaagcgacatacacacacataacatccaccatgcaaaaaaatctttgaactctacaatagatgcaatccctattctcttcttgctcgaatcatcacctacacacagcactttcagtggcatcaatagaaccagtcacccgaacttttaaatacttgccaaccccgccaccagtacttgttgaaccagcaacaccacttcctgggttggtataccatgatcccaccttatcataatccctatcctttttcttttactaccttggcctttc

SEQ ID NO: 181556 - DNA, 520 bp, Zea mays
  Clone ID: MRT4577_97156C.1
ctaacaaaatggcacaaaaatttagccgtacacaagtgccccttcacaaaccttcacggagagaagccaacgaagggaaggcgagaacatcctgggaccggaacagacgacccgaggaccatgctgcaggaggatgggtgagatccagactgatgagggaatgaagctccaaaccaactatgaagatggaggcggaagacatgcctagagagcctgctgctggatctgatgagactatagcagagctgcctccagcggttggaaagggagcacaagaaaaagaggaaaagcccgattctatggaaactgaggcataggatgagccgccaaaaaagaaaggtaacaaaactactgaagcaggccatgaggtgagctatggggccctggctgaacctgacctgcagaaggctgtagagaaagtgtatgatatggctactactagacagagggagggagatgaaacataggagaagaagatgagctggtgaggcttatactgatgacatgcgtaacaagctat

SEQ ID NO: 181557 - DNA, 868 bp, Zea mays
  unsure (1)..(868): unsure at all n locations
  Clone ID: MRT4577_97157C.1
ttgggtacctcgaggccggccgggatttgtgctgccaatcacagaaaatgaaactcaaaccatatactactanttttcgagaaaagtaaacaaaaccattggaagcgaaagcatggcacgatcggactgtctgagccatggattactgttgagctattggcgtgaacagggtcaggctaggtgtgctagcggccatcaagtggcggtccattcctgaatgatactgctggtacggtcgcacgactcacggtctactccactcgagtttgcgcttgtcaaggttcagtccaatcggtctctatcctttagcttggtagtggtggtagcccatcgagtcttcagccgatatgatcagatagagcttttcatgcgttcagttcagactcgaccctccggtcgagagggaatgaaagccgtcgtgtattaccaatcggtatctatccgtttagatgatggtagagtggtagtggtagcccatcgagtcatcagccgatatgatcagagagagcttttcatgagtccagttcagactcgacgctccgaccgagagggaaagccgtcgtgtattatcaaatacaccagtcagtggccgccagtgctgtagccattttttttgctcaggcagtcaggcaaaatctttttctttttcccccttcaattgcagcctcccctccaacggctccactttgctctttagctagagggtgactgaactttctggtgtcgctgaagtcaggtttcgtctgttttcttgttcgtcactgctgcaggtgaacaacgcagccgtgtcgtttaacgagatcgacaccaactccgtggagcacgccgaagctgtcctcaggaccaacttctacgggggccagatgct

SEQ ID NO: 181558 - DNA, 785 bp, Zea mays
  unsure (1)..(785): unsure at all n locations
  Clone ID: MRT4577_97158C.1
gatacagctccccccatccaaaacccaccgaagtaaaaccgacgagacaaggaccaaacaccaaaatgctctcatccaccgctctccggccgctgtcgccggcgacggcaacgacgcccgcgtacccagccaccgctactgctactgctaccgccaccgtcacctcggccacgcccgggcgacgctcggttgcggtgcgcgtgctgcgggactacggctcgatcccgaagcgggagcccttcagctccagccgcagcatcctcgacgagttcttcaagcaggagaagcctctcgtccagcgcaccaaggaccacatcacagattattgcacgacccttgagggtgatgattgctgcagctgctgggatgcctattttgaactcaacaaactcgagcaagagctaccgcaagaagaaatttcaaggatggtgaaggactcgcggtcagacccgaggtaccttataagcagcatccaccaccggtcagacctacggaagaagatggccgagaaagctcacaattcggcgccatcaaactccccggggcaaacagcgaagccgaggcctttccccgtccccgacgggctgccgaaaacgcaggaagagatcgacgaggatgaggaggccctcatgccggagtctccttacacgaggctgctcagagnggatgnnggaggtttcccgactggtatacccctcgcccagaccatgagaccgactgaatcacgccatgaaccagccttgccttccagatgtacagcctgaagctctgttctcctggcatcg

SEQ ID NO: 181559 - DNA, 463 bp, Zea mays
  Clone ID: MRT4577_97159C.1
tgtgcggcgctcaggcgtacgtctgcaggtaccgctctgcgctgctcgggttactactagtctactaccttttttccgtctcgagaggacccggaattgctctgcttttctgtcctcggttggggtttctgctcgtcgtcgtcgtcccaggaggagcttctctgtcgtattggtggccggagtagagcaccatctgcagcgccgacggccgagatggttgtgcatctggctctggtttgggttgcagtctcgcgaggttcgatgcagttttgctaggcgacagttgctggtacctgctagtagtatatagaggagcttaattggaaggaagcagtactggaggaaacgatgagcttcggtactgtggggcatggaggaggagagcggcgccgcggcggcggccgcagcgacgaaggagatccggcccacgctcgcgagcaccgtgcgcgggctgctcagggag

SEQ ID NO: 181560 - DNA, 1075 bp, Zea mays
  Clone ID: MRT4577_9715C.1
caggaacaagccccccggacccgcgcgccgtccgcccagggtccctctggaccaagatgaatacgacggcggctatgatgaccgggaggaggggaggttcgctgggggcacccgggccgccgccatgcccaagccaccggccggcttcgtgctggatgaccagggcaggtgcatcgccgcagcatccaagcgcatcgtcaccatcatcgacgacaccaacaaccgcccattggagtgcataatcaggagagtattccggagctcacaggaccacgactgcatgcttctctgcccagttgacatgcctgtgcaggtcctcaagagcacaaatttcagtggctgggtagctgtcgatgacgaccaactcacgcgaatcagtcaatctgttgcctatgcccttgccagagtacatatgcactttgtagaaagcggattctgttatacagcaaggggtggcttctgctttcctgaagaggccattcaagagtttcatgattccggtgaaggtgtgccttttgaaggtgtagagatttgctgcttcaatttggatggtgcacactatatgatttatacaccagttgatcctcttctttttgtcgcaatcaaggataaggatggtgtgctacgcatcgctgaggatgatctgatggaagaccctgcagttctggatgcggtagatgaagagacagaatttacagctctagtggaggaggaggaggcccttcttgaaacggtacttggtgaaaggtgatggatgccagggagtacttgtacaggaagaggaagagagactcgtctgattgtagtagaatagaatggaatggaatggaatggagtgcatttgcaactgtaagcagctgcaacctgcaatacttggagtggagtgatggacaacgcagttgataagcaactgctgctgctaatctttgtctagtgtaggatagatagctcaatgggacgatcaaagctatttatgatgtgctcatgtgtttgaattaattaataaaattaccccaatctgaatagaaccccctggtggatggaaggattgtttttaaaaaaaaaaaaaaaaaaa

SEQ ID NO: 181561 - DNA, 364 bp, Zea mays
  Clone ID: MRT4577_97160C.1
aaacaagccagttgtgtgtcaaagaggggcaggaaaaaggatgaaactgggagtggtggctcttccatcaagaggaagaagcgagagaatacctcttctgctgctacaattagcactagtataccaatcactcctgctattcctatcaggcaagtgaaagaagaagatatgagaaccctaatgaaggcgggaagtggtccaaggggcatagaagtagatgttcagaacgagaagggcaaaccatcacctttggaagttcctatttcagctgcagatcctgaagtagtggaatcaggacatgaagaggcccaagcaaatgttctggctgtgggcaatatgtttcctgaacaatccgcagaagaaa

SEQ ID NO: 181562 - DNA, 595 bp, Zea mays
  Clone ID: MRT4577_97161C.1
ctagggtttttgattttagcacgacgccgttgctcactcaatgcctgcgagaagagcctgctcctctccgatcgatacgatggccgtcttctccgacctgcacaccgacgacgggcttaagtccctggaggctcacctagccgggaaaacctatgtgtctggtgactccattactaaagatgacattgaggtcttcgtcgcggtgccttcgaagactgacgctgactttcctaatgccgtccgctggtacgagaccgactctgcggctgtaccctcaagattccctggaaaggctgttggagtaaatctgcctgcgggatcagctcctgcggcagctgctcctgctgatgaggctgacgatgatgatgaccctgatctttttggtgatgagactgaggacgacattgaggcacctgatgagcgtgctgccgcttgcaaagcctcttctaaaaagaaagaaagaggtaaatcctccgtccttatggatgtaaaaccatgggacgatgagactgatatgaagaagctgggggatgctgttcgcagtgtccagatggagggtctgacttggggagcattaaaacttgtgcctgttgga

SEQ ID NO: 181563 - DNA, 803 bp, Zea mays
  unsure (1)..(803): unsure at all n locations
  Clone ID: MRT4577_97162C.1
ccggccgggacgccacgccacgccacgcctctctcctctcctctcctctcctctcctcctcccatctcatcatctcatggccgcctcgcgcgtcggcgacccggcggagtcctcgcgcctgcgtatcggcgacgagatcgcgtggtccgagatcagcggcgtctacgaccgcgacgactcgctcaaggagaacaccaaccccaagtgcctcctcaagaaccaccccggcggaggcggaggcggaggcggccaggccaacggctcctcgcagcggttctctggcaacctcaagccgacggcggcgcccatcatcggcctctccggcaagctcggccagggcggcgcgcggcggcaccacccgcctgccatcttccccaagaaggccaagaccggcggcggcgggcgcgcgcccagggccgccgtcccggagcccagctcgcctaaggtgtcctgcatcggcaaggtgctctcggaccgcgagcgcgggcgcctgggccgcccgccgcggcctcgcggcgccgcgggcgggtgctgcggaggcctagcgttcttgatgcggcggagcaggtccaggaacagcgtcgagtgcgtcgaccagtctcctcctcctccgccgccgcccctggncgaggcgtccaggcggagggagaagagggagtcggcgcaggaggcggaggctgagccggcgccggggctgggcggcatgcggcggttcgcgtccgggcggcgggctgcggagtgggcggccgaggtggacggcgacggacgcgtcgcgacgtctgggccgttgtancgcgtgcgca

SEQ ID NO: 181564 - DNA, 386 bp, Zea mays
  Clone ID: MRT4577_97163C.1
gctacgcgtgcatggtcgcgtacggcaatgccacctgcttcctcttcatcgtgaaccacagcactgcgctgtagctccgcatcgtcatgcaaggtcaaggcgccgccggtcatccagtgcacatgcatggttagcggcacctgcactgactccgtgcaacgagctagctgcggcacctgaagaggcagatgccgacgcgcctgcagatgccgcttcagcagatggagcctaaagctctacagactcaaataatgcagctagctcactgctcttcatatgctcattgcttgctgcctgctaactagtggtgatacaactattgttgccatgttactaatcagtaatgatgcatctcccttggtcatgactatgtacttacctatgat

SEQ ID NO: 181565 - DNA, 845 bp, Zea mays
  Clone ID: MRT4577_97164C.1
ccggccgggctccctctgcctctgcctgcctcgctccattgtgtgtctgtaaaacccccccgagactggcaccatcaccacatctctcttctctcctctcccggccctctctccctctctgcccctctccgctcccctcaacccacccttgttccttttccatctgtcccgtcggccgttccgcaccgaccacctctctcacccccgccacttccgtagtcgcctcctgacctcccttctcccccgtctctctccctcctcatccccttctcccccctctcacgtcctaccgccgtccttgcgacttaccctcttcgccccactttctcacggccatcccgcaacatgtccaccgaagagccccagctcggtcccggccaagacgccactcgtgttgccgatcaactcgaccgcctcaacatggacggcgagggtgaagtggtcccacgcaccgaagaggagtatgccgaggcgcagctcaccttgcgagccattgtttcgtccaaggaagccggtgtcatcataggcaaggctggcaagaatgtcgccgacctacgcgatgagactggtgtccgcgccggtgtcagtaaggtagttcaaggcgtccacgaccgcgtcctctccgtcacgggcagtctctctggcatatcaaaggcatatggtttggctgccaagggcctgctcgagggcgcacctgccatgggcatgggcggcgttattcgcactgacggcactcatcctatccgcctcctcatctcccacaaccagatgggcaccattaattggtcgtcagggtctgaagatcaagcagatccaagatgcctctggtgtccgcatggttgctc

SEQ ID NO: 181566 - DNA, 242 bp, Zea mays
  Clone ID: MRT4577_97165C.1
cttgttatttgtttttggtgtacgagttcaaggtgcggcggacctcagaacacctaaatgagcctcagcattgacaggaaatacaatgtctatttcctgaccgacctggggaacgaacctagggggcaatatttgtcgggagtgaaaaaaaaatactcttttttgaatcgaggcctgcccaatatttcgcgctagctggaaaacaataaatctatgtgcatggtcccagcggggctataaat

SEQ ID NO: 181567 - DNA, 413 bp, Zea mays
  unsure (1)..(413): unsure at all n locations
  Clone ID: MRT4577_97166C.1
tttgttttacctccgcaagctggcggcgaacctgatcccgttcccgccgatgcacttataaatggcggggtacgcccaccagcccgcccctgtcttgtagattgcctggcgcatacagcgccggagatgacccagaagacgcgctatgccaataacaacacgtgcacgacggacccgtgccaccagctgcaccagacagcgcgcgccatctctggtggaatgactagtaccaaggaggtggaccagcagaccatcaacctgcagaacaagaacttcttctactnccggaccggaccacaactatcgtaagtgcagcttgtgctacaaagcgccgtgacggggccaacaaatctactctaggggtcaaccgcacactgaaggcatgagatgcctcgacttgcgagctagcattt

SEQ ID NO: 181568 - DNA, 330 bp, Zea mays
  Clone ID: MRT4577_97167C.1
ggtttgtttttttaaaaagaacataccattctacaccaaatgacaaaaggaaataccaacccatacattagcattagcatgtacacaaagcacacatgccaaaggcccatgcatgcaaaatgatccaaaacagacaggggccggagaacaaactgcaccaaggcctacacctatgggctaggccgtcacgggagacaggacatgccgacactgacaaagccggcctatgccgaggcccgaatgccgggggcgaccccctctatggccaggaacagggtgccctccaggcgtggagcgaagtcgctgtgcttgggcacctgcagcaggtgc

SEQ ID NO: 181569 - DNA, 394 bp, Zea mays
  unsure (1)..(394): unsure at all n locations
  Clone ID: MRT4577_97168C.1
ctttgactcgagttgcaaggaataaggtgataaagatgtgcaaagtgcaattgagtcaccatggagaagatgaagcaaagtggtaaagagaagaagagcttcacatagattttccccatcttttccctagaccttctataatctcgaggacgagattatttttaaggggggtaggatttgtaacacccactttgtaattgctaggaataataccagtagaggaacaatttctctttatgtgagtttgatctttatgcatcatcttatgtgaacatcatgcccaaaaacaattaataaaaacatatactaccaaattatgcatcatgctcgattntattctgtgtgcattttgtgataacatataataatgtgaaaaatgttaaatatccaaatg

SEQ ID NO: 181570 - DNA, 371 bp, Zea mays
  unsure (1)..(371): unsure at all n locations
  Clone ID: MRT4577_97169C.1
ctctccttcacatcttctgcttcctccacgtaggtgcacagctgtgtttatcgccttacataggtgctgtgttcacaaatcacaggcaagcactcaggttcccggaaagaaaaatcccaccggctacttgtttatttcggtgctcgactctcggcctcgtccgggcagcatctccctagatcagttcgcaccactaatcgcgagccggcttcctgctgcggtcgacggcgtcgtcttcagcctccggacactgaagtattgcacgtcagctccccctatcctcaacacacttgtcgctgctgctcttnctcgagcttccaccttgccgcatccgcataggtctggccgntccaaatcagcgcgttctcaca

SEQ ID NO: 181571 - DNA, 849 bp, Zea mays
  unsure (1)..(849): unsure at all n locations
  Clone ID: MRT4577_9716C.1
accaaaaagaattatggcggcagccgttgccgttcttcgcgccgccctccgccggggccgtccggcagctgcgtcgctactgcaccgccttcccaacccctctgctcggagcctcccgccaccgcctcctctcggtcgagcgcttcgtcccctctcgcggcttggtttctccgccggattcgggcactcctcctccaccgaggattttggcttcggctactcccccgccaccgaggattcagcggccgccgcgaagcccaagaccaagaccaaggccaggaagcaccccatgaagcagtcgcgcttcgacttcaccaaggtggacgccgcgcttctccccaccgtcatcctcgtcggccgccccaacgtcggcaagtcagccctcttcaacagatttatacggaggagggaggcgttggtgtacaatactcctggggaccatgtcactcgtgacatccgtgaaggagttgccaagcttggggatctccgtttccgtgtgcttgactcagctggacttgagactgcagcaacatctgggagcattctcgctcggacagcagacatgacagggaatgtattggctaggtctcaatttgccattttcttgattgatgtgagggatggtcttcagccgctggatcttgaggttgngcaatggctgcgcaagcatgcatctggtatacatacgcttgttgcgatgaacaagtccgagtcacttgatgagcatggatttctgactgctgctgctggagaacacacaagnntgnggtttggtgaccctggttgcatatccgcagagacggcnctggggatggcagaactctatgagatactcaggccattgtttga

SEQ ID NO: 181572 - DNA, 298 bp, Zea mays
  unsure (1)..(298): unsure at all n locations
  Clone ID: MRT4577_97170C.1
cgccccgcgtccgcggncgcgtgggcggacgcgtgggcggacgcgtgggtggaggcgtgggccatgctggcgtggtgtctgtccattaccggtgcctacaaaaggtgtacagaaagagactagaccaaacaagaatcacgctgggctaaggttgatggtgatgttaataaccatgtgtttcctattggacacgacatcttattatcttcttctggggccctcttgacttccgttggtggggggggtgggtgctctctttttgctcttcttttgtgtantgtggccgttgggggggggg

SEQ ID NO: 181573 - DNA, 664 bp, Zea mays
  Clone ID: MRT4577_97171C.1
actacgtaccacactagtactaggtgccagtccaacccggtcttcctcatccatccgtaagtattgagcattccaaggaggagcgaggaaagatacagattagagagtggcatccggctggccggccatggagggcggcgctcacgggttcgacggctcggccttcagggagtgcttctccctctcctggcggaacccctacgtcctccgcctcgccttctccgccggcatcggcggcctcctcttcggctacgacaccggtgtcatttcaggggcactgctttacatccgcgacgatttccgctccgtcgacaagaacacatggcttcaggaaatgatcgtgagcatggcggtggccggcgccatcatcggcgcggcggtcggcggctgggccaacgacaggttcgggcggcggacgtccatcctcgtggccgacctgctctttttcgcgggcgcggtggtcatggcttcggcgacgggccccgtgcagctcgtggtcggccgcgtcctcgtcggcctaggcgtcggcatggcatccatgacggcgccgctttacatctccgaggcgtcgccggcgaggatccggggcgcgctcgtcagtaccaacggcttcctcatcaccggaggccagctcttgccctaccttaatcacctcgcgttcacc

SEQ ID NO: 181574 - DNA, 540 bp, Zea mays
  Clone ID: MRT4577_97172C.1
cgctactccatgaagatcttctctgagatccgcaagcaaaagtacctcgaggctccttgataggcatgacagagccaaggctgtggagattctcgtgaaggatcttaaggtattcgcctccttcaatgaggagctgttcaaggagataacgcagctgctgaccttggagaatttcaggcttaatgagcttctgtccaagtatggggacacaaagtcagcccggaatatcatgcttttggagctcaaaaagctcattgaagcaaaccctctgttccgggacaagctgaatttcccaccattcaaagcttccagacttcgcacattgatcaatcaaagtctgaactggcaacatcagctttgcaagaaccccagaccaaaccctgacatcaagacactcttcactgatcactcttgtgctgctccgaccaatggagcaagggcacctccaccggccaatggtccacttggatccatccctaagtcagctggatttccaccaatgggtgctcatgctccatttcaacctgtggtgtcgccatc

SEQ ID NO: 181575 - DNA, 138 bp, Zea mays
  Clone ID: MRT4577_97173C.1
gtttttgctccacagccgctttatagaggaaaccaaggaaagaggcgatcgatatggccattgacactccatcgacagcgccaccaacgccacctgagccataaggagctgacggccggatgacgcttgcggcagagg

SEQ ID NO: 181576 - DNA, 335 bp, Zea mays
  Clone ID: MRT4577_97174C.1
aaaaattgcaaggcagcttttcttgggcttataactgatagcccctcccgtcaaatacccatgattttttaaacatgaagattgggctacatggaaaacttttttcttatctaaaatggcatgggaaaagggggggggctaaaaacttgtttcccaacaaacaggaatcatagatcaccccttgcacctttgtttgtaaaaaaaatgccaaacccccttttaggattaagggcccattggaaatatccatgctaatgcatggaaaacaaatcttgaaatatttgaaagcccccgtttcggatttcactctttgagaagggattccctctgctttt

SEQ ID NO: 181577 - DNA, 148 bp, Zea mays
  Clone ID: MRT4577_97175C.1
gtagctcgaacttccacgccccccctcctttccaggtcccctcgcccggtgtctcgtatctcgcgcgcctcatgcaagtcgttgtggatgccgctccagcagttgttggcagaagtcactgagaacatgttgtgtggcaagaaagtta

SEQ ID NO: 181578 - DNA, 335 bp, Zea mays
  Clone ID: MRT4577_97176C.1
cgggtttttttatccgtctcctttatttaagattattggtaggaatatatatacctcccaatggggatgaggtactatgtgccacatggacatggggtctaggtgaaggagcaagaagggtacggagaaatggagtacagagaaagtgcccattgctgttgcctcaattagaggtgatgaacacagtccatgctcaccactttagagcctgttcgtttatggattgtgtcagattgagcttagagtggattttaatctcaagcaagtcgaaattctctctattttttctcaatcccatccaaaccatatggaataagaataaccgttttgttagc

SEQ ID NO: 181579 - DNA, 1848 bp, Zea mays
  Clone ID: MRT4577_97177C.1
tttttttttttttttttttttttttttttaaaactcaataaaacgctagagcaaccactgacatgcttctcaaatccagtgaataataccagtccacacggacttaatgccaactagcggcaacacaaagcaatggggaactaattcgaacactaccagcctactaatataaaaaaagaagtgagggaacaggaaatcagctacaataatagcacggcacagcttcagcttcgacagcatagagcatctaaaacaatgggctcgaacaatatgcgctctcccaagattactgtccgtcaccagcctcacctttcggggcttctttgccctcatcagcaccatcctccgtgaggtcagaggtccaaagggtcaagttgtccctaaggagctgcatgatcagagtgctatctttgtatgactcctccccaagggtgtctaactgggagatagcttcatcaaacgcctgctttgcaaggttgcaagctttgtctggggagttcagaatctcataatagaacactgagaagttaagagcaagcccaagccttatcggatgggtaggtgccagctcagccagcgcaatgtcctgagcagccttgtaggccatcatcgtgctctcagcagattccttcctctcaggaccagtcttaaattccgcaagatacctgtgatagtcacccttcatcttgaggtagaagacctttgattcagcagcagtagaagaaggcactaggtgggagtcaagcagcttcaggatgccatcacagatattgctcagttcagcctcgatcttcgcacggtattccttgataaggttcacatgctcttcgttcttacgggactcctccttctttcggcctgctcagccagcttggccatgtagacattctcctccctcgccatatcgataatatcgataaaagaacaaacttactcctggcgcggggggagaatgtctacatggccaagctggctgagcaggccgaaagaaggaggagtcccgtaagaacgaagagcatgtgaaccttatcaaggaataccgtgcgaagatcgaggctgaactgagcaatatctgtgatggcatcctgaagctgcttgactcccacctagtgccttcttttactgctgctgaatcaaaggtcttctacctcaagatgaagggtgactatcacaggtatcttgcggaatttaagactggtcctgagaggaaggaatctgctgagagcacgatgatggcctacaaggctgctcaggacattgcgctggctgagctggcacctacccatccgataaggcttgggcttgctcttaacttctcagtgttctattatgagattctgaactccccagacaaagcttgcaaccttgcaaagcaggcgtttgatgaagctatctcccagttagacacccttggggaggagtcatacaaagatagcactctgatcatgcagctccttagggacaacttgaccctttggacctctgacctcacggaggatggtgctgatgagggcaaagaagccccgaaaggtgaggctggtgacggacagtaatcttgggagagcgcatattgttcgagcccattgttttagatgctctatgctgtcgaagctgaagctgtgccgtgctattattgtagctgatttcctgttccctcacttctttttttatattagtaggctggtagtgttcgaattagttccccattgctttgtgttgccgctagttggcattaagtccgtgtggactggtattattcactggatttgagaagcatgtcagtggttgctctagcgttttattgagttttgaagtcatctccctcaaaaaaaaaaaaaaaaaactcga

SEQ ID NO: 181580 - DNA, 789 bp, Zea mays
  Clone ID: MRT4577_97178C.1
aagaggagtctcgtaagacgaaaagctgtgaaccttatcaaggaataccgtgggaagattgaggctgaactgagcaacatctgtgatggtatcctgaagctacttgactcccacctagtgccttcttctactgctgccgaatcaaaggtcttctacctcaagatgaagggtgactatcacaggtatcttgcggaatttaagactggtgctgagaggaaggaatctgctgagagcacgatggtagcctacaaggctgctcaggacattgctctggctgagctggcaccaacccatccgataaggcttgggcttgctcttaacttctcggtgttctattatgagattctgaactccccagacaaagcttgcaaccttgcaaagcaggcgtttgatgaagccatctctgagttggatacccttggggaggagtcatacaaagatagcactctgatcatgcagctcctgagggacaacttgaccctttggacctctgacctcacggaggacggtgctgatgagtgcaaagaagcctcgaaaggcgatgctggcgagggacagtaatcttcggacagggcatgttgtctgagcccattgttttagatgctctatgctgtcgaagctgtgccgtgccattattgtagctgatttcctctccccctcactttttctaggctggtagtagttccccattgctttgtgttgcagctagttgggcactaggtccctgtggactggtattgttcccctggatttgacaagcatgtctgtggttgctctagcgttttattg

SEQ ID NO: 181581 - DNA, 383 bp, Zea mays
  unsure (1)..(383): unsure at all n locations
  Clone ID: MRT4577_97179C.1
cgcacgcgtccgcccacgcgtccgcatatctcgaacccagtaaatcaccagcgtacgaagcacattgagatcgatctacacttcgtccgtgagcgtgttgcggtcggtgctgttcgagtattgcatgttcctactgcctctcagtatgctgatatcttcaccaagggattgccttcatcggtgttcacaaaattcaggtctagtctgaacattcttccaggtggctgaccacgttcagactgcgggggggggggtgttggattactatatttagattgatcatcttccttgttttagtattgcatgtcaccattattgtatacgtgcatggcacggngatcaccttccatctctagtgcatggctatacttaaggtctgtttg

SEQ ID NO: 181582 - DNA, 339 bp, Zea mays
  Clone ID: MRT4577_9717C.1
gccgagctacacgaggagaacacgctgttgactgcgcactcgcacaacaacctgcaggagggacgctaagaggcatagttgacggtgacatgcaccacaggacctgaggacagtagcgtctgggaaccaacgaacacgacaatggggactgcatcagtgacatcatgcatggctacgaactcgacctgagtgccgctgtctagtatgactgtgacgcgtgcacgcactataagttcgacagcctgtagaagatggtcaaccgcactgtccagatgtacttgacggtcgacacgctcagagggctgtacgacctgaggacgacagacctggatgcgctgt

SEQ ID NO: 181583 - DNA, 298 bp, Zea mays
  Clone ID: MRT4577_97180C.1
agagacgacctctcctcctgaggtaagcccccggaccacgacctggcgccagaagcccgcgggatcgccttgccgatctgcttcggggagccgaatccgctcctcaggtgagtctcgcttaagccgcagaaatgctcccctgcaacatgcggcagccgtacggaggctgacgacgcgctggacaccagacgaacaacgagggcaggaccacaggccgcccatgcgtcccggagtccccgcgtcgccggtgcatggacccaccgagccggccatcgagcatcccttaacatgtgtcaag

SEQ ID NO: 181584 - DNA, 446 bp, Zea mays
  unsure (1)..(446): unsure at all n locations
  Clone ID: MRT4577_97183C.1
cgccacagaggcgggggccggacacgccacccaaganggcgcgcgcgcgcacgcacgcacgaagagcagaggcagagaagagaaggccagacgaagagaacgaacgccccaaaggcagaagcagaagcnggccaagaggacggccgggacacagcccggcgagaagggggggggcacgcaagccgacgagaaggcaggcgccagagacaaggcaacaaagcccagaagagcacccaaggcacaaccaggcgctacgacaaccgacaagacnggcacacagacggagaccngcagcaccctccacgaggcgcagcgccagcgctctnaagagcccaaggcgagcgacaggcagacgggagancacgaagggcgggcacaacgggaccacaaacgggcaacggaacctaagatgagggcgaaacagcaccggagacgaccagaggacc

SEQ ID NO: 181585 - DNA, 2110 bp, Zea mays
  unsure (1)..(2110): unsure at all n locations
  Clone ID: MRT4577_97184C.1
tcgaggccggccggggccaccgtccctatccgcagctcccccgcgcccgagatcaaccccgcgccaggagcaaccttgctcttttatccatatgctcgacggacgagaatgtctacatggcccagctgtctgaccaggccgaaagcgtatgaagagatgattcagtatctgcataatcagcctgaaaactagtcatgatgcgtgaaggacctacacgtgttgcagcagacgtagacctcattcccatggctcatacaactagctgtagattagcgggcgtcgctcgatgctctcaccgacagcacttgtcatcttctagttagaacatacaacaggagtcccgtacgaaccaacagcatgtgcaccttatcacggaataccctgcgcaaatcgaggctgaactgcgcaatatctgcgctggcatcctgaagctgcttgactcccacctagagccttcttctactgctgctgaatcatagctcttctacctcaagatgaagggtgactatcacaggtatcttgcggaatttaagactggtcctgagaggaaggaatctgctgacagcaccatgatggcctacaacgctgctcaggacattgcactggctgagctggcacctacccatccgataaggcttgggcttgctcttaacttctcagtgttctattatgagattctgaactccccagacaaagcttgcaaccttgcaaagcaggttggaattacatatacttttctactatatatgttcattttaccatgtttaggcgaggatttgtctgtgcatttgagcttggacagaaatatccataagtgccttttaactgtagcctatatggtccttgtcctaaattgttcagcattcaggagctttttattggttctcatatgacaaacctttgcccttataggtttacattgcgatttgactactagatatcttgatccctgtgtatcagatcagatagtttctgtttaataatgctacttctgaatctctgatatggtgggctgctgatcctccatgtttgcacacatctaaacaggcttgcttctagtagttttgtgccattcagccctgttattgcttgactcgtgcttgttattatgcacctcgctaaaatgaatcttcatgttctattgaattatggacatacttgtaatatctggcacctatatcatcaagatgatggtactgtgttttacagtttgagtatctaactcgattaatttgtggtaactaggagtcatttgagtgggttgtctgatcatttaacttctatattgtgctttagttcttatgccattggaactttgataattgatagtgattggctaatctttgcaggcgtttgatgaagctatctcccagttagacacccttggggaggagtcatacaaagatagcactctgatcatgcagctcctgagggacaacttgaccctttggacctctgacctcacggaggatggtgctgatgagggcaaagaagccccgaaaggtgagggctggtgacggacagntaggggacagtaatcttgggagagcgcatattgttcgagcccattgttttagatgctctatgctgtcgaaagctgaactgtgccgtgctattattgtagctgatttcctgttccctcacttctttttttatattagtaggctggtagtgttcgaattagttccccattgctttgtgttgccgctagttggcattaagtccgtgtggactggtattattcactggatttgagaagcatgtcagtggttgctctaaaaaaaaaaaaaaaaaaaaaaaaaaaaaaaaaaaaaaaaaaaaaaaaaaaaaaaaaaaaaaaaaaaaaaaaaaaaaaaaaaaaaaaaaaaaaaaaaaaaaaaaaaaaaaaaaaaaaaaaaaaaaaaaaaaagggggcgccctttttaaagaaccaaatttaacttccccgggtttgcaacgtaaacttttttttttggggcccccaaaataaaataaagggcccgggttttaaaaacgggggaatgggaaaacccttgggttacccaaaataaaacccttggaaaaaaaccccctttcccccgcttgggttaaaagcaaaaaggcccccccc

SEQ ID NO: 181586 - DNA, 2220 bp, Zea mays
  Clone ID: MRT4577_97185C.1
catggtgatgggtagcaccgtggcaggcaatcatatctatatggtaatccgggactcgaggccggccggtcagcagaggcactagctggaacaaggcaaccagagggagcgcgagccgggccactcccctccgtctctctcgaccatggcgaggctcccgctggccgcctgcgccgtcgccgccgccttctacctgtgcctccaccttgcgtcgtcgtcctcttccgctcctcgtcttgcgcctgccccgagcgaccccggccgccgtgcaggcaggaccgcctaccacttccagccggccaagaactggcagaatgatccgaatgggccgatgtactacaacggcatgtaccatctcttctaccagtacaacccgcacggcgcgctctggggcgttggcaacctctcctggggccactccgtctccggcgacctcgtgaactgggccgctctggacacggcgctggacccgacgtcgcccttcgacgccaacggctgctggtcgggctccgccaccatcctccccggcggcaccccggccatcctctacacgggcatcgacgccaacggggagcaggtgcagaacgtggcgttccccagggacccggcggacccgctccttcgccggtgggacaagcccggctacaaccccgtcatcccgctccccgccgacgtcccgggcgacaagttccgggacccttcgacggcgtggctcggccgcgacgggctgtggcgcgtcgcggtgtccgccgaggtccgcggcgtggcgtccacgctcgtgtaccggagcgcggacttcctccgctgggagcgcgcccccgccgccgcgccgctgcacgcctcgcgcgccgcgggtatggtggagtgcccggacctgttcccggtgagggaggagggtgacgatggcgacggccaagggctcgacgcgtcggcgagcggcgccggggtgcggcacgtgctgaagctcagcgtgatggacacgctccaggattactacatggtggggcggtacgacgacgcggcggacgcgttcgtgccggcggagcccgagcgcggggacgacgtgcgcggctggcggcggctggactacggccacgtgtacgcgtccaagaccttcttcgacgcgcgcgggagccggcgcgtgctgtgggcgtgggccaacgagtccgacagccaggccgacgacgtcgccaagggctggtccggcgttcagacgttcccgcggaagctgtggctggacgaggacgggaagcagctgcggcagtggccggtggaggagatcgaaacgctgcggaggaagcgcgtcgtcctgcgccgcggcacggcgctggccaccggaggcatgaacgagatcgtcggcgtcgcgggctcgcaggcggacgtggaggtcgcgttcaaggtctcgagcctggcgggggccgaggcactggaccccaactggctgctggacccgcagaagctgtgcggggagaagggcgcctcggtgcccggcggcgtcgggccgttcgggctcatcgtgatggcctccagcgacctgcgcgagcacaccgctgtcttcttccgcgcgttcaggtaccatggcaggtacaagcttctcatgtgcactgacctgacaaggtcgtccacgagggcaggcgtgtacaagccgccatacggaggattcgtggacgtcgacgttgaggagcacgagaccatcaatttgagaaccctgattgatcactcggtggtggagagcttcggagctgacgggcggatgtgcatcacggctcgagtgtaccctgagcacgcggagacgagcaacagccacatgttcgtgttcaacaatggcagcggcacggtggaggtgtccaagctcgaggcatgggagctcgcggcggcgaccgtaaattccgttgggggcaacgacagcttggttatgtctgaatctaataaccaaagtgaatcctattaaaatcttcaggttaatgtgtcaaaaatggggtccgtttgatttgattgctatactttgttatggagaggggggaaaggtgtatttcaaataagaaatattggccgattgctgttgagaaattcatattggttgatttggagagcagaataaacaagttctactgatctggcacctctggctagcagcactatcatcggtttgaccatcagccaagagtggagttttgattttcgcgtgatgaaaacatatacttatttggattctttgtt

SEQ ID NO: 181587 - DNA, 528 bp, Zea mays
  Clone ID: MRT4577_97186C.1
cgccgcgcttcatggcgcattgtttcttccattgaacaaaaggaggagtcccgtaagaacgaggagcatgtgaatcttatcaaggaatatcgtggcaagatcgaggctgaactgagcaatatctgtgatggcatcttgaagctgcttgactcccacctagtgccttcttctactgctgctgaatcaaaggtcttctacctgagaataaagggtgcctatcaacgggtttcttgcggaattaaaaactggccctgaaaggaaggattctgttgaaagcacaataatggcctacaaggttgttcaggacattgccctggctgacctggcacctacccatccgataaggcttgggcttgctcttaacttctcagtgttctattatgagattctgaactccccagacaaagcttgcaaccttgcaaagcaggcgtttgatgaagctatctcccagttagacacccttggggaggagtcatacaaagatagcactctgatcatgcagctcctttaggacaacttgaccctttg

SEQ ID NO: 181588 - DNA, 378 bp, Zea mays
  Clone ID: MRT4577_97188C.1
tcccacgcgtccgggagtccatgctccttgttgtctagctcgccgtcagcagctcactctgtacctggtcaaccttgccgtcggtcgagctgaaagaggctgtctccacgatggtgttcgatctttcagcgaacaagcttctcagcttggagccgtcgaggtccaagattctgaggaagagcttcttcgacttcgttcgagggctcatctcgttccctctgtatttgccaggaacagcatactactcatgcatgaagggccggcagagcgcaatggaggtgctgcaggaagtgctagcggagaggaagagactggtacaggtgcccggagcaggaagaggcgccatggaaacgatacgtcgccatggcggcgacttct

SEQ ID NO: 181589 - DNA, 1041 bp, Zea mays
  Clone ID: MRT4577_97189C.1
gccggccggggccccaggcccaccgctagcatccgcagttcccccgcgcccgagacgcaaccccgcgccaggagtaagtttgttcttttatcgatatggcgagggaggagaatgtctacatggccaagctggctgagcaggccgaaaggtatgaagagatggttgagtatatggagaaggtggctaagactgtagatgtggaagagctcactgttgaggagcgtaacctcttgtcggtcgcatacaagaatgtgattggggctcgccgtgcttcatggcgcattgtctcctctattgaacagaaggaggagtcccgtaagaacgaagagcatgtgaaccttatcaaggaataccgtgcgaagatcgaggctgaactgagcaatatctgtgatggcatcctgaagctgcttgactcccacctagtgccttcttctactgcctgaatcaaaggtcttctacctcaagatgaagggtgactatcacaggtatcttgcggaatttaagactggtcctgagaggaaggaatctgctgagagcacgatgatggcctacaaggctgctcaggacattgcgctggctgagctggcacctacccatccgataaggcttgggcttgctcttaacttctcagtgttctattatgagattctgaactccccagacaaagcttgcaaccttgcaaagcaggcgtttgatgaagctatctcccagttagacacccttgggggaggagtcatacaaagatagcactctgatcatgcagctccttagggacaacttgaccctttggacctctgacctcacggaggatggtgctgatgagggcaaagaagccccgaaaggtgaggctggtgacggacagtaatcttgggagagcgcatattgttcgagcccattgttttagatgctctatgctgtcgaagctgaagctgtgccgtgctattattgtagctgatttcctgttccctcattttttttttttatattagtaggctggtaggttcgaattagttccccatgcttgtgtgccgctagtggcat

SEQ ID NO: 181590 - DNA, 227 bp, Zea mays
  Clone ID: MRT4577_9718C.1
cagaaatgggaggctccgacgaccacgcccgcagatagccgaccctgccatggacggtgcgcgtccagcaggctgtgctcgatctggcgcactgccgggacttgagcgtccggcgcctccacatctcctgcggcgatcacaagttaggcactacgttccttccgattgcttcgtgggcatgccctgtggaattcaccatcgacgtcgcccgcggcatgagggcgtgc

SEQ ID NO: 181591 - DNA, 1597 bp, Zea mays
  unsure (1)..(1597): unsure at all n locations
  Clone ID: MRT4577_97191C.1
ccggccggggcgaccttcaggtcagtcgggactacccgnctgagtttaagcatataaataagcggaggagaagaaacttacgaggattcccctagtaaatcctcgcttcaggtctgcagcccccaactacccccagcctcggaaggaaccttccagaagcgcaagactctaagcaatcattaacgagagtgctctggcctctggctagctatctcgtccggtcctgcatcaggtcgtagatatagtggggatagttttgttgttggtctggaaagaagagagggaaaaaaaaagatccatggcgacggaggaggccggccgtgccctggcgacgaaggcgaagctggtggcggcggtgctggtgctggagctgctcgtcgcgggcttccacgtcgtgtcgagggcggcgctcgacatgggcgtcagcaagatggcgttcctcgtctaccggaacgccgcagccctgctcgtggtcgcccccgtcgcctacttcctcgacaagaaagataggccgcccttcacgctacgcttgctgatggacttcttcttgctggctgcagtcggggtaaccttcacacaggggctctacatcctcggcctgtactacctgtcaccaacctacgtctctgtcatccagaactcagtccctgcgatcaccttcgtcatggccgctagtttgagaatcgaacaggtaaatgtgaggagcagatacgggctggcaaagatgctaggcacggtggtcaccatagcgggggcaaccgtcataaccctctacaaagggacgccattattgacagaaacagctcatgcagagggcaccacgcacacgctggaaggcacccacacgctcggaggatgggtcgcaggatgcctcatcatgttcgcgaactgcatttgcttgtctgcgtggatggttctgcaggtcccggttctgaagaaatacccagctaagctgtcgtctttcaccatcactctggcgttgggtttcgtccagctcgctgtcgtcgcgccgtttttcgagagcgacgttgagaggtggaagatcagctcaggaggcgagcttttcaccatcctgtatgctggcgttgtggtgcttggaatcgcctggtatctcatgatctggtgcataaacaaaggagggcctcacttcgtttccgtcttccagccactgcaaaccgtcatggtcgccatcatggccgccatcttccttggcgacacactctacattggaggagtcataggtgcggtgatcatagtcgcgggtctgtactgtgtactgtgggcgaagagcaaggagaccaaaagcagcggcgatctcctagtccttcctgaaagaagccccgcgcagcagaatctcctccagcgtgaagattgaagcgagaccactcactgtacggttctcggccggctgctctgaaacgtcgaaccgggctgtagttgctccaacaagaaatatattccttgtatcagctggacaggccaattgatggtgtggcctgtgcaaccttgttggcccagggccactttcgattttgtctattgattcttttagagcaaccatcccgatgcgacgaaaaaaaaaaaaaaaaaagcggcc

SEQ ID NO: 181592 - DNA, 176 bp, Zea mays
  Clone ID: MRT4577_97192C.1
cccacgcgtccgggtgggttggcttttttcttctctccgcatcgacttcaacttcgggaggttcttctggaatcgggggcggggtttattcttatctatatgacttcatctaattttaattacccctacttcttttgctgcctcgcctgcgccacagactatcacttcctacacaa

SEQ ID NO: 181593 - DNA, 1625 bp, Zea mays
  Clone ID: MRT4577_97193C.1
ccgggctcccttggtgcctccactgcaattcgggaatgggttcgtgtcgggggctgtcggtcagcagcgaggtggtcccgtgccccccgcggtatcgcccaggcctgtgacggccagcgcgttcgggaagatggagggagacgacttgtcatccctgtcgccatcaccggttccgtacattttcggtggtgggttgaggggaaggaagccaccggctatggagaaggtagttgagaggaggcagcgccggatgatcaagaaccgggaatcggccgcgaggtcgcgccaaaggaaacaggcatatatgatggagctggaagctgaagtggcaaaacttaaagagctgaatgatgaattgcagaaaaagcaggtatgcttatacaatgtttgcatttttgtttcttggggcgcattaacttatgaaagtatttctcctgaaatagtgaaattcaaatagtttgttaatattcattcctgaattcgagaacctttggaattccagagaaccttttgtactttagcacattcttacatctttttcatcaatacttgtacattgtttactttattaggttttcaaaagtcaagttatcaatttttttacattttttgtcaatcatcacagtgcatttagtgttttttagcaaaaaggcactctggagcatttttggtgacgatgatttaatggtaaattggtaatcaccatagagcatttgacaaagtgaaatgcagtcgaagtccatctgataactgaaccatagatctttagtgtccatcagataaaaggcactatggagtagttcataagagttgtccttttcttctgtattttcttcttaaattagtttatcagacaaggaactgctgtaacttccatttgtgaatagttgcttcttggattctgatttatgacaatatagcttattgtcagcaatatttctgatgaactagaacatgtcagctttgcagccttatatgactaagttctatgtgtagtgagatcgcattctttatatctgctgttgtttagtaaatgactatcttttctaatttgcaggttgaaatgttggagaagcaaaagaatgaggtcctggagaggatgagacggcaagttgggccaacggcaaagagaatttgtctgcggaggacattgacaggaccatggtgagctgtagacccgtacggctgtacctattagcagtatatatgtagtaggtgaaggtgaacacacaaaggccagagttgccctggttgacacagccattaatccggagcttcggtctcgtaggcggatagattgcctgtgatttccacttcataggttttgcccatttgcaacaacaaaaaaggaaaaggaaagaaagaaagttcgggcgaatagaggagtttgtatgtagaaagaaagtttagattgtttgactcttataatgcgagatgaagacttattttgggacggagggagtatattgcttctttaggctttctggtttggtgatctcgggtataactgtatcatcagtccttgtgctttggaaaacgcaaaaccattttgtgatgtaaactttagatctgcagatgtccgctgtgcccatactgtagagattgcttaagatagaatacgttgt

SEQ ID NO: 181594 - DNA, 420 bp, Zea mays
  Clone ID: MRT4577_97194C.1
gaaagaagagagagagtgagaaaaaagaaagatccatggcgacggaggaggccggtgccctggcgacaaaggcgaggctggtggcggcggtgctggtgctggagctgctcgtcgcgggcttccacgtcgtgtcgagggcggcgctcgacatgggcgtcagcaagatggcgttcctcgtctaccggaacgccgcggccctgctcgtggtcgcccccgtcgcctacttcctcgacaagtgagtggtctatgcatgtgaactctgcacaggtcgtagttagtattcccttgtgattatgtatgtatatgcgcacggcaccaccccttcttcacaggaaagataggccgcccttcacgctacgcttgctgatggacttcttcttgctggctggcagcggggtaaccttcacacaggggctctac

SEQ ID NO: 181595 - DNA, 296 bp, Zea mays
  Clone ID: MRT4577_97195C.1
ctatattaaaataaagattacattaagattattgaatttgtggagggagtctagggctgaagaaaaacagctctggagaataattagtatttgaaagtgacaaacaatagccttttgttgataaacaaattctgaagaactcagcttcctctacttatatccttcattgtctacaaggacagtgcgttacttgttaaagttatgtctatgtaataaagctgttggacctatactgaatttttggtaccacagtttccctcttgaatgtactaaaacacaaaaaactgacagctctg

SEQ ID NO: 181596 - DNA, 1508 bp, Zea mays
  Clone ID: MRT4577_97196C.1
gcgacggagaggccggccgtgccctggcgacgaaggcgaagctggtggcggcggtgctggtgctggagctgctcgtcgcgggcttccacgtcgtgtcgagggcggcgctcgacatgggcgtcagcaagatggcgttcctcgtctaccggaacgccgcagccctgctcgtggtcgcccccgtcgcctacttcctcgacaagaaagataggccgcccttcacgctacgcttgctgatggacttcttcttgctggctgcagtcggggtaaccttcacacaggggctctacatcctcggcctgtactacctgtcaccaacctacgtctctgtcatccagaactcagtccctgcgatcaccttcgtcatggccgctagtttgaggtcgtagcaaggggaggacgtttgtttgggattatatataatcttcctagattatatttataatccgacaaatctttaactaacacttggttggttgaaacagaatcgaacaggtaaatgtgaggaaccctaggatagcgggggcaaccgtcataaccctctacaaagggacgccattattgacagaaacagctcatgcagagggcaccacgcacacgctggaaggcacccacacgctcggaggatgggtcgcaggatgcctcatcatgttcgcgaactgcatttgcttgtctgcgtggatggttctgcaggtcccggttctgaagaaatacccagctaagctgtcgtctttcaccatcactctggcgttgggtttcgtccagctcgctgtcgtcgcgccgtttttcgagagcgacgttgagaggtggaagatcagctcaggaggcgagcttttcaccatcctgtatgctggcgttgtggtgcttggaatcgcctggtatctcatgatctggtgcataaacaaaggagggcctcacttcgtttccgtcttccagccactgcaaaccgtcatggtcgccatcatggccgccatcttccttggcgacacactctacattggaggagtcataggtgcggtgatcatagtcgcgggtctgtactgtgtactgtgggcgaagagcaaggagaccaaaagcagcggcgatctcctagtccttcctgaaagaagccccgcgcagcagaatctcctccagcgtgaagattgaagcgagaccactcactgtactgtacggttctcggccggctgtagctgccccaacaagaaatatgggggtgtttggtttgagaaatcacttcatccaaaatgtggtggtgcatcatgagtccattactcaaatttggtgggatgaccttatgcctcatattagtactaactaaataactataagaaatggggtgatgatggatcaactcaatccattccacaaaccaaacaaaaaagtgaggagtgagaagacgatggactagatcattcctcaaaccaaacagcttatatattccttgtatcgtcagttggacaggccaatagatgatgtcgcctgtggaaaaaaaaaaaaaaaaaaggccccta

SEQ ID NO: 181597 - DNA, 566 bp, Zea mays
  Clone ID: MRT4577_97197C.1
gccggccgggtcgggaaacaaccacggcaatccactgattgtggccttcgaacacaaaaaaatgcccatgctcattgtcgtatctccacgccaccaaatcatttcaagcttcttccattcttgctgcgtctgtatctgaatctttatcttggagatcgctgggtacccgaagaattagatctttcatggccaagcaaaagatcgatgatcaacttgtcgatgcagagcgtcaagtaccggaacaaggcaatgtcctctggtggatcttgcgtccgcggtcatctccgtggacatcgcctcccacggcaatgaccgggagttcgttcctggctaggtcttcgatttcctcaagctcaccaccatcctgctctagaagattggtgacgagcacctccctcaggcaatgatgactcacggatgtatcatgcacctcgtctatgctatgactcggggctgtatcatattgttacttgtacttggaaagcctatgctgtgactcaacgttgtatatgctctaatgcacgaaaaataaaataaatcagcgccctagtgacgcgagcgttcct

SEQ ID NO: 181598 - DNA, 300 bp, Zea mays
  Clone ID: MRT4577_97198C.1
gttgagagatgggttttttctccaaagagaagtcctgcatatattcgagttgtggaactcgtacaaattttgggaagtgtgaatggttcccttggtgtccagtctaaaattcagaaatcctactgccagtactcactgctgctggcagaggctggtcagtgtcatgcccataataaaacaacaaatggtgaacggagccgcttaaattgccttcaaagcgcagcggaatagaagatcctttttttcgtcttgccatttcctccatctccaccgagccgaagactttctccatgagggccg

SEQ ID NO: 181599 - DNA, 256 bp, Zea mays
  Clone ID: MRT4577_97199C.1
cccgacgcggtcggcgaggatgcaaaggccaaggagaaggaggcgttcgacgtgaagctggagggtttcgacgctgccgcgaactcaagatcatcaaggagctaaggacgttcacgaatctgggcaaagaatgtccatgtctgtttggtagagctccccttgccccctgataatgtgtctgaaagtgattatgtaggaataaaatctttggaggaagtgaatcaggcgaagaaattttttaagctcctaatattta

SEQ ID NO: 181600 - DNA, 499 bp, Zea mays
  Clone ID: MRT4577_9719C.1
atagtacaaccggtcactgggatgatctcaaatccagaagtgtatatcacacatggtaatagatcgtttggtgtccataagtagacatactctgaggttacatctgacattgtcacatcaagattcaactaatacaacaacaagatcctagatgcttcactggatgacattccaaggtatgcctgacgcattgatagcatcgttgccggacagcacagtccacgccttcctacatacccccatcagttgccgcacagttccctagcatgtactagtggcgctcgagcttgccctgtaatccaagcttgttagtactcgtcacagcattcatggtatttggaagatcttgcttattggcaaaaacacacagttcaccataacgtacctgctcctagcttagcatgctgaggagctcatctctggctataacaacaacttaccggaaatttgctggccaacaacaaagcaaataccctggggtgtaatcgtaggttatgcc

SEQ ID NO: 181601 - DNA, 455 bp, Zea mays
  unsure (1)..(455): unsure at all n locations
  Clone ID: MRT4577_971C.1
gggtgctccggngcatctcggnctcggngntggcagtgcggttctactggtgggcagagtccaggcctgggtttgatcacacccagttcgcgatagcgtatgttgtcagcctgctctttgtagacagcaactttttcctgctgtcggagttcctcgagagagtgaggagtcagggggttgcattgcatcgctctctctatcggatcctcttgtcgggctatgtaagggcaggcaagttcgattctgtcatccatacatttgatgagatggttacatctggatgccgtgagtttggtgtggactacaacaggttcattggtgttctagttaagaattgctgctttgatttggtcgagaagtattatagtgtggcacttgataaaggtttttgcttgacttcattcacttattcgaggtggatatctgcactgtgccaatcagaaaggattgagctc

SEQ ID NO: 181602 - DNA, 701 bp, Zea mays
  unsure (1)..(701): unsure at all n locations
  Clone ID: MRT4577_97201C.1
ggtaccctcggagttcggccggggngattgttgccgctgttggagattcagtcagtcatatcaaagttggcactcctgtggcccttatgacttttgggagctatgctgaattcacggaggttccagccaaacatcttcttccagtgccaagaccagaccctgaggttgttgcaatgttgacatcaggactgactgcatcaattagtcttgaaaaggcaggacaaatgacatctgggcaagttgttttagttacagcagctgctggtggaacaggacagttcgcagttcaggtcagctgacaccatttcgatagcattactacgtttctttttaaaagtagctcccaattgcacatattttccaatgggttgtgaggaggtataggataaacatatactgtttatacttttcgaacttatacagaataaacattccttataatttgggtttcatccaattcatctttcacttggatagttcttagggacatactttggtagcttgtatttttactggattgagcaatgggcaagatattctagccttctagacatgggtaaggttatatatttggntctgntggttctggttttctgtttcatattgttctactttcgtatgaataattttttaactctgaacaatcttacttttttgaatggtttctttttcatattcttcactagctggncgaaattagc

SEQ ID NO: 181603 - DNA, 731 bp, Zea mays
  Clone ID: MRT4577_97202C.1
atctcaccttcagggcgccgttcttggtactatagcaactatataggagtagtgtttgggtttcactttgatctcttgtgttctttctcgcagcgtgtccgggtggtgttgtgctttcttgcagtgagcctgctctgtttttaccaatggtttctttgttcatgtggtggttttgagctccatttttttttcttcttcttctctctccctgtgactgttgtttttttattggtgtggtgcaaaaacttccaatccggctgcgacgaatctcgtctgggcagcccggccaccttttgcacataaggatgggctacgtgtgttgaacattagtggcgaagcgcccgattcactctgcttgggggcctggagttccatctgctttccagtcctctcagtgaagcgggcgcacatcagttggtttttctttacccccctcgcctccccttttgttttcctgcgatggcttctgttttcgtgtccaaacagaaggtcgtcgtctcttggatctgcttgagttttgtcatggtttatgtggcctgcgcaatgcaaagggtctggaactgaaaggttttctgtggcgaaattgatgcccgtgccaagtacatgaacagagttggaatgcaatgaactccaatggcaacacgcgccttttagcggaagtaaaagccgccacagtgaatgcgaaccctaaaagctgcgcgcttgaaaaacgttccagtttcgttcttcta

SEQ ID NO: 181604 - DNA, 292 bp, Zea mays
  Clone ID: MRT4577_97203C.1
ccggccgggtgtgttttccgttacctccctcctcctataggtggtttctcgccaccctctgccttcgatcagattttctcgatctcccttccccgtccgcctctgctcctcccatttctggccacaacatgaggcagcgcatctcagatcaagatcgacacaagccggtatccaggtcgcaaatgagtgatgcgagctctactgactccagcatggcattcaggccgatgctccgatgcccggtgacaagaccattgggcgtggtgctgatgctttccgccccttcttcaga

SEQ ID NO: 181605 - DNA, 390 bp, Zea mays
  unsure (1)..(390): unsure at all n locations
  Clone ID: MRT4577_97204C.1
gtggccattctgagaggtgatatatacagcttcggagttgtccttcttgagctgctcacaggcttgcgacctgttccggtcctgacaacatcaaaagaacttgtcccatgggtgctggagatgagctctcagggaaagctggttgatgtcctagatccaacactctgcggcacagggcatgaaaagcaaatgcttaaggtgcttgggcttgcttgcaaatgtgtgaacaataaccctgccatgagaccacatatcatggaagtggttacatgcctggaaagcatcaacgttggcctgcaggcacaaaagtcagtcaagacaatncagntagcgagntatacatgagaatattgtaattaaatgcatanagcacacccctntttaacaaga

SEQ ID NO: 181606 - DNA, 330 bp, Zea mays
  Clone ID: MRT4577_97205C.1
cgttttagatctctcaaaagaggcttttgcattttgtattgcatcgtttatattccagccttggaaggctgaagatggaaggagacattcttgcagttcaaatttggaggacactgaggctaattgttgcaggccttgattgtacaactagctgtctgcttcaggtcaatagcgaccttaaacttgtcgacccacctacagtgtctactgcgactttttttaccggcaataaccttcccttgttatctaattggactaacaatatatcttcttctgactaataaacgtctgatatattactctgaatcgttaaaccttttctttttaaat

SEQ ID NO: 181607 - DNA, 403 bp, Zea mays
  unsure (1)..(403): unsure at all n locations
  Clone ID: MRT4577_97206C.1
ccggccgggccgggatcagctcctccctctccaccccgatcgcaatgccactacgtgatcaaccccaaaggtcgccgtgaccgtgccgaagagatctcgcgctccgggcccgttaccgcgcagctgtgctgtcgcaggcccacccgttcacccactccgccacgctctcgataaggccgccgcacgcggccgcacgcaccgacacgctggagccgccgcagcaggaggcggtgaaaccatcgccgaccaacggtcgcatccgctaccgtacgccctcggcggccgatctgctccccgctgacgatgtcgcggcgnatgccgcgacagccacagcggtggccgcgaggatgcgccgctactcgggagacggagcacggcagcagcagcaaatggaggtgttgtc

SEQ ID NO: 181608 - DNA, 1323 bp, Zea mays
  Clone ID: MRT4577_97207C.1
caagcattggttccaaagattcctctggaagagcttatcattccattgtgagcccactttctcaggcatacaatttggactcaagctgcctctctctttctataccaaccatgcagcctctaacttcacatgaaatgtcatcactaattgatggttctgctgttactttggtggtacaatgtctggaaagtgactctgtccgtgacaaggaccaagaaattgactctgttcatgagaagggtgttgaggttagctcaacacctgatcctgttggggttgaattagaatctgcaccagccaaaagaggtgcagaattatcttcaaagaacgagttgcattctacccttggtcctctttgttatcagattttaaacatggaagatgtgatcccaatcagtaccccactctgttctgaacataatggtgcacatcaaacatcacaacaatgcatgtcacccaatggttatacttctctctctccaacgattggaaaagtatcaagtcagctaactgttgattcaattttgagaatggctgctgatagctttccatgtactccttcaatactaaggaaaagaaaacgtaataaagcaacacctggttcaggtaatgagttgaagacgggtggagtaaacaatgatagcttttacactcctaatggaactaatgggaaggacactactccacggtcatttaaaactgctgcatccttctcatcgctgggttctgttgatgggctattgacttctgtaaggagttttgattcttcaccaccctatcagaaaaggtcaaaaagaatggctatcatcaaatcagttgagaaacagctagatttttcagcagatggactggatacttctggttctgagattatgaactctccttgtcataattcccaaggcgtagattctaacaggatgtagcgcatacaagtgatttgaatgtaatttaattccataatgtgcaggaattaatggcaatcttatgaaaccggacaggactttatggaatcccttccgaactaaccagcctcatgcaagtgtcctggttcaagccaaatccaaatcaatcaccttcagcggagataaagagcttcctgcaatggaaatgacgtacggaacacaggccaacagtttaccctgtcatctcatgtaatgagagtgtacaaaatactgtctaaattgaaagcacattccatagaagattacattgtttcctacatattgtgaacttacagctaggagttgagattgtagaagcccacagatgtgtacaaaaaaaagggaaaaaaaagcaaagtcaatttcctgtcaaaaaaaaaaa

SEQ ID NO: 181609 - DNA, 398 bp, Zea mays
  Clone ID: MRT4577_97208C.1
aggggaaaaaaccacaggggggggggttttatttattaactcccacaaaaaaaaaaactgggccaggaagcccaccgaacagcccaaaggccaaacggggcccaggaaacactgaaaagcacacgtcccccccaaaaataccaaagcaaagcaaccccccaacacacacacccaagtcgggtccttaaaacccaaaaacccaccccccaacccaaacccaacccaaccattcacctcccgtccatgtttttttaaaccggaaaactggaagcttttaaccccgggctttttaaccccggccttgggcacgggaaccggaaacaccccgttttcaaaggggggcctaacctcctccggtttggggttccccggcaggggaaaacccccaacaaaatggc

SEQ ID NO: 181610 - DNA, 350 bp, Zea mays
  Clone ID: MRT4577_97209C.1
ccttcccagccatggtcgtgcctgaccgtctccctgcgtgcgtcttcctccccgttcgttctgctcgccctgcatctatggagctcggcgcccatctctgatgtcttcttccccagctcgatctttcctccactggaccgcgcctctgctcctccctggaaccatggccgcgcccctcagctacctgctcgccaccatccggtgcttcttccggtggagcagagggcaacagtagacgtggcagccaaaaccaccgtgcagcctccttcaaccggaccaagcaccgcccgctttccatggccgcgcgccctggagctcttccccatcccctccccgcgccctctctgctc

SEQ ID NO: 181611 - DNA, 542 bp, Zea mays
  Clone ID: MRT4577_9720C.1
atggtcaaaattataaacttacaaggatggtaaaacattcagaaatcaaaccttttcaagtcaggcaatcacatatttacagtatgtacagactttctactagaatggggaaaggtgtctagacaatattacaaatttcctgaaggtgggcatttctagtccctgtaattcataaagcaaatctgctgacttggcattaagactctaaaatagtgtgatccaactgatatatatatatgtatatatatatattatatatataatcataagaaggtgtttgcagaaataacatttacaaactatacagtacacagtactagtacatagaaaatagattctaactttatgatcccctttgtgtaaggcaagactgaatctgtccccaaatttagtcagccagaggtacaagcaagaaacagtggtccatggataaatgaatatgcaaattaggtgcctacatattaaaaatctggagaatcaagaaattccactttttatctgggccaattgtggcttgctggatacatcaactacagtttttg

SEQ ID NO: 181612 - DNA, 256 bp, Zea mays
  Clone ID: MRT4577_97210C.1
gttctagatcgcgagcgaccgccctttggtttttttttttttttttttttttttttttttttttgaaaaaggggcattattgaactctcaggccagggagttcacaacattaaagaaacaggtcctgttattgcacaacacatcccaacgcgagatggtttgatctattacaacaaaccaagctttttattggttccaccaccaatcacaaattccaggctacaatggaaaagagtaacccctgaggtacttggag

SEQ ID NO: 181613 - DNA, 271 bp, Zea mays
  unsure (1)..(271): unsure at all n locations
  Clone ID: MRT4577_97211C.1
ggaatcggcaacaagcaactgctgcgactgaggactgatggactacgccttctcatacggtcggacacaacggatggtattctcacctgaggaagcctacactgtacctcatggaacgaaggcaccatgtgatcgcaaacgcatgcttcgagctaaacatgtncggtatcgtcagatgacggctacggctaaagcgaggagggtaccatcttcaggtacgaggacgtgcccaggaacaaccagcacgcgctggtcataacgcttgcgcaac

SEQ ID NO: 181614 - DNA, 268 bp, Zea mays
  Clone ID: MRT4577_97212C.1
tcaatattctcaggcatgcaagaggacctacgagaccgaaaaaagtgacttgttggccagaaaccttgggtcttttcataaaaggaaatttgggctcgtacaccgcccctaaagatataggtagaaagaagagatttttaaccctttgtctgcaaaagaaaaagggttaaatgaagcatctatacagatgactttgggagattatgacaccttttgccatcttcagggcttacgtctttactttcttggctaaccagtttcttagaag

SEQ ID NO: 181615 - DNA, 716 bp, Zea mays
  Clone ID: MRT4577_97213C.1
agccaatacccatcctcctcctcctctctgatctcccccaaatcccgccgcgaagacgcctgttcttttcggccttcccgattcccgcccgcggcggcgcgagcccaggcctccttccaccgtcggagtcttccctcgtcgagaggcaccgcgcccccgcccccgccccacactcgactggcgccgcactgacgtggcgcggagatccatctgggcgggcttgcattgatttattctcctgtgggcttgttgaacagtaacactatatgggatcgtactcgacaagcgaagtgcttaatgctgccgcggttggggtccatcatccagcactccgtttgcacgagctggacctgaaaggttccatgtcggtggaggaactaccaacgacgtcaggcctggagaatggacaccaggcaccatttgttattggtgttgctggaggtgcgtcttcaggtaaaagtactgtttgcaaaatgatcatcgatcagctatgcgatcagcgtgtagttgttgttactcaggagtcattttattatggactgtctgatgaggaaatggtccatgttcatgattataactttgatcatccagatgcatttgatacggatttactactctcttgtatggaaaaattgaaacatggtaaagctgttgacattccaagctacgacttcaaaacacataagagtgtctcatgtgctagaaaggttaatcct

SEQ ID NO: 181616 - DNA, 315 bp, Zea mays
  Clone ID: MRT4577_97214C.1
ttgcattcgaatcttgcttataaaatttcgtcttcaactgataatcggtaataaattgttatgaagccaggtgcgacgttcctcctgggggctatgttcggtgcccttttaactggaggatgcaatcgctgtcgtcatcttaaagaaacaagcagtaccggtagcaggtgagaaaacaggcgctgacctcgtaccaaaccaactcataacatacctgctgatgccaaccgaggcccccaagaggaacagcaatcggaggcatcgcttgtgggctcgtgattgaagacatgctggtgttttgctgatgagatcgta

SEQ ID NO: 181617 - DNA, 555 bp, Zea mays
  Clone ID: MRT4577_97215C.1
ggatcaagaccaataattgtaatcatgaaccagctggaggaacaatcttgccatgacaagatggaagaactgacaactttgatgatcgctagattgaaacacgtatcacacgagtctaagaactcgagtgtatacatgtgagtaatgaccacatgcatctggaagcagcaagctgaacttattcgtgccagagaacccatggggcaaacacctgttcacgaggctaattctatcgatctgggcatcgtccaagggagagcaagaccctaactcaattcgattcgtgaacctcaaagaacgcattgaatgctctacacacacatttcctgcagatgcaccactcatgcttatgcttacattgggggtcatgttaatgaggaagttataccataaacggcactcctgtttaggtgagaacctactgggggacatcattgcaagatggcctgagccatataaacgatgacaaacgtgaacctatctttcctagattttccttaagtgccttgcgcattgcaatgatactaccaggcataccattgactctgtttaacc

SEQ ID NO: 181618 - DNA, 348 bp, Zea mays
  Clone ID: MRT4577_97216C.1
gtctgatcagaactaactcgctcgtccatgttcagctcagctactacaattcctcatcaggttgtgagccattaccgaccaatgacgaccaaccgctccatgtccatgctcttctactgcactcacctgactagcgacaccatctccgacgtcatccaccggaagccctcccgcgctagaaccgtcctatttgtcacctacacgcctaactccttcataaacgtcctcacctcatgctctgtcactgttgagcatccatctgccatatagctgcacaacaacgcgtaagtatatatatattgatgtaacagattagcttactgctgctatcgtaactaattgatccat

SEQ ID NO: 181619 - DNA, 381 bp, Zea mays
  Clone ID: MRT4577_97217C.1
gcgagatgctcgtcgtctacgactactccccggggggcctcctgagccaccacctgctccggcggcacgactgcggcgcggtcctcccgtggcggcagcggtacagcatcgtcagggcgctggcgtcggccgtcctgtacctccacgaggagtgggacgagcaggtgatccaccgcagcatcacgtcatcggcggtgttcctggaccccgacatgaacccgcggctcgggagcttcgcgctcgccgagttcctgtcgaggaacgagcgccacggcggcgggcaccacgtggtggtcaccgccagctcggcccggggcatcttcggctacatgtcgccggagtacatggacacgggcgaggcgaccaccatggccgacgtct

SEQ ID NO: 181620 - DNA, 223 bp, Zea mays
  Clone ID: MRT4577_97218C.1
gggttttacaataattatgacatgagcggctacacaatcagcgttacgattgctgaaaaatcagcacccaaagcagcaccatacttatggtcatgggtaagtagtgtttatctgaatatctgatagattcaaattgtggatgctagatcaaagtgtatctagtagtactggtattgggattctatagtagtatagtgtgcaattgcgattatgtgacacgttc

SEQ ID NO: 181621 - DNA, 510 bp, Zea mays
  Clone ID: MRT4577_97219C.1
taaaaaaaaaaaaaaaaaaaagaaaaaaaataaaaaaaaaaaaaaaaaaaataaattaaaaaaaataaaaaaaaaaaaaaaaaaattttttttttttttttttatttttttttttgggactttttccccgttttgggtcaattttgggggttttcttccatttttttgggggggtcccatcttcgcctttttgggggggccggttttcccttttaggtggccgtttttttattaagtgggggttggtaaaaacctggggttttggagaataaattgggtttcccaacattaatttttttgaagatgttgtcctttttaaaagggggggtaatatcgtatttgccaaaacttttccccttttatattagatgggacccccccttttggagggcattaaccccttagggggtgtttattccccgaaggggggtggttttatttgagagggccctattcccgggccatttccttttgtcccattcttttttttttctttcctccgtttttccc

SEQ ID NO: 181622 - DNA, 573 bp, Zea mays
  Clone ID: MRT4577_9721C.1
ccatactgttgtttattagttttgttttcatcacactattaggaacatcatgttcttttataactcaatatatctcatccacgattcatgacacacaagaccactaaaatagaaaaataagcaccgaccgacgactccatgatagggagggtacaccacgcagggacaaccagcacgaccgcgaaatacgccagggtacacccagttattcttataatgacgccatggctttactgaccaccgcggaggcggagcaccaggttggagagtgctaaacttctggatgttgaaaactgctaaggagcggccatcctccagctgatagccagaaaagatcagaccctaatgggctgggggaatgccctatttggcctggatcttaccctccacgttgacaatggaaaaagagctctcaacctccagggaaatggactcgccacccaaggggaagacaaatatctgcataccacctcccaagcggatcaccatttggagggtgcactccttctaggagttgtagccttcaagggtacggccatacaacagctgcttgccagcaaacatcaggcgctg

SEQ ID NO: 181623 - DNA, 166 bp, Zea mays
  Clone ID: MRT4577_97220C.1
tcgcggcccaccgcctcagcctaccccgctgctgcttccagtgagcgaaccccgccaccagccagcaccgccaggcctcctcctccagctccctgttccgagataggcggctggcctccatgccctggaatggtatttggctccacccattgctcaaaggtcatgg

SEQ ID NO: 181624 - DNA, 161 bp, Zea mays
  Clone ID: MRT4577_97221C.1
gaacggaggggcgaggcctaaacagacttcgctgtctcctgcagtgtatgaacagcgccaggatcggagcaccaccgggggctccggacccggggctactggaggtccctgacggggggggtgttgccaaccaaaaccagtttccacccccgggccgaatt

SEQ ID NO: 181625 - DNA, 608 bp, Zea mays
  Clone ID: MRT4577_97222C.1
gccggccgggtccgagcatacctccagtatcacacctctccgcaagtagatgtagactccacagcagcgacagagacagagacgaacgactacgaagacaacaagaatgacatttgctgatacgcacgctctccgcccgccgtagccccgggcgccacggcactcgaggcgctacgccaagctccaggagacggcggacgaagctgccgcccggaagagcggcgaggaaaagaacgctgaccaaaagcctcggctgacaatacgtaaggtccacaacaaaccagatcatggggacgacaacaagtgacatgctgtatcgtgtggagtgtaatggatgttccctgcatggatgcgtgaatccatgccatgttataaattgaatgcttccttttttgtatcttcacatgtgagaccccgtcggcgtcactctctgcgacacgatggcctgtgaatactacaaacaacatcctgtgactgtgcacacaagatagaaatcaaaaacaccctaggcccccaccagatctttgactagagccctaccccggctgtgtgaataccatactcagcttactcaaaccggccacctccagggagcagccgccacccga

SEQ ID NO: 181626 - DNA, 902 bp, Zea mays
  unsure (1)..(902): unsure at all n locations
  Clone ID: MRT4577_97223C.1
ctaactaaatttttttaaagtgaaaagtttccatctatatgattgttcaccatgaaatgaacatcaaagaatagttttatacaacacatgtcccactttttacatgcaaatctcaaaccataaaccaaacaaaaaaagtcagacacccctgctcacataaatggtgatccgtgttaaatgacataatgaaatctcttttttcactgagagcagaatatggacatgatcaaaagagatgctgtggctggtcagagtacaattcttccctttccagtgcatccaccataaaaggaacagcgatattctctaccactgcatatacaggtatattcccaaagagatttcatatttacccaccaaatgtccaaaagaatgctgtgtaattctgagtgcagtcaatctgtgacaattaatacaatttgttccagggtatgtatggggaatatttacctccgtgtacattctgtgtgcaaatacaaagttttgtacagttagcgggaatagagagatatacaataacgccagctggtacctgccggatcctcaatcttgagaaaggtcggccctggataagtagttattatcctcagnnnnnnnnnnnnnnnnnnnnnnnnnnnnnnnnnnnnnnnnagcctctccacaatgaacatatccaagccagtaaaagtaggtatttcgccagcactacaatgagatgtatcacctgtatttccccatactgctctccaacctctgtatgcttgcagcaacccggccaatgtttggttttgagtcaatgctgtaatcatcgctgttgttgacacttccagtgttagtctgtacatcggtgttactagcatcactgtttgcaacaattccagagttggatttcacattagcatcgacggtgctggtggcgaatt

SEQ ID NO: 181627 - DNA, 572 bp, Zea mays
  Clone ID: MRT4577_97224C.1
cttcccggaccccattccgccgggcgatgagatgatcgagacatagcctcctgactactggccaaggtcatgacggaggtatgatgaggacacagaggaggatgcttgcgtatgtaaccgacgatctatgttttcttcaagctgcttagaccgactaatggtaactaatatcacgtggttactgtgaacgagggtggaatccgtctgagctatatctatattcataatcaaaagagtgccgccgacactactatgacaatggcgtgatgactataagaccaccagctgctgattctggcggaccatcttaatctgacagtaacctgaactaccgaggatactaccatgatggctctccacataaaggaaatatccacaacaaccgtactccaccagatggacattcccaaaacaacccgccgcagttgggagacttccagacttaccgatacaagcatgatcgtggagggtatgccccacaacaaaattatgcacattgtgcagctggacggtaggaggtttatgaaagggctgattacacataccgaccaggctacaatggaccacctgat

SEQ ID NO: 181628 - DNA, 496 bp, Zea mays
  Clone ID: MRT4577_97225C.1
gtaacgctaaaaaagtacagtttctgtaccttattgccctatcccaacatctccctttacatgtcgacgatgacccgcaaggaattggtgccgttcaagcgcgctgcgctggacgccaccgatgccgcagacggaattcccggtagcgttgttctgaacgtcgatgccctcaaaacgacgaacaagcctcgctattacgtcttcgatccggccaatttcgctgaattcgtcccggcagatgccgccgaactaaatctggtcgtgcaggtcatttcagttaagggctcgaaggatgagttggtgaacgacctccctcaaaaggaaatcggcggtgctgcatggacgaaggccaccatcctcaagcttcacggcaagtgattgcatcgcttttgtgtgaaagagggtgtgcgtgtgtttgtgtgtgtgtcgttttgaatccgttatcgaacatatgccgatccgtcgaaaaaaaaaaaaaaaaaaggcccctagggcc

SEQ ID NO: 181629 - DNA, 582 bp, Zea mays
  Clone ID: MRT4577_97226C.1
ctcttcggcataaagctgcctctttttgcgcaccatctgttacctaaggtttttgccatgattactactatataccatgcgaaggttgtgggttttgaagggttatatcagttactcatggtctgcccaattatccaagctatgctccttccttcgtctgttatacctgttttccgcatttcctcgtcgagatcattgatgggcagataccggatatctcgatgtgttgaaatattgtgcttcctagcatttcttctaacactgtttacaaatatcatttttatggcggaagttctttttggtgatagcacttggacaaatgacctgaaagggaacactgaaaaccctattctacttccatatatcgtcgtagtcctgatatcatgtggatctattggttttgcactgttccttgctgttactccactaaaatcagcatgtaatgaagctgagagagcgttgtctgtgcactcataacagagagaaacgttggatgccactcgtcacagcaaaaccgacttctctgagaatagggcacatgaagcatatgaagaacagaggtccttagccatccttgttcca

SEQ ID NO: 181630 - DNA, 532 bp, Zea mays
  Clone ID: MRT4577_97227C.1
attcggctcgagggctggtaaaaggcaatctgtaaaagatgctactggaaaagttgcacactcagcaggttcttctctacggcgctataatgaagcagcactgaaaaaggaagttcaagaattaattgtttcatggaagtcatactttgagacatgtgtttgtgccttcatttatgctccatctaggaaccgccaaatgctcttcgacggggagaagactcagtcagtaattcagtcttgtgatgttcgtccagttccattgactgttcatcgccccaccttgaaggaagcgaaacgggtatattgtaacctaacacaactctactatgagatggaatgttcaaccacagatgaaacattacctgatgctggaagtgtgaaaaatgttgaacaaggtgaaggaaaaaagaaggaagtggctgcaaaccctggggaatctatttctgacttgtctaccccgttggaattgttgaataagaatgaagcagcaaccataccatcatcaaagaacgaaacaacactctttatgagc

SEQ ID NO: 181631 - DNA, 363 bp, Zea mays
  Clone ID: MRT4577_97228C.1
ggggggtctaactgaatcttttttcctccagttagttaaagcttagaaccacccaaaagaaaggggagaaaaaaaacggaaacagcaaagcttcaagaaagagaggggggagaaaccaacttttgggccatccatccatgccttaaataaaattaaaaaaaaacgggctaagagacaaattttttgcaccttcttcttcgcgggctttacaccatggggggattacccgcccaacttcacaaaagaagtgccacttccccattaaccatttcggaatttgaatactttttttttaagtaaaaaaacatttttttttttgtttgaacaaactggtgcaccggcacgggaccccttttttttttt

SEQ ID NO: 181632 - DNA, 949 bp, Zea mays
  Clone ID: MRT4577_97229C.1
cggctcgaggctggtaaaaggcaatctggaaaagatgctactggaaaagttgcacactcagcaggttcttctctacggcgctataatgaagcagcactgaaaaaggtgttgaatttgatgcttgttgacttttatgtgtgcagtaaaagcaaatgtctcagcttattttttaggtgtctttcgtttttgtttgccttattgcaggaagttcaagaattaattgtttcatggaagtcatactttgagacatgtgtttgtgccttcatttatgctccatctaggaaccgccagatgctcttcgacggggagaagactcagtcagtaattcagtcttgtgatgttcgtccagttccattgactgttcatcgccccaccatgaaggaagcgaaacgggtatattgtaacctaacacaactctactatgagatggaatgttcaaccacagatgaaacactacctgatgctggaagtgtgaaaaatgttgaacaaggtcaaggaaaaaagaatgaagtgactgcagaccctggggaatctatttctgacttgtctgcccgtttggaattgttgaataagaatgaagcagcaaccataccatcatcaaagaacgaaacaacacctcttcatgaggcagcaaagtgtggcaatgctcagctgaccctggagttacttgagcagggtttggatccttgcgtaaaagatgcaagaggaaagacatcttattcgctggcttcagataaggaagttaggaatacattcagaagatttatggcgctcaatcttgacaaatgggactggcatgctgcagatgtgcctagtgcactaacaaaagaaatggaagaatcacaagctgcaaaacaagcagacaaggacgccaaaaggaaagcacgtgcaaaggaattgaagaaattaaaaaaaaaaaaaaaaaagggcggccggctcgcgatctagg

SEQ ID NO: 181633 - DNA, 1534 bp, Zea mays
  Clone ID: MRT4577_9722C.1
atggcgcccaagcggaagaaccagagttctgctgctgcggtcattcctcctattgatctcaacagccaattgcctttcgcagggagacagcaggatgttcgtactccaagttggattgagtctcctacagacttggagataacagaagccaaggttctgcttgctgaaatttgtttattgaaggagagagcttataagtcctttttcaattttgtgtccaatcctcctgttggtgatagtggtttgggttttagagtgcgaccctctcccaaagatattgaggtcctggttgcttcacttggtgatcttcccaatgatgagaggcaagttcactttgaaatgcctacgagtccaggtgatgcagagataagtgctatgctggacatgttggctggggattcttcttactcggtccctgctgaaacaatggctgttgcaactatcctagagcttgaaaaaatcgatgctggcccttctgctcctgctgctgaagaagtactggtggaaatctttactggagctgatcccaatgggtgtgaccctgctgatgctgatcccaatgggtgtgaccctatcagagctgatcccaatgggtgtgaccctaccagagctgaacccaatgggtgtgaccctgtgtcgtttattatccgtattgttgacgaggacgaagaagaagaagaggaagtcccattaattcggaagaacagtcggcgttacagagtcagcggggggagtagcgatattccttctccagctctgtctgttcttgttggtctgcaacaattatccatagcaaattttgatcaggctctcgaggatgttgttcctgaagatctgctgttagagccaactgatggtgatatgatggatgtctgctctaacactccagatgtgggattagaggtatcccgggaagcgtctcgtgcatcatcgaccttggaaggcggtcttcggagccaagaggttggtcaaggtcgctcaattcccatggaggtgactaagaatccttcagccttagaggtggctgttgcagagaacccagtcttcaagggtggtgctggcggttgcctagcccccaagggtgttgccggtaatgatccggctcgggtgggtagcgcaagctacaacccagcccccgagggtgttgttggtgatgatccggcttcgatgggcagtgcgggctgcaacccagcccccgagggtgtccgagcgggctcctcttctcatacctccatggatgtccatgtcgggtcttctccaccacattctgatggcataatagcagcgcatgcttcaaatgaggaagtcgccttagagattgccccggttgatattccttcatcgagccaccacctagcttctcgtgacttaggatttccttcgttcttctctaatcttcaggctttggtcgacgggatggctggtcaattgagatcacaaggtgcctctatcccagaaggagctctgtctctgacgcaatggaatctgttgctgcttcagaagcagatatctgatttgaaaatgtcaaatgctg

SEQ ID NO: 181634 - DNA, 270 bp, Zea mays
  Clone ID: MRT4577_97230C.1
aaaaaaaaataattatataaatatggttgaaaagggaaaaattttatatgatggtaataaaaattcaagaattgaaagttaattccaagtaaaggtaaaaagttaaaggggagttattttaagttaaaaaaggtgctttttggaagaggggaaaggtgaaaaaaaggggaatgttatttaagggaaatattggaacaattgaattgggatatttattgatttgttgaaaaaatttattaaatttgttggaagtatttataaatgaaaaat

SEQ ID NO: 181635 - DNA, 786 bp, Zea mays
  Clone ID: MRT4577_97231C.1
ccggggttccaagacgcgtatacacttctactggcttgtatgagtacaggggttgggattgcaaggtggggtaccgaacatcggcgttttacatggggtttacgttcaatggagcgacatgcggttgatttctacatttcagattttcagtccgggcttcgagcattggtgaaaacaggatatggtgcacgtgtgaccccatacgttgatgaatgtgtggtaattgacatcgatccagacaacaaggatatgtcccctgaatttttgagatggctaagagagagaaacctttcaagcgatgatcggacaatgcgcctaaaagaaggatacatcaaggaaggtagcactgtaagtgtgatgggggttgtccaaaggaacgacaacgttctgatgattgttcctccatcagagcccatctcaactggttgtcagtgggccaagtgcgttctcccgaccaaccttgacgggcttgttttaagatgcgaagatacttcgaacattgatgtggtgccagtttaattagcggtgaagagtcgttgccaaagaaagtgtctgttaaatatgagtctgaattgtttcatgcaatgttagttgacaaaaatgtgcaaatgttgggtgtgattatggcaggtggagggtgttccgcccagctggcttttggatgtatagtttctttttcttttagttgtgttttgtcatttctttttaattttcagctccgagatctgaaacttgtgtaaccagatgcctcttaatctaaatcagcgtggcatttagatcgatttg

SEQ ID NO: 181636 - DNA, 851 bp, Zea mays
  unsure (1)..(851): unsure at all n locations
  Clone ID: MRT4577_97232C.1
gcgattgggaccctcgaggccggccggatgtcacctggccgctagctagggtttggtctttacggccgccgccgcttctgcagacgtcccgtgccctttgctgtttcagcgttctttcttgtagtttcatgaagcatcttggttggtttgtttcttgagtgtctcttccttttctcccctttgctcctctttgtgcagttttgttcagagagacgatgttttcctcttttttgtcgtccttaagaatttatttctctcttctgttgcgagctctgatgaggactgtgatgaaaaacacaatcaaaacacaccatctttcgggactgattggctcgatacgagccatgctgccaactctgcaattctgacgtccccattccagcccgcagattttcttttgcatttccacgcttttattcatgcgtctgtatgctgcatcgtaaaaaaattgatctgaaatactttgacagtggcctgtgacgaaactcagcaatcaaaaacaccatctttcggggctgattggcgcgagccatgctgtcacactgcaaagaattctgaggccaaacagagtataaccacttttgagtctgataccgcattggccatattttttttttcaggaaaatggtaacagcaaatcagaccagaaagacttcttggttcttaggcgtttcaaaatattgtagcctagtattttcatggtattgctattttttgacaaaccactgaacggtacccgtaaaaactgccaacgttaaaagtgaattaactactagttttattttacatttgtaggatgtaatgtgctgcagaatttgagatgnaattggatacctgcagattatgattac

SEQ ID NO: 181637 - DNA, 1371 bp, Zea mays
  Clone ID: MRT4577_97233C.1
cggacgctgcccgagacgcccgagcggacagtatggtgggccatcttgatttctgctttgcgtcgatgaaaaatgctgggcagacttcctttgcgtcactcaatcaagctgttactgaatgctcaacactgaagatggttactcaattcagggacagctttccgaagccaatactctgggctgtgattctgctctttgtgatgggtttcatagcaggtggtttcattctgggtgctgttcacaatgcaattttgcagctggttgttgtggtgatatttggttttgttgctgcacttcttatctggaatgcttgctggggtagtagaggtgcagttgggtttgttaatcgctatcctgatgctgatctcagaactgctaaagatggacaatatgtaaaggttacaggggttgttacctgtggaaatttcccccttgaatcctcgttccaaagggtcccgagatgtgtatacacttctactagcttgtatgagtacagaggttgggattccaaagctgccaatacagagcatcggcgttttacctggggcttacgctcaatggagcgccatgcggttgatttctatatctcagattttcagtccgggcttcgagcattggtgaaaacaggatatggtgcacgtgtgaccccgtatgtcgatgaatctgttataattgacatcaatccagacaacaaggatatgtcccctgattttttgagatggctacgggagagaaacctttcaagcgatgatcggacaatgcgcctaaaagaaggatacatcaaggaaggtagcactgtgagtgtgatgggggttgtccaaaggaatgacaatgttctgatgattgttcctccatcagagcccatctcaactggttgtcagtgggccaagtgcgttctcccaaccaaccttgatgggcttgttttaagatgcgaagatacttcaaatattgatgtgataccagtttaactggcggtggaagggtagttgcaaaaaaaagtgcctgttaaatatttgagtctattgtttcatggaatgctagttgagaaaaatgtgcaaatgttgggtgggtgtgattatggtaggttgagggtggttggttaagctggcctttggatgtatagttttttcttcttcttttaattgtgttttgttgtttctttttaattttcagttctgagatctgaaacttgtgtaaccacatgccttttaatctaaatctgcgtggcatttagattgacttggctttgaaattagaaggacgctctcttttgtgctttgtgttaaggacttggctaagtagtatttcgggtgtccaaaaaaaaaaaaaaaaaaaaaaaaaaaaaaagtactctgcgttgttaccactgct

SEQ ID NO: 181638 - DNA, 214 bp, Zea mays
  Clone ID: MRT4577_97234C.1
tttataatttttttttttgtttaactcggttcaaatttatttttttaaaagtttatggagattaccatagctgcaaaggcgcagagacagcagagggagactccacaagctgaaacaaagaggcaggttgcacggctgctgggtgggatgaacgtcgtagaacacgaaatgctcgcaggataagataaatctaagagagtgggaggaaactata

SEQ ID NO: 181639 - DNA, 565 bp, Zea mays
  unsure (1)..(565): unsure at all n locations
  Clone ID: MRT4577_97235C.1
ccggccggngataccctcagccacccacggtgctagaaaccgaaccgccatcgcgcagtccgcagcggctttccgcccgtcttcaccgtccacctcgacggagcccatcccggcacctgcgttcgagtccacggagattgcgatctgcttccgatctttgaggaatccaaggtcaaccgttggcgaccaagtgatctggttcttcgagttctgcaaagttgaacaccctgagtatctgtttggtgaagagaacgaagaagagagcgaagtgactgaagagaagccaccaccaccacctttggaatctcgggcaaggacttggctctacttcgacatttgcgagtccaagcctgactcacctgtgaacaaaggtcaagaacaggtaccgcaggatgaggcgcatgcaggatgctgcgatgagttcgtgagagagatctaggccggcgtctcccaggcaactttgtgttgctggaccgatgtctccttataatgcaattatttatttattttgtatacaactcctgttatgtagtagagatgtgacattcgatcctggtgcatgatt

SEQ ID NO: 181640 - DNA, 234 bp, Zea mays
  Clone ID: MRT4577_97236C.1
aacggataccctttcatatttatgacgccataaaattatggcgtgatttaattcttaaatcttcatttccacaacaacatgactacatcaatgtgttcactctaccgagattcaacactttagttactctatatgggccaattacgcgatagtggcctaccatgacatggacgcccacatttcagagaagcggaccccctcctctatctagaatgatcatccaaggccggacta

SEQ ID NO: 181641 - DNA, 1318 bp, Zea mays
  Clone ID: MRT4577_97237C.1
gcagatgctgaactgtgttgctggattgcgtgaatatttttcgcaaacagatgaaattcatacagttccaaggattccggtgatgcataccatggttaatgcggcctcaatgaaaaaggaccaaaaccttcaagaaccagactcgaagaccaaacaagctgataacaaacatttggatatggtagatgaagagtcggaagatgatgatgactatcaagttcctgatgctgatgtggaggaagaacctaccaaatctgacagtgatgctaagaactcagacccaatagatttgtcttggttttcgggcattattcgtcaggatacaaatgagaaaagtcgtaactgttgggcagtgcctgatagcaagatctttaaagttcgtagcaagaactttccacatgacaaatcaaaggtaccagcaggtaagtatctaatggagctcgtagcagttgactggtttaaggacgccaagcgcatggatcatgtcgctaggcggaaaggatctgcggttcaggttgccgctgagaagggaatgttcactttcctggtaaacatacaaattcctggaccaagtcattacagcttggtcctttattttgtctcaaactccttgaagaaaggatcgctgttgcagcgttttgccgatggtgatgatgattttagaaacagcagactgaagcttatcccatctgttccaaaggggtcttggatagtgcggcaaagtgttggaagcacaccttgcttgctggggaaagccgtggactgcagctatttgcgtggtcctgactacttagaagtggatgtagatatcggttcgtccgcggtagccaacggggtcctgggcttggtgtttggcgttgttaccaccttggtagtcgacatggcgtttcttatacaggcaaacacgtacgacgagctcccagagcagctcctaggcgctgcgcggctgtcacacatcgaaccttctgcggccgtgtatcctgtccttgacaacatttcctgaacgggacggacaaatcaacctgtgcagattctttcgttctttccgtccgccccgccacaaaaaggctctcccaatttgttcagccactgcagcattgtgcagctcgatacatttgaggttcagacagacagactgcagcagtccacaagtgccttgtacccttcatacagttttgccatttttttaggtcttttcttttacattttactttactcggtgtagtttgagcttcctacagatattgtaatgcaatagacacatcaaagtgagatatacagatacagcatggttcagaaacaagttcgtgtacttccg

SEQ ID NO: 181642 - DNA, 457 bp, Zea mays
  Clone ID: MRT4577_97238C.1
gtccggccggcggcagggctgaggcaacggtgcccaccctccggctctttctctgcttttctgcgccgccgctccgctctccgcccgccgccatgacggaacaggccatctccttcgccaaggatttcctggccgggggcatcgccgccgccatctccaagactgccgttgccccgatcgagcgcgtcaagctcctgctgcaggtgcagcacgcaagcaagcagatcgcggccgacaagcagtacaagggcatcgtggactgcatcgtgcgtatccccaaggagcagggcgtgctgtccttctggcggggcaacctggccaacgtcatccgctatttccccacgcaagcgctcaacttcgctttcaaagacaagtacaagcagatcttcctggggggcgtggacaagcgcacgcagttctggaggtactttgcgggcaacctggcctccggcggggc

SEQ ID NO: 181643 - DNA, 510 bp, Zea mays
  Clone ID: MRT4577_97239C.1
atagaggcgtggctaggctgtgggaccgccgcccctgcactctctgggtctgctcgggcgggccacaccagtacatagctctcggaggaacaccatcgcttaaataggaaactcacgtcgtggggctatgtctattgctggatgcgatacacactatgtaaccgaccacacgcgtgatacaaccacataggatgacaacgagtgggatctagtgtggctagatatcttgactcctctatcttatctgtcgagctcgtccacatcaaggggaggttggccggccatgggggaagggatggtggccgcatcgggctggggcaggctcgtcggtgaccgatggggcaaggatcgagctcacgccacggacttgcctgcaccgggccggcaccgggggggctccatctgatagtaacttggccatggggcctgtttcccatgtacatgcgggctcacgcaggggaggaaagaagcacacacgacggccagtgaaagtggcaagctgcttattga

SEQ ID NO: 181644 - DNA, 535 bp, Zea mays
  unsure (1)..(535): unsure at all n locations
  Clone ID: MRT4577_9723C.1
gtggcggccgctcccgaggccggcccgggttgcgnnatctccgaagaangttttgagtagcatattcagcaaattctgcatcgggaaatgatctcgcaggatgctgcatctagtagtttggagcagaagctttttccttgactgagaacaggaaccaacatgctgactggcacttgattcgcggcatcagaatggtgaacaggcgtgcttgttctctgaggtgccacaaagaacacaagggaggtgaagccctgtccatcctagtgcacaccgcataggatgtgtttggttgcctggttttggcgaggtcctgccggtgcaggtaccttgttgtttggtttcccgtacaacctcatgggctaggcccaattcatgcaccgacagcctggccgggcggataccggagtattggtcttcgctcctgagccaggttgcaccgatgcaggcatggaacacaagaaatcattttaagttggtatttatgttatatctcttaattaatacatccaaaaaaaaaaaaaaaaaaaggccccta

SEQ ID NO: 181645 - DNA, 328 bp, Zea mays
  Clone ID: MRT4577_97240C.1
aaaaagggccccagaaacattctggggtttaacgaaaaacctaatttcaagggcttacagggccccccccctaggaaatttaccggaaaaaactaatttcaaaggcttacagggccattttattttccccaaacccaaaattttacgggagggggggccaaacagttttttttgggaggggccctaaaaccccaaaaaagggttaaaaaaaattttgggggggcaaagcatacagcacccccgattggtttcaaccaactttgggggacaatgttgggaaaagggactggggctgagaattccacttgggggggggagtgaacttcct

SEQ ID NO: 181646 - DNA, 601 bp, Zea mays
  Clone ID: MRT4577_97241C.1
gctccacgcagctcttcatggccgcgctgtacgcgctgtcgccgcccgcgggagccggcgccggcgctgcgcccatgagcgtggtgtccgcggcgccctactactcgtcctacccggccgtcacggatttcctccggtcggggctcttccggtgggccggcgacgccagctcgttcaggggcgacacctacatcgagctggtgtgctcgccgaacaaccccgacggcgccatccgcgaggccgtcctgccctccggcggctccggcgtagcggtccacgacctggcctactactggccgcagtacacggccatcaccagacgggccgaccacgacatcatgctcttcaccgtgtccaagagcacgggccacgccggcacgcggatcgggtgggcgctggtgaaggaccgcgacgtcgccaagaggatggccaagttcatcgagctcaacacgatcggggtctccaaggactcgcagctgcgcgccgccaaggtgctcggcgcggtctccgacgcctacgagctcccggagggggcccagcaccgcctgttcgactacgggcggcgcaagatggtggagcgctggcgcgtgctgcgcgaggc

SEQ ID NO: 181647 - DNA, 298 bp, Zea mays
  Clone ID: MRT4577_97242C.1
gtccatgggggggggggggggttctattgcttgggtttgggtttttttttttgttttaggtgggcctttttttttttttttttttttttccttttttctttttttgtgttgtctgtgctttttctttttttttttccaattttcaatgtaaataatgggagcggtgggggccgggttatgtcaaaagacgattgccttccttggggtatggggtagtccccgggcttttgcggattttgtgtcttcccatttctccggcaatgtcttggcccgtttgggggttgggtttttccccctc

SEQ ID NO: 181648 - DNA, 266 bp, Zea mays
  Clone ID: MRT4577_97243C.1
agacgatgccatactgataccagtttcagctggtgtggcacttctttgcctcttgtgcatatttattggattcgtgatgctcaaatccaaaaagaagaaggcctaatggctaatactgtcaatttgttgcacaatttgttctaatttttgaaacagtgaatttattaaatgcattttcgatcatttcgttcgaattattagtagccactttttggttgtcttcgcatggaaatacatggatgagttaagtgaggcatgcttcagaa

SEQ ID NO: 181649 - DNA, 604 bp, Zea mays
  Clone ID: MRT4577_97244C.1
tcgaggccggccgggcgctcaatccctagccctcgcgccgccgccgccgtgcccggagctcgagctcctcgtctgcccgtagctcgcgccgcaacgccaccatgaaggtcaacatcccgaacccgtctaccggatgccagaaaaaactgtaaatcgatgactaccacagactacctgcctattatgaccgaaagatctcccacgaggacagacgagatgctctgggcgaggagtttaaggcccatgtcttccagatcatgagtggatgggacaagcataggcttcccaatgaatcgaggagtactgacttctgatcgtgcccgactatctgctccgcagaggcactccctgcttccgcgattatgacaagcgtaatgatgagcgcaccaagaagtctgaccgtgtctggattgcgaaccacgacctatctgatatccacttgctacttgttactaaggtcgagaacgatctgcctgtgctaactgagactgataacccaaagatgatcgagcccaaaagggactccaatatcaggaacgtgttcaatcttgtaaaggatgaccacttgctgaaggacgtcaacacgtaccgcaggacattcact

SEQ ID NO: 181650 - DNA, 643 bp, Zea mays
  Clone ID: MRT4577_97245C.1
ggccggccgggatcttatatctagccagcgatcctactgtcccactcacacatgcacacacacccatgtctcctattgccttctgcgtcttctacatcttctctacctccatccgcacaaggaaagcatcatgtcctcttagaagcatcgccacttcatcagccaccaccagaaccacgaagaccgagcctccggccactacgttgactcctacacccagatggtccccgccaccgccgaggctcataactagacccacacaaaggatgagacggaacacaaggcacatccacatcctctaccaggataacatgcatcgccctccggcacattgtgaatctacaagaagtcatacgcaaaagggactccaatgactttgacgtgtacgagatcacggaggattatcgcatgacgtctattccagggaagtacaaagcctcatccatcttacaatccacaccgacttcactaagcgggaagacttccatcgaagcctacgtctcatacaacctgcccctctctgtataggtgactcgactgcccaatttcagcgaaatcccatctggatattatgatgatcggcgaacacacagctgtataagtcagcactgcatgtacgatgatatagaagctccccaatgat

SEQ ID NO: 181651 - DNA, 494 bp, Zea mays
  unsure (1)..(494): unsure at all n locations
  Clone ID: MRT4577_97246C.1
cgggggggccccctttttttttttccccccccccccccccccccccccccccnnnnncnnnnnnnnnttttggggccctcttcccgggtnaaggggggttaacccaaagtcccaaactttccttttgttggtttggcccccaggttcaaaacaagcgggcagaagggcccgnttattcgacaggcagcctttgcgtgccaaaataggaccccccccggtttaattggactaatgcatgctggggatgggtccgatggaaatgcttctggggatgcccctcccggggacccccggtttggagaagggtttgggctgttttttcgggncgttcccggggcccggggggtttttggggtccgggttgttgttggtcttgtgggtgaaccctttgttttttttttttctggctgcgggttttttgaaggctgttttttccctgggttttggggggctggggggtttcgggaatttcttttgtttttttttttgggggt

SEQ ID NO: 181652 - DNA, 243 bp, Zea mays
  Clone ID: MRT4577_97247C.1
atcttatgaaagttaaggaacccttccaacgaatcccgcaaccggactcccttacacctcctcctccctacggaagggttgccatcccttcaccaacggaaacggtggacgtaccgctgcagcagcggttcatccgctcaggaaccacattgataccggtcctttttcaaaactccatcatctcccaccaggattaatcgcactactgcatcctaaacgcgctcacacttccctgaaacaact

SEQ ID NO: 181653 - DNA, 234 bp, Zea mays
  Clone ID: MRT4577_97248C.1
gtcgagggcacgacgtacgcgtctagatagcgagcggctttacactatcactgttttactactgctgcattcgctgccatggatccgacttgctgtgacatactcaacagtgatctaccaacaacccatcattggtggtgcgctatttcagagtgcttatgaatcatagttgaatagtgaagcattctggatgatgctggtggcgtcctagagataagaaagtacatgtttgga

SEQ ID NO: 181654 - DNA, 513 bp, Zea mays
  Clone ID: MRT4577_97249C.1
ctagcacaagcacaatggccactaccttccgcaacatcttccttaaagccgctgaggccttttgctggttgattggcacagtttccggcatgtttctcttagtgctagcactgaccctttttgcatccactagttccactcatccatctccttcttccgctcccaccgctagttccacctcctatcacggcacttgcgatgaagatgagttgcatcgactcatggcaactcatgtgggctatgtagtttgcgctatggccattgccatgttgttgatggtctttgttcggaaggttgcggacggggcagccaaggaccacgagcgggtcgccgcctcggaggacgcagcttacaaggctgcgtacgatgccgcggaggtggccaaagaggctatcgggcgcgccgagaaggaggtcaaggagctcaacgacccgcgtcgcgtcaatcttgccctgggcgttctcgagggcgaccaggctttggccgacgcccggaagaagctagatgcgtgcg

SEQ ID NO: 181655 - DNA, 366 bp, Zea mays
  Clone ID: MRT4577_9724C.1
tcgagacatctggccaaagcataacgcgctcacaggatctgctgcggtctcctgacatgggaaggacattcatcattgggcccgaggcctgctagttctctgccatggactacacttaccctctgtcgatgccgctccacgacgcagatgagctcaccaagtggtccctctaccgctcggtcatcgccgagttcatctccacgctgctcttactctacatcaccgtggacaccgtcatcgtatacaagcaccacacggacacggcctcttaaggccccgacacggcgtacagtagcgtgagcatacacggcatcatgtgggccttcagcggcatgatcttcatcctcagctactgcaccgtcggcc

SEQ ID NO: 181656 - DNA, 317 bp, Zea mays
  Clone ID: MRT4577_97250C.1
tttttattctttttttttttttttttttttttttttttttttttttaaatacggaggaacctaattggtgtttatttcatccaataattgcgtgcaaggatacacatgcatggaaacgaacatgcaatccaaaagctaccccgaggcaacgctgccgaggcggacggggttgacgtaacccctgggtctgtgcgacgcgatgccggtcgcggagggggccggtggcccgttaaagcagcaaaacggccccttcggggtagtccttgccctctttggcccacaggaaggcgcccttgaagaggtcccccctcgggttg

SEQ ID NO: 181657 - DNA, 219 bp, Zea mays
  Clone ID: MRT4577_97251C.1
cttcttctcactccaatcgtcagcttaatagctgagggagcgagtaagtctgacagtcaatcacagtcgtcgtgcaggaccattaattcatggggctgtggtggtagatgtaggaccgacgtaacagcaaatcgtccccttgagattcaagggaggatagctgcgaaaataggcgtcctttccgtccccagtccggcagtcccgagctgagtgcatgag

SEQ ID NO: 181658 - DNA, 247 bp, Zea mays
  unsure (1)..(247): unsure at all n locations
  Clone ID: MRT4577_97252C.1
cggccggnagtagacgaacgaggaggagtctccaatccgggcaggacaggctcctcccattggctcctctcccacgagctctcaccgatcctcgcggcgaggggagaccccttgaagtcactacgggtccggctgcatcccctccagaccggccgggagccagggaaccatggagaggcacgaactgttcatggactatcagctccggcaacttccggccggcacgtttgatgtcgaacaaggacac

SEQ ID NO: 181659 - DNA, 626 bp, Zea mays
  Clone ID: MRT4577_97253C.1
cgggtcgaccccgcgtccgttaaaaaaaaaaaaaaaaaaaaaaaaaaaaaaaaaaagaaaaaaaaaaaaaaaaaaaaaaaaaaaaaaaaaaaaaaaaaaaaacaaaaggaagacctctttatatggagccgggctttcgttttgcgggctggcgcgctgtcttaccccttcttgggctggcgcttacctttgtttttactggccctttaattttcattgcggtgggtcctgcgtttaaccctggtggtgaccgaactaaaccgggctggacccaaattccttttcctccggggggcttcctttttggcaggcgggccgcgtccggctttgcccccatttagctcgcccttattggcaattgggccgccccttgtccggtcgcttctcccccggcgggggggctgttttctcgctgggtgacctttttttttgccagggccctgctgcccttcccttcccctttttacccttccttttcctttagggccccggtttttccccgtcacgctccggtttgcccggtcactttttggttcggattttcctttttggggtccctttacccggtaacagggctttggcccttggatcttggattgggcgttcgtcttagtggacggttcttc

SEQ ID NO: 181660 - DNA, 342 bp, Zea mays
  Clone ID: MRT4577_97254C.1
ccgacgcgtgagctgacacctgatctgactcgtcatcggactcgtcggctgacgcgtggggccgaatccaccgcatgctcaaactgggactgagcatctactagtactgacaggcaccccaggctgacaccgacatgccccctctgaactatgacgcttgcgacaacaacatggacgaggtgctctaagctgagtgcattctcatctaggaaagagagagaacatcgcgtctcatctgtctgtcttaccacttatgctatgatccaatgagccccaggtatcctaacgctactattgtgtctgctgtcttctactccatcatgctgcttttttgcggcctca

SEQ ID NO: 181661 - DNA, 425 bp, Zea mays
  Clone ID: MRT4577_97255C.1
aaacacgctaaacctagcaatccgccccaaatcggcgaccgcacgcacgccgtcgcggccatggcgacctccttcgcgttcggcaactccggcggcgcgggatccacctcgtcctcccccttctccttctcccccgcaacaaccgccttcacctccaccaaaagaaaaaaaaagaaaaaaaaaggagcagacgtaagataaccacaaaggaaagaaaagccagcacgagaatgaacgcaccaaaccagcctcgaaagaagaaaataggcgaataaagaccgaagaaaaagacaacaaccaagacaccgcgaaaggaaaaacgagaaacttagatacccgcgccgacaagcgctacaacgaaggggaggacagaaccgacaaagaaggacacaacactaaaagacaggataaacgaagaaggaagg

SEQ ID NO: 181662 - DNA, 278 bp, Zea mays
  unsure (1)..(278): unsure at all n locations
  Clone ID: MRT4577_97256C.1
cttgaatctgacatatgctccagatgcaggctcctttgaacatctgcagtttttgcaccanagactactgccctagggtcatcctcgtgctcccattgtactcagatatgtcactgcctcagcttgagaccctagagatcatttgctgcggtgatcttagggagatcttccacccagaagaccccaagctcgagaaccaagatgaggttgtcaagcattttcccaagctacgacgcatccacctccacaacctcccgacgctacgcagcatctgcggt

SEQ ID NO: 181663 - DNA, 503 bp, Zea mays
  Clone ID: MRT4577_97257C.1
aaaaacgacgaccctttggcccttttatttatctgggcgaaataaaaccttggcttccatttttaattggtcagaagaagaaaaaaggccagggggggtttttgtttttttcgacacgggcaagcacaagacccttatgaaggacaacaacactggacacggctcctgcagaaaaaagagggggggaaggggagcaacaggggcccaggggcagtcaggggccgaacctttccctggcatgggggggattggagtcgatggtggggccaggggggataatcccgtatggggttatgggcgggggggttccggaggaggggttcctggggggttccatgttgacggggctgttgatgccggggatctgggatatgtccttggggtagttgaacaggtttgggtacttccttagaagctttttgttgcacttgaagggaacggggtaaacctgtgattgggggaaacgggaaagaaagaaagcttcgatgggatgcacaggtttg

SEQ ID NO: 181664 - DNA, 477 bp, Zea mays
  Clone ID: MRT4577_97258C.1
gccccaaaaggaggggaacccctacaggggaaaaacccacaaacaaagaatccccccaaaaaaaaggcccaaaaaacaacaccgcaaatgcatgagacaaaaaacggggacaaaaaaacacacccgagtagcacaaacacacatggggcaaaaacccgggcggtacacatggacaaaaaagccctaaccacacgagaagtttgcacccccgcgggataccccaccacgccactccaaaccacccaacaccaaaacccgccaaaaaaagactcgtgctaaaaatagggccaaaaaacccccccaaaccaaatgcaggaacccgggttcccccgggcccgggggacccaaaacccgggaaccaccaacagggggaaccccaaaaaccggggccaaacgcagcagggcccccaccggcacggggaccacgggcccaaaatgcgccccaaaaaaatcgggcacaaaaaggtcgcgagcaaa

SEQ ID NO: 181665 - DNA, 313 bp, Zea mays
  Clone ID: MRT4577_97259C.1
gagaatatgtttaaagttttttttaattgactgcaaacatctggatgccagatatttcttcaggatcaggcaggcaaaattgttacaaggtattgtcatataatcccgcatattgcaccatattctacattttattaccctatcttattttttaaaaatattcctttatttttatatttttcaatattttacatattttataattttttacatttttttttgttattcgattattatatcaattatatactttcttttcttatttttttataataatttttcttaattattatttaaatcttttactttttat

SEQ ID NO: 181666 - DNA, 2009 bp, Zea mays
  Clone ID: MRT4577_9725C.1
ctcttaaactaataattagtatatacataaagcatgggttgattacacaaaaattaattaaataaacttataatgcatcacctcattaagcatagagtgactctacaaaccaaacacaccatatatgtctcaatcacctccaaactacatacaacaaacaccagactgcgtgccacgatctcggtaaaagttggcactaagtctatcttcagcagcttccatcccatctcctattttaaatttcaactctactatgtttccaaaacattgttttaatttataagactatatgtcaacagattcgtcctaataatgcgagcggcatcatataacaacgcaattatcttattggggtttcttctgaacctacacacacgcgtcaacgcctccgtttcttccccggatgcccagaacccagctgttctggacgagaacgaacgacgcactccgaacagtctttaccaatactcgagacagccagccacctatagtactacaatgaacggctacgggctacggctaaaatatctctcagtgtatctgcctatctatacataagttttgcataaaagcgcactttctaacagctggagggagggcgcaaggccagcgtcattgttcctcatgtacgtctgtctcgtcgtatatctcctcctgcaggagctcctctatgacatcctccatggttatgataccaacagcctcttcatcttcgctcagtgtgggcaagggctctttatggacctgcagaacgtctgcttgatctttggaccattttttaggcctatttcctctatttgatgtgttctgagtgttagggtagctcttccatctttgcagtggtggcggaaggtttttcacgaccttttcgttgttcttatcatcaatagcaatggacacctcaaaagttccaccatcattagcagcttgttcagctggttggtaacttggattgtttttccttatgactacagccatgtggctgtgacctttctgaaattcgtttaggatgtcatagaggggcatttcttctagaacacgaggaattttgcggatagttacactttttataggaacctcatcatcagccctaacttataatcaattcttcaccaatatcaatccaataatattcgttttcttttcataatacacaggaactctgctatgccctttctcaagtacctcttgcattagattcctgtcaagttttgcatttatatcaattgcaaatgtttgacacaagggtgtcatagcatctttagctttcttttcagtcagttcaagagctcctgctattatggtagtttcatcatgggttaattctccacctttgccagcctcattcccgtgcagagtgacaagtgtttttagttcagctctacggaagagagctgtctgaccatgacccagcacatagtccaatagcttgcttataggataggcaataggaaagcagacccaaacaagcacacggactaatggagcaactgaggcaccaatagccagcccataatgtgagcagatggactgtggtaagatctcaccaaaaagcagaatcagtgtcactgatattaaaatagcaccccaagctgtcaccaagctatcaaggaatatgggcaaagcctccattgcagccgcattgcagattagaagagtgcatagcagaaggtgctggttcttcacaacaggtaaaatcttagctgcgtgcttgcgatcctgctcggtgccggacttggcgaggacctcgagatcgacgaggctgagggacatgaggcccagggtgaggcccgacatgaggcccgcgaagagcacgagcacgatgatgatgacgatgtgctcgaaaaaggccgccgagcagcagtggtactccaccgccattcacctccgccgccggctcctctctcccctcctgcttgacgacgagagccaccaccaccagaagcttctcctccgctcgacccgcgaactcaccccacccgacagcaacggagctcgaccgcagttgc

SEQ ID NO: 181667 - DNA, 385 bp, Zea mays
  unsure (1)..(385): unsure at all n locations
  Clone ID: MRT4577_97260C.1
cggaaaacccaacngcgcgagccccccggcgagccggnggccaaccgcaccggcgagcgccaggcgngccccgacgcaaagcggcgggcgcccanggcagggacagaggagacggagcggcagagggcaaggggcgccggggcagngcggacggaggcaacggccgagggggaagggaaaggaggggaagaacgcggcggggaagaagaagccggcgagcgggagcaccaaggcgaagcccaacgccacagagccgcgggagcacgccggaggngcggcggagcggccccggacggaggccaacaagaccaggacgggcgcacaacaagggcaacaaccggcagggagccaaacaacaagagagaaaaaaccagcgcacgagaaa

SEQ ID NO: 181668 - DNA, 332 bp, Zea mays
  Clone ID: MRT4577_97261C.1
cttcccacccatcccctgcttctagctcctcctccttccccagcgggtggccgcagcaatttgcaagcagcagcagcagaggaagaacagcgtcacgttctgacggaggagaacaggagaaggtctcgggtttcagctgcctgtatgagcgccgccatggcgtggtatccattaccgcagagcggaggcacaggcacgccgtcgggcggcggcgagctgttggacgaccagagcggcggctgggcgctctggagcttcggctcagctgacgacgaccacggcgctggcgtggtgcgcgcggagacgcacgggagttcaaactagcggacgga

SEQ ID NO: 181669 - DNA, 287 bp, Zea mays
  Clone ID: MRT4577_97262C.1
tagtttgacaaataaaaaagagacgcgccgacatccacagacactatcaagcgccagcgctacctgcgaaatacctaagaaatgctccgaagccgaggagctgcacgactgcacacaggaatgaggactatatacgcgcctggaactgaaaacggggtgcacacctcccgacaaggacgacccacacattaagctccacgagatggacaactgagcacactacctcgaacagctgccaaagtgcaagacaagaagcccccccaagccatcagcctgcaagcacgagc

SEQ ID NO: 181670 - DNA, 458 bp, Zea mays
  Clone ID: MRT4577_97263C.1
ccggccgggaaaagctgagcaagtagcgattgcttgtaacccgagcgggggcaataaggtagtgtggatgtcaattgtggtgcatgtgcctgggtctagtgctacaaactgtggaccacccattccaagttgtgtagtgggtttcggatgccttggtgaaagcctttgcatcccaacacctaaagtggtggacattgcgtgaggctggcttcacagagcagcgagtaccgcccgccaccagcggtggaaggataatgagtcgctatgctataggccaattgaggcacatgtgccctctctggtagaccactatctttttgctatttttcttatctacttttgttcctatgtaaccattacgagtatcacgtttttgttctgcatcttggaataaattaatttgtaaaaaaaaaaaaaaaaaaaaaaaaaagcttgtacctgcccgggcggccgctcga

SEQ ID NO: 181671 - DNA, 368 bp, Zea mays
  Clone ID: MRT4577_97264C.1
ccggccggggctgagcaagtagcgattgcttgtaacccgagcgggggcaataaggaagtgtggatgtcaattgtggtgcatgtgcttgggtctagtgctacaaactgtggagcacccattccaagttgtgtagtgggtttcgggtgccttggcgaatgcctttgcatcctaacacctaaagtggcggacattgcgtgaggctggcttcacagagcagcgagtaccgcccgccaccagaggtggaaggataatgagccgctatgctctaggccaattagggaacatgtgccctctatggtagaccactatcttttgtaaattgtaaaaaaaaaaaaattaagaaaaaaaaaaaaaaaaaaggggcggcc

SEQ ID NO: 181672 - DNA, 151 bp, Zea mays
  Clone ID: MRT4577_97265C.1
ttttattttttatttttaatagctgagcagggggggatgataaattggcagggctacaagctttaccccgattcatacaaatttgaacaagaaattactaacgtatgtatactagaaactggggctctctgggtctaaaaaatgctagaag

SEQ ID NO: 181673 - DNA, 2682 bp, Zea mays
  Clone ID: MRT4577_97266C.1
atgaggcgaagtggattggtgacatcagagatcacccctgctgccgaagcagaacaagcagatattgaagaaactgattctgaagatgatcacactattgcaataccaagcaagcctagccacctggacttcggaaagtcaacaatctccaaggctgatttcccgaagatggtaaaatcgggctactttagcgaagatgagaagaagttgattcgcttcggaggagaggaaactaccccgaagccagagaaggatgaaatagtgattttcaagagtttcctcaaagctggtttgagatttcctttgaataggatgattgccgacgtgctaaaaaagtttggtatctattttcatcaattaactcctaatgttattgttaggcttagtgtttatatttgggctctccgaagccagggggtggagccatttgccgaaggtttctgccgggtacacgagctacattatcaaactaaggccagaaaagatgggttacatgaaaattttggttgttataattttgcctatcggaagactacgaagtttcctgtaatcagctatcgaagcaagtggccggcaggctggaagtcagaatggttctacgtcaaagttgacgatgacaaggagaagctagtaccgagcccgcttgaattgatattcggagagaccagacctcactgcaatatgacaccagaaggtccaactcaaatcgcgttggctgaattcaggattattgctgagcacattggcactagagatcttgtgcaggaatttctgtcgttcaaaatatttccaactatgaaggaatgggctatgccgaagctcaaaaaagagaagaaagaaggagaacttgtccgcctgccctaccattacaagttcaagaaatattttaaagaaccctgccaagaatggttcgaaacaattgaagtaatgagtactgaaattcttggaaattattctaaaaaagaagatcaattgatgacagcagccttcggcacccggccgaaacgaaggctaaatagagtgcttgatgctataggttttgaataccctgactacgagcggctagacaagggtgccgaagggcaaaaaagaaaacgagtggccagcgttttaactaaagacgacgaagatcaaccgaaaaagaagaaagaaaaacttgagccgaaagcaattgctccaagaaagagaaaagctgcgtctccgaagcctgcatcaccgaagccagcatctccagaaccagagatattagcccgagatgaagaagtatatgtggcaccttctgctgccgaagcggaagaaattttgaaggtaatgactgaatctttacctgtcaagctaagtccgctggcaccggaactgacaaagttttttcagaaggacaaagagacttcggcagtagaaagtcctgcgaagccgaaaaaacaaagaatcattcaagtgacagatgtgatccacaggacaccgtcaccgtcatcggtatcaaaaattgttgttgccaagaccgttgaaaccgctaaaggtgccgcagccgaagccaccagagtggagacccccgaagctgaaaccggcggagccgaaactaccggggccgaagccggggctacagaagatccgaacctggaagagacacttgaagttattgacaatatactcctgaaaatggctgaagaagaagctgctgtggtcgcggcaagcacagctactgaaaaagagaaaaagcaagttgaagacgctttggaaggagattttaaatttcaagatttacttggacaagaattaacagatgctgaaaaagaagagcttaaaaaatatgccgtatcctgtggatataagcctggggctatgctatttggtggagttaacgaagggaaactgagatgtcttcgaaaccacagcgaggctaaaattattagaaccctctcgaaaagcattggcctgccgaaactagaagcggacctctgccgctaccagcgacaccatatcgctggaagcttgctttatgctaattttaagagtatactactaagtaaggttctaaaaatgcaacaagatctcgaagaggagaagaacaaggctatcatcaaagatttggaagaaaaagttgaaaattacgaagctactctgaaaaataaggacttcgccatccaagattttgaaatcatggctaaagagcacgaaggtgcattggaaaagaaggactttgttattcagtgtatggaaggctccttggctgaagaaaagaaacaccttgaaacaagtcttaaaactgagatggataaaaattcaaatctgcaaacatccttgaaagaactccaagagaaatgcctaagcttcggcagtcgatgcgtgcagcggctgaaggatgtgtttcattctatcggagccagctctgaaaaatttacaccttcggctgcaaacctgcccagcacattagaatatattgaaggcgaggttgatgctcttgatgaagttattggtgggcacgccgacttctacgccatggtagcttctcggggcacagctgccgcttttctaaaggtgacgaagctcgaagtcatcttaagccggatgacgaagctgatgtatgacgaagctgaagttttgacgaaatctagcctgaagcttgatagttgcttcaccatactttcctgcaaaaattctggagagacttttgtaatataa

SEQ ID NO: 181674 - DNA, 2976 bp, Zea mays
  Clone ID: MRT4577_97267C.1
atggccagagtgcgctctactgctagggctgagcgcgaaggagacgaagccgaggctgcggaaactgtccctatctcggaagcgatgaggcgaagtggattggtgacatcggagatcgcccctgctgccgaagcagaacaagcagatattgaagagactgattctgaagatgatcacactatcgcgataccaagcaagcctagccacctggacttcggaaagtcaacaatctccaaggctgatttcccgaagatggtaaaatcgggctactttagcgaagatgagaggaagctgattcgcttcggaggagaggaaactaccccgaagccagagaaggatgaaatagtgattttcaagagtttcctcaaagctggtttgagatttcctttgaataggatgattgccgatgtgctaaaaaagtttggtatctattttcatcaattaactcctaatgctattgttaggcttagtgtttatatttgggctctccgaagccagggggtggagccatttgccgaaggtttctgccgggtacacgagctacattatcaaactaaggccagaaaagatgggttacatgaaaattttggttgttataattttgcctatcggaagactacgaagtttcctgtaatcagttatcgaagcaagtggccggcaggctggaagtcagaatggttctacgtcaaagttgacgatgacaaggagaagctagtacagagcccgcttgaattgatattcggagagaccagaccccactgcaatatgacaccagaaggtccaactcaaatcgcattggctgaattcaggattattgctgagcacattggcactagagatcttgtgcaggaatttctgtcgttcaaaatttttccaactatgaaggaatgggctatgccgaagctcaaaaaagagaagaaagaaggagaacttgtccgcctgccctaccattacaagttcaagaaatattttaaagaaccctgccaaaaatggttcgaaacaattgaagtaatgagtactgaaattcttggaaattattctaaaaaagaagatcaattgatgacagcagccttcgacacccgcccgaaacgaagactaaatagagtgcttgatgctataggttttgaataccctgactacgagcggctagacaagggtgccgaagggcagaaaagaaaacgagtggccagcgttttaactaaagacgacgaagatcaaccagaaaagaagaaagaaaaacttgagccgaaagcaattgctccaagaaagagaaaagctgcgtatccgaagcctgcatctctgaagccagcatctccagaaccagagatattggcccgaaatgaagaagtgtctgtggcaccttctgctctagaagtggaagaaattttgaaggtaatgactgaatctttgtctgtcaagctatgtccgctggcaccggaactgacaaagttttttcagaagggcaaagagacttcggcagtagaaagtcctgcgaagccgaaaaaacgaagaatcattcaagtgacagatgtgatccatgggacaccatcaccgacatcggtatcaaaaattgttgttgccaagaccgccgaaactgccaaaggtgccgcagccgaagccaccagagtggaaactcccgaagctgaaaccggcggagccgaaactgtcggggccgaagccggggccacagaagatccgaacctggaagacacacttgaagttattgataatatactcctgaaaatggctgaagaagaagctgctgcagtcgcggcaagcgcagctactgaaaaggagaaaaagcaagttgaagacgttttggaagaaggagattttaaatttcaggatttacttggacaagaattaacagatgctgaaaaagaagagcttaaaaaatatgtcgtatcctgtggatataagcctggggctatgctatttggtggagttaacgaagggaaactgagatgtcttcgaaaccgcagcgaggctaaaattattagaaccctctcgaaaagcattggcctgctgaagctagaagcggacctctgccgctaccagcgacaccatatcgctggaagcttgctttatgctaattttaagagtatactattaagtaaggttctaaaaatgcaacaagatctcgaagaggagaagaacaaggttatcatcaaagatttggaagaaaaagttgaaaattacgaagctactctgaaaaagaaggacttcgccatccaagattttgaaatcatggctaaagagcacgaaggtgcattggaaaagaaggactttgttattcagtctatggaaggctccttggctgaagtccaagccgagaatgatagcttaaagaatgaattgcttaaacaatcagaaaaatttgagcaggaaaagaaacaccttgaaacaagtcttaaaactgagatggataaaaattcaaatctgcaaacatccttgaaagaacttcaagagaaatgcctaagcttcggtagccgatgcgtgcagcggctgaaggatgtgtttcattctatcggagccagctctgaaaaatttacaccttcggctgcaaacctgcccagcacattagaatatattgaaggcgaggttgatgctcttgacgaagttattggtgggcacgccgacttctgcgccatggtagcttctcggggcacacctgccgcttttcagaaggccggctgtacgcatggaaatattttgaatagaccaaactttggcttatcagcgtcagatctgatagatatcccaagcctggccccaagcattggaaatagattcatgacccagatctgggtaaatgggggcgaaaaatggcaggtgacgaagctcgaagtcatcttaagccggatgatgaagttgaagtatgacgaagctgaagttttgacgaaaactagcctgaagcttgatagttgcttcaccatactttcctgcaaaaattctgcagagacttttgtaacataa

SEQ ID NO: 181675 - DNA, 392 bp, Zea mays
  Clone ID: MRT4577_97268C.1
caaaaaaaggcgggggccgggagcttttttcatggtttaaaagctttacaacataagcagcaaacccagaaacagccctaataacccccatttattagggcagaccaacacaaacgataagcgcggggcaaatcaaaaaaaacccacaccttgtaaaacccatataaaagcttgattaagcccagcaaacccccaaaggctttttactgaaaaaaaggccgccttaggcaaaaggtttctccaactggaggggctcccccacctcccagggaaagtcagggccgccccttccaaaggggccgaaggccgccgtcttgaggaaccccccgttgcccccttttttgaggccaaggttgataataatcatcccaggcctgaaatcaaagttctcc

SEQ ID NO: 181676 - DNA, 286 bp, Zea mays
  unsure (1)..(286): unsure at all n locations
  Clone ID: MRT4577_97269C.1
cgacattaatcacttccattctcaaccnacccgccgggcgggaattttagcacatggaaccaacccctaaactctacagtccaatggatcattcaggccagtggtaacactgccactgacacccatggggaagcatgacaccttattaccccaccatcgcccctaaattacccaactaacaacctagccccccgctatacgacagcacatactgtccccagctggggacaccaccagaagcttcccaaaggcatggactagggtacttccggccgcacaacgccgt

SEQ ID NO: 181677 - DNA, 465 bp, Zea mays
  unsure (1)..(465): unsure at all n locations
  Clone ID: MRT4577_9726C.1
cgccatcaacgccaaggacgcctttgctcgacacaccgacgagatctggggtacgcagctcagcaagaagtctgttcaggacaagtctggacgcgccgcgcgccgcgcagctgaaaaggcccagaaggctaaagagcaagcgcaggctaatgctaagcacgccaaggccgaagccgacgcccaggcagagagcctcaaggacacgctgttgaagaaggcggccagtgcccaaaagctggcggaggagtatgcagagggcatcaaggcagctgtgcgcggtcaagccgacgaggtcaagaaggcagccgatcatcacgccaaggacgtacccaagcctgaggagatcaaggctgctgccgccgagaagggacagggcgctcagcgaaaggccggggagtttatcgagcatctgagcgaaaccatgatcaggaaggcacacgacgcgcaaaanaattgtcggtgatg

SEQ ID NO: 181678 - DNA, 350 bp, Zea mays
  Clone ID: MRT4577_97270C.1
cccacgcgtccgcccacgcgtacttccacgcgtccgagacaatgctgatgccttgatgcttatcgttttctgtaatgttcgtaaataggctcttcgtcgccttgttgtctgactgctacattgtcaatatttcaaaacatacgtatttgaatcaaatgtctggattggttatgcctaaaaaaaaaataacttaattggatacgaacacataaataaaaaaaaaaaaatacaacaactaaaaacttaaaaaaataatattacaacaacaaaaaaaaacaattacaacaactataaataaacggggctgacatttcaagaaatcacaacttaacatcatcactagcaactac

SEQ ID NO: 181679 - DNA, 2250 bp, Zea mays
  Clone ID: MRT4577_97271C.1
cattgggtacctcgaggcggccggagtcttacgacgatccggcaacgctacctttccgtcgctcctcccccacccacgaaccctgccggaagggcaaaaaggggttcgaaattggtcctgatccaggagccaatcctacagacttcacctcccaaattcttttcccgatccgatctgcaagttctccttggatcctgcatcctccagccgattcctgggaagatctgaatcctcctctcgaccatggatccacgcgccaggtatccttcgggcatgggcaacggccgcggtgggaacctcaactactacggccgcggcccaccgccgcaacagccgcatcagcaccacaaccaccagcagacgtcgggggcgcaccaccaccagcagacgtcgggggcgcaccaccaccagcagtacgcgcagaggcagcaccagcaccagcaccagcaccacggccacaatcgccatcagcaacagcagcagcaccacatttaccagcagcaacagcagcagtggctgcggcggagccagattgcccgcgagacctcgggcgcagccgtgaccagcgagccgaagtccctggcgccatccacggccgccgatggcgtcgattcgagttcacaagattggaaggcccaattgaagctgccgcctccagatacacgctacaggacagaggatgttacagctaccaagggaaatgagtttgaagactattttctcaagcgtgaactcctaatgggtatatacgagaagggatttgaaagaccgtctcctatccaagaggaaagcattcctattgctttaactggtagtgacattcttgcaagagcgaagaacggaactggcaagactgctgcattttgtattcctgcactggaaaagattgatcaagaaaaaaatgctattcaagttgttatattggttcccacaagggaattggctctgcaaacatcacaagtttgcaaggagcttggtaagcatttgaagatccaggttatggtcaccactggtggaaccagtttgaaggatgatattgttcgtctgtaccaacctgtgcacttactcgttggaacacctgggcgtattttggatcttacaaagaaaggtgtttgcattttgaacgactgttcaatgcttattatggatgaggcagacaagcttctctctcctgagtttcaaccttccatagaacagttgattcgctacctccctgctagtcgacagattttgatgttttcagcgacattccctgtgactgttaaggagtttaaggacaaatatctgcctaaaccttatgtgattaaccttatggacgaacttacactgaagggaattacacagttctatgcttttgtggaagaaagacagaaagttcactgtctcaacactctcttttccaagcttcaaatcaaccagtcaataatattttgtaactctgtaaatcgtgttgaactattggcgaaaaagatcacagagcttggctattcttgcttctatattcatgcaaagatgctacaggaccaccgtaatagagttttccatgatttccgtaatggagcatgcaggaaccttgtttgcactgatctttttacaaggggaatagatattcaagctgtgaatgttgttatcaattttgatttccccaagaactctgaaacatatctccacagggttggtagatctgggagatttggtcaccttggtctggccgttaatttgatcacctatgaggatcggtttaacttgtataggattgaacaagagcttgggactgaaataaaatcaattcctcctcagatagaccaggctatatactgccaataatctgaccgttttcatatgctttcatttctccgcgaataatgagaacttttgtaaataccagctcatcaggttttatggtgttgatctcgtttgttgcatcagagacaattctatgttggtggataacattagatgaggcacccaacttattttattacaccttgtcatgctgacactgttatggctatatgagggcaaatgtcctgccacattaggcacaaagtagtgtatattctaggtgcctattcctaggccctgtcctgcttttagtttctttttctcttattttcatcctattgtgtcattagctgtttcacacaggacattttaaccctgttgctggttctgggcgtgtgatctgtcggtgctcaaaaaaaaaaaaaaaaaaaaaaaaaaaaagtactctgcgttgttaccactgct

SEQ ID NO: 181680 - DNA, 362 bp, Zea mays
  Clone ID: MRT4577_97272C.1
gttctagatcgcgagcggccgctcgcggtacctgttttactactctctgtttggtggtttctgaggaagttgcccgtgtacttgtatcgtaaaaaaaaaaaaaaaaaaaaaaaaaaaaaaaaaaaaaaaaaaaaaaaaaaaaaaaaaaaaaaaaaaaaaaaaaaaaaaaaaaaaaaaaaaaaaaaaagggcgccacgataaaaaaaaactaaaatttaaatacccttcaataacaattacataatttttaaaaaaaataagggggaatccaattaataggcccttaaatttaaaaccgctttgaacaaaaaaacctttttgttaaaaaaactcaaaaaattaaaatttcaccccctttttac

SEQ ID NO: 181681 - DNA, 2547 bp, Zea mays
  Clone ID: MRT4577_97273C.1
tcattctgggggccaaaagaactgcaaagtttgttattatggaagaaacaagtagacagttctggtacccataacctggccaagttgcttgtgccaaacacataaatccatcacaaacgacaagaacgttttatcccagcgttacattcgccggacagaatctaaatggcgaccatgccaagaagcaaagggacatggttgcaagggtaaaagacagcacagcacggtgcagcttaccaccgattattggcaaacttaaaaccacttcactaccgttcagactccagacctcaagtgtgatggccgacttgtcacacccattaaccaatctgaggcgcacatccccaagttccacttgggctaaaatgtcttttacccttgtgcgcggcacccacaggccacacgcccagaaccagcaacagggttaaaatgtcctgtgtgaaactgcttaacgacacggcgtacggaaaacaagggaaatacaaacgaactcaaagcaggacagggtctaggaataggcacctagcaatatacactactttgtgcctagtgtggcaggacattttccctcatatagccataatagtgtcagcatgacaaggtgatcaggaaaagtcgggtgcctcgtctcacgtaatccaccaacttagaattgtctccgatgcaccaaatgagatcaacaccataaaacctgatgagctggtatttacaaaagttgtctccttattaatcacggagaaatgaacaaagatgaaaactgcctgatcattggcaatatatagcctggtctatctgaggaggaattggttttatttcagtcccaagctcttgttcaatcctatacaagttaaaccgatcctcataggtgatcaaattaacggccagaccaaggtggccaaatctcccagatctaccaaccctgtggagatatgtttcagagttcttggggaaatcaaaattgataacaacattcacagcttgaatatctattccccttgtaaaaagatcagtacaaacaagattcctgcacgctccattacggaaatcatggaaaactctattgcggtggtcctgtagcatctttgcatgaatatagaagcaagaataaccaagctctgtgatcttcttcgccaatagttcaacacgatttacagagttacagaatattattgactgattgatttgaagcttggaaaagagggtgttgagacagtgaactttctgtcgttcttcaacaaaagcatagaactgcgtaattcccttcagtgtaagttcatccataaggttaatcacataaggtttaggaagatatttgtccttgaactccttaacagtcacagggaatgtcgctgagaacatcaaaatctgtcgactagcagggaggtagcgaatcaactgttctatggaaggttgaaactcaggagagagaagcttgtctgcctcatccataataagcattgaacagtccttcaaaatgcaaacacctttctttgtaagatccaaaatacggccaggtgttccaacaattaagtgcacaggttggtacagacgaacaatatcatccttcaagctggttccaccagtggtgaccataacttggatcttcaaatgtttaccaagctccttacaaacttgtgatgtttgtagagccaattcccttgtgggaaccaatataacaacttgaatagcatttttttcttgatcaatcttttccagtgcaggaatacaaaatgcagcagtcttgccagttccattcttcgctcttgcaagaatgtcactaccagttaaagcaataggaatgctttcctcttgaataggagagggtctttcaaatcccttttcgtaaatacccattaggagttcacgcttgagaaaatagtcttcaaactcatttcccttggtggctgtaacatcctctgtcctgtagcgtgtatcaggaggcggaagcttcaattgggtcttccaatcttgcgaactcgaattgacgccgtcggcggccgtggatggcgccagggccttcggctcgctggtcacggctgcgcccgcggcctcgcgggcaatctgattccgccgcagccactgctgctgctgctgctgactctggtgctgctgctgttgctgctggtggttgtggctgtggcggtgctgttgctgctgcctctgcgcgtactgctggtggtgatgcgcccccgatgtctgctgctgctgctggtggtggtgctgatgcggctgttgcggcggtgggccgcggccgtagtagttaggggtcccaccgcggccgttgcccatgcccgaaggatacctggcgcgtggatccatggtcgcgaaggaggacttgcagttcggatccggaaaaggatttgggagaactagaagattggctcctggatcaggggaccgatttcgagccccttttgcccttccggcaggggtcgtgggtggggaggaccggaggagcgacggaagggtagcgtggccggatcttcggaaggagcgaaacattggtagggattacggaggagcaattccctcgaaacctcgagggta

SEQ ID NO: 181682 - DNA, 1315 bp, Zea mays
  Clone ID: MRT4577_97274C.1
gagggcaaaacagctgcaacgtttgttattatgaaaaaaacaagtaaacagttctttacacataacctggacaggttgcttgtgccgaacacaaagtcagcacaaacgtgacgagcgttttatccaagcaaatctaaatggtgaccacggcaccaagcaaaagtgacatgactgcaagggtaagacagcacaacatgatgcagctcaccaccgattatttgcaaacttaaccagttcactaccgttcagactccagacttcaagttcaatggccgacctgtcacccaataacccatctgaggcccacatccccaagttcgactcgggcaacaagcttgtgtgagcaccgacagatcacacgcccagaaccagcaacagggttaaaatgtcctgtgtgaaacagctaatgacacaataggatgaaaataagagaaaaagaaactaaaagcaggacagggcctaggaataggcacctagaatatacactactttgtgcctaatgtggcaggacatttgccctcatatagccataacagtgtcagcatgacaaggtgtaataaaataagttgggtgcctcatctaatgttatccaccaacatagaattgtctctgatgcaacaaacgagatcaacaccataaaacctgatgagctggtatttacaaaagttctcattattcgcggagaaatgaaagcatatgaaaacggtcagattattggcagtatatagcctggtctatctgaggaggaattgattttatttcagtcccaagctcttgttcaatcctatacaagttaaaccggtcctcataggtgatcaaattaacggccagaccaaggtggccaaatctcccagatctaccaaccctgtggagatatgtttcagagttcttggggaaatcaaacccgaccggcctcgaggtagcctgaatatctattccccttgtaaaaagatcagtacaaacaagattcctgcacgctccattacggaaatcatggaaaactctattgcggtggtcctgtagcatctttgcatgaatatagaagcaagaataaccaagctctgtgatcttcttcgccaatagttcaacacgatttacgcagttctatgcttttgttgaagaacgacagaaagttcactgtctcaacaccctcttttccaagcttcaaatcaatcagtcaactagcagggaggtagcgaatcaactgttctatggaaggttgaaactcaggagagagaagcttgtctgcctcctccataataagcattgaacagtccttcaaaatgcaaacacctttctttgtaagatccaaaat

SEQ ID NO: 181683 - DNA, 356 bp, Zea mays
  Clone ID: MRT4577_97275C.1
acttcactctgcaaacagtgcaatctacagtataaaacaatattttacacggcctgctggagatggccttaaagcccaactaatggatgtgtaacgttaacatgtgaattgaactcttttttgtccttacaaagaccactctttttatgttcttataaagcccaaactctaagggatgtgtaaggttaacatgtgaatgtttaactatattttcgtttacctaaggtgacaaggcttcaacttctcatcctgcaaagcagtccatcaagactcctgcagacaaatctaggaagacccccacagctgacaagaaatcccccaaatctgggagccatggctgcaagtaacgcaacaaa

SEQ ID NO: 181684 - DNA, 301 bp, Zea mays
  Clone ID: MRT4577_97276C.1
cacgcgtccgtatagctgtctgcctgcggtgtttgactatgcttaggacgctctggtgtactaaattcaatctatatgcgcatgatgtcagatgaacgcttaagatctgatgcaactgctgttctcattgatcgcccttctggacaaatcttgtcagcactgactggtcactcgaagaaggttacaagcgtagaatttgtaggcgactctgatcttgttttgaatgggtctgctcacaagagagtccgtatctggcggcatcctgtggatgggaattatccctgtgggtataccttgaatg

SEQ ID NO: 181685 - DNA, 474 bp, Zea mays
  unsure (1)..(474): unsure at all n locations
  Clone ID: MRT4577_97277C.1
cggccgggcaccaaacctacatttctccttccctctctctaggctaggctaggctccctcagctgtgtggttcgatcgatccgccggtctcttttgctcaccaattaagaaccaagagacagcatgcaccaccctgctggtgaggtagttgccggtgttttcctcccgtacctgccgcccgccgctgcagcagccacagcgcctttcggtttcggaaccggaccccaatcccataaccacgcgccagcagatgacgacggtcacctgctgttcccgtgcaacgacgacagtgacctgctgacgctgctgctgccgccctactccgccgngggcttccactacgccggccagcagccattattgcttgatcatcgccatgaccatgacgacgacaaggccgcccaagctaacgagaaccgaccgacccaccggccgtggaagctcgatctccgaggagaaacagcggggggagga

SEQ ID NO: 181686 - DNA, 242 bp, Zea mays
  Clone ID: MRT4577_97278C.1
gcacgagggacacttgcgatgtgtgtggccaggaacgcgaaactgctgatcacattgttctccgctgccactttgccaagaccttctggcttgcgattggctttcacatccccaatgacatgactgtgcaaaatttgcaccagattgaacggccctcaaacctcccgcaaaatgagttcagctcctttgtcatcctatgttgctggcagttgtggaaacgcagaaatggttttgttttcagg

SEQ ID NO: 181687 - DNA, 306 bp, Zea mays
  Clone ID: MRT4577_97279C.1
ggggggaaaaacagggggggggctgttttgcctggactaaaattaatcaccctccgaacgggggggcattttggttttacaaaggggcctttacagagacttggaaatgtaaaaaacctccttgttggacagaaaacatccagaactttgccggcctttttacaaaaccctttaagaaccctacttttttccccccccctacaaaggggcgaaaaaaaaggggggggttctctggcatttaaaacccaaccccccaaacggggtttacatgggggggagggttccccttccctggccgtttgcccc

SEQ ID NO: 181688 - DNA, 208 bp, Zea mays
  Clone ID: MRT4577_9727C.1
ccctgctgtgcttgcagataatgctataagtttctcacctgacaagctgcatgtgctactggggatagttctaaagaaaacccaagccttcaatcacacgccagcccgcgctctcaagccagactaacaagccgaactctgttgcattacccccatctatccatgaaacatgtacctgccaccctcgatcaacaccacttccgaccca

SEQ ID NO: 181689 - DNA, 243 bp, Zea mays
  Clone ID: MRT4577_97280C.1
cacaagaacgcttagttgaaggtacttcttgaaatggatatggatctaataccataggaccttagaccagtctatgtcgccaagagaacaggtcttgtggagtacttaatcaacaattcagtgtgaggtcttgtatcttttcaaaagctattgtccagctgttgaggtcgtttgcatttgtattaccgaacaagtagagatgttggggttttctagacaaggtcaaatggaatttttgttaat

SEQ ID NO: 181690 - DNA, 340 bp, Zea mays
  Clone ID: MRT4577_97281C.1
caaactcttgtgccacatctaaagacaccgcggcggcgatcctcctggtggtgagctactctaccaatctacttgacaaaataaagattatgacgaatatcgtagcttaccttacaatgctccattataactagctgatgatgattatttagtcttcttctatttcacagaaatacccatattatctgcataaattttccactaacctcaagactaacttctgaaatctaacgtcacaagttaggatcaagagcattcccaacatcagcccaatttgtctataactaggtacctggatatcctatgcatgcttagtgctgtccacaatccactactaatt

SEQ ID NO: 181691 - DNA, 171 bp, Zea mays
  Clone ID: MRT4577_97282C.1
ccaggagataagaaaaaatagttactgtctatatcagagccacacttctataagatgcacaggcacctctttcaacaaagaaattactatgttaaatttcctagttaactagtcatgacaacagccagcggtacatgttaacacacactttgtttaaacatgaaactaggg

SEQ ID NO: 181692 - DNA, 143 bp, Zea mays
  Clone ID: MRT4577_97283C.1
tcctgccccgtctgcttgccttcttttcacctcaggtcgtcgaagagagagagagagagagagaggagttgcaagttggtgagatggacctgttgtagcggataactcgcacggggacggcccactggcgcaaggaacacgag

SEQ ID NO: 181693 - DNA, 189 bp, Zea mays
  Clone ID: MRT4577_97284C.1
agttggcattgtagttggggtccacgggcccaaaaaaagggacacgttggctaaacctttgtttccccgggtaatagcaaatctcaatataaggtggggcgggcaaaagatcggtgccaggacataacgacagggaaatttgctgcccaataacaaagcgaaacaccacgccgcggggccacattattg

SEQ ID NO: 181694 - DNA, 367 bp, Zea mays
  unsure (1)..(367): unsure at all n locations
  Clone ID: MRT4577_97285C.1
ggcaaattccagaagatgaatctattgggtgtgcaactactgagcactggatggttgtcnatnaaactgtggaggcaaaagtggtactactcgatgagagtatagagaataatgctgctgtcataggagtagtcgaggagactgctgaaggtgaaactaaggaggaagcatcagacgagaagggaaaaatagaaaataatgaagatgctgacaaattagcaccagccgggaaggggaaaatagaaaataatgaaattataattgacgcaccagatgagaaaacagaaaataaagcagatgctgacacaccagctggggagaccaaagaaggtgaaattacagtagaggaaacagatgagaaaataga

SEQ ID NO: 181695 - DNA, 411 bp, Zea mays
  Clone ID: MRT4577_97286C.1
ttttttttttttttttttttttttttttttttttttttttttttttttttttttagggggacaatgcctaaaggcacatgtttttaagtagacaaacttggtaacagggggcaaacacccactcggggcctgttttaaagggaacattcgtggtggggttttttagctaccacagtaaacacctttgatgctccaggcttaccgggggtgaacttaaaattccctgtcgggaaaaagggcgggtgccacaagggaccattttaacaaacctgccgtcgcccactgggttggaattcttacccaaacaaatgggcacccaatattcacaaagttttcgtttttaccaaccgaagttgaccaaccagtcaaaaacatttcccagtacattcttgccagggagaagattaggtg

SEQ ID NO: 181696 - DNA, 526 bp, Zea mays
  Clone ID: MRT4577_97287C.1
gtgtttttttttttcttaaaatgccttttttttttttttttttttttttttttttttttttttttttttttttttttttttttttaaaacaggcccaacgggcaaaggggtaataaatttcacccccaataaaagggccttccaacttaaatttttgggacatgaaaattaaggggggggggaattcccaaccaacgggatttggaaaaaaacacaacccttttgggaaaagcccagggttgcgtaaaaaaaaaaacaggggcgggggaggcccaattaaaacagtattaattttggaaaagggggcccaaaattcacattttagtttgaaaggcttcctaaaaaaaccccaaaggggggcaagtaagaaccgcagggcctttcccttgggggggtttatatcctctgcatttggaaaaaaaaaacccggatcgtgttacccttgagcgggctggcatgctttaacacaagggcctcggaagcctccttttcgtttttaaacaaaaagaaagccggcctctggcca

SEQ ID NO: 181697 - DNA, 325 bp, Zea mays
  Clone ID: MRT4577_97288C.1
tcaagcctgttacacttggactcggtgtaaaaagtcctataaaaaggagcagatatgacgacctttacaaagcagtctagaggactatgtttgtgttcttctgaaccaatggacagaggtgctgcccgacatctaatgttattatccatacaaaaattgctcaaaaatttaatgagaggacagctgcatggcccacacgaattattgatccagatccacttcaagaggtttgcacgctatggccaaaccttagtgaacgacgacgtgagaatattaagaagcatatatcgaatgccaaaagacgaggcgcaactattctgactgg

SEQ ID NO: 181698 - DNA, 431 bp, Zea mays
  Clone ID: MRT4577_97289C.1
gttggccaccccaaaacatagaaagtggacccttccagggactccccctgagaaaacacttctcgagagctgtcccggacacacaaagaccttttgatgaaaaaataaaaagaataggaagaggaagagagtaaaaataaaagcccccccgggggagggacccaagcactttttccccctgggaggaggaggaaactctcactcaaaatcccccggaccccggggcagcgaacaaatggacaacctgtccaagggaagggagggtaaaggcggatacccgttgttattgcccgggctcacgcccccaaaacttttttttggcgagccccccacgggccagaagagccgtgttcgggaggggcctttacccaataccccctccctgcccggggcccaaaaaaaaaaattgcttataaggaaccctttcctcc

SEQ ID NO: 181699 - DNA, 111 bp, Zea mays
  Clone ID: MRT4577_9728C.1
ttccaaatagcagagaggaaacaatcaggggtccatccatttttgtcagccatgacgaactgctatctgggcctcgcagtacatccgggcgcacttcactggcctcgacct

SEQ ID NO: 181700 - DNA, 593 bp, Zea mays
  unsure (1)..(593): unsure at all n locations
  Clone ID: MRT4577_97290C.1
tgggtacccctcgnggtccggccggggcgcaacggggttcgctcgcaactgaagaccaaaggcgagagccggctgcccggattccggaagcgcccaagccccccaacgcgaccgtcgctgtcgccaccgcgctcggctcgcccgcgtccacagaagccgccagggccatacgccgatgaatcctgccgcgacggcggatcccagcagctccagcacctcggcggccacgctgcggaagcggatgatctctatagacacggctcgacgaggagccgacggcgcgtcgcctgagaccgcgcccaggccagatcgggcgggtagtgataaggcgccgcaggagcgggaggaggagggctcgatggcggcctccgcgcctgcggcggcagcagcgagggagagtgacctggaggcggtgggcgagccgatgagccccgcggggcggctgttccgcgagacgcacttcaactgctacatcgtggccgtgatcgggctgggcgcggcggtggacgtcgcggcggcgcgcgcggggctggaggtcacgctcgtncgccacccacgcttctccagcgtccaggtgaatgatagtgatgcga

SEQ ID NO: 181701 - DNA, 380 bp, Zea mays
  unsure (1)..(380): unsure at all n locations
  Clone ID: MRT4577_97291C.1
aatcgacccaggcggccggcaaaatatataaccataacaagcactattcttattctttataataatcgaaattctacgcctttgcgatttttcaaaacggtacgggcanatactaatactcanactgccacaaaagttctatcgcatgacattcattgatacatcactttatgctttaagaccacaacttaaatatataatcagaaatccaactcactcataaatcttaaaatacttatcactaatagcttataagttccaaaacactaactcctattttaacaacttagatgatcacactcatgcagaatagatcccacaaatctcttcttactatgccaatattacttctagcaaagttatgcggtatacttattgac

SEQ ID NO: 181702 - DNA, 218 bp, Zea mays
  Clone ID: MRT4577_97292C.1
tatgccagactgccatggggccatggatgcgtgagatcaagtatttggtgccgaggacacgtgagacgaggtctggcgaagtacgtgcacaccattggaaccccggggtgtagagaaaactacgtggtcgagcgggttcattgtcaccgtattgatcctattgagagaagagttgaatacaacgttatggatgactgggttgtagagatataactgca

SEQ ID NO: 181703 - DNA, 426 bp, Zea mays
  Clone ID: MRT4577_97293C.1
gtgcaccggttcatgggcacgttgtttgtcccggcgtccgtggacccgcgcgccggggtggcttccagggacgtggtcgtggaccacgggacgggcctcgcggtgcggctgtaccggcctagccgccaagccgtcgccggcggcgccggcggcaggctccccgtgctggtgtacttccacggcggcgcgttcgtggtcgagtcggcgttcgaccccgtgtaccacggctacctgaacgcgctgacggccaaggccggggtcatcgcggtgtcggtgaactaccgcctggcgccggagcacccgctcccggcggcgtacgaggacgcgtgggcggcgctggcgtgggtggtcgcgaacgcgaacgcgaacgcgcggcgcggcggggccggggccggggacccctggctgtccaggcacggcgacgcg

SEQ ID NO: 181704 - DNA, 279 bp, Zea mays
  Clone ID: MRT4577_97294C.1
aattcggcacgaggcgagagctggcgacagcggccacctctgagccgccttgagcaggggaaggggagctgggttagcgacaggcgaatggcactcaccgccgctgacgcgcgagcctctacgtccccatcgacgcgcaaatggatccgcagttggagcctctgtacgcgcaggtcgagccgtacgactccgtgttcctcaaggactacgatgtccacaccatctactacgagcacggcgggaacccgcacggccatgctggcggagttctctccactg

SEQ ID NO: 181705 - DNA, 274 bp, Zea mays
  Clone ID: MRT4577_97295C.1
ccatatacgactactacacgaggaccgtttatttcggtctgcgtgcgcgtgcccaccgggggcacccgagggacctgatcaaggccatcaaccatgcctagccggcgctggccttcgtggacacgacgctgcagtcccttgggtactccgagaaggcgtacctgaccaagcctagcgggggcgcctgcacagccatgctgtacaacaacgacaccagtactgtggcgcggcatggtgttcaacgtgctctgctacgacctactggtctggccca

SEQ ID NO: 181706 - DNA, 534 bp, Zea mays
  Clone ID: MRT4577_97296C.1
gtattatatttttgtttttttataacatttttgttttttgttaccaactcaaccacaactcttttcactaagcataccaataccgtgcaagacaaaaccttccgtgaaaaaagacccaaacgccagaaaaaccacatacaacagcagcttcaacaacaaacgcataaaatttccaccaaaaaagacggccccaccagggtggaagggagctacaccttctaaaaccccgaaacctgcaagggtgcgaccatcggccagctaaaaaccccccaagaaaagacgcccccggggggggggaacccccccctcggacaggagctcaaggcgagggggagcccaccccccaaaggtctcgacctaaaaaaaaaaggtcttggcagggaagaaccccccccccatccggggaacgacccccccgcggagcaccagatggaagatgctccccccccccagggtggggcctgccaacgaggggccctccacaaaaagcttgcccccccccatcgggcgccaaccatacggggggggaccccc

SEQ ID NO: 181707 - DNA, 331 bp, Zea mays
  Clone ID: MRT4577_97297C.1
ggaatcaaattcaaaatttgcatatccatgaactgttgttcaataatgatcgaaacttggaatagattgaagagaaacctcatcgtatggtacaacggtctgtaccaaagcatgtttgaaagaggacactcgaatattgtgtagattacaatgatgaaccatttgctatttgttaagagagttgagagagtcagagtccgtttacgaaccaaacctgcgaacggggctgtcgtggatgactccaacttcttgtaggcagaaccgtttgagctcagggcattgatcagcacaggcgtgttccttcaggatggtgagacgtaagttgttagat

SEQ ID NO: 181708 - DNA, 242 bp, Zea mays
  Clone ID: MRT4577_97298C.1
agcgatgaaaattgaatgcacgataagtactacgttacattgaccagctgcaacggaattgatacttcacaagacctcagtccacttcgaagccgtatcagtgagtgttacacacagcccacaaaatcgcagaggagaaaaaaaaacagagagaagatgatgaaaagtgtcagtaactggctaacttggcgctacctcctccgaccgcgccgagggctgctgcccccattgcccgccgggaa

SEQ ID NO: 181709 - DNA, 408 bp, Zea mays
  Clone ID: MRT4577_97299C.1
cgtaccggaattgccggcccggcccaccccaccctttgttttaagtcctgcatcaccaggaggctctatgagatgttgttcatgctgctgcgaaatataatgatatgtacacaagggtatgttctactcctggtgtgaaagtgtccagatcacacaggtacctgtaacataccacgggagagatagttgggaaaaagatagatgccaaatctacacaagatccaaatgttgtgcacatggatttatatcaggactactggtgcggtgtaatgatgtaacacctaacggtgcacataaggatttatatcaactgccctgctcaggtgaatggagtcgcctatgagacacagcatgtgagtgataagactaattcggccctgactggtctgatggatgcagcctgaacat

SEQ ID NO: 181710 - DNA, 361 bp, Zea mays
  unsure (1)..(361): unsure at all n locations
  Clone ID: MRT4577_9729C.1
cgcggccgcgtcgacattctgtaaaagttttatggtatttaatttttggattgtgttcggccattaaccaggattcaacatgaagttaaatgtatcatatccagcaacaggcagtcaaaagctgtttgaaattgtagatgaacacaagttacgtgtattctatgaaaaacgtattggcaccgaagttgaagttgatatactcggtgatgaatggaaaggntatgtgcttaaaatatctggaggcaatgacaaacaagggtttccaatgaaacaaggtgttctctctaatgtccgagtgcgcctattattatctaagggacattcttgttatcgccctacaagggatggcgaacgtaagagg

SEQ ID NO: 181711 - DNA, 1307 bp, Zea mays
  Clone ID: MRT4577_972C.1
atgaagcagtggtgtgacgatgtcgaccgtctgctcggcatggcgcattttggctcagccaggcccaagcctcggtcatcccggcgtcaacatgaggcgtcggcgtcagtgcactccccctcgaggcctgatgacctgcgggtagaactcaaccgcaagcgtgcgggcgaggatgtccgcgtctctctggagagggcgcgtgagcgtcagcagaatgtcgagggtcgcaaccttgaccacgacttcgctgcggttgcaccgcaaactccaacgggtgcccggatccaggcgggtgtcccattgaccggcatgggctgcgctgcactagcggatgatctccgcgcggcgacttggccatccaagttccgaccacacctaccagagaagtacgacggtacgtcaaatccgtcggaattcttgcaggtatacatcaccgctattacggcagcaggaagagctctgcgcgcggttcacagcgaacttcgccagcacttatcaacggcatggcgtggaggctcacctccatgcagtgacgcagaaatcctcagggcactcaagacacgcacctatgactgcttgaaaaagcatggtgcaaattgggtcatcgagcttccgtccatgctatgggggaaccggaacacacccagccgagctaccggggagaccccgttcttcctggtctacggggccgaagcctgtcttcccccagaaatcatcatgggctccccacgggtcctgtcgtttgatgagtctatgcaggaacaactacgatgtgaggacgtggacttcatcgacgagcacagatggcgagcggcgatccgaaatgcacgatacaaccaagcgctcaggcgctaccaccaacggtttgtgcatagtagggagctcagggtcgaggtcctagccctaaggcgagtactgaaccaagaagggctccacaaactctcctccagttgggaaggacccttcaaggtgaaggaagtatgccgactcgggtgtgtccgccttgccacaactgaaggagtgcctctttccaacccctggaacatagagcatctctgtaagttttacccatagaagcaaaactgggggattgagtttttcttcctttgtaactgggttgcgcatatgtgtatgtcaatccggtgaggtccgccctcgtaaacctggcctcttggtctacacccatgtatatcaagttataaggaagagatttacccctcaaaaaaaaaaaaaaaaaaaaaaaaaaaaaaaaaaaaaaaaaaaaaaaaaaaaaaaaaaaaaagaaaaaaaaaaaaaaaaaagcggcc

SEQ ID NO: 181712 - DNA, 525 bp, Zea mays
  unsure (1)..(525): unsure at all n locations
  Clone ID: MRT4577_97300C.1
agctcccgtcggctgacattcaggttgccctttgctcgccaggaggcgacgaatttcctgagcaaccaaagcaatacccagatcaaatcaaagcctccaagaaatgccagagcgcaagaacagctagcacgcgtcctaaccttgtcatcggccggctgcttgcaacgctgtcttcttttcgtcccttctgctcttcctgaagagaagaaagcaacgccatgattagacaagacctggacccaagaaccatggcaaagaaacgatcttggggcaggagagtactgcagcacgggcttcttggcgacggcgcaggggttcggggcaaccccgacgaggttcttgatgtccgtgagcgcgcgccagctccccatgtctgcacaaaccaggagatcagagcaacggactcgcgacgcagcaaacatctaaatcatcgcacctcggacgcatggcgcgggcctccccacccncgtcaggctntatcctaagttaatcttcaaggaaaaaatggtgcttcttggtgctgcg

SEQ ID NO: 181713 - DNA, 825 bp, Zea mays
  unsure (1)..(825): unsure at all n locations
  Clone ID: MRT4577_97301C.1
ccgatcgaagcaacctacctccgcccgtttgagctcgagcgcatccgccgaaaccgaggacgactcttctccccgccgcccccgccgccgcctcctcttcggcccaagcggagaaccagtgcttaggttcaaaaggggttaaccttcttttccatgaatatgtattttgaaggctatggttaccgtggaagtacttttgagcagacctatcgctgctaccctgcatcttttattgacaagccacagcttgaatctggtgacaaaattatcatgccaccttcggcacttgatcgtctcgcgtctctgcatatcgagtaccctatgctatttgaagtccgcaacacagcagcagaacgtacttcacactgtggtgtcctagagttcattgcagaagaaggcatgatctacatgccatactggatgatgcaaaatcttcttctgcaagaaggagatatggtgtttataaaaaatgccaacctcccaaagggcacatatgtgaagctgcagcctcatacaactgacttcttagatatttcaaaccccaaagcaatcttggaaaaaactttgcggaactactcttgtctaaccactggtgacagcattatggtggcgtataataacaagaagtactacattgatatagttgaaacaaagccttccagtgctataagtataattgagactgattgtgaggttgactttgccccaccacttgactacaaagaacctgagcgaccaaaacctactggctcctccagttctgatcctgctgcagaggctcaagttgaggnagaacccaaagtcagccccttcactggtcctgga

SEQ ID NO: 181714 - DNA, 906 bp, Zea mays
  unsure (1)..(906): unsure at all n locations
  Clone ID: MRT4577_97302C.1
agccaactcggagctcggttcctcttcctcctcatcccctatattcttcgcctcctccacatttcttccttccgatcgaagccaactacctccgcccgcttgagctcgagcgcatccgccgaaaccgaggacgactcttctccacgccgccgccgcctcctcggcctctgcctcctcggcctctgcctcctcttcggccgagcggagaaccggtgcttaggctcaaaagggtttaaccttcttgtccatgaatatgtatttcgaaggctatggttaccgtggaagtacttttgagcagacctatcgctgctaccctgcatcttttattgacaagccacagcttgaatctggtgacaaaattatcatgccaccttcggcacttgatcgtcttgcgtctctgcatattgagtaccctatgctatttgaagtacgcaacacagcagcagaacgcacttcacactgtggtgtcctagagttcattgcagaagaaggcatgatctacatgccatactggatgatgcaaaatcttcttttgcaagaaggagatatggtgtttataaaaaatgccaacctcccaaagggcacatatgtgaagctgcagcctcatacaactgacttcttggacatttcaaatcccaaagcaatcttggaaaagactttgcggaactactcttgtctaaccactggtgacagcattatggtggcatataataacaagaagtactacattgatatagttgaaaacaagcctgccagtgctataagtataattgagactgattgtgaggttgactttgccccaccacttgactataaagaacctgagcgaccaaaacctactgctcctcccagcgctgatcctgctgcagaggcttcagaatgaggagaaacannagtcagcccctt

SEQ ID NO: 181715 - DNA, 389 bp, Zea mays
  Clone ID: MRT4577_97303C.1
ctcacgcgtcttatatagccgagatgcgcaaggaagttgatgagcgggaggccctcacgggccgcaccggtggccaaccctgatcttctgcgaatggttcgagttgcagcacgcctgtcggaacccaaaagactgtgaactatgacgagcggtgccaacccagaagaaactctggtggaggctcaaagtgatgctgacgtgcagatcgaacgtctgacttgagtataggggccaaagactaatcgaactatagagtcactagttcccttagaagtttcactaaggatagctggccctcacacgagacctatcgggtcaagccaatgattagagggataagtagcgcaacgacctcgacctattcgtaaactttaaataggtaggactgc

SEQ ID NO: 181716 - DNA, 833 bp, Zea mays
  unsure (1)..(833): unsure at all n locations
  Clone ID: MRT4577_97304C.1
gcagcaggcgatgtccttgcccccgggagcggtcggcgcggtgtcctcgccggccggcatcaccaccgagcagatccaaaagtattntggatgaaaataagcaacttattttggccatccttgaaaatcagaacctaggaaagttggctgaatgtgctcagtatcaagctcaactccaaaagaatctcttgtatctagctgctatcgcggatgcccaaccaccacagaaccctacaagtcaccctcagatggtgcagcctggtagtatgcaaggtgcagggcattacatgtcacaagtaccaatgttccctccaagaacgcctttaaccccacagcagatgcaagagcagcagcaccagcagcttcagcagcagcaagcccaggccctttctttccccgcccaggtggtcatgagaccaggcaccgtcaacggcatgcagcagcctatgcaagcagccggcgacctccagccagcagcagcacctggagggagcaagcaggacgccgcagtggctggggccagctcggaaccatctggcaccaagagccacaagaacgcgggagcagaggaggtgggcgctgatgtagcagaacaatcctaagctgttagtgttaggcaaaaataacgccatgtatgtatactataagaaagaaagaaagcccgtctgctcgtagaaggctcgttttatcatgaaggctcgtttagaacaagcttttagattgatgatgatcatgatggtgtgttctgtccgggattggtatctcactctaagttgntgtaggcttgtagcaattgtgggataactcgctanaaaaaaaaaaaaaaggcccct

SEQ ID NO: 181717 - DNA, 183 bp, Zea mays
  Clone ID: MRT4577_97305C.1
cccacgcgtccgggactggacgggcctgcgcgtcaccgtcgagctcactgtccagaaccgcctggaccgggtctccgacgtcaactcagacgccgcgctcgtcgtctctgcgatcgaggagcacgacatgaacgggcagaaggtcaagatcgtcaggaacagcgaaaacatcggcgtagacga

SEQ ID NO: 181718 - DNA, 331 bp, Zea mays
  Clone ID: MRT4577_97306C.1
aaacacaaaagcgccacacttatatattcacaaaagcgtcacaattataatatcattcacaacgttgcaaatttcttttttggggaaaaacaaaacaaaatatctagctgcgtccatccaaaagaacttttattctttcttgtgggggcaaccataggctccaccgggatctgcttgctttggggatcatggagaaaacaagtgtcccactacctataggacctggctccaagacacccttctaatgcgctgcggtcacgaataactctatgattctggtgcaccatcagctgttttttctccaccaaatgctccaccaatgtcagcacca

SEQ ID NO: 181719 - DNA, 336 bp, Zea mays
  Clone ID: MRT4577_97307C.1
ataaagtacttcttgttttttgtttataaattaattctaattttgaaaaaataaaatttttttaaaaatttctactaaaggtaaaactgtatgggttaaaaaatgtgctaaatacattttggaaaaatgtaaaattttttttaaatttaaacttttaatttaaaaaagtttacttcccataacttaattttttgtttctgacaaaaaatcagaatggtttaaatttcaccctttttttccttttgtcttatggctttttttgaagaaggtcatttttttatgcttaagatgtattttttgacaaaggtgcgttggcgcactcctttttttattttt

SEQ ID NO: 181720 - DNA, 332 bp, Zea mays
  unsure (1)..(332): unsure at all n locations
  Clone ID: MRT4577_97308C.1
ggccgacgccgcctcttccgtctcgcccatgcagaggctcttcgacaccagcagggaggtcttcgccaactcctacccgggcttcgtcccgccgccggacgccgtcgcccgcctctcgggcctcctcaatgagctgaagcctcgtgacgtcagggttgccccaagcatgtccgtcttcaagcatgccgatcctacaagcccccctccatttggtatcttctgtttaccgaaatcggcaattattcccctccacaaccatactgngatgacagtgtttagcaagatactgtttggttccatgcacctcaagtcctatgattgggctaaaagtc

SEQ ID NO: 181721 - DNA, 449 bp, Zea mays
  Clone ID: MRT4577_97309C.1
cgagccggccaggtggtggacctatcgcccgtaggcgacaggtcccgcgcctcctccaagaagaaccgccgccgccacaagaaggccgacgccgcctcttccgtctcgcccatgcagaggctcttcgacaccagcagggaggtcttcgccaactcctacccgggcttcgtcccgccgccggacgccgtcgcccgcctctcgggcctcctcagagcaggagctcgtctggccaaggtgaacacagatgccgtttttgacggttcatctgagaccgtagttctgtaccctgaaaatggagggaacttgcactgctttacggcgctgaccccttgtgccgtgctggatgtgatgggccctccctaccaccgtgttcacggaagggattgcgcgtattacagcgcatcgtcctactcgtgtgctggagatggcaatattcttggctccgacag

SEQ ID NO: 181722 - DNA, 409 bp, Zea mays
  unsure (1)..(409): unsure at all n locations
  Clone ID: MRT4577_9730C.1
gccacgcgtccgccacgcatcggtctggctcgaatcgaatgcacgatgagccgagatacgaagactcacaaacattaaccgtagctngcaggccctacgcggccgttgcccggtctgcggagaggaagccgatccaaggacgatgccgtcggacatataccattgcagacacgcagacccgtcaagtgctgactgaaaacatgctggcaatgcacaagagagcgtgtcagctctgaaaccatcatgcgggtctaaacaccatgtgcgcgtcgatacaaccgaaccaggcatccggcgagtgagtataaaaccggcaatctagaggagcctagatgcacatatcagaactgctcaagtcgcgtaaactgctatatcatattaaacaggcatacattacaacaataagcac

SEQ ID NO: 181723 - DNA, 2554 bp, Zea mays
  Clone ID: MRT4577_97310C.1
accggaggcagtatgggatttggtgcccacaggaagtggagggagagcggtctgcggtctcgcctcgttcctcccgttcccgtcgccgccccgctcccgcccctggttttgccttgcctagccttcgtccgtctactacttgtatggatgcaaataccaatctccacctgcactctcccgactcaggatttatacccacccccgtcggtcgatcccctccctccctcccgccgccgccgccgccgcccgtagccaagaccaagatcccgtctcgcccggcgtcgcacctgacctaaccctgagccctgtgatatgccggttcaggtcggaggcagcaaggtggcggacccgaggccggccagggtggtggacctatcgcccgtaggcgacaggtcccgcgcctcctccaagaagaaccgccgccgccacaagaaggccgacgccgcctcttccgtctcgcccatgcagaggctcttcgacaccagcagggaggtcttcgccaactcctacccgggcttcgtcccgccgccggacgccgtcgcccgcctctcgggcctcctcaatgagctgaagcctcgtgacgtcagggttgccccaagcatgtccgtcttcaagcatgccgatcctacaagcccccctccagttacctatttgcacttctatggttcctccgagttttcgtttggtatcttctgtttaccgaaatcggcaattattcccctccacaaccatcctgggatgacagtgtttagcaagatactgtttggttccatgcacctcaagtcctatgattgggctaaaagtctgccggcgggtagcaacgataatgcacttgagaactctgatggtgcaggagcaggagctcgtctggccaaggtgaacacagatgccgtttttgacgcttcatctgagaccgtagttctgtaccctgaaaatggagggaacttgcactgctttacggcgctgaccccttgtgccgtgctggatgtgatgggccctccctacaaccgtgctcaaggaagggattgcgcgtattacagcgaatcgccctactcgtgtgctggagatgcacaatattcttggctcaaagaggttcacagcacatttgagatggaaggcataaagatggagcccaacttcatcgtctaataattaagcaggcatggcatgacatgacatggcatcgtaatgctgctagtttcatgtagataatctctagctgcgggggtgtagtacaactggaagacggccagatgctcttttgacattcgtttgccttaatttcatatgcctccctttatgtatgttaacaattcgaatcttgggtcatggtcactttttttctgttttccctgtagacagcaggtgctactttttgaagtgatcatggaccaaattctgtgggtcgtttggttggtttttgttgagcagcagaacagtcttcaactttctgcctgccatcgtgtttcagtttcagggcccatgccttgtgttttctctttgaatgaacaaagaactgtctctagcatagttataaatggatatggtccaggcttccaaatcaggagctgtgaggtgatggggacggacgtagttgtgtagtacgggggtcaggtcaggtccggccggacgatgttcttcgttgcagcgtactctctgttggctgcaccgcattagcgcaatgattcggtctgatttgtcatactttttaacctacaaatgttatgcattagcaatggttttagataaaaaaaaaaaaaaaaaaaaaaaaaaaaaaaaaaattaaggcggccgccgccgggaaaaaaaaaaaaaaacaacacctgacctgcttactattactaccatttcagcctgcagcaagctttcttcttacaagttgcttttgtaccatcaattctaaacaattgccctttgttgctttgagcctaccaatcggtgccctttggtaagaagtggggaaataataccccacaaaaaacgggggggacgacggcgagatggccggcgcgcgcgcgcgaataggcactaggcaggcacacgggtggtggctggctccggcgagcagggcggcgcgctcaccagacggccttgtcggcggagaagccgcggaggagcggaagcgactcgcctgcggcggcggcgacgcagcagcagtgcgtggcgccggcgctctggaggtcgtcgagggtgacgaagcgggaggaggacttggacggggcggagaggtggcggaggacgtgctcgaagagggcctcgtcgcaggggagcgcgatgggccccgcgcgcgggaacccgtactcctcctccgcctgccggagcagctcccggaacacggggtggttcaggtgcgccgcccgcaccacgaaccgccgcgacgcgccgcccacgcacaccgccacgtggcccgacgggaccgccgcatcagccgccgccgccgccgccgcccgtagccaagaccaagatcccgtctcgccccgcgcacgcacctgacctaaccctgagccctgcgatatgccggttcaggtcggaggcagcaaggtggcggacccga

SEQ ID NO: 181724 - DNA, 399 bp, Zea mays
  Clone ID: MRT4577_97311C.1
cctgcggtaccggtccggaatgttcaaacaaggcagcgaccggcttcctctccacccaggaaaactttctggagaggcttgtcttgttcataagactctagtatctcgcggctggaaggtcctttgacgggtatgaaacaggtccagaaaggggaggcggcctgcttggtcgacgtcatggagccagctgggagcagggctgagcgttgaacccgaggctcccggttccaagtcccatcgtgctcctcttccaatgccacactgcctctgagcccatccttggcaccctactctgtgccaggttcctgccccttcctccgccacagcatggtcattccaggatatttttttttttcccccccccccacacagggtgcctatgagccgtctcatctccga

SEQ ID NO: 181725 - DNA, 246 bp, Zea mays
  Clone ID: MRT4577_97312C.1
gccggccgactcgataagaagagtgatatgacgacaggatgagagacacaaacgatgcgatgagagcctgggtcctcgtggctctgttctgtattaagcatggggagaagtaaaggcaaagaacatgaatgcgtagagccgccctggctcagggtggcttagagatgacgcaagtacgaggacgtgccggaatggtatcacacacagcgctaatgctggggcaggacggcgtgattcgatcggggc

SEQ ID NO: 181726 - DNA, 683 bp, Zea mays
  Clone ID: MRT4577_97313C.1
cggacgcgtgggcaaggtggctggtgagatgtgtctctcgctatgttggatcactgctggtgcgcgcagatgtaccagggcgagaagctctgcctcaacatgcacttctagctgttgtgggtcaagaactgtctgaggtgcagcctcacgcacacattgtgccttggcctcacgcagtggctggcgtaggaggcccgattctggtggacttgagcatggagaaacacaactgcacaatgatgacgaggtggcttcgaccgaggcttctgcctctactgctcctgatttgtatggtaaaccaagaacctgcgctttttacaaccacaatcctcgattatactacatggaaagctagatgagtgaccaaatattgaaaaggttgaggctgctacgaccaaatattgaaaaagacgaggctgcacaaaagatgaggcgccaaacaaaactgctaaactgtgtgaccaaactgtgcagaggatggccccaagataaaaaaaatgtactgggaatcatttagcttgtatggttaagggtgctgtggttgttaagctgttttccttggaagactcgtgttgaagcgtaacctattgtagtcatatgggtgtaatcagttcaagtgtggttctaaacttataatgtatggtgactttttttaaatataaatggatatcaatgttcttgtc

SEQ ID NO: 181727 - DNA, 571 bp, Zea mays
  Clone ID: MRT4577_97314C.1
ctcgccacaccaacagacgcagccaacagcgccccctctgaaaaaaagagaacagcaacgggaataatctcctttcctcctcgtccgcgtgcgatcgacgcggaggcgccgcccgtccccctcccctccgctccgacccgacccgacccgaccccatggccttcatgcgcacctcctccaatgcatcctctggcatgggagttgctcctgatatcagggagacattcctggagcttcagatgaagaaggcatttcgctatgttatcttcaaaatcgaagaaaagcaaaaacaggttgttgtggagaagacaggggctacaactgagagttatgatgatttcctggcttgtctcccagaaaaagactgcagatatgccctttatgattttgactttgttactggggagaatgtgcagaaaagcaagattttcttcattgcctggtcccctgacacatcccgcatccgcgccaagatgctgtactccacctccaaggaccgcatcaagcaggagctcgacgggttccactacgagatccaggcaactgacccgaccgaggtggagctcggcgt

SEQ ID NO: 181728 - DNA, 530 bp, Zea mays
  unsure (1)..(530): unsure at all n locations
  Clone ID: MRT4577_97315C.1
acaagcttttttttttttttttttntttttctttttttttcttttttttttttttttgtaagtgtttcttcttatttgggggtgcccacacacctcacccaaaaacctaaaaagcgaaccaaaacaaaaaaccacccaaaaagagggcccccccaaaggcgggtggggggccaaaggccagggggacaaaaaaaaacagcggcacaaagggcaacaagggggggaagggaaagaggggcggcgggaaacccgcaaaccggggggaaaaagggagaccccgcccgggggccgccaccacccaaagggaaaaccccaccacaggggccgacggcactagggaacccgaccccgacaccaaaataggcgaaaacagggggaaagcggttcccggtgaaaaattggtacccgctcacagccccacacaacacacgacccgaatgcagaaagtaaaaagcccggggccccaaaagagcgaccacactcacattaaccgcggggcgcacaccgcacgcgtccaaccaggaaaacca

SEQ ID NO: 181729 - DNA, 261 bp, Zea mays
  unsure (1)..(261): unsure at all n locations
  Clone ID: MRT4577_97316C.1
gggggggtaaaaaaggggaacccccgaagcccccaancccngagaaaggggggagacaagcaccccggaaaggcaaaagatagaccaaaggccacctagcagaaaaacggagcaaagcctgtgagaggggcaaaaatcggcaacaagtgcaagagagcaagccagagctaacgaaaaccgaaggaaggggaaaaaagcaccggcgcgaaaaaagnggaaaaaaagagaagccaaagggcaaaaacaaagcaacaaccaaca

SEQ ID NO: 181730 - DNA, 301 bp, Zea mays
  Clone ID: MRT4577_97317C.1
tttatttacttgtcgaacttgcccaaaggaaaggaaactgagatgaggctgcggtgatagaagaaacattatacaggctaacaagagcacgtttataaaccaaaaggaaagtcacgggcgtagtcttatgcttcatccacagctcaagttgtaacaatccaagggaaacatagataaaatgaggtaggcagaccattgcacgtaaaaactaattgtcacgatggcttttatggtggttaaaaagacatcatgattccataaattgagacgtcaaaccaggtggtcaaggtttgtattattt

SEQ ID NO: 181731 - DNA, 262 bp, Zea mays
  Clone ID: MRT4577_97318C.1
cggctcgagggcgccttcaacgtcgacgactacatctccctagtccgtggctgggatctccagggcctccgcaggagagccgctggcgtccaccgccgcttcgacgcgctgctggaggacatcctcaggcacaaggatgatgcgagggctgctcgtaggctcgaccaagacgacgacggacgatacagcagcaagcaggacaagaagcaggccacgcacagcaaggacctgctcgacatcctcatggacaaggcagacgacc

SEQ ID NO: 181732 - DNA, 404 bp, Zea mays
  unsure (1)..(404): unsure at all n locations
  Clone ID: MRT4577_97319C.1
gctnancaatcggtggcggggggacgggggagcgggatatacttatgatgaagccatgcaacatccaaacacaaagctttattattaaaacattaactaaatccacacctaaaagaggctccaccaaaaggggttgttggtataacgctatgggcgatatgaaatcaagagtggcggggggggggtgacatcatcttttgcattatgattccagacaccatgccagggattatcatgaacggcaacatccgtgggttcatgaacaaggcagatcatactcacaccacctagctgaatgcatcatactaggtgtcactactggagaaaccctggagaggataatgctcctaggcgtcttactggataaaattgcttggggacatcataagctagactatcttaat

SEQ ID NO: 181733 - DNA, 222 bp, Zea mays
  Clone ID: MRT4577_9731C.1
acacctttctactactggccgcacttgaacaggtcttatatcagcttcgaggagaaccacccaagctcgacagagaggcagcacgcacggaaccaccaacgcttaccaccacgactacgaggtcagcaggccggcactatgaagaaaaccaaagtttgatgcgccagggcccagacgaagtgcaggggctgcataccaagtttgaagagaccaatgcatgga

SEQ ID NO: 181734 - DNA, 589 bp, Zea mays
  unsure (1)..(589): unsure at all n locations
  Clone ID: MRT4577_97320C.1
gcctctgtcgtcgcgcccgcctcgncgatgccgttgctctcctcgncaccatgccgtttgctgatgcatcccgtggcccggcggctggctgcatcctcaccgagttctgccgccgtggacgttttgcggaggcaagcgagctcgttagtaagtttccatccagtgatgtgtatggtgcgtggatcaatggactctttggtgctggcgagcttgatgctacgatgaagttcctctctgataagaaggaaagtgaaggctacatccttgatgggcggcggtgtgacagccttatttatcgcttgcttgtcaggaacagacttggcgaagtgtatgacttgcttgttcaaatgatggaggagggcattgctcctggcatacgcaccatgaatgctgcgctttgcttcttttgcaaggctggtcttgttgaagtagccatggatttgtataggtcgagagtggagctcgggatcaacccaaacaaagatgtctaccataatctgatcaaggcactgtgccatggtggggagacagatgaagcatgcctggtatttgaggaaactatggaaggagggtacttcccggggcgtcc

SEQ ID NO: 181735 - DNA, 321 bp, Zea mays
  unsure (1)..(321): unsure at all n locations
  Clone ID: MRT4577_97321C.1
gcagaaggggagcgggangacccgaagaaccgaagagaangaccnagaagnagaaagaggaagaacccaagaggaanacnaaaaanncacagggcccggggaggggggggagncaggganancanagcagacggggaaangaannaggcccaaccaaaccaaannaaggagngngaaggggccagcagagcacaggggaggcannnggaggaaagaaaanccgggcaccnnncgggagagaagcaggggaaaagcgccccagnncaagacgacgaggaaaaaggaagggcaanaaacaaaggggaggcaaaccccaaaaca

SEQ ID NO: 181736 - DNA, 593 bp, Zea mays
  Clone ID: MRT4577_97322C.1
gggtacctcgaggccggccgggaaaaaattgtccaccccctatcactctcgcctcccttagatccctcctctccccgtaggattctccccatcaacgcttgattcgctccagtatcatcgaatccaattcacagccaggcagacagggcggcagatctccacgaacctatcttggaatcccagaacaccttgcattcgcgggcaggcaaggattcgaattctgacggacgagctctcctggcacaaaaggcagataattttcttgatacctcgcgtgccgtctcggcaaccggaggagaccccgcggtgattaaggaacgggcaaaatgcagaggctgccttacacaacggggctgaccacgctgcgcagctaccgactgctcttcaccttcgggcaggtcaaggatttcttccgaaagttcgccgacaggtgcaaggccacaaacggcaacgcctactggccgatctgcctgagcctgccagaattctatgccccacgattgcacctgagaatacacgaacgcacatcatcgtcgatggcaagcggccctgaatcatggactgccggtgtttagcgcaccttccgcgacaat

SEQ ID NO: 181737 - DNA, 642 bp, Zea mays
  unsure (1)..(642): unsure at all n locations
  Clone ID: MRT4577_97323C.1
cccggggtccacttgnatcggcaccgctcgactgttgctataggcaacattcctgtcgagcacctcgcgagtatccaggtcaatgagttggcggaagagtttcttcactcgcgaacattcccagagttgtctaccgtttaagattgagtactctctcaaatgtatgtgaattaaagtgcatgtctgcactgaattatgtacaataatacttttataccaacacaatacaattttggatgttacacaacatgtacagtcaaagcaaaaacatgtgtatattttattgtgttgttttttatagctccaacgctgtaaaacccgtactatgcaaaccataaagctcaactaaaagtattttaagttcgattctaatacaattttactttatcttaacgagtaacaccgagagtaacacacaaattaaaaaaaaaaaaaaaaaaaaaaaaaaaaaaaaaaaaaaaaaaaaaaaaaaaaaaaaaaaaaaaaaaaaaaaaaaaaaaaaaaaaaaaaaaaaaaaaaaaaaaaaaaaaaaaaaaaaaaaaaaaaaaaaaattgggggcggccccttttaaaagatccaaattttccttcccgggggtttggaaaggttaaactttttttttggggcccccaaattaaatt

SEQ ID NO: 181738 - DNA, 398 bp, Zea mays
  Clone ID: MRT4577_97324C.1
cacacacattttttggtttaattcgccctgaaccggttttttttgccttgaaaagttggggaggggaaaaattaaagttccccaggctggcccagttttttttaaaatttagcagagtttttttccccctttaacacaggcaggcagggggatttttttatttttaccaaaatagcaaaatttctggttgtacttttaaaaacattttcaaaaccctgtttaaagggggtttaaagggggtttggggggccccaattgtctttctttattttccaacccccctttgcccgttgaaaacccaccccacccttttttctccaatttgacggggtttcccctttttttggaaatttttttcctgacaaaaatcccccccttatttggcgctttttttttga

SEQ ID NO: 181739 - DNA, 882 bp, Zea mays
  Clone ID: MRT4577_97325C.1
actccatagggcgattgggttcctcgaggccggccgggaaatcaaacttcttggcgtcatactgcgtcacgtctctttttaatctttatattccgctgttttcctgactgcggtttctttttccttttcccctcctccctcatctaccccaccatctactaactatccttcacaatggcctcgaaccccaagtacgataactatgatttccctgcccagggtgctgagaagcaggatggtcacgctggttacctcacagaggaccagactgccaagcttgaacagttccgcatgatgctcgaatcagagggctgcaccgaccggttggacacattgactctgcttcgattcctccgagcgcgcaagtttgatgtcgaagcctcaaaagccatgttcttggataccgagaaatggcgaaaggagaccaagctcgacgagactgtgcctgtctgggactaccctgagaaggctgagatcaacaagtactacactcagttctaccacaagaccgacaaggatggccgacccatctacatcgagactcttggcggtatcgacctgaacgctatgtacaagatcaccaccgccgagcgtatgcttaccaaccttgctgtcgagtacgagcgcgtcgccgatcctcgtcttcccgcttgctcccgcaaggccggtcacctcctcgagacatgctgcactgtcatggacctcaagggtgtctccatcggcaaggttccccaggtctactcctacgtcaagcaggcttccgtcatctctcagaactactaccccgagcgccttggcaagttgtatatgatcaacgcccccttggggtttctccactgtctggagcatcgttaagggctggctggaccccgtcaccgtttc

SEQ ID NO: 181740 - DNA, 374 bp, Zea mays
  Clone ID: MRT4577_97326C.1
tcggaagctgtacggggcggtgatgtctgggaacgtgacaaggtgcacaactccgcgtggaagaggctgtctgcgactaggagatcgttcccatcaacttcgtcaccggcgagcacaagagccccgagcacctcgtccgcaacccgtttggtcaggttccagctctgcaggatggtgacttgtacctcttcgaatcacgagcaatctgcaagtacgctgctcgcaaaaacaagccagagctgttgagggaaggaaacctcgaggaggcagcaatggtggatgtttggatcgaggtggaggttatccagtacaccgatgtactgaaatctattctttttcaggttcttattattccttatgcttgggggaaccac

SEQ ID NO: 181741 - DNA, 324 bp, Zea mays
  Clone ID: MRT4577_97327C.1
gcccaccatggcatcatcggccgctctcttggtgctagccctcgcgctggtgggggtcaccgttcttcacgtagcggaggcaaagaacaagagagctgcggagagcggagaggcggccgaggcaaaaaagatccaggactacttctgctcaacgctgatcgatggcaataaggggacggacctattcgtgagcaaggagttctgcgcgctctcccagcagtccaacctggtgctgtacggtaggatccattgcaagggctagtgcacctagcagaatggcatttcagcgccggccatgaatgtctgccatgtggagtgcgacaa

SEQ ID NO: 181742 - DNA, 466 bp, Zea mays
  Clone ID: MRT4577_97328C.1
gaaccacccgtccgctatctggaagtgtctctacttagcactgcaacaatttataattttctgcaatggcgagcactagcatggtcctgtgttccacgggcttggaaggcaaggacccgaacctgcctgcgcctggcgtctgcacgcaggcccgcctgaagattcacgctactgaggctaaggccaaaccagggggcgcatgccggagcccgtggtaccgtcccgatcgcctgctgtaccagggcccactgtccggggagccggcgagctacctgacagaccagttaaacggccgactacagaatgggacactcgagcgctgtcggccgaccctgagacgttgcgcaagaaccgggagctggaggcgatccactctcgctgggccatgctgggcgcgctcggatgcgtctttcaagagctaatggtccgcaacggagttacattaagtcaggccgtgtggtttaag

SEQ ID NO: 181743 - DNA, 252 bp, Zea mays
  Clone ID: MRT4577_97329C.1
atcagtatcggcttggggacacccaccgatgtccggcccagacaggctgacggaggaggaaggaatgctttctctgccacacggccaacaggggaagcgcctgaacgaggtggtcgacctgccagccaccgggatggacgcctttcaagagctagcggacgagatatgatggattcatcggtgatatgagccacgctcacggacagggctgggtcgctatacatacatatatactgcacggggtgcctgctt

SEQ ID NO: 181744 - DNA, 125 bp, Zea mays
  Clone ID: MRT4577_9732C.1
gcgttcgtcgatcatccatcgaccgactaatgcttgaattactatcccgcctgcctgcatggatcacgagggaggagctgctaacaccgaccggacatgagctaccaggctcctcctccgggcac

SEQ ID NO: 181745 - DNA, 444 bp, Zea mays
  unsure (1)..(444): unsure at all n locations
  Clone ID: MRT4577_97330C.1
aggacacaangagcggcccgnggggaaggngggcgacgnccgggacgcaccggggggccgcgagaacgaccncgaggccanccagcccgcgggaagaacgggcaccnttttttttttanacaccaacncnacncnnnaanncaaaaggccncnaaangnnangcaccacccccccnccnnaacccngcaccacnncaccnncnancaaaaagaggccggcggaaaaaaaaagaaacngcacgaggccaacgggcgggagaaggcgcgggagaaccccaagcagcngcagagcngcgagcgcggcggagacgccgcggccgcccgaggcgcacaggcnnnncgcnggaggcnggagcacaacancgaaagaaancaacggncagcccaccggaaaagcacganngaacgaacaaaccagcgccccacccacagggaccgcacccc

SEQ ID NO: 181746 - DNA, 305 bp, Zea mays
  unsure (1)..(305): unsure at all n locations
  Clone ID: MRT4577_97331C.1
cggacgcgtgggctattattgtagtgccctcgcctgaagaggatcaaatctattatttcattgttaaccagacaacgcatgaggggacatgatcgcacctacacacaaagggccttgaaaccacgtaccacccactaggcgcacccctgatggtccggcgccgncgcggacgacttcatacatacacacacgtccactaacatctcacacatagacacacacgacacacgatctggactcacgcgcgccataccagacaacttatattttggagcgggaaccacgtatccagctcgtatctagca

SEQ ID NO: 181747 - DNA, 655 bp, Zea mays
  unsure (1)..(655): unsure at all n locations
  Clone ID: MRT4577_97332C.1
cttctaatcgttatcgctccatccgcaccagtgtcaatattcgtgagctcgcgacttcctcccgactcctcccttgcagagatggcgaggaaaccctgatgggcgcatctctcctacacgacatgcggaggcggcgagctcgctacagatatccacacaagactgccgccgggcggacgacggctttcatcccctcgagggagcgccattgctacgccgtacaggctcctagctctcaaacagtcaacaacgcgcagtagtccactgcgactgtagctgccacagactacgctacgcgaagagggttgaacacatgtgatcgttcatcacgccactgtgcatattgcggaagcgaaccgagactgacgaaggagtgatatgatcataaaacgaggaagaataagcgaaggatgttactgnaaatgggaacagtatggaggatcatatactggccgatgacgagagtctggaggcccagatcaaggaaggttatgaaggcgactaggatagtgctagtgactgtccagccggatatgtcagaggagcagatatgcgcgctgaaggatgatggacccaagtgactgagctgcctagcgaaactgtatctcaggaactagatgaactgaagatggtatctaggattgctacagagaca

SEQ ID NO: 181748 - DNA, 309 bp, Zea mays
  Clone ID: MRT4577_97333C.1
gctaaagcgcgatcggccgccccgtaccaacccatccatgcacgtgtgctgctgtgttggcgtaatcccctatcctttttatgttctactccgcctgcccagaaaggatctctgtcgcgcaggacaaggagagagcaaggcccaactcgaataggcattcacaagagtagaggttcagtagatggggaagaccgccagagtaacagcaaagaaaccaatgctccctgcagggacgatttaggacttggagcgtaaattagaagattgaaacgaaaaggcctgacgacatcacctgaccgcacgcacaga

SEQ ID NO: 181749 - DNA, 554 bp, Zea mays
  Clone ID: MRT4577_97334C.1
ggccctaggggccttttttttttttttttttccctcaaagtaaaatacatgtaaaatttctggattatactggcaattaatattctccataatatcatggaacctgtttgaatatacaggaaaaaaacacgaaaaatgatccgccacttggcgaagtgagcctccttgctgattcgctgattcttatctaaaggtcctcagggccactgatatccttattcccaatcactgtctccgttggggatttttagcttgaccccaggttttgcagggagggtcattttccccttcagtacaattccaaaaccgaaccaaacatcacgggaaaccttaaagctgtcaagctcaacaatgctaggtttcgacttgaagcgaccaaggaagctcccaacctttttgaactcaggaccaagttcaatggagggattggagggatttgttcgggctgaattacgggtaacgaacccttcacccagggtttataaatcagactgtactagctgaaaatttgaggccgccttaactggaaggaagcgggaccttggaacgttgat

SEQ ID NO: 181750 - DNA, 502 bp, Zea mays
  Clone ID: MRT4577_97335C.1
ggcaggaaaaaaacgggaaccccggaccccttgggtgggggattttcgaatacgttacactgggggaaaacaaggaaagaaggggccattaaggccagcacttattttttgcggcccccggggggatgggggaggggtattgggatcaaggaccatttaaaggctaattctattagtataaaaaaaaagggcaaaaatgatggggcggccatgggggggggtaaaaaacaatcctttggattttttccaccagccgttcttttttttgggccaaatcctggtttggcttcggaagccccccgatcggctgggccgggtcggaatctttccgggtcatgaaaaacaggttaagttttagggaccggacctccttctctagggtttcacagggttaaagaacgggtggcatatcaaaggggattacggggggggaacttttttcctttgcttcggccatttggggggagcgctcaacccggcgcttttttgaaggatctccatt

SEQ ID NO: 181751 - DNA, 316 bp, Zea mays
  Clone ID: MRT4577_97336C.1
ggagttaccaagtatattcaagctctgctgtttgccggcttcctcatgcagaaggaacttgactaccttgttggagctgttgccaacccaaagaagccatttgccgctattgttggtggatccaaggttcacgtaagattggtgtcattgagtccttgctggcgaaggacgatatcctcatccttgggggggggatgatctacacattttacaagggaacaaggtattctggtggaaaaatctttgggggagaaggataaccttgagcttggaacttttcttatttagaaagctaaaggcaaagggggttcttttt

SEQ ID NO: 181752 - DNA, 140 bp, Zea mays
  Clone ID: MRT4577_97337C.1
ggtagagcctcaactacctattattcaaaagcggtagggagggggctatattttgcgcccgttctcaccatcatgagaggcaactggccccagtggtactattattaggacgcgtatgctaaagcttaagcgccggtaaa

SEQ ID NO: 181753 - DNA, 2392 bp, Zea mays
  Clone ID: MRT4577_97338C.1
gtttccaacacagccgactgaaaatgcatactgtcgtcggaagtggcagctccaatgacgtggctcgttctcacgctcctgctctcatcagcggccgccgccgtggagacggtgaaagtggtcaccaccccagtcttccctcagatccctcggctccaggcaagcaaagacttccaggtggtggtgcgcgtcgaggcgccaccggtggcgcagcagcaggcgcgcgtccccgtcgacctcgccgtggtgctcgatgtgggtgccggtggcggtggcagcaccggctcggcgaggctggatgcggtgaagaaggccgtcaagtttatcatcgggcagatccatgacaacgaccgtctcgccgtcgtcgggccgtcgcccaaccgccggctagtcatcgggtttccgagcactcacgaggctcgacagaacgcagaaaaatccgtcgacgacctggagccccgtggcgagttcgcgtccggcgccggcttggaggaggccgtcaagatcctcggggagttaccggcgacggcgagcgggagcagccgcgcgcgcttcgtcatcctggtgaccgacacggcggtgacggagggcagcggcggcagattcggcaagctgcggcgcgagctcctccccccggtgcacacgttcggcctcggcgcggggcacgaccccagggcgctgctctccatcgccagggagtcccagggcacctactccttcgtcgacgaccagaacacggacggcatcacgggcgccatcgccatctgcctcagcgggctcaaggacgtggtcgccgtcggcacgcgcgtccgcgttgaggcgcccgtcgggagcggggtcacgatcgagaggatcgagtcgggggggtacaggactaaccccaacaccggagacgacaagacgtacggcgaggtcgccgtaggcgccctctatgccgaagaggtgaagagcttcatcgtccacctccaggtgcctgctctgccttcgacgtcggcgatgacgacctcctcttccgtcgacaacggaggctgcgacaagcaacagctgctcaccgtcaccttcgccggccactacaccaccagggacgagggaggtgccacgtctccagcttctccaagtccgacagtgaccacagcagtcttgtacgtgcaaaggccgcagccggaagccctcgacgttgccggcggcggcgcgctgcacagagtccccgtccccgcggtgatgaacctcatcgcgcggttcggcgtgctggagatggtgaccaccttcgtcgaggacgagatctggcggcttagttcttccagttccagcacggtggaagtggcgacaaagctgcggacgcagtgggagcagttcgtgcaggcccggcagttctggagcggcctggacctgggagtcctcgacgtcgaggtcaacaggatggcgagcatcctagaagcagcaggaacccgaatcggttcgtcggcgacggcctacatgctgtcgtggctgtcgagctaccagatgcagcggccgacggccatgggctcgccgagcatcgtggccgccgcgttcgtcaccgtgaagatgcagttcacgctgcagcaggcgaccatcgtcaacactcgtccaccaccatgcatcggcggctgcccggcgtgcgagtgcgggtgcgaggaccgctgcgtgcagccactgccgccgccggtgctcctgccgtccggacgcggcgacgacacctaccgcgtcaaccccgcgtacccgcagggcgtactgttcaacgccatcaaccaagcaatggagcagatgtacctggcgttggtccgggcgagcaatctgacgcgttgcgacgacgctgcccgcgtcgagttgttcctgccggcatgatccggcgagcgacgacgactcatcacggggtacgggcaactcaccgccgatcgatccatcgaggatctagctagctataccgtctaccgtataccgtcctagctagtaggctagtagtatacggtggtgtgcttaactatacaagctaagtactgtacgaccaagcttagcttgtcataaataagcaatcgatcatacgcactccataactagtacatgctcgtatgcgttgccttgtgctctcatttcctttctatccagaaaccctctacactacatccacacagttatgttactcgccaacgagcattttcgatgcatggattggtcatgcctccataatctcctgctaggcagtttgatatcaatatttcgtaaccttgtacttcctctatcccaaaatataaggcgcacatgttttttaaaaatactcaacgttgtaaaactttaacaaacgattcagcaaaaaatatattttgtgtaaaaaaaaaaaaaaaaaaaaaaagggcggccgtcgcactagaac

SEQ ID NO: 181754 - DNA, 668 bp, Zea mays
  unsure (1)..(668): unsure at all n locations
  Clone ID: MRT4577_97339C.1
tgcttttgtgtcgtcgtgtcgaaactccttccagaccaagcttcgtctgctgtcggcttgcaccagtcctcacggcccacgtcgagggagacgaagggataggaggcggaggcggaggttgcaaaaaaggccgggagcatgcaggcggtggacccagcgggccggataagcgcgttgctcgcattgcgccagctcctcgccatgctctagccgctggccctgctccgccctttcattggcgcgcgtggccggggcgtccgatgttgcggcctccgtgttggggctagcgggaaaaggggaaggcggcggcgtcagcggttctacgggtgccggccgtctcgcccatggtcgccacacgaaggaagatagccacgcgccggacgcaggaggccaggcgggtgtacgatctgatccccaggtttctatgtgatgtgttctacttctacactgtacattttctaccttttttatgttctactaggctgttcaggtgaccagtactattaactaaataaactctatggttagtagcttcctgacagccttgcttgaattccaagcgatgttgttttgtttactttagttgcttacttacaaaataagatatacaggccccctactccttttgctacgtangatgcagacctggacatgccatgcgcccatgc

SEQ ID NO: 181755 - DNA, 1149 bp, Zea mays
  Clone ID: MRT4577_9733C.1
ttgggtacctcgaggccggccggggaaaccccaacccaaccatcgctccacgcccgcgtggaaaagacggagagagaccgggagagaagaagaagaaggaaaaatcaggggaggaggagactcagcggccgggaccggaacgtgaaacgcggacgcacgtcgggaaagtaatgtaccaggccatcccctacagcagcgcccgggcgtggctgatgccggcggcggcggctgaggcgggcgtcgccgctgtgaagccggagccggtggcgaccgtcgcggagcctgcggcggaggaggagcgcgcccggccggacgccgcggccggggacgacgacgacggcggcagggcggaggtggggagggccgtggcggagaggccggtgctggtggtggggcggcgcgggtgctgcctgagccacgtggtgaagcggctgctgcaggggctcggggtgaacccggccgtgcacgaggtcgcggacgagtcggcgctcgcggggctcgtcccggccggcgccggcgccgccgccggcgcgctgcccgcggtgttcgtcgggggcaggctcctgggcgggctcgaccggctcatggccgtccacatctccggcgagctcgtgcccatcctcaagaaggcgggtgccctctggctctagtttctattactaatcaatccgtacgtcggcgtgtttcttccttcctgcctcttctgtcttctctcagaaacgatggcgtcgtggtttcgcccgtggccgttggatcgagcatcacaacaccacaccgcggctgatgcatgatatgagtttggaaataggactttggtttcttttttatttgtttatttatttaggcgaagcgaaaaaaaaagaatggtgagaattcgaaccacagagtaattttattgtccgctaagcgtgtgcgtgcgatgacaagtggtcgcttcgcttcttccatcatgtgaatacggaagacgggcgagagacagaggggacggacgtttgtttgctgccggcatctgtacaatcctttccgtttcagattttaatgagggatgagctgtccagtttccctgcggacggctccgctgtcctatgtatactcctgctgcgttcattcccgcccgtatatatatacggcatttgtcctgtactactc

SEQ ID NO: 181756 - DNA, 233 bp, Zea mays
  Clone ID: MRT4577_97340C.1
acaaaattttaagcaagaattccttatttctccgatgtccatcttcgaatgcgagcggagtgccctaatagccatggaagccaaaacctgcttcgccattgccagcgaccgaaacctcggggttcaactccaaacaatcgccaccgatttccaaaggatttataaagtccacgatggctttttcctgggtctttccggcttggcaaccgatgctaaaaccttggttcaaaggc

SEQ ID NO: 181757 - DNA, 181 bp, Zea mays
  Clone ID: MRT4577_97341C.1
gacggagacacctagtggtccacgaagagaggaaacgctaacgaccgaccatgtggtaggtcccacgcaccgtgcggctggacctactttccacccagtgggcgtacttcgatgacgctgctgcgggcgaatccccgacgttaccagagccatacgggggcgcacacacaccggctgatgt

SEQ ID NO: 181758 - DNA, 733 bp, Zea mays
  Clone ID: MRT4577_97342C.1
ctcgaggccggccgggccgggatctcactttctttctcggcacgtccgccatgctctcgctttccttctctctgctttgcttttgtgtcgtcgatgtcgaaaactccttccagaccaagcttcgtctgctgtcggcttgcaccagtcctcacggcccacgtcgagggagacgaagggataggaggcggaggcggaggttgcaaaaaatggtcgggagcatgcaggcggtggacccagcgggccggataagcgcgttgctcgcattgcgccagctcctcgccatgctctagccgctggccctgctccgccctttcattggcgcgcgtggccggggcgtccgatgttgcggcctccgtgttggggctagcgggaaaaggggaaggcggcggcgtcagcggttctacgggtgccggccgtctcgcccatggtcgccacacgaaggaagatagccacgcgccggacgcaggaggccaggcgggtgtacgatctgatccccaggatgcagacctggacatgccatgcgcccatgccttcttggtggttggtttgttcttcagatgtagaaagctacccgaaatccattgaactttggcagtctttttcatggtttcctgctcctatttctatggcggcctcgtcttgtttgtcagtcaagcaacaaccatgtggcacagattaataattcaattcaaggaaatataagtactgttgtatgccattctccagtcaattc

SEQ ID NO: 181759 - DNA, 275 bp, Zea mays
  Clone ID: MRT4577_97343C.1
gcgccgcggcgcgggaggcgtggttggaccacccatgggatatgaaccagatccggtaccagcgcaacggcggagcttccgatgcgggcacccccttggtggtggtggtggggactctcgatccatcattgtcgtcacacttggaccattaggccaccgcggcagggcggcggagaggccatggacgtggaggaggtccgcacgtgccgggacctcgggctggagctgccctccgactgtaccgtggagatccagagctacaggcagtccggcgg

SEQ ID NO: 181760 - DNA, 1667 bp, Zea mays
  Clone ID: MRT4577_97344C.1
cttgcagatacttctccatcggctgcatctctctttctttctctctgcgtccgccatgctctcgctttccttctctctgctttgcttttccttctctctgctttgcttttgtggcgtcgatgtcgaaaactccttccagaccaagcttcgtctgctgtcagcttgcaccagtcctcacggcccacgtcgagggagacgaagggataggaggtggaggcggaggttgcaaaaaatggctgggagcatgcaggcggtggacccagcgggccggataagcgcgttgctcgcattgcgccagctcctcgccatgctctagccgctgggcctgctccgccctttcattggcgcgcgtggccagggcgtccgatgttgcggcctccgcgttggggctagcgggaaaaggggaaggcggcagcgtcagtggttctacgggtgccggtcgtctcgcccatggtcgccacacgaaggaagatagccacgcgtcggacgcaggaggccaggcgggtgtacgagctgatccacaggtagtgaacatgttccatctcttgctattctgttcctctctgctagttgttaggtctattgtttatgacattgtcgtcactcatcaggtttctatgtgatgtgttctacttctaccctgtacattttctacctttttatgttctactaggctgttcaggtgaccagtactattaactaaataaactctatggttagtagcttcctgacagccttgcttgaattccaagtgatgttgttttgtttactttagttgcttacttacaaaataagatatacaggccccctactccttttgctacgtaggatgcagacctggacatgccatgcgcccatgccttcttggtggttggtttgttcttcagatgtagaaagctacccgaaatccgttgaactttggcagtctttttcatggtttcctgctcctatttctatggcggcctcgtcttgtttgtcagtcaagcaacaaccatgtggcacagattaataattcaattcaaggaaatataagtaccgttgtatgccattctccagtcaattctatagcacggagggtgcttggtttgtttatccgaaatttgtcaggctcagctcaggctccgctcgaagcactgacctacatgatgattggtgccacacgccatgccacaacctttgtgtttgtccttcctgcttccttatttgttacatttggatctttgttattgttgtttacagatgatccaacattttaaaacgttgcacggattgttggatttttgtttcaggtctccacagattgttggattggtcttggcctcttcggtattcttgcaacatgcatgtgggtagtatcatggaactgaacctgctgaggcatctccgggcccccacccgaagggggacgatgaaattagaaaaatggccgaagccattatggacaaggttgtcgaccaactattgaatgaagctgcagaaatagtgcttaaggtggattgaatgttactgtagaacatttggaatgtaacatatgtaatatattgtaactttgagtgtaatatataatctatagtttaattctttacgatgcatgaaattttgcatacataccattttttgagccttcggcgaaaaaacaccttcccttcttttcatgctttgtgaag

SEQ ID NO: 181761 - DNA, 247 bp, Zea mays
  Clone ID: MRT4577_97345C.1
aggcaccacaaaagggtcggagtcttttatcaattaatacaacccttgtttggaaaacccaattaataaacctgccggataattaagggccgggcaaaacaagattccgttccacaaaacaaagctttggaaaacaatgggaaccggacagaaaccccgcagcatctttaaatcaagggccaaatggctaaacgcagatttctagggaagttaaaaagggttttaccccctacaacaaaatgggggc

SEQ ID NO: 181762 - DNA, 835 bp, Zea mays
  Clone ID: MRT4577_97346C.1
cggacgcgtgggtggcgcaagaaattattcaaaggagtgaaaaggcatgcacggtgctagaaaagtagcagaagctgcccgaaaaaagtacagagcccgaagggcacataggtattaattagtggtttttatcatgctgtaatttttaattccaaactctgttctcggtttgtaatagtaatatagccgtatcttttcttccctcagaacctgctgaggcatctccgggcccccacccgaagggggacgatgaaattagaaaaatggccgaagccattatggacaagattgtcgaccagctactgaacgaagctgcgaaaatagttcttaaggaggattgaacgctattgtagaaacatttggaacgtaacatgtgtaatacattgtaactttgaatgtaatatataatctatttatagttttaattctttacgatgcatgaaattttgcatacataccattttttgagccttcggcgaaaaaacaccttcccttctttttatgcttcgtgaagaaaatcttttctatatcacaagaatttgcttacttctctgatgaagaatatccaagcttcgtgaaatattctccgaggctataaaaaagttttgtgttgcctctctaatgaggctacacttcatctcgatttctcttttccaaaatattctccgaagatcaacactgtatccccttcttgttccacatgcaatatgctgtatgatgcttatgttatgcaaaaatgatgtgatgatgttatgttatgcaaaatgatatttgtgccacagatataagtccctgtaatagagcacacatactttttaatcagcgctgactcccg

SEQ ID NO: 181763 - DNA, 255 bp, Zea mays
  Clone ID: MRT4577_97347C.1
gtcccacagcgtggctctctgggttctcccacttgtcctccttggaaggagctcttgctggccagtgtttggaggggaggatgagtgcctgtcactgaggcctcactatggttggcgtctgaagcgaggcggtcgtcaggcctgtgctgagatggctgctggcctggcctccaagagtgctggacaggcgggggacactgcccagatgctcggtggagggacagtgatggccttgactcatgaggcctagagaaa

SEQ ID NO: 181764 - DNA, 468 bp, Zea mays
  Clone ID: MRT4577_97348C.1
aatgtaagacggcctttttttttttatcgtggtcgatcacaatcacaataagatgggtgaatgaaacatgttaaaataattattggggaaacataaggaaatgggggaagggggggcgtctttggcctttttttaatccttagcccttgggatgcggcataaggaaatgttggtacgccacgcccatgccggttcacgcgtgggtcgatcagtggccgccggacaccttgttcttgacaggcggcgccgtgccctggaccgtttgggccacctgcttgggtgcctgtttaacggggccgggggggcggtgctattgtagttgtgcgctgttggtcgggactccgggggtgttgggcggggtttcggcggtgttgtcccggggcgggtggtagtgtagccgggcttgcgggggggcctggggggttttttgggttctgtgccggttggcgtgcctttttcttaacgttt

SEQ ID NO: 181765 - DNA, 1141 bp, Zea mays
  Clone ID: MRT4577_97349C.1
actcctatagggcgattgggtttctcgaggccggccgggaagcgagacaggcaacctgacaagaaagaaggacatgcggcgcgagagaaacagaggcgaagaagaagcacaggaactggcaaactataaataaagcgtcactgtgctgcgccattagagagagagcgagagagagagagagagcagcactcgttcacgatgagcagcaccacgccctccatgtcgcggaaccttgctcagacggcagagacaggtatggacggcggagcacacggtcaccacatcgagacctgtgctgttcgttcagtgccgtctgctggcgtgcagatgcagcccctgcgctttcttcagcactgtgccttgtgcaaccgtgcgcttggcccagagcttgacatctacatctacaagggagagagcgctttctgcagcgatgaatgccgagagaaagggatgagggtcgaccgagcccgaaggaaccgccggatctgagtgtttcagagaaagcacaataccatactccatatatttatgcaactatttcatttgccagtcagtcgtgtatggtatgggcattgcataaacatacacaagactgcatttttgtttccctcttgaaatggagaagtaaaaaaaacatcaattttaagttaataaatcaaatgaattacggctcatatatagaatgaagatgctgtatcagtcctgtactctgtactgatggtactctgtggatgggagcgagcagtcttggttcttgaagtaacagcaatgaacagaacggcgtgtggtgtggtccttgatcattttttcggttagccttcctgagtctctctagtaggccgctgctttggattgccatgcgctgctatagatcatacttggaggaggcgagcaggagctcctccgcgccgactttcatgttggggcccgaggcgaacttgacgaggcggctgctgtcggggacgaccgcggcctcgacgatgaacacgccgcagacagggcggtggtcggagaacttggactcgccgcggatgtaggacagctgcactatcccttcgccgtgccagaggatgcggtcgcaccatgccggcgtcctcctcttcttcttggacgacacgtcctcgccggcgtagggcgacca

SEQ ID NO: 181766 - DNA, 713 bp, Zea mays
  Clone ID: MRT4577_9734C.1
tacggagacaccaaccatctaccacagtctctgccatcgagatgagcatgcacgcggctagctcctggcattacgagcgccgcgctgctcgatggagaactccatgatctcctctccatctctgggggtggcgtatcacgatctgcctgccactcggcgccgcgcctcctacttcgatgcatcctgatccaagaataatatcaagactagacaagaccctaagttattgagagtggtctgaacggcaaggacgacgccaaaggaagatagggcaaggggaaagaagcgtagcacatcgtcaacatagcacagcaattgcgacgacagatgcagcctatgctagaaggaggatgactgtttttccatgggagaccattgtgtccactgaatcactgggcttgtgaacggtggcgctaatatatctgagattcttggctatgaagccctacgaggcatccacatctacgctgtatgaagctatggataacccatgcaaggactctgtggaatacgtcctgaaagataatggacaaatgccaataatcaacctgcgatgaagggttgaactctcacatgtatgattagtctgtacagctctccttgagcgacgtgatggtgcgatggatgggtggatctgattgtagcatactacactacactcactgtaatgatagatgtaaatatagctgcacgattgatgaccaaatgaattc

SEQ ID NO: 181767 - DNA, 405 bp, Zea mays
  Clone ID: MRT4577_97350C.1
gatgaaacgatgcatatgtttccacttggtttttacgattcaagttacacgggctaatttgccttagaaaccaccaaacagttagttaaaacaggtaccgggtgggggccaagatcaagaaaactagttatcctaaccacaggcggggggcaacacaactgagggcacagggggggagccctgtccattggaaacaaattggaatcgacgacacccttctggaaaacaaaaaaggctaaaaaagggctgacttggcgctgcagagctgggtgccaatgagcccaggagccgagaccatgtagggcagggcgggcttgaccttcaaaacttgcgggacatgaggcctcaattggggttcacccaaaagatgttggggtccaacacggggggcattttgtcgatgcg

SEQ ID NO: 181768 - DNA, 411 bp, Zea mays
  unsure (1)..(411): unsure at all n locations
  Clone ID: MRT4577_97351C.1
ggggggggggggggcgaaaataaaaaaacctccacaacctaataactttcntcttcacatttaacaaactttattactaccttaccacttnnttccncaacctanaacananncactttttttttttttanattttccnnaaaacttggggggtgtggggggttttataancnacncaanttntanattnccaccatatataaaaattttccccaccnctactcatctctttnccaccactattttantcatcantnctttatccncaccctntttatttcnacntaccctttattnctatancattntaataanctatccccattcttntantttaataantacaatntccatcttttcaaacatcancntcatttttatttctttnttaaaaaaactatcttncctttt

SEQ ID NO: 181769 - DNA, 265 bp, Zea mays
  Clone ID: MRT4577_97352C.1
cgaggatcaggatctgaagctaaagaagcaggagctggagctttgccaaacgggcccttattattggaatatgaccgcgatggataaatatgttactgacaataaagagaaatttatagaagtagttaccttgcctaatgatagggtttcgttgaagatgactaaatcagggtgtctatttctatcaaggtggttaagatgttttacaaaaacatttgctgatagaaggagctggaatggatattttactttcaacgattttcaa

SEQ ID NO: 181770 - DNA, 455 bp, Zea mays
  Clone ID: MRT4577_97353C.1
ccacacacacacacaaaatggttttgggaaaacaccgggaaaactgttaacaaaggggtgcaattggtctaaacgttgctgcttggtgggggcggttttatacataaggctggatctaaccatagcctaccagatccgaccataaccccaaacctaaggtaagatacaaaagccgcaaaggctccggagtccggacagcccaccaaggccaaccctgtccttttttttttttttagcccttggtggacatgccttacaggttactttaaaacaggggaaaaaaagaagcatctggggcccccttggaattattccttggataaaaatctagggttacaatatttcgccctctggttttggcctgcactaaatcttttgtttgaggacccggcggagctggatcttttggttttccatccgggcctccatgaactttgccttaaaactgtgctttt

SEQ ID NO: 181771 - DNA, 261 bp, Zea mays
  Clone ID: MRT4577_97354C.1
attcggctcgagcacgggcgcagcacagttttgattttgctcctcctgcacatgttgctgttcggggcacaataaagttggaaggcctgctgccacaccactcagggcatgttgatcagtatttactgccttgcgcacaatacaggttactgcgatctctagggaacctttacttgcctgctctgccaaagccggggtgcataatcctggacatggcagtgtctacaatgaagacccactcacaggtgttaccaagacatg

SEQ ID NO: 181772 - DNA, 434 bp, Zea mays
  Clone ID: MRT4577_97355C.1
cccacgcgcgcgctttattttttcactcaacccaaacaaacgaacaaaaccagggggggaacatggacacaggcgacgaggcctcctccgccacagggcaacaccggatacggagcccgcggagggagccacgaccctgaccagaacctgcgccaaagcacccccgccagggccacccgcgcatacagcaagtgaccggtccggagacatatgcaccagccgctgcctccccgccatcaaaaaagccaactgcccgccacgagggggggacgcggacaaccacgacgcaaccggaaggctctgcaacggccagccggcggccgacaaaaccgccaacacgctggggaccactacctaccctgccgggaacctcagccgcacgaaccggggaaaacgccacgacaagataaagcgcactgaatcacaatctgacc

SEQ ID NO: 181773 - DNA, 1867 bp, Zea mays
  Clone ID: MRT4577_97356C.1
cgggttgacccagcgttctggaagctcaaaaacctctccgctgaaaccgccacacgtcgcacgccccgtcccgctcctcttgaccgcctcgctcccacggtcccaccccgacgcgcggcttcctcaggcacccacctcgccgaccgacacatggaccccaccgccgcccccggctccggcggcacccccgccgactccgacgccacctccccgaccaacaccaccgtgacgctcccgccgctcaccctccgcgacgtgccgcgcctcgcctcctcgtccccggcggcggcggcggcggcggcggtcccgaaccccatctcgcgccacccctacttccacccccccgccaacttctacatctctccgggggacgtctccctccgccacgccttcttcgacctcgtctccgccgcgccctccccgctcgtcgcctaccgccgcggggggccccggcgggacctcgccgtcgacccggccgcggcgcgcgccgcgctcgtcacctgcgggggcctctgcccggggctcaacaccgtgctgagggagctcgtcgtcgggctccaggagctatacggcgtccgccacgtcttcggcgtcgccgccggctaccgagggttctacggcgccgacgaggatcacgtcaggctgcaccccgccgccgtcgacgactggcacaagaagggtggcaccgtgctcaagaccacgcggggtggcttcgatctcggcaagatcgtcgacggcatcgtcgcgcgcgggtacacgcagatatatgcgataggcggggatggaaccatgagaggggctctggcgatctttgaagaatttaaacgccgtggtttgaacatatctatcactgggatcccgaaaaccgtggacaacgacatcggcatcatagacaggtcgtttggtttccagactgcggtggaggtcgctcagcaggcaattgacgccgctcatgtggaggctgttagcgccgtcaacggcgtaggcattgtcaaactgatgggaaggagtacaggccatatcgcccttcacgccaccctcagcagtcgggacgtcgactgctgcttgatcccagaggtggatttctacctggaaggcaagggtggcctgttcgagttcctgtacgaacggatcaagaagaaggggcatgctgtcgtcgtggtcgccgaaggagctggccaggaactgattccccggactgacgatcagaagcgggagcaggacgagtccggcaacaccgtcttcctcgacgtaggaccctggctgaagtccgagctgggcagatggtggaagagggaacatcccgacgagctgttcactgtgaagtacattgaccctacgtacatgatccgagcggtccctgcgaacgccagcgacaacttgtactgcactttgctggcgcattccgccatccacggggtcatggctgggtttactggcttcgtgcctggtccgataaacgggacgtacagttacataccgctggaagatgtcgctgtggcgaagaaccctgtcgatgtgaacgatcacaaatgggcatgggttcggtcggttacgaatcagcctgatttcctgaaatcccaagcatagtacctcaagtccaatggctgctcctcccttaattagactttcttactgatccagttgcctgcatccctggttattttctgttcaataagggttgtagcttttatgctctccagtttgtgcgcatgtggaacacttttgagaaactgttgtgcttgtacatatgctgatactatcgttctcatgaataaacgatgctttttactttgagtgaaacaccgtttgcttaaactgtattggattgctatagatgtcagccgacatcgattgataatgatcc

SEQ ID NO: 181774 - DNA, 358 bp, Zea mays
  Clone ID: MRT4577_97357C.1
tcgagttttttttttctttttttttttttttttttttttttttttttttttttttttttttttttttttttttttttttttttggcggcaaaaccggggcttttttttatttaattttatttttttggcaggggggcggggtttttttgggggaaaaggaaacggtccttttgcccaatgggccccccctaaataactagtcccccctgtttagaatttaaccccccactttgccttgccaccggaaacgtttgctggaaacgtgttttttttcccaatcagagtaaaaacacccgttttacccttaacacgtttttttttctttcaaaaaaaaccggccccccccaagggaactttt

SEQ ID NO: 181775 - DNA, 171 bp, Zea mays
  Clone ID: MRT4577_97358C.1
agccctgatagtttagaaaacatcccagaaaagtggaccccagaagtcaagcatttctgtcccaacgtgcccatcatcctggttgggaataagaaggatcttcggaatgatgagcacacaaggcgggagctagccaagatgaagcaggagccggtgaaacctgaagaaggc

SEQ ID NO: 181776 - DNA, 278 bp, Zea mays
  Clone ID: MRT4577_97359C.1
ccactttcgccgagcgtgcccgccgtcgaagccgcgtcacactgcgatgagaccactactcatatcggcagccactctggtccgaaccgatgtgtacccgctgttcgctgctacatgcattgccttccgcatctacggacttcacctcttccgtagcatcgacctgaatccgtgattcatcgtaccgtcagcatcaaaagcatctcaattacctgatggccctgaccaaagctgctgctcaggcatctcttgactaaatagcttcttactcagcaaca

SEQ ID NO: 181777 - DNA, 279 bp, Zea mays
  Clone ID: MRT4577_9735C.1
cccacgcatgcgaccagaggttcagttcgctctcattggggccaccgcctacttattggctacactagcccgcggatgcgagggcttcttgtgtaccatcgaggaggacgcgcctggtatgattaccttgaatactagactccggaacaaagctgaaatggtgcatactcgatgctgcaagagcaattactgaactgaatggtgtcacaagcctagatcttacacttagaagtactgcgctgtatatgtctataagtacattcaaacctgttcttagat

SEQ ID NO: 181778 - DNA, 503 bp, Zea mays
  Clone ID: MRT4577_97360C.1
tcacaatggcgacatccgtgaagcgcagccacagctgcagatgccaagtactcttcctgcttgcgttggttcttctggcattcgtctctgcgagtcctacacccatcagcggtcagagcattgacgacggcaggaagagcaagacaacggtcgtcgtcggcggcggcaacgaggcaatcgtcgacgaggacaacgacatattcaacgggtgccactacaataaccagaatccccattattcgtcggcgctgttctgctgcagcaaggacaagctgtgctgggcgtcgttgccggagtgcgccgccaactgcccttgcaagacgaactgctagacgatgatgagcttcgagtctccagttcatacatgatccatggttgtgttattggaggaagatgtactagagaggcaatcgccaaagatgcagtcttgatagcaactgagaataatcgtatgatagatattgggctaaaccaggaccaggagtatccaaaaattgttttat

SEQ ID NO: 181779 - DNA, 140 bp, Zea mays
  Clone ID: MRT4577_97361C.1
gcagctggtatatacatggtttattgcacacaatttgtgcccttgaataacgcctgactttctggacagcattgtctgcatcaagggtttaaaggactgaatcaataaacggtgtgtaggcgatcactgtttcaccgcac

SEQ ID NO: 181780 - DNA, 759 bp, Zea mays
  Clone ID: MRT4577_97362C.1
tgacaaggagatttctcctcagttgcaggacagcataaagaggctcatgaacgaggaaacggaaaaggtgaagggtttcccagtagacagcattgtgccctacaccgagaggctgaaaatcctggctggtttggcgaaccctgaggacctgcaactgagcacagcagagaggaagcttgtgcagacctacaatatgaagcctgtgctatctcgcccacaactcatattcttctagggttcaaactactttgagatcgatctcgatgtccatcggttcagcttcatatcacggaaagggctcgagaccttccaggagcggctcaagcatggcgttcttgatcttggtctaactatccaggcacagaaggctgaggagttgccagagcatgtcctgtgctgcatgaggctgaacaagatcgacttcgccaacaacgggcagataccgacgctgataactgcagctgatgagtaaatctgtcctgttactgtaaggcactaactttctggaaaaagcaaaagagactgttgcttttcgagatgctgttgtatagatcggcagatagttgtagggactaactcaagtttgtgagctaagaaacacctaatcactgaggagggaaaagaagatattgcagcaatctgcattctgaactctgaagacgatgcatatacatgtctgtgttttctttttcttttttggaaacgaaatacatgtctgtatttccagttcaggcttactaatgttgcaggttcatctcc

SEQ ID NO: 181781 - DNA, 313 bp, Zea mays
  Clone ID: MRT4577_97363C.1
accacgcatacgactaaaacgaactcttaatccacaaatggaccttaacaccatgtatgggcggcctgacgctctgacaaacttccatctcggatgtttcacatgccttgtcgtcagatttttctcaaactcactcacattctgcatatattgtataacaactaacagatggctctggccacagatacacagacacatggtgtcatggcggtacccacggtcttcctgttgaaaacgcacatatgcatgccaaccgttctggtaccccatgtgatccaaaggaaaccacaatatctgctaccgtgcctgatgg

SEQ ID NO: 181782 - DNA, 306 bp, Zea mays
  Clone ID: MRT4577_97364C.1
ggggaaggaaacacaaaatccctatcaaattgagccgtcttagtcttaaaacaaagtctcacaaaaaggatcttcatttcatggcaaaatattttgaaatggacccctttacaaacttttattttcacaattgggaccgaatccaaaggtttaaatagagggtttaaacttcaaaaatttaccgcatttgaaatcactttgggaccggacacccaccagaaaaccttcccccttgcaatgaaacaaaaaaaagctcatgcccccactccccctgtgagggatcaagaaaacccaaaagccttcgtt

SEQ ID NO: 181783 - DNA, 375 bp, Zea mays
  Clone ID: MRT4577_97365C.1
ctctcttattaaaaatatcctcttcttctaatggtcggttttttttcaaaacactgcccctccactcacaaaaaaaacaaacattacatgcccaacaatttcttctacaaaaaaaaaactgccaaaataacatcacaaaaaaccctacaatcagatgctccctcactccaggtcccaactcttttacaaaagaaaaaaaaaagataggattgattgttattagcttttcccaaacgactgcccttaaaaaacaaccgactcataaggggaaaccctatggataaacccctaaaaacactccaaaaagaatgcttcaattataatggccaccaccacttaacgatccatactttcctcaaaactacctctccacca

SEQ ID NO: 181784 - DNA, 420 bp, Zea mays
  Clone ID: MRT4577_97366C.1
ggccgcttttttttttttttttttggtgttgttttgtttttttttttttttttttttttttttttttttttccttgggattcaccttagaagaaagcctgccgggggtcaccgcacccttcgttccgcagtccatgctggttgctgcatgggcctgctgggcccgcggttgaccccaggcctggcggcgggcacagggcgaccttggttcaagaacacgggtgggcctctccatccccgcgccgaccgatgctgacccctctggcctagggcctccagcgcgggggcgaactgggtctcttggccgcgcgggccccaccgttcggttcctccagttcccgtcggtgttgccgggcccgccgccctggttgccaccgtcgcacccggcggcccccccccgggggccggcgtcggccccccc

SEQ ID NO: 181785 - DNA, 567 bp, Zea mays
  Clone ID: MRT4577_97367C.1
gcgcgccgcacgacggcgggcgcggcgcttttccccgtttcttcccctcacaccgccgacgccgactcctcctctcacgactatcggcttacgtcgaggatgctgcaccaatggccaaagagaaaactcacgttccgatccgatccattgctgactccccttctgtggaggcccacccccagtcaggcacatgcatcctgctccttaagaggctctgagatctatggcataaacaggtggaagaattctcgcggtgggctggaggacaacgctttcgagtacgagtgggaggtagactcatcggggcggacgcgagataatatgatggaggctactatctgtgctctaatgacctttcaccaggattatctactgagtcctccttcatgaccgctgacttctgagatgtggcatccaacctaccatcctgatgggcgcgtgttgattgtgattctctcatcatttgctgatgcactgatgggttacaagctggcatgtgaccggtgtgacaatgtcgtcagcgcgaccacattgctttcgctcttgtatcgatgctcatgagctgct

SEQ ID NO: 181786 - DNA, 944 bp, Zea mays
  Clone ID: MRT4577_97368C.1
actctagaagagctatgacgtcgcatgcacgcgtacgtaagctcggaattcggctcgagagcagccggccaatctagcatcagcgcgcggggtctgagagcagagcggcagggcgccatggcggcatcggtggcgctgagcagcgggcaccggatgccggcggtggggctgggcgtgtggcggatggagaaggcggacatccgcggcctcatccacacagcgctccgcgtcggctaccgccacctggactgcgccgctgactaccagaacgaagctgaagttggaaatgatcggttattattattttgttaagtatttttttaaagtgctataatataatcagtatagctgacctgcgttttttctaaggtagtatttactatgaagtgcagtttgcaacccattttattgtctataatattatatatgtctaatagtatctttaattctatgctatcaggcaaacctaaaaagttggcatactgctcgttttcttcgacactataaatatggtgaaggcaaatgttatactgctaaaaccgtaagggtctgagaacctacacttgagtggtccctggaaaaagttgacagtacctcttacgcaggtaattgaggggttataattatttcgttaagtatttgttttcagtgctataatgtaatgagtatagctgacctgtgttttttccaaggtagtatttactatgtagtgcagtttgcaacccggtttattgtctataataatattatatccatctaactgtatgcttatttttatgctatcaagcaaaccaaaaaagttgccatacagctagttttcttcgacactataaatcttgtattgttaatctcttttggttatgaaataatgatagagattgatgtcctacaaaagcttacaagaaatgatattgcaggcaaatagtaaagtatacattctcgca

SEQ ID NO: 181787 - DNA, 240 bp, Zea mays
  Clone ID: MRT4577_97369C.1
aaaaaaaaaataaccgttttacccggcctattttcttttgtagcccgtgtttaaggctttcaaccccccagtgaaaaatacagaaattaacttctccatttaaattaactttacatagtagtatatagttaccgggtcccggacccatgcttgcataatataagggacagggccattttttacaagaaggggaaatacacatccaaaagttgtctttagcctccaagtaacctaaaagtt

SEQ ID NO: 181788 - DNA, 349 bp, Zea mays
  Clone ID: MRT4577_9736C.1
cccatggttaattcatgaccgataccaagcacggggtaccaacctcggaaaatcgggaccggaaccagagggcgccccaatctatgccaaaagaggacacacgcgaaaaacgggaaaacccggaaaaaagcagaatccgggggaaaaggggacaccacgggaaaacccaggggagccaaaagagggagccaaaaaagaaaaaacccggggggcaaaaaggccgacacaaaccaaaaaaaacggagaggccaaacagggacaaataacaggccaaaaaccggggagagccggatcaacaaatagacccccaacagccggggaaaaggataaagcaaaaggggaaccaggg

SEQ ID NO: 181789 - DNA, 250 bp, Zea mays
  Clone ID: MRT4577_97370C.1
ctggcattgcgtgcgatgcgagacggcatctgttcatcgtcctccagctagcccaccaatgcaccttcgaaaacacacctgatatctcacccgaggataatcaatcacacggagaaagtaaccttttgcttgtcgtcaccatggctgaatacaaactggcctacgagtcagagctggatgcttttcacccttccttccgctatgaaactcgcgatccaagagaagactggaaaacctccgcccttcgcgg

SEQ ID NO: 181790 - DNA, 144 bp, Zea mays
  Clone ID: MRT4577_97371C.1
gtttacccactcgtccgggcggccgccagaacacttctgacaactttttaaagcactctttcaatccattccactaagactatatacgaggtccattgcaaaacattacgctacacatattcctgttctatctatacataatcc

SEQ ID NO: 181791 - DNA, 124 bp, Zea mays
  Clone ID: MRT4577_97372C.1
catggtggtatccgtggcgacatgattccgggccggagcctggttctggccctcaagaccacctgatgtctactcgtgttttacgcccttgcggtatcctcttatgtgtccttccgttcttttt

SEQ ID NO: 181792 - DNA, 132 bp, Zea mays
  Clone ID: MRT4577_97373C.1
gggtttaaatcttttttaacctcctttaattcccttggtacccgaccagccggccttaggaggagggcctggccactcttaattatttggaaggccatgtggttggggaattcaggtttgcccttccatttc

SEQ ID NO: 181793 - DNA, 210 bp, Zea mays
  Clone ID: MRT4577_97374C.1
aagcggcgccctttttttttattttacatatttttttacaggaggaaaaacgctgagtggcggtgttacactttatataacaggccacaccataaaaattacaagcatacatcaaccttaactgaccgttttcacattcttctaaaaaccctttacactgtcatttgcaacggcttctatacaccggactcttggcgtacgcgtttttct

SEQ ID NO: 181794 - DNA, 690 bp, Zea mays
  Clone ID: MRT4577_97375C.1
actaccctagactcagagcagccgcatccacaatctgcctctctcgtcccctggcgtagtccgggtcaggatgcaggaatcacgacgaggacgagggaacgatgtcaacccgcacgacttcgtcatggcctactccgaccacctcaagcactccgaccagatggagctccctgagtcgtgctgacattgtgaacactgccatggtcaaggagcttcctccttatgatcctgactgccactacatcaagggctgcatccatgtgcagggaagatctacctagagcaaggcatcgcgcgtgtcgtgatgtttcagaaagatctactactggccgacagaagaatagagctcccggccaacacacattctgaaaaagcagtgttgctgctgcacgcaacatcctgaacccactgcagatgatgattatcatcaatgccaatcccaagggagcacccctcatcaccaaccagacaaggcgtgatctgcaccatagagcttggaaggagcgctggtaaagcgtgagcaaagccatctttggtctcactgacggcatgttcgatgattgataacactgcgctctatatgctcgcttgcgtcagaatactctagttgagagtgactgtaacgtccattgcatctagctatgtagccacactatgctccgcgagaaccgaacgcgatatcaagactca

SEQ ID NO: 181795 - DNA, 243 bp, Zea mays
  Clone ID: MRT4577_97376C.1
cagctgctatactacgagattcgcaatgacgcctaatgacgacaagaacaagatggacgcttcaaagtcggccactaaagacaaagacccagtgaacaaatccgggggcaaggccaaaaagaagaagtggtccaaaagcaaagttcgggacaagctcaataacttagtcttgcttgacaaagctacctatgataaactctgcaaggaagttcccaactataaacttataaccccagctgtcgt

SEQ ID NO: 181796 - DNA, 788 bp, Zea mays
  Clone ID: MRT4577_97377C.1
gccccgcgcgccgattcactaggttttccaactcccctgcacccgccgccgccacctcccctccccccaccacaccctcagccatggcggtcgcggagccggtgcccgggggcgacgtgaagctcttcaaccgctggaccttcgaggatgttcaggtgaccgacatctcgctgaacgactacctcgcggtgacgtcgatgaagcactacactttcctgccgcactcggccggccgctactcggccaagcgcttccgcaaggcgcagtgccccatcatcgagcgcctcaccaactccctcatgatgcacgggcgcaacaacggaaagaagatcatggccgtccgcatcatcaagcacaccatggagatcatccacctcctcaccgacgccaaccccatccagatcatcgttgatgccatcatcaacagtggtccacgtgaggatgctacccgtattgggtctgctggtgttgtgaggaggcaggctgtggatatctcccccctgaggagggtgaaccaggccatctaccttctgaccactggtgccagggagagcgccttcaggaacgtcaagaccattgctgagtgcctcgctgatgagctgatcaatgctgccaagggctcatccaacagctatgccatcaagaagaaggacgagattgagcgtgttgccaaggctaaccgttaagatggatgtgcatctgagggtctcgcttttggctggagatttgaaagtgatgtgttttacagatatctagaactgttttagctatgcgttaagttttatgga

SEQ ID NO: 181797 - DNA, 294 bp, Zea mays
  unsure (1)..(294): unsure at all n locations
  Clone ID: MRT4577_97378C.1
ccttcctttctagatctacttcctacaccgagtcgcgactccatataaagagcgtggggatatcacaatttaccanatccctatcttctttaccaccaacattccatcactataactcttaacttaaacctttatatctccttaaacttacatcaacattatatttatccctaattcttactatttcttataatctaccacttcttacttcatcttacaactctttatattttatctttctttattattaatatttcttatttaaattttctattttattttacatactttttt

SEQ ID NO: 181798 - DNA, 304 bp, Zea mays
  Clone ID: MRT4577_97379C.1
gcgcaccgaccggcgccaggggagccagaacgccggaggcaagaggcgaaagagaaccaggcactggacccaggggcgcagccacgggccaggagaaaagcaaaacgcgcagcaggaacaggaagcccgcgggaatccagcacgcccagcggacaccacgccaccaggcaaaaccacgagcagtcgacaaaagcggcccgcgagccaaagacgaagacgaacctaggcaccccgacggcgcagcacaggcccgcaagccaccggaagtaacagcagaaccgcaaaggggcggacaggaaccaaa

SEQ ID NO: 181799 - DNA, 742 bp, Zea mays
  Clone ID: MRT4577_9737C.1
cggtgagctcagtatccgcccaggcccgcgagcagcagcagctcgtgcggccgcagcagcgtcgggagcagcgtcggggagggcacgggcgcgccgaggtaggagaagtccaggtcggaggcgtcggcgggccagagcgcgccggggacgagcggcgcgcggcagagcgggcaggtgcgctggtcgtgctccatccagcggtcgaggcaggcgcggtggaaggcgtggcggcagttgccgagccgccgcacctcgtcgccgccgccgatgccgccgaggcacaccgcgcagtccccgccgacgacgcgcgcctccagctcgtcgaaccgcgccacggggagggcctcctcgatgaccatcgccggcatggccgtccggaactccgcccgccggtgctgctgcggctgcggctgctgcggcggcggcggcgcctggtggtcgtccccgagatccagcaggtcgccgaggcccacggcgtcgaacgcccagaggaggaagcggcggacgtaccccagcagcagcaggaggtggagcagctgcttcgggagcaccagctccgagtagcccgccgggaaacccatgcgtggccgtgcctcttggcttgcggtggtggtggtgtaaggggaaggtggggtggggtggggtggtgaagcgacgtgcctggcccggtgcttcctgcagatatggcgcttggcgatgcgtggtggacggcaaaaagggagcggacgctaggtcgacccgg

SEQ ID NO: 181800 - DNA, 579 bp, Zea mays
  Clone ID: MRT4577_97380C.1
ccagccttggcactgactaacgcgttgctcctcctctcgagtctcctttctcctcttctgccccaacgctcgctggctgtagaggaaaggcgaagatggcgatgaccgtcgaagtgtaagtccattgtcctcggttttgtccaacttttgcttcccatttacacaaacttttctcgtattagttccttctgctacaggctcgccggactactcgcgttcatgttctccacgagtattctactgcagatactggcctggtacacgggcgaccacttatttcaggagccaattaagatcactgaaagcttcctatgatgccaattaataaccattacttatgcagtgtgcacattacaagtttcgagaatgcgagaacttcgctgttctctttccgcaatgtatgttccattagtcgtttgtcctgtgatttgtggcataagcatggcacacacagtaaaaagaaagaaaaggcacactagttgcttgccatggttatagcgcagcggcatcatatcagtcaagtgtgccggagaaagcaccttgcagtcactgcatccacacaaaagctgtgtagacaga

SEQ ID NO: 181801 - DNA, 236 bp, Zea mays
  Clone ID: MRT4577_97381C.1
accacgcgtacgttaaaatgtgactaataacgttttctcacacggaagcacatgcggctatttaagcattttgctgtctcttgatacatattagtcgcaatcatggactaaactactatatgtttgcacaccgttcttacttattgaaagagagtcagcggctgataccaaaatattgtattggtttcttgaaagaactataaattcatgatgttatattttattgtttagaaagt

SEQ ID NO: 181802 - DNA, 250 bp, Zea mays
  Clone ID: MRT4577_97382C.1
gggggggctaatgtaaagttctcattttgttcaaaatcgatcgctgaggccatcaacaaccaacccaaaacccgcaatggggggtcgggcactagggggggccaaaagaccagacgggccgggggccaaccacaccggggcgggacaaaggagcggcgccaacccccaacaaggggccgccgcaggccggggaacggcccctaaccacccacggggggggggcggaggaaacccacgaacggcaggaggg

SEQ ID NO: 181803 - DNA, 1209 bp, Zea mays
  Clone ID: MRT4577_97383C.1
gaccctcgggctcgccccgatcctcctcgacgctagcgcgcttctccggccacggcgcgacagcccctcaccgcaggccacctcgctttctcgccttcctcgcagccccaggccgaccttgccaggtccagtccccgccgccggctctgctgcgctgctggccacttgatctaccgtcgtagcaggcgcccccggcagcggctcggtctccttctacgttgtcgactccccgtccatggccgagcaggcccctgcgttgctcacccctccctcttgaggctctacagcgtcgcccggattcgcgccgccgccgcgtcctctgactgtgtcgtcatcgagcagtacctcctcttcacacttctcttgtcaccggcgtcgcccattccctaccaggtccgacgcatgcccctgcctggctggacccaccccgccgcacacccccttcatcgccttcgttggatccgtcgctgtcgcggccttcccggccggatccccgttgctgcgaccttctcggatcgatctgccgtccctttggctggatcgcgtcttcccggctggatctatccctgccgtggccttcccggccggatctgccgtttccccttctattctgttgcgggcgcggacaccatgaccggcgcagacgcgtgcgctgctgtcggcctccctggcggggctccttgacgcccggacgatcgaagaagcgggaaggtcggtctaccggtgtccttttgttgtgtcgccctgacgatcgttgacgctcgaacgtcgacccctcccgaagatcaggcttttgctgcgcgtcttccgaccgcgaccacctcgacttcggctacctcggcatataggggctatcgtcttcttggagcacacaccgttctctactccagccgcaacattcgcaccatcacgacgctgcgactgcggggggatttcaacccgtcggctcctaccttcagcctcttctccagtctcatcgtgtgtggtgcccccgttgcgactgcggggggatgttagactatgtgtgtgtgagtgtgtgtgggccggcaccactgttgggctgtcggcccattagggttagggtttcatgtgtctctatatattgtattccacctctatgcaatacaatgggttcagtttccaactcccgggttcgattccctttggaaaaaaattccggcttggttaaaaaatcctctcattgtgtcg

SEQ ID NO: 181804 - DNA, 2050 bp, Zea mays
  Clone ID: MRT4577_97384C.1
atggtatcagaattcggcacgacaattgtgcacgccgaggtttaggttttcctctcccacagcagggcagccgccggctgctcccaccctacagccgtcgcctaccatcgttgcccccgggaggctcaaccttccctcccgggggcggcctccctcctcccaaccgtccgcacccccacttcttccccagccgacctctggccgccgccacccccgagccggcgagctcgggctccctccggccgcctccatcccttccccgaccggcgccttcctcctccccttgccggcgagcgcgggctcaagcgcgccccgaccagccggctgctactgctcgacgccggatgggggagacgacgcgacgctcgctcgtggactggcgcccatgggacgaagctgcggactccctcgatcggccaccgtcgtgccctctctgggcgcgccccccactgcggcgcccgtccagctgcctgggacgcccgcgccaatccccctccccggcgagcttccccgggctccagtctggacctccgcgcctcggtctcccctcgcctcctctttggcccgtactggcgttccgccgccgcgaatcctcatcccccgctctcctcgtcgatcgcgtctcgggcccagctcggctggggagtaatcatccggccggccgcacatcgcgtgcctcgcgccaggcggcccactgggatgtcaccagggccccgcagccacgccggacgccccacgctctccggccgcccggtttcccgccggcggccgccggccccctgggcgccgtacgttcacaggagccccaccgtcaccgcacgcccgtgctggcccccccgtccatcggtgccttggtggggtggatgcgctccttctggccccagggcttccagacgccggtcgtactcaagatccgccgctctgccacctcgctgttcgcctccgtggctgagagcgcccccgacggcgctgtcccgcacagcagcggcacccctgccgcgcttctccccatggcgccgtcgtgccaatccactggcacgaccgacgcaggcccctgcccggctggacccgccccgccgtccaccctcttcatcgcctcctcgttggttccgtcgctgtcgcggccttcccggccggatccacgttgctgcggtcttctcggctagatccgccaaccctttggccggatcgtcgacttcatggctggattcgtcgctgccgtggccttcccggccggatccaccgattccccgtcttttctgccacgggcgcggacaccatgaccggcgcagacgcgtgcgctgtcgtcggcctccctggcggggctcgttgaggcccggatgatcgaagacgcaggaaggtcggcctgccggtgcccttttgctgtgtcgccctgccgatcgttgacgctcgaacgtcgacccctcccgaagatcaggcttttgctgcgcgtcttccgaccgcgaccacctcgacttcggctacctcgacatctatgggctatcgtcttcttggagcacacaacggtctctgctccagccgcaacattcgcaccatcacgacgctgcgactgcggggggatttcaacccgtcggctcctaccttcggcctctactccagtctcatcgtgtgtggtgcccccgttgcgactgcggggggatgttagactgtgtgtgtgtgtgagtgtgtgtgggccggcaccactgttgggctgccggcccattagggttagggttaggtttgagtccctataaatatgtgtacccatctcctatcaatatatccactttacacttctacaataactatgagaaacacatgctgctggcttcctggaatgtttgcttaacttgtttgtgggagagccactggtgggatgggtcagagttttaatagaaactttgtcctccagactgacggctaaaaaaaaaaaaaaaacaaaaaaaaaaaagccggcgcgaccggtctgccgcccgcccccggcgccgtctctcacatggaggccgttcctgctccctcgaggtcgcgcagggtctccccgacagcaacg

SEQ ID NO: 181805 - DNA, 2226 bp, Zea mays
  unsure (1)..(2226): unsure at all n locations
  Clone ID: MRT4577_97385C.1
ccccgcgtccgcggccgcgtggggacgctctgcccagcagcgcctcacccttcactccccttcccggcctcccaagccgtcgccaccggatccgcgcgcccttgtgtctgcgtcgctagaatcgcgagcctagtgtcgatcacctcgaccagcagcacccagtagcaccacccttcgaacttctcccgtcgccggcgccgtcaacaccccttgccaggtccggcgcaggcccctgctcggctggacccgccccgtcgccctcccccttcatcgtcgtcatcgttggttccgtcgctgccgcggcctccccggccggatccacgttgctgcggccttctcggctagatccgccatccctttggccggatcgccgtcttcatggctggattcgtcgctgccgtggccttcccggccggatccaccgataccccgtcttttctgcagcgggcgcggacaccctgaccgacgcagacgcgtgcgctgtcgtcggcctccctggcggggctcgttgacgcctggacgatcgaagaagcaggaaggtcggcctgctggtgcccttttgttgtgtcgccctgccgatcgttgacgctcgaacgtcgacccctcccgaagatcaggcttttgctgcgcgtcttccgaccgcgaccacctcgacttcggctacctcggcatctaggggctatccagctgcaacggtctctactctagccgcaacattcgcaccatcatgacgctgcgactgcggnggggatttcaacccgtctcgaggtacattctcttcctcgactcctcattctcccctctcctagtctttggcgcgtagtggcgaactggagaggtgtacaatcgtccggcgatccggacttcgattggttctctgctgttggtctgatgggaagtaaagacggcaccggtgacatatcggaagcccaaggctatgctgccgacattgattccatcagggaggcgcaggcccgcattgcgccgtacgttcacaggacgcccgttatgtcgtcgacgtccatcgatgccatggtggggaagaagctcttcttcaagtgcgagtgcttccagaaagcgggcgcattcaagatccgaggtgcttcgaattcgatattcgcacttgacgatgagcaggtatcaaagggcgttgtgacacatagcagtgggaaccatgccgctgctgtggctttggctgcaaagctgcgtggcatacctgcgcacattgtcattccaagaaatgcaccagcgtgtaaggttgaaaatgttaagcgctacggtggtcatattatttggagcgatgccagcattgaatcgagagaatatgtttgtaaaagagtccaggaggagaccggcgctgttcttattcatcccttcaatagtaaatacactatcagtggtcagggtacagtatcccttgaacttttggagcaagtccctgaaattgacacaataattgttcccattagtggtggtggtttaatttctggtgtggcccttgctgcaaaggccataaacccttcgatacgcattctagcagcagaaccaaaaggtgctgatgattctgctcagtctaaggctgctggaaagatcatcacattgccttccacaaacaccattgctgatggactacgagcttttcttggagacctgacatggcctgtggtgcgtgacttggtggacgatgttatcgttgtggatgacactgccattgtggacgccatgaaaatgtgctatgagatcctgaaggtggctgttgagcccagtggcgcaattggcctggccgcagcactgtccgacgagtttaagcaaagctctgcttggcacgagagcagcaagatagggataattgtttcgggagggaatgttgaccttggcactctctggcagtctatgtacaaacactgattggagagagtaggaccgatgatattgcccttgaatttcaaacgtgatagttttagacaagtcgtttgtaaacttggaatagttcgttgtaaacatcacttattacctgtttttttatcaatgggtcattcagttgcagccaaaaaaaaaaaaaaaaagggcgcccgccgcccccctgtgtgtgagtgtgtgtgggccggcaccactgttgggctgtcggcccattagggttagggtttcatgtgtctctatatattgtagtccacctctatgcaatacaattagttcactcttctaaaaaaaaaaaaaaaaaaacac

SEQ ID NO: 181806 - DNA, 650 bp, Zea mays
  unsure (1)..(650): unsure at all n locations
  Clone ID: MRT4577_97386C.1
ccggccgggccgggtgttttttaaaanaaaaaaaaaaaaaaaaaaaaaaaaaaaaaaaaaaaaaaaaaaaaaaaaaaaaaaaaaaaaaaattaattgcccaaagcatggacttcacaacccacttaaagctccaaaaaggggggtttgagaatcttttgttttgaactgaatttcagggctaacttattttggaacccaaaaaaggagcaatctaacatgacagtttattaagccggaaccacttatatgctccctgccctttgaatctcccataaaaataaacatttcaaagtgggttgttactctttacttgaacattaaagtttatgctatggaacaaatattttcttgccattatgcccctaaatatctgacatgggttccaacatcatgataaaaaaaaggaccctgacacagagttttgttacatcataaataaacaatcttggaaaattttaattttcacgtctccaagttttaaatcattatttatcataacatctttgctcttttctttaaaaagctctaatgggcaggtacctcatgtatggagatatatctgcaaaagctgcgcatatgctgggccaacctgcagtatgccatcttgcccggttgatacaaacataatttatctgcattttatccttat

SEQ ID NO: 181807 - DNA, 247 bp, Zea mays
  unsure (1)..(247): unsure at all n locations
  Clone ID: MRT4577_97387C.1
tctcctccacctccnactcctgctccttgctatcctactcaccacagtgcaaggtcttcatccatcctctttcgtgccttacctcccttttatactattatccgcatcctctgtatcctttttaatcttctacatcatgcttctttccacttcatcactgtcgagctcattaccttcgatatctaccttttttttatggtctattgccatgacaatttgtacttccttctctaaaacattttcttta

SEQ ID NO: 181808 - DNA, 318 bp, Zea mays
  unsure (1)..(318): unsure at all n locations
  Clone ID: MRT4577_97388C.1
cggcgcgccgcttggggggggggtttttttttaaaactgggaaggagacttcttatttctgggggggcacatacatcatccaaaaaactttattattgagattacaactaataagcaatctaaaagaggggacaattgtggtgttntaaaagggggcggggggggcgcgcgaactgcggggaaaaaggggcaactgtggctgtgtgaaaaaggagagcacggggtgcggcggctagcgtgggtaaatggggntagtatttgctgcggcgaataagcagcggggggcagtgcgggcaattgggtaaatggaagcgggcc

SEQ ID NO: 181809 - DNA, 277 bp, Zea mays
  Clone ID: MRT4577_97389C.1
cgtacgccacgcgtcgagcagtcaatgtgggactcatttatgaggcgccagtcgctggctcggggggggtgcctttgaactgtgtagcaccaacctaaataataaatgtgtttgattcggactcccttcgccagaaagaaaaaaagcatgatgaatgaatgaaatatacgtgatcagcataagagaacagatatataaacaatatgcactcggtctaggaaggaacactgacaagatacattcacaatggttccatgttatcatgatggctcattgg

SEQ ID NO: 181810 - DNA, 293 bp, Zea mays
  Clone ID: MRT4577_9738C.1
ccggtccggaagaaacaactgttcgacagcttatagcacccggccgccgcaaaacacagggcgggagcacagacggagccggcgcgggcgcccaccccgcaggaaggggcaacgaaccaaaacagaacccagaaggacgaaaaggagacaggccacaagcgcaccggacaggcacagcgcaaaggcgacacgaagggacgggagaaacccgagccacagcaggacaacccccgccacccgaaaggcaaccgcacgaagatgaccgcagccggcaccaaccacacgacggcgac

SEQ ID NO: 181811 - DNA, 336 bp, Zea mays
  Clone ID: MRT4577_97390C.1
aaaaaacgaccggggccaaaaaggtttattactattatggcagccctgtttattaaatcagaaccagtagtggttgggctggcaacagtggcaagaccctccaggtggggttttattcatttaagggggggccccgcgtttaacaacgacgtgggtctttgaattggcctgcctgcatgcagggatgcatccatccccgggagggacctgccggacctttgtggctaaacaggcaacaaacgggtagccaacgttggggggccccatcgggtatcccgggccgggggggccgatcttttggaacaccgtttggtatcccaggcccaggccgccgtg

SEQ ID NO: 181812 - DNA, 259 bp, Zea mays
  Clone ID: MRT4577_97391C.1
caaatacaaaggtttttatttttgttggacccggaaaatagcccaaagtaatattttggggggcccaaaaaaaaattctggcccggaaccaagttttttaaatgcagggcaacattaacagggggccaaacccaacccttttttgaactaagggccccgcaaaagccaaaaatttgtccattttgaaacaaaccccccccaaaaaaaaaaattgaaaaaaatccttatttagcagccaacctcaactgaaaaattttac

SEQ ID NO: 181813 - DNA, 194 bp, Zea mays
  Clone ID: MRT4577_97392C.1
gcgacccacgcgttcgctcgccgacgtctctgcggtacctgtcgtcttttcctccaatacggcctttttcccttgcgagggtaagctcaatcgtcaaccatgggtaacgagaaatcccacatcaacattgcgtgaattggccacgtcgactctggcaagtcgaccaccaccggccacctgatctacaagcttgg

SEQ ID NO: 181814 - DNA, 717 bp, Zea mays
  Clone ID: MRT4577_97393C.1
cgggagggcggaacacctgcgtcatgaggctctggatcttgtgccagtgccgtctgcagccttcgtcggcgtacggcacccaccggaagtcctgcgccggcagcctggcgagctctcccctggccgtctcaaccgtgcgccccaagtggtcgccggcagcggcggtgaacagctgctgctgcaggcacctgacggcggtgcccactacgtccgtgctatcggagatgtgcagcatcaggccaagcacgaagttcccaagagcagggacgggagctgcatgattgaccaggcagcaccggcgacccatctggttaccgtccctcgctcatctgctgcttctgcttcttgcaggatcactcggcgcttgtgctcgcgcagcgcgtcgtcgcactctcgagacacgcgcttcagcttcctccgccagcgcagcagcgacgcgtcggtgatctgccacttgcgagatatgtccagcgcagcctccagcctgatgcgcgccatctccagcctctccatgtgctcccttgcgttggactattcttcgtactgggactgcatactcgacaggacccggttaaccgtctcctgcaccaccgcggagctcaccatgtctgccattattaacccctgtgcataagagagacataagagctcttgatcctagagcagaagagtcagattcagagggtgaagtttcgattaaagaagcacttttgtagc

SEQ ID NO: 181815 - DNA, 345 bp, Zea mays
  unsure (1)..(345): unsure at all n locations
  Clone ID: MRT4577_97394C.1
ggcggccacngcgtactccgtggcgctcctctgtggcgcacgcctgccggccgccctcctccctcggaacttttttttttttttttttnctncnccnacaanttttttttggggtggctaaacaagccaggccgttctttttttggggggggggggatccaccagctgaaagaagacctcaacntaaantgggaccccnttgaagacaagcccaccgtcctcctgnacggaggcggcgccgncgnggcgctatggttgacgtgcggngntgncggcgccataaattccgtgccgttgctccccaagatcctggagttagnaggactcgatttttttttttttttt

SEQ ID NO: 181816 - DNA, 573 bp, Zea mays
  Clone ID: MRT4577_97395C.1
ccggccggggccagtttctcttcgcctcccgctctacctcctacgatccgcagatacacaggcccgcgcttcccctcctctcgcagttctcgcgtccactgtaccggagctccaccacggcctccggaaagaaacagatgaaagacagcgacggcgagggcaccggcggtggcgtcgcccgctcgcacccctccaatctcccgcttccgactccacagtccgacccgaacctccagttctcgggtgggacggacgatgagtcctcgagccggaatagcagctcctctgccaccggcggcgcgagccccgggtactactcggactacccgtctagcttcagcggcgagtgttcgccgtacaacatgtccccctggaaccagaccatggcgtccccctggtcgcaccgcaacgaggcgtccgccgccgggctcggggggccgcccacaatggcgccggggacgagtctcatcagctcgctggtgaggggagagggccatatctactcgctcgccgccaagggcgacacgctctacaccggctcggacagcaagaacatccgcgtctggcgcaagc

SEQ ID NO: 181817 - DNA, 293 bp, Zea mays
  Clone ID: MRT4577_97396C.1
aaaagcaatccggtagtaccacgcttttataccttgtcctagcaaaggttggtgggggaagacgaaaacctggagagatggcccgatcgggggaatccaaaccagggagcccccccttatacctgaatggatttccggccataccccccttaattagtggagggggattttgcccgcccttccgggtccctgtggggggttgcaaaaaaaagccgaggtccccggcccgggggaggggaccggacctgtccccccccgccccctaaggggccccccccccccaaaacttgggg

SEQ ID NO: 181818 - DNA, 280 bp, Zea mays
  Clone ID: MRT4577_97397C.1
gatccccatggccatcttattacggtcatccggactgggcctctccttgtgataaccatccttattctggggaacactctagtgacgctgtgaacactaatggttagggggaaaagggcagacctcaagcatcgccctcgttaagctcgagacaagcaagactggtctggaacctgcgcctatgtatcatctggagggtagatgaaagaggcgcccttgatacggggggtatatccaagaatcacgtttctggaaaagggagcccagcccattatgcagc

SEQ ID NO: 181819 - DNA, 732 bp, Zea mays
  unsure (1)..(732): unsure at all n locations
  Clone ID: MRT4577_97398C.1
caattcggcacgaggcttgccgttgccgccgatggaaggtgtcgcggatcccggccctcctcccacaccgcctctccctccccctgtgctccacctcgccgtgtccgcgatggaacccacccgcgccgtgtccgtgatggaacccacccgtggatctcgcccacgatgcacgcctccaccgcgtcgccgatggaaggtgccgcggatcccggcacacccgctcgcccggatctcgccgtgtccgcgcatggatcccgcccgctcgcccggtctccgcacgctctcgtggtggaggcgcccgctcggccggatgctcatgaatactgtccaagctcgcgaggcctccgcccgcctcccccaccgcgacaggtaccctcgcgccccgcctccgtccgacgcccctaccacaccgccatctccgcgcgcagattcaaggcaggcgcgccccgctcccaaattccctccgcgctagggatccgccgggaatcgcccatggcagccgcgctccatctgcccccttccatccatggcatcgcgcgtccgcgcccctacgccgccacctcctcctcctcctctccccctcgctgcgctgccatctcctcggttctgcgcgtccgcgcccctgcctgcctgactcctggtcctctctctcgccccatcccccatgaatcccacctncgcgatgccctcagcccccttccgctctcagatttcggcatctcccggactccc

SEQ ID NO: 181820 - DNA, 465 bp, Zea mays
  Clone ID: MRT4577_97399C.1
gccgcaggctcaggacggaaggagaagagggttcggccgtctccttgaccccatggtgcgagagaagaagctgtgcatcccgatgcagtagatcacggtgctgaagctcgcgctcaatatctgcgtcggggagagcggcaaccgtctgacccgcgctcaataggtgctcgagcagttcagcgatcagacccctgtcttctacaatgccaggtacacggtacggtccttggggatccggcgcatccagaagatcgcctgctacttcacggtgaggggcgagaaggccatgcatctgcttgagagcagtctcaacgtcaaggagtacgagctgctgaggttgaactccagcgacaccgggtgctgtggtttcggtctccacgagcacatttgccttggtattcaagtcgatccagaaacaggcatgtacggaatggacttctacattgtgctggagcgtgccggcta

SEQ ID NO: 181821 - DNA, 219 bp, Zea mays
  Clone ID: MRT4577_9739C.1
gggtgggcaaatcagaggggaaagggggcggcttgggggctcctagggaacacccatgcaccatctacgccgattgtttaaacggtcccacatggatgtgaaagacaccaaaaacccggtcgtggcaggaaactgcctaggagcatccaggagttaagcccagggggaactgaacagatccacacctggggtatcgggggacatggaagccgcctgccc

SEQ ID NO: 181822 - DNA, 678 bp, Zea mays
  Clone ID: MRT4577_973C.1
gggaccctcgaggccggccgggcttccttcttctcattctcaaggatggcatgggcttcagtgtcgccgcttctaactgcttaattgctcctccttatatcttcgctgcattcgtcatgatgggctttgcctgggctggtgacaagtaccatgtcaggtcggtctgggtgattgccaacggtgtcctggcgctcattggcctacccatgattggtttctccaacaatgttggtgtccgctacaccggcgtcttccttgcaaccgccgcagcgaatgccaacgtccccgccgttctcacatggcaagcaaacaacatccgtggccagtggaagcgcgctctatgctctgctactctcgtcggtgctggtggcattggtggcatcatcggtggcactgttttccgtacacaggacaaaccccactacgtccccggtgtcattgcttgcatgatcgcagccggtctcatcgtcgttattgcactgcttctgaatctcaagttctggagggccaacaagcgcgccgcggctggtggaaaggtcatcgagggcctcgagggcttcaggtacactttgtaaacgattgatgtaatgtcgcgtaatcatagttgatctacgaacgaatgaacgaatctcatgatggtaaaattcttgttagaaaaaaaaaaaaaaaaaagcggcc

SEQ ID NO: 181823 - DNA, 388 bp, Zea mays
  unsure (1)..(388): unsure at all n locations
  Clone ID: MRT4577_97400C.1
ttttgaacggaggaagtactgtgttggggagtaccacacaaataacgtaccacaagtgaactcttttttacacatgtcatggagcatagcatcaaacatacacgtaatttttgttttatgagaacgcaatgttcataggcttgttggggggggttgccncnaaagaaatgattgatagttcactatttggggggggggaaaaaaacatcagtngcttctagttctccgngaggaagtgcactcgagcgaggggatgctccttcccagccacccagacgctggtctgcgaccactgcacgtnctcccattctaggttatcctgcaacaccttaagctggtctgctggtagcgggattccgatggagcgcatgggacttttaggcatggg

SEQ ID NO: 181824 - DNA, 528 bp, Zea mays
  Clone ID: MRT4577_97401C.1
tgtgcggacgctcgaggccggccgggtcggggatcctccttatctgattgctcctgatattacttcgcaatgctcgttttacctctctcgaggagtcggatagggttccataggtgcctacgctacggaggtcgaggctgtactactcgtggccgctctcctttcgcctacatcatacttttgagtcgcccttctgactgcatacacagacgaagaaggtagggctacctcctacccgcctactactcatactaggatctatccctacagaactgcatacatcttcatatggaattgctgtctcgtttaatagggggatcgttgaacattcgcgataacatacctcgttggactcgtaactatgctagaacaccaacagcgtttgcatagatactagaccgacatcttagagcaaagagtgaagtgtgaaccctcatgctgcgtcctagctgatagtcggtggcagttgtaagcacctgcttgtggtacagtcagaaatacatttgatcctgatgtagcttaatatca

SEQ ID NO: 181825 - DNA, 344 bp, Zea mays
  Clone ID: MRT4577_97402C.1
gcagccggcactaatttttcatgtattgaatgctcaatcgaatcaggtaatttctctgtattatatctaaacctaaactgttcctagatttgcaagaactgagtgaacaaaccaaaaaaacatcagcctctgggcacactgtattctgtacaacgtagttgcccacaactgaactttacaccgcggcagcacagacagagagttgatgcgtcgacgacggcaatggaggcctcaaaagtcaagacgtcagtgtccttcagggtcctcttgcactgcgatgagcaacgagtacttgaccttgagcgcaaccttgccgcctttcatgcagagcttggcgccggtga

SEQ ID NO: 181826 - DNA, 229 bp, Zea mays
  Clone ID: MRT4577_97403C.1
cttattcagcaaaagggcatagaccaccacaaatgcacatatcttactgctagcacatcacgtgcagacataaattttttttttcttggctgtcagcaatctaatatcggcgcacagctccaatttttcctaacattaacacttgctgcaccgcatacaatgggtgattaacccaaatgcaattacttggaaggttgttatcatatacaggcacccagggagaacaagt

SEQ ID NO: 181827 - DNA, 268 bp, Zea mays
  Clone ID: MRT4577_97405C.1
gatcctcctgggggtcttcggcctcatctggtccctctacaccgtctacacctccgacctcgacgaggacgaggagtccggcctctcgctctagatccatccatccatccatccaccctctcctgctgttaaaggatctgcatgtaaacatggtggtggcggccaccggtgtaatttcagacatggctatttgtatctaagcttcacttttgcgagatgttagcagctggattataagtaataatattttgatccggccgtggagatt

SEQ ID NO: 181828 - DNA, 592 bp, Zea mays
  unsure (1)..(592): unsure at all n locations
  Clone ID: MRT4577_97406C.1
agttcggcacgagggttgcctgttctcaattcgaaaacgggtcactttgatctgtgcttcttttgtgcggacctgaagaactggatcggaactgggctanagatttagggaactaacctgggtcttgatgccattgatagagttttggatctccccaataatcctaaccactanatcaaagcgcggacacatattgtaccttgcttagattcgctcgccatcacgttcgtgggggaagttctgcgctacagcagcgacgggcggggaagcgagctcngcatcgacggtggtggacttcctgtggctgacagccttccctcgagatcggtctaagggggaggtggagaaacgtanacggaagtgaacctcttgtgtcaggcgtggaccctcacctctctatttatagggctacgcaacaggggcccaccagcctcgtcttgggctggacgcccncgatcagggcgcgaggtgaagggcccagttaaccgttgggctaactgggggagatcaattccaacacgtggcggtgaaggttgtcaagccccggcgggatgtcnccggatagcgcgttcccggacaggtcgagcacttt

SEQ ID NO: 181829 - DNA, 445 bp, Zea mays
  Clone ID: MRT4577_97407C.1
ggaaaaactggcaacctttgccttggttcgcactcaaagcgagggtttgttgtttttcaaatgggccccacccttttgccgcccccagaagccccctttttttcctttgggtttaacctagaataaagcccggcgggggtaaccgcccccattgatccccaatccctgctgggtggtgcctgggtcttctggagccccgggtgaacaccggacttacaactggcccaggggggcctttaattaaaaacacaaatggggaacaaccaacccggggcgggcgaggataaaccctttgggcttggggaaacaacaccggggcgaacaggataacttgggcgggcgggccccaccgcttagtttctccacatcccctcagagttgccgtaacccccgccaccggtggcaccgacgtagccgccgccaccaccaccgtagccgccgccgc

SEQ ID NO: 181830 - DNA, 491 bp, Zea mays
  unsure (1)..(491): unsure at all n locations
  Clone ID: MRT4577_97408C.1
tttttttttttttnnnnnnnnnnnnnnnnnnnnnnnnnnnnnnnnnnnnnnnnnnaaactgaaacacggacccgaagggtacaagttcagttcaaaaacagagactaaaagggtacaagttcagaaagacccgattcctaaactattcttacactatcttcccgtcacccttttcatttgactaacaagcaccgtttttttatcggtttttcagtttgatcaatctccatcacgatgaaatttcccaagattacccgggcctggcggccaagggtatatactcgttggatacatcagtgtagcgcgcgtgcggcccaaaacatttaagggcattacagacctggtattggctcaaacttccgtgggctaaacgggcatagtccctctaagaagctaactacggagggatggctccgcatagctagttagcaggctgagggctcgttcgttaacggaattaaccagacaaatcggtccaccaactaagaacg

SEQ ID NO: 181831 - DNA, 485 bp, Zea mays
  unsure (1)..(485): unsure at all n locations
  Clone ID: MRT4577_97409C.1
gagaagaatagtttgatcatcttgtgagaaaaataatggctgcttcagtgatgctatcttgggtgacattgaaaccagctggtttcacggtggagaagacggcggctagaggattaccgtcgctcacaagagctcgtccctccttcaaaattgtcgccagtggcgtcaagaagatcaagaccgacaagcccttcggaattaacggcagcatggacttgagggacggcgtcgacgcctccggcagaaagggcaagggatacggtgtttacaagtacgtcgacaagtatggagctaacgtcgatggatacagtcctatttacaacgagaacgagtggtcagcgagtggtgacgtgtacaagggaggagtcaccggattggcaatttgggcggtaactctcgccggaattcttgccggaggtgctcttcttgtgtacaacacangtgctttggctcagtaaatcttaaagttgttagcgcatgtgtaa

SEQ ID NO: 181832 - DNA, 128 bp, Zea mays
  Clone ID: MRT4577_9740C.1
ccggccgttttcgggaatatcagcaccgccccttgctctgagttgcgtgttttgttctctgtgagcgtcgtgggtgttgatggcgtcaacttcgtactcgcggccatccaagccgcctgggccgactt

SEQ ID NO: 181833 - DNA, 519 bp, Zea mays
  Clone ID: MRT4577_97410C.1
cccacgcgtccgcccacgcgtccgcaataatgattgtagatagatatgttattattgcattgcagttcatctatatcgatcactccagtgcttttgtttcattgtatgcttgcagccttgcacttcaatttttgcagtccaaagttctattctttacttggatatattactctcttaaaacatcaattcattgttttgcattcctttgtttatttgtagatatgaacaagtcctttgttctttaatgggtttgattttgctggcttgaactctttaggtttttgaactaatgataacatgtgtagacctgaaaattcgtagactattgtactgaaccttctgatgtttgttcctttcttcatgttgtaggttgctgatcaatttttaagcaagaaatctggtatgacgcatgacaaggttgtctgctatggcatacaactatgtctctatttcatcctataatgagttgtaagtccttgtcagactctattgtgctagtaacttcgtttgttaattttg

SEQ ID NO: 181834 - DNA, 342 bp, Zea mays
  unsure (1)..(342): unsure at all n locations
  Clone ID: MRT4577_97411C.1
tgcacgcgnacgnaaagctgggaatcctctaaagcggccgccctttgggggtggtttttttttttttttttttttttttggagggaaggaatttaatctggggtgtatccaaggttttggcgggacctgaacaaacctattcgcaggggacgatccctagccctatggcacccaggagagcggcattattagggctttatagggccggagggggggactgactcggcactacccggatgaatactgggtatctggttttcttaaaaaacgggggcttattggaacgccctcatttttgggccgtgcgcttttgggacgggggctgctggctgccttaccgga

SEQ ID NO: 181835 - DNA, 806 bp, Zea mays
  unsure (1)..(806): unsure at all n locations
  Clone ID: MRT4577_97412C.1
ccggccggggtgtgtgccttcttctcctttgcttttttccctaaagtttctccgtcctggcggctgagggctgctgcttcgtccctggtggcggctgagggctgctgcttcgtccctgatggcgcctgattgcctgggcgcgatccgcccgtgcttcccatagcgtactccgtccctggcgcccccagtgaggtccgtccgtggcgctccgcctcccgtcgtcttccgtcaccacgctctggtcgtatccccgccgtagcgtcgtccagtgctgccctgcagaccgcacatctgtccacctgctgtgtggtttggttccctccatggattctaccaatccgaaccataaagatgacgagttcccatagaattcgaccgcgaacgggacaaattttggttccaatatgtacaaccagctgaagaaaccggttatattatggcaattgagaccttagatttaagtactattgtaatccgtatggttcttgctattaatttctaggcatatgaaacaaaaaaaaatgagcgtgcaattcctattcctatatattaaagctatgtagctagacgcacagccacatagggccacgtcgttcaaatttttgtaagccatccgatacaagatcgttggttaccaggcgcgggagcaaaggtagccaaccacacgacgggactcttccagatggagacgaaacaccacatgggcgggggaaggaaaagagcgatcagatctcaagacgnccgtcgtccgtcttcgccaagctgcatcgncctcaacgctttgtcccggncatcacgccggccat

SEQ ID NO: 181836 - DNA, 1238 bp, Zea mays
  Clone ID: MRT4577_97413C.1
tattcggcaccagggccgcaccactgtctttgtgtgatacctgctaccaccggccacccagctctataaattggtgcaactattggctgcccacccatcatatcgatcagctcttgcaaccttatctccattgcactgcactgcattgcattgcattagtagagggagatccatggccagagaaatggagaaggcaaagaaggccgcatcttcccctaagagctcaacaattagtactggtcccaagagcccggtgaggaatggaggaggatctccccctcataagaaaaacactactactgaccgaggcacgtggacggaaacatgagcagcaaaacgttcgaaaaggaggagacacgttgtctcatgacgagagcaaaccacgccgttcttcatcaactgcggcacaaacctcacccaagagatcaccgagacacgaacaacccctgagctacaacaggctccacactgaggagagagcaataaggcgggctggctacaattatcaggttgcaagcaagataaatacccaggaaatcattcgcagatttgaagagaagcttgcacagttgatggaggagcgcgagataaagctgatgaggaaggatatggttcccaaggcccaactgatgccagcatttgacaagccattccacccacaaaggtcgacgaggcctctgacggtgccaaaggagccgagtttcctgaggctgaaatgctgcatcggtggggagttccatcgccatttttgctacaatggagtcaacaacaaggccatcaagtcgtagtccatacataatacatgcacgcagagagatatacacacatgtgcctcactacactgaagctacaatatcgatcagcattctttttgccgccgccgttgcatacgtttccaacagaactactgtataacacccacgcaagccatgcatatatacgtagaagttgcacatgtgcgcacaaatttttcacgtacgtagcacacacacagatgtggttaatcgcatgctgatgatgtaattaaatttcgcctaccgttcccccacttctttttctttgtcttttacatttttcatccctctaggttaagttctcttttcctcgtttagctagcgtgttccatgcatgtatatttctgctggcataaataaaaagttttcatatcaataaaatatatatatatataggtatatatatatatatatatatatatatatataaaaaaaaaaaaaaaa

SEQ ID NO: 181837 - DNA, 315 bp, Zea mays
  Clone ID: MRT4577_97414C.1
ccggccgggcccgacgaccaccagaacgagctaaagtgcgagcccagccaccaggcaagacaggcaggaggatcggacgagtcgccaaggagactgcctgcttttcacattgagtgttaagatggcgtcgctttcggctgctagccctgacctccttgatcttggcaggggtcactcctgtcacggacatggaccaccacccctgctcgagagactggactgattcccaacacctgaacaacacctgacgcactctagctgactctagaccacccaaagagcccatgctccacctcgcccttaacctccgacctg

SEQ ID NO: 181838 - DNA, 442 bp, Zea mays
  Clone ID: MRT4577_97415C.1
atatatgaaagctttttatttatgccagcaaaaatatacatgcatggaacaagctagctaaatgaggaaaagagaacttaacctagagggatggaaaatgtaaaagacaaagaaaaagaagtgggggaacggcaggcgaaatttaattacatcatcagcatgcgattaaccacatctgtgtgtgctacgtacgtgaaaaatttgtgcgtacatgtgcaacttctatgtatatatgcatggattgcgtgggttatacagtagttctgttggaaacgtatgcaacggcggcggcaaaaagaatgctgatcggtattgtagcttcagacactcggcttgtttccggttactgtagtgtagggaggcacatgtgtgtatatctctctgcatgcatgtattatgtatggactacgacttgatggccttgttgttggctccattgtag

SEQ ID NO: 181839 - DNA, 620 bp, Zea mays
  Clone ID: MRT4577_97416C.1
atcttttttcccactagcctacatcttctgcagatttgccggctaccccaacattttggactctctccgtagcaagcttaagttctatcttctgccatggggtaaggtgaagtcccacatcaacagtgtgttcattggccacggcgaatctcctgggtcgcacaccagcgagcacctgatctacttgctgggaggcatttacaatcgtgtactagataggtatgcgaacatgggttctgagatgaacaggcgttcctacgacaatgcttgggtgctcgacaagctcaacggtgagagtgagaggttcatctccattgatattgctctgtgcaagtttgataccaccaagtattactggaccgccatcgatgcccctggacaccgtgacttcatcatgtaacttgcatcacatggtacctcccacgatgtctgagctgtccttatcattcactccaccagtgaccggctgtcacgctggtatctccaagaatggccacaaccgcgatgatgctctccttgcatacactcttgcagctatacagatgattacatgctgctacatgatggatgcatcgactcccatgtactccaaggcgatttatgatgagattgtggaggaa

SEQ ID NO: 181840 - DNA, 510 bp, Zea mays
  Clone ID: MRT4577_97417C.1
aggccgcgcccgcctcgtcagtcctcatgtctctcactttcgggccgagctccggtatatccagcggcggtaatggtagtcgaagtcaacgccgaccagaagctcgcaggcactcctggaccaagtgaacgcaacgctgtacagaaaacatttgagaatgagcatcaagaatatgaagaatagaaattattgcgtcaagttaaacttaaagagggtgaagcgaaaagggctcaagggatagaaggagaataattaaaataaagtatgggaaaagaaagcgatagaaaattggaaaaagctattatcccagaacaactgcaaaaatgaaatccggatatgtagctaatagatgaactaggatagtctaaagaggggattccagtatttgcagttggggttggactgagaacatatgataaagctttcggtaactactatgcgcaatatcacattgacattaaagagcaccttcaccgctttaattcgcctaaagagaccaagaatcatggc

SEQ ID NO: 181841 - DNA, 303 bp, Zea mays
  Clone ID: MRT4577_97418C.1
tatttctttttttttattaacttgagttcagaacatccagaacttgtcagaagagctcaggttaaaccgtttagcaaagccatggattgaggatagatatgtctgactaccaaaatttacataacatattgtctgtccaattaattattggttcaaaacacttgtgggagtttcaaatcgacacatcgacgacgaaaaaaaacttgttgcgggggttgtttaaactcatcccgtccattcatatttacagaactgaggcacgccttttaagaatcctttgtcgggatgagaagtgacttttta

SEQ ID NO: 181842 - DNA, 620 bp, Zea mays
  Clone ID: MRT4577_97419C.1
cgggataaattgctaaatatagaaaataaaataaataaaaaaaaaaaaaaaaaaaaaaaaaaaaaaaaaaaaaaaaaaaaaaaaaaaaaaaaaaaaaaacctcgggccaccccttattggagggggtggccactaaattccggcccgtttttgcccattttggtttttttgttttgaaaagggatttggcccttccctttaaaaatttttggttggaagcccctttgttaaacctcccaaaaaattggaaaaccccttttgacttggatttaaaagccttttttataccggggaaaattggtttttttggtttttaaaaagttggggggttttttttcttaacttttaaagggattcggaaccggaaactttggggtaagaaaaccggccggggtttttatcctgttgggggggccaaaaaaaaaaacaaaaatacacaaaaaaaaaaaaataacacatgaaataaaaagaaaaacaaaaggacaaaaaaaagaacaaaaaattttaaaaaaaaaaaaaaaaaaggggccctgggcccacatttttttttctttttaggaggggaaaatgggccctcgggggaaattagggaaaaaccgggctccccgggaaaaattttt

SEQ ID NO: 181843 - DNA, 171 bp, Zea mays
  unsure (1)..(171): unsure at all n locations
  Clone ID: MRT4577_9741C.1
cggaattctccgggntcggacccacgccgtctcgcgccgcgactnggcgtcgaccaggccgccgccgctgtggagccgcnnctcgcgggcatanncgcggcgtcccgcgctttngctggcgcccntgtccgacgggcgcagatctcaacgagggggccagctttctcgtcg

SEQ ID NO: 181844 - DNA, 409 bp, Zea mays
  Clone ID: MRT4577_97420C.1
agcccagctccgcatgaggcgcacgagacaggacgtcttagtactcgcctatgctccgcgactaaagcttcttccatttcctaccgacgacgctgcaggtgcaccccattccgcagacaccactgggggagtgcatttcgtatccacatggggcaagccggaattcaggtcggaaacgcgtgctgggagctgtactggctacagcatggcattcaggctgatggatcagatgcccggtgacaagaccatcgggggtggcgatgatgctttaacaccttcttgagcgagactggtgctgggaagcacgtccctggtgcatgcctttgctgagcgtgaacgcactggcatagatgaggtgaggactggcacctaccgacagctgttgcaccctgagcagctcatcagtggc

SEQ ID NO: 181845 - DNA, 828 bp, Zea mays
  unsure (1)..(828): unsure at all n locations
  Clone ID: MRT4577_97421C.1
ntaggggccttttttttttttttttttttttttcatgaattactcaagaatagaggttgccacagtactttgatataatgtacgaaatcacggcaggtcacatctcagcaatcatgcaccaatttttttgaaagaatgtttatgcaatgtcactaggacaccagtaggaaactatcagctgcaataaccaagtaactaggagatgaccttggcacgactggctgagtcttccttgtgttcgacccacatcatgaaaacatagccaaggcaccacagcagcacgtactgaagcggaacccagcacagaagcgccacgaggctaagcatgctcccaacatactgtgggtctttgatgtagccaaagggaaactctgtcacccacgggatcgtctttccgaatcgaacgccatagtaagtacctgactcaccaagcagctgatacaccctgaagttgagatactggccgacggagaggaggatggggcagtacagaggcgggggccaggagaatgaagagacggaggcgagcgcgaggagctgaagcgccttgatggcgtgcgagacctgcgccatccgccggcacgggtcggcactgcggccgcacaagtccacccaccgctgcgggtgggtccacagcacgtagtagaacgggaacggcagcagcacgcccacggccgccgcggcggccgccatggaaaccatgtcgcgggagcgcagcaacgggggtcgggggtgctcgagtgttcaccgcaacggttttgcaatccggtcctgcccgcctttttgacaattgcagagacttcttgtggtcaccgcagcccggccggc

SEQ ID NO: 181846 - DNA, 420 bp, Zea mays
  unsure (1)..(420): unsure at all n locations
  Clone ID: MRT4577_97422C.1
tgcgggtcaccccttcttcctatcgtattgtccgagcccgtctcatacgggaataaacgacacgtaaacatcgcccttacacgtcatcgtatccaagaagccagattcctagcccataccttcccttatagaggactaccgctagacagcctaatgtcgtcttaactcggaaattccagaggcgagggacgctacaggggactgcggatcataagccgccgtatagattcgtaagaaaccgtacaggtctagagcagagagaggagacgacgactaaggaggctccgaggacgaataaggcaggaccctataggcggggccgacggtcacagtttaaggtcgtttcgagccgatacatcgggtgacatacgcactagataccataaacgtagtcccagaggtagncggcatacgtagtaa

SEQ ID NO: 181847 - DNA, 578 bp, Zea mays
  unsure (1)..(578): unsure at all n locations
  Clone ID: MRT4577_97423C.1
caagngnaatcctgatgaaagacgtgatgctgattctgatgtggaaatgaatgatgccaagcctttggatgactctgggaggaggggcagcatacagaatttaagaatgaagaaagagtctgctgagacagaggcagttgatcaggatgttaatagtgcagctgcagaacattctagaggcactggacctgtggctgatggagttggttcctcgaaacaaacctttccgaacgacactactccgatgtccatagatgaaccaaacgttctgaaagttgagcaacagagtccaaacaaattgcaggaccaaccgacgatgcaccagaagccatgatcaccttaacatagtagctaatgtcatctgtagcctgtcgattcttttgtgcaaattcatttgactgtaggcaagccgtgcatgtcacaaggctgaagcagggagcagaagcaaatgctaaccaagaagttgtgcatctgaaatctatagtgttttgcgcgttgcatttgtattacgaacagttgaaaacgatgatttactggtttataatcatgaaattttgtcttccatcctttgcttatgc

SEQ ID NO: 181848 - DNA, 271 bp, Zea mays
  unsure (1)..(271): unsure at all n locations
  Clone ID: MRT4577_97424C.1
gcgtgcataatcattgcatttaatctttcgtaatctgcgaaacaatcttgtacgttccttttcttttgttgaacgcaacggtacaaacccaacaaaaaaaaagagaaaaaaatatatggcggattttacaatggcgtgatgcgatcctggtcaaatcaaatcaaatcatatcatctccccgcacaaacccagcacgggcagccccaccgcgcgcgcaacaccaacaccaaccaccaccaccacccttccatggggggggggnggggggggg

SEQ ID NO: 181849 - DNA, 241 bp, Zea mays
  Clone ID: MRT4577_97425C.1
cctagctgtaagtagagaatcgatgtacaccgcctcagcacaggcactgctgcgtctggtggtaattaaagggacaaattcgagacaacactgccggatcaagcgagccaactctagaatcactcattacacacatagcttggacaaatagaacataatgtactaaaggattctaaagctagcaccaagtctaacatgaaacgttccaagatgcatgaatcttctcatggctacagcattg

SEQ ID NO: 181850 - DNA, 466 bp, Zea mays
  Clone ID: MRT4577_97426C.1
gggtgggaataaagggtttaaattaatcttatttattaaccgggattgaattattaatgggggaaatggcttaataaccgtaacgaatgatcttaacctttaaattttatgccagcatgtgctaactctgctttgccatatagctaaaatgaggggcatgacaaattggttctccgttgttaccacaaacacttttttttattcttatcaagcttacttaactagaccttctaatcattactaaaatttgttttgaataaactattgctaactattattttaagggcccttaaagggagggggccctttttttgtgcaccggtggcacattccccccgcccggtcctggttttgaggagggattttacacaccaaaatattagggagatgatgtttgggaccaaggacactatttttttgggaaaatgaatgagggaacctgttggagtaagaaaaatcacttttt

SEQ ID NO: 181851 - DNA, 481 bp, Zea mays
  Clone ID: MRT4577_97427C.1
ccattagctaaatcgacacaagagcgcataatatccatatcgacaccatgagggtgttgttggttaccctgactctgctgcctatggtaggagcgccacatcaacacatacaagcggcggctgaatgatgtcagctcacctgcgtcggatcatgtactgccaccggagcatgtgccacctgcgggtgacatgccacctacgatgcatactgccatcgacggtccatctgccgccgccgagacacctgccagctgctgtccatgtgccgccgccgaatatctgcagctgcaccatgccactatgctactgaaccatgcagtgctgaacctaatccacaatcacactgatgcgcgtgctaacagtcacatgcaagaccgtgctagctgcatggaacctgaagcactggcactaccgcgatcatgagccagtgcgtctagttcttgacgcatgactgaagaactacagccactgcctactgatc

SEQ ID NO: 181852 - DNA, 414 bp, Zea mays
  Clone ID: MRT4577_97428C.1
tttttgcagtggtaatacttggctgagaaatcctgtgccaagcgcaaaccttgtacaagtcctggctacttattttaggggctagaatcaggcgacgacagcttatgacttgtttttttacaccaatccagacctggattagcaatgattcttatgcatcttttggttgttactaccactcatgggaccatttatgcatacatgtgaactatttatgctgctgatatgtctctagtgtggcaatgattttcttacatatagaggcttaccaaaagttcaaaatcttgttgggtctgcagcagcagaagcatcacacccaagtttgtcatacactctgctattcttatttcctaaatatgtcttcttatgctaattggaaactctattatgcccaatactagtcacgtgtatgtc

SEQ ID NO: 181853 - DNA, 623 bp, Zea mays
  unsure (1)..(623): unsure at all n locations
  Clone ID: MRT4577_97429C.1
cccgggggcacaagaaccnacccctctgtaagaacaaaccacccactccagcggcgatcagggaacagacgacgcatcgagatgatgctccagtccctgtacgctccaagtctagtattcgatgagccaggactctcgatctatcgtacacaccgttacccgatagcgtggatcctatacgtggagcgaccctgaaacagcaaccatgatcaccagcgtctcctgactcgctacaacattgtgtgcgcaccttcactcgtctgttattacagccaatctgtgggactatccaccatgtgatccacagggtactctggtctgagggctgtggcactgtgatggtactggcttctacagacatcggtctatctactatcccctctgtgacctcgctcaagtttcttcatcctacttcaatgctcagtcggtagtggcatggtgacaactctctctctgataactaataccgcgcttcaccaccaagtaaggactacgcggcgtggaagagtagggaggcgcatcagggccaccgcgcagaggacgcggcacaaactccagcccgcggaggctggcaccaacacgctgctcaacaacatgagcagctaccgcgagctgtactagat

SEQ ID NO: 181854 - DNA, 304 bp, Zea mays
  Clone ID: MRT4577_9742C.1
caccgaaagccaaaattttcggggagaatccgaatctcgctggcgcgacacaagcccaaatggctggcacattgacaggctaaggtgtcatgggctggcgccaccgtatcggactaaataaaccctaagatacctgacctagccagtgcactgcaccgtcatggctcagaccctagcccaccacatgtaccaagctgggtatgcctatcaagctcacggtcaatctttttcatcaagagcaatacagctctagggtacagattaaggccacagggttcaacaatgactgcgccaaagcctagca

SEQ ID NO: 181855 - DNA, 717 bp, Zea mays
  unsure (1)..(717): unsure at all n locations
  Clone ID: MRT4577_97430C.1
tacatgctaaacattctttattatttagaaactaagacagtgttgtaattttagatgccaaacatccttaactttgtggtttcacttcaccttaatccatgttttgaccaaaacatattgtttgcagtcaatgggtggttcactaagatgagacatttgttgcgatacaactgcatgatgttttgagtcatctattaattattcaacaactgtaaacctgaagcggtgatatgatcatatgagtctagttcagtaccagacttggtgttgcgtgcattgtattgggtacctgatttttttaccataccaggtctgaactaacatgttattgttgtgtcgcttactgatgcatgatatttccctccatttgttaactgtgcatctcctttagtattttttgcagtgtctgatctcccaagggaactccttatttttgttcaaaaaatcttgatctatattgtctttatgcaatgacttttgtctctgttcatcttatcagtttagcttttgttcagtaattattgacaggctggaaattctgcctagatatatgtatgcacatgagtaatttatccttgttgaatgatatgaaggataagatttgtgttctgacagatgtattcaagtatcatctggacctgcacgctattcttggctagaattcagccaccaataggctttggtcaatggntgcgtttcagcctaaactggtggggc

SEQ ID NO: 181856 - DNA, 408 bp, Zea mays
  Clone ID: MRT4577_97431C.1
ttggaactttgggctgatttatgtgcttgtttatgtgcttgttctttcgttggtatgggtgttggtggttgcgcttgctatatggcgcttaagaggtaatgatagacagacgaaaaacggaagtacgactcgcactgggaagacgacgaattagtcctaaaactaatagacttgaaggaccggtgaccgaagtcctagaggtgaagcccctaataagaccccattagtataagaagcctcggggcgtgcgactcatgcgagaagtcactcggcacaacgaatttatagttactaaacgtcgatttattaaagttaaagttaaagttagcactggaagccgccaatactctaaggtgctaaaccgtcgacgaaacgtacgtatgttaaaaaaagaaattattaaagtag

SEQ ID NO: 181857 - DNA, 713 bp, Zea mays
  Clone ID: MRT4577_97432C.1
ctctccccccaccccatcccttccccaccaccgacgccgccatccacatccagaggccagagccatcgtctcgtttcccggcatggagtccatgctcttgagggcctcccgtgactttgctcgcgccgccagcaagatcgcgtcggctggtcggtgggcagcgccggtgacagcggctcgatcagccccctcagatctgaggagccgcctctccttccacagcggcaccggtggtaacacacccatctccaccgacgcaccaccggacgaaatgtcgtcgcccgcttccttcacccccctcccaggtaaggtgaaaattctgccttcagacgaggacgttgagtcagaggaagccctgtgggccttgtatctgcgctggtgcaacactttgaaccagaagcgtgaccatgatgagatggttcgccggtttgatgtattcaaggacactgttcggatggtccaccgtgtcaacaaggctaaattgccttacactctgaaagtaagtgaattcgctgatgggaagctacaagagtccatgagtccaaaagtgtttgatgaattcgcaactcatgcaaagggtggtggatctcgccctttggcaaatcgtcggaaggaaggggatctcatcattgaaactggtgaagatgtgccagaatatccccaagtgtacttcaagttctctgaatctggagattccatcatccccttggagt

SEQ ID NO: 181858 - DNA, 295 bp, Zea mays
  Clone ID: MRT4577_97433C.1
agatcctgaggtctttttccttgcattttggcttcaactgccgaattgggaggggctttaagatgactgattgcacctgggatcatgtcattccttgctaccaacaaatgcaggaatgcagtttgcaagacggaaagaccaactctgggtaggtccaatccaaggcgttgtgtcatgataatgatatgaaagctgtctctgtaaatggaaaacccatttaccatttatgggacataacattaaccagacactgtgtcatgatgtcagtgttgcaaaatcaaccaaggcaccctta

SEQ ID NO: 181859 - DNA, 566 bp, Zea mays
  unsure (1)..(566): unsure at all n locations
  Clone ID: MRT4577_97434C.1
cccagcgtccgccaagcgtccggaagcgtgggttcgtctaaagtcaggccaatgttctccactctttgtttacagaagtttacacagtggaagtttaaaaatactgagtaaaaataagnagacagtctaaaaaagacctacaaagctttttaaatcaaatcttcttttaaagtttgaccataaaccgtatcaagatactaaatatataccgagtagaatttgttattaatttttgtctgtaactatacatatggatattatttttatggtccgaattggagataagatagtttgatttggacaagatttagaaatagattccttttttggaacatgtaggtacccgctggaggccagactcgcgatttctttccaacacgaacgaacaccggtgcagatttcacgacttgttggccccatatattcctagttttcctgtactaccaattgcacctgattttgtcgaggatgcgaaccaaacacgagaaaaaaacggtttggttctggggaaaatcgacagcagtcgccactcgccagctgggntttggtccagacagcagttacgt

SEQ ID NO: 181860 - DNA, 334 bp, Zea mays
  Clone ID: MRT4577_97435C.1
gcgtgaacaccgcaacctggtgcagctgctgggcttctgcgaggagcgcggcgagcggatcctggtgttcgagttcatgccccacggcgcgctccacgaccacctccactgcagcagcagcggcaacggcgggcgctcgccgctgttcgcgtcgtgggaggcgcggctccgggtggcgctggacgcggcgcgcggcgtggagtacctgcattgctacgccgtgccgggcatcatccaccgggacgtgaagccctccaacatcctgctcgacggcgactggacggccaaggtgtcggacttcgggctgtcgctggccagcggtagctcggcggcg

SEQ ID NO: 181861 - DNA, 272 bp, Zea mays
  Clone ID: MRT4577_97436C.1
gacggcggggccccatcgttgtcacagccagtctactccggcggcccagcccacgtacagtcgagcaggcgatctcgcacccctggtcgcctggtcagcagtgagcagtcagcggctgcgcgccgcctcgtcgggactcgggggcagagctggggctatctcttgagctggtggtcaggtactcaggtcgtcatccatgatccatcctgattctccctcgtcctgctcccctttccttggccggccggcgcgcggagtggaggtcgaccgac

SEQ ID NO: 181862 - DNA, 323 bp, Zea mays
  unsure (1)..(323): unsure at all n locations
  Clone ID: MRT4577_97437C.1
tccgtccggcttttcctcttcctggtggtctctnnctcgtcttctccaaccgaccgcccgattggcngnnattccagtttcgtacnncccgagtaccngntccagctcgttctcgtcccctgggaactcctcagcccccttctctcgtcccgcccttcggcacctttcgtacggccgcnncggcaccacaaaccgcgccagnntctcgagaaaataggaacctcggagggaaccgatgtgatggaggggatgactcnnngccgctgacccgaagacccgatgaagggggtgcccggtgaccaggntnactcgccnnngcgggg

SEQ ID NO: 181863 - DNA, 270 bp, Zea mays
  Clone ID: MRT4577_97438C.1
tgctcatttaaaccctaatcgggcgcgcggaggtggggggtgaaccctagggcatccgagtaaggggtgaaggacgtgagagtgcaagagttttatgtggaggcgtgagtactctgggaaatgctattttcaaggtgcgagggtgaatccttgccacgggtcatgagctagacaagtttggattctaaatacatagaggactgcgtgtgctggaacatgtatgacggcatcgtggatacgtgaatattttttagaaagaatcaatgattc

SEQ ID NO: 181864 - DNA, 867 bp, Zea mays
  Clone ID: MRT4577_97439C.1
gcgttcttttattattgaaatctgcttctccttggggtggtgggtgcacttattaatgctggcgaggtttttgggctttttcctgttggaagattgacatatgcacgggatgtacttgccctggagagtataaagaaaagccttcaaaatatacctgaagattggaatggagatccatgcatgcctgggggggtgggcttggaccggagttacatgtgatgaaggatcaaaaatacgtgtcatctcattgaacttttcaagtatgagtctctctggatttctttcaccagatattgccaaactgactgctttgactgatatatctttggcacacaacatgctcagtgggcctattccgaatcttagcaacctaagaaatctccaacgactgcacttgcaagaaaatcagctatctggatcggtacctgagacattgggtacaatcaatacattgcgtgaaatatttttacaatacaataatttaactggaacagttccggagaacttactgaacaatacaggattgacatacacatttctgccagggaatagcttctctccaaaaccaccgcattgagaaccaggcagtttgtacgacaaactactctgtgtaacatgattcagatttcagaggtagcaggaatgttgttgattcttctagggtagctgtacatttttttaaccattctgtgcataaaggggagatagcagtacagttattcaaaccaatcaaggaggttggcaacatggtggcaagatacatatattggttttggctagcaatgtttggttccagagactaaagttcagtcagttcaaatcgaatgtttgaatatccattataagtattaaatataatttaattat

SEQ ID NO: 181865 - DNA, 225 bp, Zea mays
  Clone ID: MRT4577_9743C.1
cagagcctgagggttaatccaagaccaggttcggaaatgcaccaggacggagaatggtcttgcaacattatgtagagagcggagcatagttacttgagcttgatggatatgctctcgattcagtactatgagatggcctgaattctctcaaaggtggctaagactgcaaacgtgctagagcactatgctggagaaagagtgcgtctaaatgttgattactacatt

SEQ ID NO: 181866 - DNA, 350 bp, Zea mays
  Clone ID: MRT4577_97440C.1
accactgaatattttagtccctaccttcaccattactatggagtatagctagactgtattttatgctaccggctcgcattataacacaaaactaccaatggcagcctatatactaagagtcaaatttggagtctgctcatagggggggggaactctccgttgttgtgcacctgccgtaccgttctgaagcatacgtggctatctgcatggacgttttcttcttcctgctgctctgtatacttcggtcctggacggtggtttggccaccgtctgtgcctgtagacgatcctcaagatctccttcatgctctccgaagacgagggggttactgatgcctcataattgatgct

SEQ ID NO: 181867 - DNA, 217 bp, Zea mays
  Clone ID: MRT4577_97441C.1
agggggcttaaggcggcactttttcggctagatgaggatcgagacgcgggggtaacacttatttggctaagagctgctgctggatgccatacgcatgactgcatgctgcactactcttgtgaaacgcatgtttatgttgacccacaagggattaactatgagggtgactatggctccaaggccgacatatgatattgttatggacttctgtttgggc

SEQ ID NO: 181868 - DNA, 408 bp, Zea mays
  Clone ID: MRT4577_97442C.1
cagtactcgaacccaaacataaacaaaaataatcttaaaacacttgttaccagtactcgaacccaaacataaacaaaaataatcttaaaacacttgttacgccagacaattttatgaagttcgcgtcataagggacctcctgtccagattcgtctagataaagaaatagcaaataaactactcggcagcagcaacctcctgcatagcctcatcaccctcgacaggcctctcaagcttcacaccaacgtcctctttgtagtcgccatgaacctccatcaacttcccgagatcaaacttgggggccttgagtatcttcaccttgcggatgaagacgttttgaagtgggaagatgctggaggtagacttctcaatctctttgccaataacttccggaatgaacttagaaac

SEQ ID NO: 181869 - DNA, 507 bp, Zea mays
  Clone ID: MRT4577_97443C.1
attgagaagtctacctccagcatcttcccacttcaaaacgtcttcatccgcaaggtgaagatactcaaggcccccaagtttgatctcgggaagttgatggaggtaattactacatgcatggaaataatttatccagacaacatccctgtagttatcctaacacgttgcttctcaggttcatggcgactacaaagaggacgttggtgtgaagcttgagaggcctgtcgagggtgatgaggctatgcaggaggttgctgctgccgagtagtttatttgctacttctttatctagacgaatctggacaggaggtcccttatgacgcgaacttcataaaattgtctggcgacatgttttcttctgtccctgccctaaactctaaacccaaaggttattcgtaacaagtgttttaagattatttttgtttatgtttgggttcgaaaaaaaaaaaaaaaaacaaaaataaaaaaaaaaaaaaaaaaaaaaaaaataaaaaaaaaaaggggggg

SEQ ID NO: 181870 - DNA, 806 bp, Zea mays
  Clone ID: MRT4577_97444C.1
gggtacctcgaggccggccggggcacattacgtaatctcagaattcggctcagtaaagaatctacaaatccagattacattattgttggaaaaaacaaagaaaaatatactgcggccgttgattcttcatcatcttcaccctctacgccagatatgggcagcgctccagctgtccggagaatgaaagtgaaggacatttcagagtacatgattaatgctgccaaggaaaatccacaattagttcagaaaatccatgaggttttacttgaaaatggtgttatggcaccacctgacctgttttcagaagattcaatggaagaaccaaaggacctcatcgtgtatgacaccaccctgtttcaaagcaaggatgaaatgaaaaggaggatgaatgagcttgggtcaagggaatacacagatcgtggtcatgatccattgttgcctcatcatcctggacatgaactccaaccaaaagtggctcctcaccgagcacctctggagtcacttaagcctgttgagggtttgggcatttaccacccacatgatatcagagatatagcatctccgtttgtttctcagtacgaaccttctgcacctcctcaggaagcttcatcccaacttacaaagcaattgcctgtcacagctgctgctgttgcaactgctgcagtggtggcatcctctatggttgctgcagccgctttatctaccaatgacgtaaactttgacgtgcctgttgctgctgcagccactgtcactgcagctgcagttgttgccacaactgctgctgttagcaagcaatatgagcactc

SEQ ID NO: 181871 - DNA, 282 bp, Zea mays
  Clone ID: MRT4577_97445C.1
ccgcccccaaaattctcgccccgcctcgctctccgtcgcgccattccagggaccctccatcgccgcccccgccatcatcgcgtcagcccgcgctccgtcgatggaaggcgccattccagggacccaccccaaccctgcgatcctcacccttccaaggatgccccgcacccatctcgtccaatccctcctcccgcctcacccgctcacaaggtcgacgacgacgaatctaaggacgccaacgccacccctctctgagctccctatggccactgcgggtgagtg

SEQ ID NO: 181872 - DNA, 486 bp, Zea mays
  Clone ID: MRT4577_97446C.1
accggcccggaaggcccggggcgacccacgcggcttgttctcagggcggcgcgaggggccgggcggctgcagaagaagccgccaagcaccacgcagacaacgaggggccggccggcacgacgaggggaggccgacggcagaacaaggcgggggcaagaaggggccaggacgccggggaggacaacggccagggggccacggcaggagcacgggccccggaacaggcgcgccgagaccaggagcacgggccacaggcgccgcagcaagagcagccgccaccggaggaccaacggaccgcggcccggcagccggcggcggaacggcacaccccacgaggaaggcatcaaagggcacctccagggcaaggaaggcaacagaagggcggccacagccccccaccagccacagagaaccgacaacggcagaaggagcgactggaacacccaccccaagaagaagcaccggaagcagcaagccaacgggggc

SEQ ID NO: 181873 - DNA, 246 bp, Zea mays
  unsure (1)..(246): unsure at all n locations
  Clone ID: MRT4577_97447C.1
gccaagaggcanaaaacaggagcgggggggggggacacangaccaagacaaggncanaggccagcanagcgggncaacaaacaccncggcngcggcggacacgggaggggagaccaannngcaganggcgagccacgagcccancgaccaggnggcncgccaggggccanacggagaaanngaggggagcagcaccacgggcacaanaatttggnncaggnacngnaccgngcacgngcccacaag

SEQ ID NO: 181874 - DNA, 419 bp, Zea mays
  unsure (1)..(419): unsure at all n locations
  Clone ID: MRT4577_97448C.1
ccgcgcctagagaatgaacaatttccccaaaccctaacttcggatctcgatggcgaacccccgcgtcttctttcgactgaccgtctggtggagccccagcctgccggatcgagatggaactgtacgccaacgaggtgcccaagaccgaggagaacttccgcgcgctgtgcacgggcgagaaggtcgcgctcaagtccgttaagccgctccactacaaggtgtctaccttccaccgcgtcatcccccagctcatgtgccagggcgccgacttcaccccgcgtcaacgtcaccgcccccgagtccatctaccgcgagaactcccccgaccagaagttccgtccccaagcacaccgaccncgctatgctctccatcgccaacccccgccccctccaccaacgccctctcaattcttcatctg

SEQ ID NO: 181875 - DNA, 447 bp, Zea mays
  Clone ID: MRT4577_97449C.1
ttggtgacttcccttcaatccttctacaataataaacaggttgggtgcaagatgggctatggattctgtgctactggaacaatgatcttcaaaagtaatctgtcttctcgagaaattgtagagcagctggtccatgcatcctactattctcagatccaaaatgttgttttcatggagcttaccaacgaagattctgaaatatgcagttcaagttacggatatcaagctgaagctttaccaacgcggctatcattcacgtggaaagtggaaaatttcttgtcttttaaagagattatggagtccagaaagatttttagtaaatatttttaggctggctgctgtgagttgcggataggttgatatgagtcgtttgatacgatctgcatatacttggtaagtgatcaatcatctgggtttgatcctgattagaaactttgggtacatttt

SEQ ID NO: 181876 - DNA, 761 bp, Zea mays
  unsure (1)..(761): unsure at all n locations
  Clone ID: MRT4577_9744C.1
aattcggcacgagggcaccctggaacccttctattttgcactgacttccacggctcgcctcgcttccccatcccactctctgtccctccggcgagtggcggcggcagagacggaggccgagtgagcagtacaacgccgccgacaccaatcacgagggtatatcaactacaagtagagggaggccaagcacgaaaccatcaaagctgaccaactgagcgcccgccgcaatgctctcgcgcgccgccgccatccgtcgcggcgctgcggcggcgttctccacagtctcggagaaaccggagacggggctatacggttnncgacgtgcttcgcacgggcgaaggggttccgccgcttcgtggacgacgccatccatcggtcggacgaactcgtggcacgcgtcgcgcggctgccgtcgtccaccgagatagtgcggaccatggacgagatttccaatacagtttgttctgtcattgattcggccgagctgtgcaggaatacacaccctgatagggagtttgtggatgaggcagataaggcgtcgatgaggatttatgagcatcttcagtacctgaatacaaacactactttgtacaatgctgtactgaaagctgagggtgacagtgtcctgctcacagaggaagctcgaagggcagcatgctaccttgcgtattgagctttcagtaaaggagggattcatcttcctaaaggttcaatgaaaatgtaatgaacaaaccaggttttgtggatgtatatccagcttc

SEQ ID NO: 181877 - DNA, 579 bp, Zea mays
  unsure (1)..(579): unsure at all n locations
  Clone ID: MRT4577_97450C.1
gttatgagttatgactcttggtaaacttgttgttttcatggtaattttcccttcaatccttctacaataataaacaggttgggtgcaagatgggctatggattctgtgctactggaacaatgatcttcaaaagtaatctgtcttctcgagaaattgtagagcagctggtccatgcatcctactattctcagatccaaaatgttgttttcatggtaattttcactcaaatagtagtggttgcgtgaggtttctatctattcaaaataaagaaacaatatgacatttgaatgcaatgattattgcttattttgtgtctaagtcagcaaaagattggggctagcgcgaatttgtgacattaactagcctgtttgatcaggatgcaggctttcttctataggatatcgttgtgttttttgccgaggtgctcatcctgaaggcaacaacaactatgcaggagcttaccaacgaagattctgaaatatgcagttcaagttacggatgtcaggctgaaactttaccaacgcggccatcattcacatggnaaactggaaaatttcttgtcttttaaagaagatatgg

SEQ ID NO: 181878 - DNA, 195 bp, Zea mays
  Clone ID: MRT4577_97451C.1
acagctagctagcgtgcagacgaacaatctgtgtcttcacctcactagctaacaccagctagcagctcgggcgctctgccctgcaacaatgggcggtcgctcctgctcccagcacctgaacacgggggcggccctggcaccggaactgctgctgctgccgacggaggccgggacggcgtccgcgctctagagctg

SEQ ID NO: 181879 - DNA, 417 bp, Zea mays
  Clone ID: MRT4577_97452C.1
ataataattttatatttattaaatttttttttaggggtcaaccaacaattattgacaataatacggggcttaattttttttttttcctaaagaaaaatgcaaaaacaactattcttcgtttgctaagggaaacaacaaaggccccgttcgacattaaaacgactggaaataaccaggagcaaatagcttaatttaattttccaagcttttgaaccactcaaaacgccaatgccaaaagccgttactactggaattaaaaagaccaccaacctttttttgaggcgttttaaacaagcaaaggagcaggtcccaaaatctaaaagaaaccttttgtgccttgggcgacaataaacttcctatacaaatttaaagcctcatttattaaaatagcctgtaaaaaaaaatgagccctctttt

SEQ ID NO: 181880 - DNA, 261 bp, Zea mays
  unsure (1)..(261): unsure at all n locations
  Clone ID: MRT4577_97453C.1
gaaaaaaaagccggccgaccgggcggtcgggtcaagttcttgttatttaactttttaatcaagactaccttacaacaccgccgcccttttctaaaaaactacccccttcntaataaatttccacacattctccaaccattatatccccaaaatccataacaacttataaataaccctgttgcccccaccttccaattctgcctcttgaaaccaaaagcaacaccaaattctcgattccatacaactcgtatgcttgtattc

SEQ ID NO: 181881 - DNA, 456 bp, Zea mays
  unsure (1)..(456): unsure at all n locations
  Clone ID: MRT4577_97454C.1
caacnagcaacatagaaagcacaagaggggaccaacaanggcagccaaaanannnngccnccggaggcgccnggggcnnncngcaagngcngcnacggcgaccannnncccgcaaggcncgcaagcnccnatagcnncccnncnncccccaaaccccncaccagcggngncnncaggggtgaaaacccaaggggggaacccnacagganccaacaggcaancacagcaggcancnaaccnnnancaccccnggnccnccaacaaccgncagcccnannacagcagnnaccnnnggggcannnggnggcacaaaacancagggcacaacaacnacaacaacnngggccagcaaaccnngcngccnacncncagcaacagcagnnncnnccanncaaccaacnagcngcanngaacccngcnncnaaaangcaacaacaacaacnaccanncagccag

SEQ ID NO: 181882 - DNA, 412 bp, Zea mays
  Clone ID: MRT4577_97455C.1
cggacgcgtgggcggacgcgtgggttgatgagaaaaaaaaaaaaaaaaaaaaaaagaaaaaaaaaaaaaaaaaaaaaaaaaaaaaaaaaaaaaaaaaaaaaaaaaaaaaaaaaaaaaaaaaaaaagggggggcctttttaaggattcaaagtttatttcccgttgattccaagttataattttttttttggggcacctaaattaaatttaatgggccggggtttaaaaacttgggaattggaaaaacctggggttacccaaattaattggctttgaagaaattccccttttgccaagttgggttataaccaaaaaggcccgacccattcgcctttccaaaaattggccaaccttaattgggaattggacccccccttttacggggcattaaaccccgggggttgtggggttt

SEQ ID NO: 181883 - DNA, 489 bp, Zea mays
  Clone ID: MRT4577_97456C.1
aaattaaacatgtttttaacttttttttttttttatacaatacacaaggggaacccacattctcaactttctctttgcacaagggcaacccacaaaaataacttactttttggaccctagccaaaaaataaaaaccctggaaaccaggtgcccaacacccaaagacccaccctttaaaccaagcccccaacaactgaagaaaccgggggcaaccccagcccaattcagaccttgtggaccgccggcaaaaaaaaaacagctcctcccttgggctaggccccgcaaaaaaaaaaacccccctcttttccttcttactcccagaaaaaaaacaatccggaattaccactctcccgggaaaaacgaacaatttttccagaacataccccggaaacatgaacaccgaatttccaagatgatgcaaggtaacgagaaacttaaagttatacaggcattgcgtgcaaaaattcacggaaggcctgacaataattc

SEQ ID NO: 181884 - DNA, 349 bp, Zea mays
  Clone ID: MRT4577_97457C.1
ggagcagattaaatctctttctagtcaaaattaaacaagaatggatttaattcccctcaatcccattcgatccttgtgcaaccaaacaaggcctaatgggttttacttctacgctagtcgcgacggccgccctttttttttttttttttttttttttttttttttttcaggcgggcctgcagagtcaaaacaattttttcaccaaatggctgcacaaataaaatttaaggcatgttctttctatattggttttatatcaaattcaaaaggtccccaattccaaaaatctacaggggccttttttttttcaaaaagggtatttgagggggtcgcgctgcaacgccttttg

SEQ ID NO: 181885 - DNA, 662 bp, Zea mays
  unsure (1)..(662): unsure at all n locations
  Clone ID: MRT4577_97458C.1
aattctgctcatgccgaggcgggaccttcggaaactgcaccagaaagtcttgtgaaagagagccttcccgagaaaccctcggcacctgctcccgaagcaccttccaggggtgatttgaattttattattcgacatgcttcgggaaaacaactatcagcagagcaagttgccgaaacggaacattatgctaaagagctgaagtacccctagggatccttggtatatggaggagataatgatgatgatttcgtctactgtcttcctgacggtaaggagatcaatgtttgccgagaaatgatggataacatggggtattcgaagcttgaactcgacttgtctgtgatgacaaaggatcaacttgcaaatagccaagcctacaacagcctaaaggtgtgtatactttgatttgccattttgcaatttgtgttacaataaactatttttgtggtaattcctatcgtcgttacgtgttcattctttgttttccagggcttgattttaagcaaggctttaaaagcccaaaaagatgtagaggatgagagctgccgaatagcgcttggaaaccttcgctcagaggttattacattaagaaatgaagctcttgagaaggatnagatcctactctccttagtgaaaaattgaatctagcgaaccaggctact

SEQ ID NO: 181886 - DNA, 935 bp, Zea mays
  unsure (1)..(935): unsure at all n locations
  Clone ID: MRT4577_97459C.1
tgggtaccctncgaggccggccgggatccatccatccacacacacaaacagacagacagacaagcatacaacaccgttgccatttagttgtgttcttgctaggcagttgcgcgcttacattgagccgcagctagctgtctactacggcacaactatctcctgcgcgcgtgctcgatcgatctgaaggccagacctgagcctgtccaattttgccttgttctacccaccagtagtcgagaaggttccatataagcgcaagcagacagcaaaagagctaaggagtctgagacaaggttcgaacagatggaggatgtggtgaagttcgtctttggagtttccggaaatgtcatcgctctcttcctcttcctttccccagtgtaagtgctcgatgtagcgcccctcctcgatttcggtaaattgtgtcaacagggtcggagtgtgcgcaaaatcctagcaaatataaacattgttccagtacaagactgatcacgcacaacttttacttttgcttacacaaatataaaaataagacgtattccttcatttatttatttcattaagctggatgtacactggaaacatccagcatccggtacacctagcaaattaatcgcgtgccacacccacaccttttgcgacgtgctacggtgctagacgcttttttatattattactatagcttttgtccatttctgatactccattcatgcgcgcgaaacacgtagttgagctgttgttttctccagctgagtcatatatatacggcttgaagctttaaactgatcatctgtcggggaaaaaatatatatacgtatgtttttggctcgcaggcctacgttctggaggatcatcaggaggaagtggacggaggatttctcgggagcgccttacagcatgacactaccaacactctcgtgcgccggcgccaagttccc

SEQ ID NO: 181887 - DNA, 434 bp, Zea mays
  Clone ID: MRT4577_9745C.1
cccccaacaggggggggataaaaacatgcaaaacattggctaaccctaaaaactggcctgtttccagggaaaaattaaaaatggggggtaagataaaaaataggatagaggggctgctggaaataccctaaaaacatcagttatcccccataaagggacccacacccccaactagggggggctaacccacagggggggggcaggcccccccccataaaggggaccatcccacaggggggccccccccccttcccttgggggggcccccctttgaaggggggataaaccgccacatggggccccctggggggccgccaaagggcataataagcttttgccctgcaccttgcccctgggcatggaatggaattaggggcccctggccaaaaggcccccccatcagggtcgggtggggcatgtaggctggaccccat

SEQ ID NO: 181888 - DNA, 305 bp, Zea mays
  Clone ID: MRT4577_97460C.1
actaactataggacgaactgtgaaccgggccccaccctctacgcgaccgctatatttttctcgagatcgagcatcacaaataatgaagaagtaatacggggaatccaaactctctggggccacaaaaaaataccaaagtgcactaattgacattagcgaacacacgcacctttaataaaaatatgacagaaagaaagcgaactcaaaaacactaccaaggccagggcattatccacaccaaccaccactttctgatatgcagcctgcactggctggatgaatactttagcaaaacgttggttcaa

SEQ ID NO: 181889 - DNA, 219 bp, Zea mays
  Clone ID: MRT4577_97461C.1
ttttacttatattttttttttttttttttttttttattctgggggggggtagacccgaccaccctatacaaacaaaaaagatattgccaatcttccatttacaaaaatttttacaacaacacggtgtggtacttttttctattagggccacatcttaaaaaaggaaccccagcgttgtcttttaaaaaactccccccccatggaaatttcgggggccct

SEQ ID NO: 181890 - DNA, 209 bp, Zea mays
  Clone ID: MRT4577_97462C.1
taccgtaagcctgggcacgctgctggagttcgccgccttcctctggctccgcgccaggcagccggacctgaagcggccgtaccgcgtgccgctgtcgtcgctgcccgcgctggccgccatgtgcgccgtgccgtccgcgttcctggcgtacgtgtgcaccgtggacgggtgaagggtgaacacaatacaacacaaaatcaaaacaaaca

SEQ ID NO: 181891 - DNA, 209 bp, Zea mays
  Clone ID: MRT4577_97463C.1
tgttttttcctcccaccatggcgcaactactgggggggttggcatcgcacgcgctgcgcgcaacgcatacggatctactggagctgtcctccctcgtgatgctatggcactattgaacttccatagacgtgaggattcctaacccgattacagaggatgtggagaagtaacagcttgccaaggatctcgtaaactattggtatgctgtg

SEQ ID NO: 181892 - DNA, 706 bp, Zea mays
  Clone ID: MRT4577_97464C.1
ggccgggccgggacctcgacagaggcaagcgacggtgactgatttcagaatcctccgctctcctccaggtcgggcatagtggtggaacggaaggtaatatgtactccgccaggaagaatatccagaaggacaacggccttgagccctccgagtgtgtcgactccgctgaccaccatttctttgatctggacaacgacaaccagcaactcaagagcagacctcaaggaactgtacatgaatcaatgctatgccatgatgccatgctaccgtagagctcgaatgctgttgtcatccacgacccatagcgcctgagcagggcttcatcgaagatacatgccactactcacctaggtagctggagaagaaattcacgcggcatggatgtggtaattgtcggtacaaggaggattgggaggacaccctacaaggatgcagctggtctgtgccctcgcaccaggactctgactgatgctcacgatgggatcttgtaggatgttgactacccaggtgagattgagaagaagcgagtataagaccgactggatgaatccaagattatcaagattttcttggacccataggagacgaactacactgaatacaagctggagacctgcactgcgttctaccgcacgctgtgagagaaagatgcggtctgtgagtaccctatgaccgcaaatgcataaatatgatgacctctgaatat

SEQ ID NO: 181893 - DNA, 240 bp, Zea mays
  Clone ID: MRT4577_97465C.1
cgtcgatcgggtcaccttgtatggcgcgcccgtgcaagctgacccgtgtggaacaaagctgggcgccctattcacttaacggatggtctaaattcatgatctgacgctgtgcaccattaagaaacaggatttacacttaagattgcaccgatctgactatatgctggacaccctatccaagtctctactcaaaattgagctcaacactatcccatcaacctatcctgggcttggcttcct

SEQ ID NO: 181894 - DNA, 175 bp, Zea mays
  Clone ID: MRT4577_97466C.1
gcgacgggttcttcgtgcaattcgaggcaccggcgctgaggaagatatgtgttgtgcctagcacaaaagaaaagggacggacattgtgcagtagccctgaggccttggacatcgggatccaatgagtgcttccccggatattcaaggaggcaggttaagcccaataatgggggac

SEQ ID NO: 181895 - DNA, 585 bp, Zea mays
  unsure (1)..(585): unsure at all n locations
  Clone ID: MRT4577_97467C.1
catcctattgtcatgcaaattttccatgacatgcagttgactacttacatacgatgcaccaaatgtgacatttgatggataccatagcacctttgcatctattatttgtatgtacacatgacataaacagacaacaataatgctaataatgcatcccacaaagagaatatttagttactatgtgaaactcctctggtgcttagcaatgagatcaccttcatgcttgactttattaacccaaaatgcattcatagccttaacttgcaaccacttgaaataataatcgatattagacccacaaacttttggtacttacccatccactttaggtaacccattgatacttattacatggtactccctccaaattaagtcacgttgatttttttcaaaactttaaccattcgtcttatttaaaaaatcataagttatcatttattttgatatggttagttttatcaacaaatgtagcttaagcatgatttaaatgtttatatgtttgtataatttttttaataagacgaatggtcaaaggttttgtaagaagttaacgtgacttatattaaaatccggnagggagtattt

SEQ ID NO: 181896 - DNA, 1053 bp, Zea mays
  Clone ID: MRT4577_97468C.1
gagcatcaaaccctaggcgaacccgatccaggaacaccgtcaacgccgacgggtggtggagctccgcttcgaccgcgcttctccagccatggctgaacccgagatggaggtggccgtagcgacagcagcaccagccggtcagaagagagagagggaggaaggaggcgatcctgctgctgaatgcggcggcgaggagacggaggtggaaggggcggcggcgaagaagccgaagttggaggaggccaaggaggcggagaaggggagggtagaggagacggcggaggggaagacacaggaggcaaatgaggagaaggcagtggaggcggaggacaagcctgtgacagaggaggcaaatgagaagaaggcagttgaagcggagggaaagcctgtgacacaggaggcaaatgaggagaaggcagcggaggcggagggcaagcctgtgaagctggggcctaaagaattcgcctcggccatcgatatgttcaactacttctacgctctgctccactcctggacgccgcagcttgagttcaataagtatgaacaaatggtgctggaggatttgctgaggaaaggtcatgctgaacctgctaagaagattggggcaggagtcgaagcatttgagataggcaaccacccggtgtggaaaagtcactgcttttttgtgcgcaggactgatggatctgtggatgacttcagcttccgcaaatgtgtggacaacatactgcccctccctgaggactttaagatcggcaatggcaagaagtctggtggccaccaaaaggatggcggtggagggcgggcaggaggacgccgtggaggaggccgaggcggctggcgtggtggacggggccggggcaggaggggagggtaggttcttacttcttaactggccctgcaattttgcccagttaactataccggggttgccgtggaaacgaaggtaggttcttactattatgttggtttattatgtggtgcctgtcctaaagaccgataccaacttttttaccttgcaaccggtatatgatccacgccgagtgcttgccgcat

SEQ ID NO: 181897 - DNA, 829 bp, Zea mays
  Clone ID: MRT4577_97469C.1
ctctctcccctaactctctctccttctctcctttgcttccctctcgcagccgccagaacacgccgcacgcccagcgcacgcgcccaggccgaccccgacgaccgagccgcgtgctcccagcagcaagccgcccctgctctcagccctgcaccgcggcccctgcgcgtcggccatccggccgagccaaccctgcgctgagccaagcagccggcccctgcacgacgccctgtccgagccgcccctgcgcagcgagtccaagcgccgtgcaaccgttgtctgttggtttctctgcgttaatggaaatcactgcttccgtttctccttcctctcattattcctctcgctagaaaccgacgcattgacgccatttggtggccgccggcgcctctccctctccctggcagactttttctctcccctccctctctctataaaagggacagcagagctctctcccatcctccctacccaagctcaccccatccctctagctcgctagtacactgctcgacgccgtcgttcgttgccgttcgtcgccggagcccgtggagttcgctggagtgtgcagttcgtcgccggagttcaccggagcgacacattcgccgtccgtagtcgagcccctgcttttctccacccagccgaaacccgtcgatctatccccgtcacacgcacgaacccaaggttgatgacgacccaaatttattttatgtattttataaaacactttttgatttgattcatgtgttgtatattttgtttgttggaatatgaacacatgtgattccaatttatgtatttgaggcgctatgaatttggctaaaataaagat

SEQ ID NO: 181898 - DNA, 332 bp, Zea mays
  Clone ID: MRT4577_9746C.1
cggaattccagctggacccacgcgtccgaggacgcgtaggcacttatgcaggtattgaaagtgatcagtaactcatcttgcaggacgggagtcaaagtcgggctctattcagtgggcattaacaaacgacatgtatacaccaaacgcgagctgactcatggccagtaccacacaaaaggtatagcatccaagaagccgtactatcgtcatttcactaatcacagaggataacaggaatagattttatcataagcgcctcatcacactaactaaggttgtcactgacaatccacatcagatcattgccactagaaacattgctactaacaaca

SEQ ID NO: 181899 - DNA, 161 bp, Zea mays
  unsure (1)..(161): unsure at all n locations
  Clone ID: MRT4577_97470C.1
ctcgatccgccttgctcacgggcagtgcacgctcactaacacaccagtaatgctaacgccgnagcgagaacaagaaaggctcgactggccgaggagaagaagcagggcctgcagctgctggacttctgggtgagcccattcgggcagcgctgccgcatcgc

SEQ ID NO: 181900 - DNA, 507 bp, Zea mays
  unsure (1)..(507): unsure at all n locations
  Clone ID: MRT4577_97471C.1
tcagtagcaaggkgcgccagattttcagtctcatgtccagccgggcatttcttcctctgckcggcctttgccttctkcttctcamtctcktcctgccacaacacgggccagtsggsccggscctcggcggtgccgngccgcgaccctkccttgtcgggggccccgcsagccggcagcgtgccgtgcggggcaccccgcsccgccgtgccgggggggcgcgggggggkcggcsgcggcgcgcgcgcggcggcgccgccgccccgcbggscgcgcttgagcgcgtcggacacgtgtgggccgcgcgacgcccgacgccgtgggcgggcccgccgcggccgcgabccggcgcaggatgcggtcgaacacgggctgcggaagctcgtcgtcgtcgtcaacctcgccgttgctgttgctgccgctgccgccgccgtcttgcttcgccagggacgcttcttccatccccaggagctgctgctgccgttcctgcacgtcctgctgccgccgccg

SEQ ID NO: 181901 - DNA, 284 bp, Zea mays
  Clone ID: MRT4577_97472C.1
ggggcacccattttgcccatgtgaccatgtgaattactgaatgcagctcatgtctctgatgcacgatccaccttgctgacgaatcatctgaaccctgcgatcaaagtaagtttgcaagaaagggtaccctatacttttggacgacattgttaaattagatctgttattttattgttagataactgtgagctcttaatacgctacaatctgtgttttccaacaaatagatcctccttgcgatcctgggtgaccagggagctcgacaggaattttattaattatga

SEQ ID NO: 181902 - DNA, 391 bp, Zea mays
  Clone ID: MRT4577_97473C.1
ctgggttctttttttttatcatttttctttttttgccgtcgccggtgtcggccccaaacccgcgtggggggctgccctcattttttaagaaaacggaggagccccaaaaggactaagacatgggggggcccctttaggggggctaaaattttgtttccccaggaggggttttttaaaaaaaaacacccgcccgatttttacaacttattgggctttcaaaacagggggggggagccattaggggggagaaaattttagccccgggcaacctccaaaatccaaatttatgttcacccttggggagaggccacaccaaaggggggcgggtttttttgaaaacaaaccctttggggggttccaaaggggccaggctcccaaaaataaaaggggg

SEQ ID NO: 181903 - DNA, 385 bp, Zea mays
  unsure (1)..(385): unsure at all n locations
  Clone ID: MRT4577_97474C.1
tttgcttgctttgctaccttctttctccctcttccccttgacattttcctttgtcccgctcccatctttttcccacccccctctcctccctcccagccccagccccagccccagccccgccctcttcacacccctggccctccggccgggcgcccgccccggcccttccctacctgtaccagcccctcttttccaatttcaccctcgggggggggttccactctcactctctctcatcgcccacaccactctcgctcggtgtgtgggtgacagaggagaggaggggagggagctagtagctgctaggctggcatggccggctcgagttgcatgcctacgattcagnaccagnnggacagtagggggggcccctcggcccctgccc

SEQ ID NO: 181904 - DNA, 632 bp, Zea mays
  Clone ID: MRT4577_97475C.1
aacgaactcttgctccgatcacaaactagctgaggcagactatggcgcatgcgctgaacagcaggaagacgccgcaggtgccgatcgcgatagaggggctcccgcagctggctacgttcgcgcccaggttcatcacctgcggacagattgcggcgcttctggccacgtgcatcccttacctcacgaggagggccagcgcgatcccgctcgccgtgctgcaccgatggcaagagacgcaatagcgaagtaccgcgccagcgcggaccgccaggcgcagctctgctggctcaagaggctaccaacagacgtcatatgtgtgcacctgggcactcgtcggcaccatacctcggcaagtgaggcggctccgaaggatgccccatgatgatgtccaccgactgcaacaagatgacctacatgcaccacgaccaaggtaataagtctaccgaacgctcgcgtacgatccgcgcgctgtacgagtggtgaagccagagaacacaaaaacctaagctaggtgcattgccaggaggactatgcagaatcgatctatatatatactgtagggaaggacactattatatatgtatgagtgatctgcaaggtgaagaggttccatcctcctacttgtgcatacc

SEQ ID NO: 181905 - DNA, 475 bp, Zea mays
  Clone ID: MRT4577_97476C.1
ctccacactcgaagcaactgtctcttccaccggcgccctctctctctctcactcagactctcgttctcaagtctctccatagaagaggcgtgccaggtttggcccaccgcgccatgggatcgggatcgtgctgctgcatagggtgcaacggcggcggcgacgacggcggagttgacgccggcggcggcctcgaccccaaggggttcctgctggcgatgatgattgccctggtgcttctaatgctctgccacgtacgcccgcctcgccggaactcgtacgtcgtgtaccgcagctactgatcgccgatgggtgccaagctgaaaggactctccatccggccccttcgtcgttccgattcctccttggccgacatgctttggtaaactcactcgattctttgtccgtcgtctgctgtggcgccggcgcaattggctgggtttttaatatatatattttatatatatatatatatata

SEQ ID NO: 181906 - DNA, 170 bp, Zea mays
  Clone ID: MRT4577_97477C.1
atagcaccccgctgcgaggggcaagtctgattcgaagagcgagagattacacaacacaactcgcgatatggaatgtccgtatttatacggcacaagaacgccgcatcgccttgaggatctcaagctggaactgcgcaccataaccgcaaccgggccccgctaaaaagccc

SEQ ID NO: 181907 - DNA, 431 bp, Zea mays
  Clone ID: MRT4577_97478C.1
ctgtgcggagcaaggggagatgctttcagcatgtaacgcacaataggttcatactaggtcagtggtgagcgaaattgttcgcactattatgacacaggtgtagagcagggggaaagaccaaacaaacaacctacggtcctcccttgagatcattgaccacattgaacggaatgggagtgaccgtgtgtatggtggtcccctcaaccatgaagccaaccttggggcccaacggatggcctcttgacgctgatgacctcgccccggtcctttgcattcaggttcagctgggcattcttggaggtgctcagggggggctcttttgtgcagcgcgaccggtggacatgctacacgccggcatggatacgctccctgttgatgccaacattcacctagctggtgtatgatggaggccgcatggagctgcttggtga

SEQ ID NO: 181908 - DNA, 462 bp, Zea mays
  Clone ID: MRT4577_97479C.1
agcctaatcttatttattgaagcgagggccgggtctacagtcttcagccaggcaaaacgctaacatcactccaacatcatagctgggatataatctactacaagttcctttatcccaaaaactggcaatggataaggcctagaacacgggctgctaaccaagcttgcgccatgccatacctttccttatgactctgtggataaaccgctcgagcgggaccttgccgtacatggacgtgttctggacgctgtactccccatactacaggtccagcaacagcatcgctctccgagggataccacctgccaatcttgccgaactcggggaggtcctgcagacccaggaacaggttggccaatccatcgagcacccagatgacggccgccattaactggatgggcaccttgaagaacctgggctggcgcccaagcaaccctaacaaaatttgcccgtgctccagcg

SEQ ID NO: 181909 - DNA, 439 bp, Zea mays
  Clone ID: MRT4577_9747C.1
gggattaaaaccacaacaattcgcagggaatatggggcatgcctcggtgaccgaacagcattggagatagaaaaaagagggggggggaccacttgcaattgcaacgttcggggggtgagcgagcgagtacggatactcgggtttgcgctgcgcaccgagctgaaacacgttgtattcaaagggagaggccccaaggcacccagtcgagccgctgttcgagcaaacagggacccaaacccaaggagaccatgaggcctggatcgacccccggaccattttcgcgccggggcattcatgggttcgccgccgggctcccaaagctggtggtggtggtttttttttttttgggtggatcggccgcgcaagctcaacaaacgtcaagggtgaaaaccgatccaatcgaaggggagtagtagtgtctttccagttctttttccct

SEQ ID NO: 181910 - DNA, 392 bp, Zea mays
  Clone ID: MRT4577_97480C.1
attcggctcgcaacaccaatcaccgtcgctctcgaagccaaccggctccgtcggggcgtactctcagacctcgtcgccgccgctggggggtaccaggcggcgctgtacctcgaggcgctctcgcgcttcgtgttgtccatgcacgaccccgaggtgctccgccgcttcgaccagtgtcgcgcctcgcctcgtagctagttacccttcttgttctcaaggcatctttgggaagcatgagatgggctagcaagtggctgaggcagtgcgaaacagaacaaaaccaagacgacgagtggccagttgggcgttaggtggtggtgagcgactcgaaaacgttagcagcagcattctgtgggcagctgcgccctcgtgtatccgacttggactccaat

SEQ ID NO: 181911 - DNA, 1230 bp, Zea mays
  Clone ID: MRT4577_97481C.1
ctcgaggccggccagggtgaggacagaagctcagatgccgccttcatttgaagctccaaagcccaacacctctcctagcctccttccgtcccgccgccactcccgtcatgggcgattccgcggcgggcgcgccggagccgagcaggttcggcaggatctgcgtcttctgcggcagcaaccccggcaatcgcgccgtctacggggacgcagcgctcgacctcggcaaagagctggtggcgaaggggatcgatttggtctacggcggcgggagcgtcgggctcatgggcctgatcgcagacggtccttggtggcggctgcagtgtcctcggagtgattccgagagcactcatgccgcttgagatatctggtgctagcgttggagaagttaaggttgtctccgacatgcacgagaggaaagctgagatggcacggcaagctgatgccttcatagctcttcctggagggtacggaacaatggaagaactgttagagatgataacgtggtcacagctcggaattcatgacaaaccagtcggtttgctgaacgttgatggctactacgacccgctgctcatgctgtttgatagaggggcaacggaaggctttatcaagctagattgcagagatataattgtttcagcgccaactgcccatgagttactgaagaagatggagcactacactcggtcgcaccaggaggtcgccccacggacgagctgggagatgtcagagctgggctatggaaaagcgtcggagtcatagcgtacccttagtgcttaccaagatgaaatcgtccctggagtacgtttttcgtctagcatctagttgttactcgactgcaggcatcggcattcaagcatcatctttagatctactcttttagctgtcactcatgttaattgttattgttacttcatctggtgaacaagagtataagaatttgtatatgttcttccacgtcaacggtgctggcaaaagcatattacaaacagtacttttgttccccgtggttacaaataatacagtttgtacgatgaagggattaaaaaaaaaaaaaaaaaaaaaaaaaaacttccccgtgaccccgtttcctccagtttcctaccttcctctggccccagcagccgcaagccaaaaccttagcatgcaaaccaccggagcagtgcaaatcgctcggacggaaccatggcggacgacgattccaacgaaatcgacatcgtgtatgaggat

SEQ ID NO: 181912 - DNA, 1674 bp, Zea mays
  Clone ID: MRT4577_97482C.1
aagactgccactaagttgtacctttgtgatgtatagtttaattttaggctttgttaggttaggtagaagactgtaatgtgaaatcccccagtgcgcacttatattatccttgcagaatggtgagactgacaatagcttgacttgctttgcagatcgttgacatgtaactaaaccaaaactacttcctgagaatttgcacacaagattgtccctgctttagtaagagtcagcgaggacgagcctcccccatcctaggtgctagtgtctggcccattttttcagggtccaatattaaagatattatcaacatccctagagaaggtgaaactcaagtcacgtcatgccagttgacgcatctttaaaaggtgtttaatttgaaaaaaaaatatgtatcgagaattgtatggcatgcttaaatttctagagagatgacatgttctatgcttaaatttctggagatatgatatggtctatgcttaaattgtgttgattttatttgcttttgttggtatttaggtttggtatttaatccacatggaataaacgaacaaacatagttgtgtgtgttttagaatataatccatatggaataaacgaacaaacataggttgattgggtttatggatttaatcccataagggattgggtgaaaggcttggattcacccaatccatatggggaaaaaaccaacctggaaaaaattttccaaggtgccgaacaaggccttatgtgattgatactacccttgcacctatgcatcaccaattagtgaattattattacttcggccatgttttatcaaggcatataaatttccatagatgtagccattatggtcattgttgcgctgtgtcaataataatattgcgacgtaatctggttaatttttaatggttgaatttacaggatcctgtcattaaacctctacgagatttagattctgaaaccctgcaggcaacaataccacatattccattatgggtgaagagcccagactacgagcgggtgagtacgtacttcttagttcttattacgctactaatcattccattgatttattcttgttacttgatggaatgtccatagtatatcggtccctttttaattaatgagtgaatgcaggtgtaagtcaactgctttgtttactcaaaccttgaggaacatctctttatagaatgtaagtcctatggacaaaatgggaccttgttcgtgttttacccaaaataaatttatgatttctttatgtttgaaactaatagaattttatctatagaataacattgtttctttgaaatttcatcttaatattagcattatgtaagccctagctccaggttgtcgccggcccgaagctcctcaacagtcgcacccacagccccatgaccaaagtggcgaggtggagggcacacacgccaccaccgcccatatccaggtcacagggaagaagggccccgcagtcgccttcgttggggtccacatgtcctccggcggctccctccggcgatggccaggtgggagaagggggagggagaggtgctagtggctaggattcagatagataagaaggtatccaaatgagccctaataaagatattagagctcattcattcattttgagagaccccacgatatagaaatgttcactattctagcaaagggaatgtgctttttcag

SEQ ID NO: 181913 - DNA, 396 bp, Zea mays
  Clone ID: MRT4577_97483C.1
ggcgggggggggggccctctgcccgcccgaatttcacaacccaagaaaccagggggacgaccaatttttaaaatttccactgaccattggggaggccccaaacggggcccaaaaaagttccaaacatgggggggggccaagcaaaaagtaacaaacaaacgtttccgaatatccggtgaatcaaaaacagccgggattttgtccaaaggggcaccccccggcagagagtcgcaagacccaccccatgggcacaaagatcaatcttggcgcggaccgatttatattggggcctgaaccatccttcaactggttcacaccttcagcgccagctttttggggggaaggagcctccccctccagggatggctgccaaaggaacggggtctcggccaaaaa

SEQ ID NO: 181914 - DNA, 849 bp, Zea mays
  unsure (1)..(849): unsure at all n locations
  Clone ID: MRT4577_97484C.1
cggacgcgtgggggcgacgcaagcaagaagagagggtgccggtgagtggtttgtcggcgtcgcgacgatgacatcctccctgccgccgacaacttctatggaaacctttcctccgaacttacaaaggtgcccacaacaacgttcagaacagtgaagaacaaacaagaagagatcaatttctatgatcgttgacatgtaactaaaccaaaactacttcctgagaatctgcacacaagattgtccctgctctagtaagagtcagcgaggacgagcctcccccatcctaggtgctagtgtctggcccattttttcaggtaccgtccaagaacctaaagaaattgaattatatgacctgtgtaactagctttagtaataagtattcattattcctcttgatactacttttagctttgctatggacatgagcaatagagatcacattaggaggaggaagtaggatgattgcggcctcttccttttgattcttccttccctacatcttttgattcttccttccctacatctcttaaattttgttgaatttatttgcttttgttggtatttaggtttgacatttaatccacatggagtaaacgaacaaacatagttgtgtgggttttggaatataatccatatggaataaacgaacaaacattggttgattgggtttatggatttaatcccataagggattgggtgaaaggcttggattcacccaatccatgtggggngaaaaaatccaacctggaaaaaaaatccaatggtgctgaacaatggcctaacctggatattncctcatgtggattcggatgcttcttgcagcagggaagtaaagaactagtaaaatta

SEQ ID NO: 181915 - DNA, 1449 bp, Zea mays
  unsure (1)..(1449): unsure at all n locations
  Clone ID: MRT4577_97485C.1
cctcgaggacggncgggncggggttttgaccatctatacctcctccgttcttcggtcgttcttcctgcccgcgtgaaggtcgccgccgctcgtcagtcaccacctcccctgatcccctcatttccatcccacccttgcgatcccggcagctgatccttcttccctttctctctatcccacttgccgatcgggcgccgtcgccgtcgccttcttcttccctctcgcgctttcctcgcggcggtggagccaccaccaagccggctgcaattcgccgtggcgcgcctgactcgtggcgcgggaacgcggttgcacgcctcgaagaggggagacccctctcccgcgcgcgacggttcccgaacatcccggcgaaggacctgctcggtcatcgctgctgccggagctgctcatgttgaatccgagatctgaaatctaccccaccatagagtatcgccctatccagccctccgacctcgaagctcttgaaaagattcatcttgctctctttccaataaggtacgagagggagttcttcttgaacgttgtcagtggcaatggtattgtctcctggggcgccgtggacaccagcagatcagatgatcgcagggatgagataataggttttgtaaccacgaggatgattgcggcaaaagatagcgagattgaggacctgttcaggtataacagttcacgcaaagatctaacacttgtgtatatattgacgttgggtgtggtggatggctacagaaaccttgggatagcttcatcactggttcgagaagtggttaaatatgcagcaagcatatcaaattgcagaggtgtttatttacatgtcatttcatacaaccagcctgctatcagcttctataagaagatgctatttaagctagtcagaaggcttccgatgttttactacataagaggacaacattatgactcatacttgtttgtatactatgtgaacggtggtcgttcaccttgctcaccactatgtccaactattgccatccaatattcctgcacaagatgtagaggagctgttggagggtgaaaagatacggagagcgttttttagtacttgagggctttcgtgaagatgctggttgccaagttctggagcaaagaggaccattgcaatccgagatggaccagatgtcaggaatcaaacaccctcttggcaacacaaagtaataaacggataatcagcggtgataataccagatgtcatgtctaatcttagttgtgatgacaatttctcgtcttttactttcctttttttctcttggaggagtttattgaaacaaccgctgttgttgtacacttctgatacgggtacataagttctcaaatggttgtagtcacgtcacattcgttgtaaagaagaggggaaaggagaaactggtaacgttgggagtgttgtgcaatgttgaaatgatcgtgttgaattaacag

SEQ ID NO: 181916 - DNA, 276 bp, Zea mays
  Clone ID: MRT4577_97486C.1
gaattcccggctcaccacctccgatgagttatagttcaataataaatctaaataaggcaccacaacacacctggcacggtacttcctcctactaattcctaactcacaattttcctacatgcttacaaaactataacttccttcttccacataccttcattaatatagcttcatatataaaacccaacttatatcctatagctccacaacaattccacagcaacatacctttaaacccttgatattcaacaatcccaccctatcttctttcaaaat

SEQ ID NO: 181917 - DNA, 144 bp, Zea mays
  Clone ID: MRT4577_97487C.1
gtcgacccacgcgcttgctgacgcgtgggattaatgtgaactataggaaccagagtagtcttgggacgagactaagcatcatagaagtggtggaaattctctaattggaagttgatctgcacccagacaactcctgctgtttgt

SEQ ID NO: 181918 - DNA, 365 bp, Zea mays
  Clone ID: MRT4577_97488C.1
ccggccgggatctacacgtacacactcgccaacaccgatatgtttagaatatcccattgatgaatgcacagagcacagacaaactagtgagagctgaaccaaggggcaggcttgaccaacttccttatggatgccttgtaggcgctggccacatctagagccattgcctctgtagcctataccgcttactaactccagtaattccgataaagctccccgggcgcaggtaaatggataacgctggcaggaccccaggactaggaactcccataactctcttaagaaaagcaaaacctgaataaccaaggacacaccactacacagcgtggttccacccttatctacatcatcgccatgcacctacc

SEQ ID NO: 181919 - DNA, 160 bp, Zea mays
  Clone ID: MRT4577_97489C.1
caacttcaatttttaaatcacaccaacctttccttccatagaacacataaccacttgggtggttatatttaagacatgacttccattaccatataacattaatacccttcctaatattttacactctgtccaatcttataaaaacaacctttcttccccc

SEQ ID NO: 181920 - DNA, 206 bp, Zea mays
  Clone ID: MRT4577_9748C.1
ttggtacagttatccttttcgtcttttagagggtgaacctcaaggagtgtgatgagttctcaagttctgttgcctgtggcttgatctgtggtgattgtatcttcactgtttattttttcattctgttaaaatttatttttttttttttttctttatttttactattaatctatttattactattaatatttatttatcttatttta

SEQ ID NO: 181921 - DNA, 427 bp, Zea mays
  unsure (1)..(427): unsure at all n locations
  Clone ID: MRT4577_97490C.1
ttttcttttttatttaccttttttttgttttttttgacctctgcntagcacaagcgggtgatcaatggggggggacccctttttgcgcacccggttttcccttataacagggacaaaaacccagggtgtgaaaaaccgatcctttaaatagacgagcttttccctggacaagggtggcccttaaggtacgtgcccgaacacatatgtgtaagagaacctatgggtatgggccccctctggcacccccccgggctttcaccctgtataaccattccccggctccgccattaaaaggggatttctttacccggggtttccaataagggggctcaccccgctggggacaaaacccctatttagaaaaaagctttttctgcaacaccctggttttcaaaaaccaaggattttgctaaaaaaaaaatgggcc

SEQ ID NO: 181922 - DNA, 350 bp, Zea mays
  Clone ID: MRT4577_97491C.1
atattagaaaggggcagacttgaaacacaacaggtacaactataaaacacatgaaaggataccactgaccgggccgcaaacaaaacacaccagaaaacaatcgccaaacgggcatgcgaacagcggaacacaacagggtgattcagtcaaacagcaggtcatgacccgcataaagggtttggggtaatcggtggaagatattggatattaccatgccttacgagaaatgcaatggtaaacaaatgcgttgccggacgaaggactagcaaaccagacagacagcttgctttgtcatgcatgaggatcgagggtaacagaagcaccacgccacgctgctggggcactaccaa

SEQ ID NO: 181923 - DNA, 465 bp, Zea mays
  Clone ID: MRT4577_97492C.1
gggcagggggggccaaaaataaaaccgtttttattttttggggggcgggggtttagccccctgccaaaaaaacaaagcggggcccggattacaggaaccccccttttttggagtacccccccccccaccaccttttttccctaagtttaaaacttttactcaccaaaaggaagcagttcccaagggccggggggggacttatttttgggaaccataaaattacacccccctgcggaaaaaaattaaacaggggtggggttgtgtgccccgaaactaattaatttgggcgccccccggccggtactacggtaaaccaaaaaggggggggggctttttttccccgggggccccctgggggtccttgggggccttttttttttcggggggctcgggaaaaaaaaaacccccgggcccaacggccgccggggaaaaaaccccccccggaaacttgggcctgggcccgtg

SEQ ID NO: 181924 - DNA, 307 bp, Zea mays
  Clone ID: MRT4577_97493C.1
gaaggaagcatgcgcacagagtctccaatctcttttatcttttctgccgaccctccaccacagccctctccctccgtctctcatccagtccatggcgagattggccctacagctgtcatggtgctccatggcgtggcggtgtcctttctccttccatctttccggtgacgagcaagggatggtctaggctgcatcatgggtatgaggcagcagggtggtctgcagcagcacaaatgcacatggacacagctatggggaggtgagtttttggagggttcggtgtggaaggagagatggagcacatgac

SEQ ID NO: 181925 - DNA, 324 bp, Zea mays
  unsure (1)..(324): unsure at all n locations
  Clone ID: MRT4577_97494C.1
gattaggtgaaaaagagggtggagaaaatttttttttttgntgattntggntgnggttggggggggnnantgttttttttttgnanngnanngnanannnagnnnaagaatgnaagagggggnataggnntatgtcctgnnnannggntngnttnaaatttttgagttgaangnanntggagagaaagngaaatattgaatatgtttggttttttgnggngnngggtgaaatttggaaggtngaagggtgaaaaaagtgatnttttgaaaagntnnaggaattttgttggtgnnantnaaaaaatnantttggggaatgggaat

SEQ ID NO: 181926 - DNA, 293 bp, Zea mays
  Clone ID: MRT4577_97495C.1
ccggccgggccgggattttacacatagccatgcgcccgcatgtgctcctaatggacgagcccgtcggatcccgcgccactacgataaactccgctccttgacggctgagaaaaagctcaagaatccatagggtatcaaggactagcttctcgagctgtcccccttccggctgtaggtcatgaccgtgctgtgctaagagatgatcccagagatcctccacatcgaatgcgagaactaggtctccaccgcgctagtactaggacccggctgaggcagctagcaataccgcatgt

SEQ ID NO: 181927 - DNA, 700 bp, Zea mays
  Clone ID: MRT4577_97496C.1
aattcggcacgagggaagccggcccagcagcaacgatggtttgcactatgcattgttggttgcgttgcgtccatggcctctcttctgcacccattcttcgatttcgatctcaccgaggccgacggagcagacgactaggagtccactattcccgagaagaatccaggagaggagaggagctaagcagcagctgctgtagctgcgtttggtggatcgaatcggtcgtcgtctggtgctgtgtttttgctactgaggagagggagggatctgagggaggggggtgatgtcgtcgtcctcttcctcgtcggtggtatacgaggggtggatgatccgttacggtcggcgcaagatcggtaggtccttcgtccacacccgctacttcgtgctggagccacggatgctgtcctactacaagcgcaagccgcagcacaaggccgacaaggtcgggggaaagctccccatcaagtcccttcacatcgatggcaactgcagggtcgaggacagggggctcaagatgcaccatggacatatgctttatgtcttatgcgtctataacaaaagggagaagcacaaccgcatcacgatggcggcattcaacatacaggaagctctaatttggaaggagaaaattgagatggtaatcgatcagcgacaaggagtaacgttgagtgatgggaaaaggcctttagcacatcgcagc

SEQ ID NO: 181928 - DNA, 779 bp, Zea mays
  Clone ID: MRT4577_97497C.1
gggattcttcgatttcgatctcaccgaggccgacggtgcagacgactaggagtccactattcccgagaagaatccaggagaggagaggagctaagcagcagctgctgtagctgcgtttggtggatcgaatcggtcgtcgtctggtgctgtgtttttgctactgaggagagggagggatctgagggaggggggtgatgtcgtcgtcctcttcctcgtgggtggtatacgaggggtggatgatccgttacggtcggcgcaagatcggtaggtccttcgtccacacccgctacttcgtgctggagccacggatgctgtcctactacaagcgcaagccgcagcacaaggccgacaaggtcgggggaaagctccccatcaagtcccttcacatcgatggcaactgcagggtcgaggacagggggctcaagatgcaccatggacatgtacaactgttttcctctctctcatctctttttggtgttcttcttcctttttgttatcataattctgcgatgactgggagtctgggacgatgatttcgttcgggcattacttctcctgctgcagatgctttatgtcttatgcgtctataacaaaagggagaagcacaaccgcatcacgatggcggcattcaacatacaggaagctctaatttggaaggagaaaattgagatggtaatcgatcagcgacaaggagtagcgttgagtgatgggaacaaggcctttagcacatcgtagtaagaggctagcttacaaaatggaaggaaatcttcttcatctga

SEQ ID NO: 181929 - DNA, 316 bp, Zea mays
  Clone ID: MRT4577_97498C.1
cgacaatcaattatatcacccttccgtgacttcctttcaagaagttcaactctatggggcgcgttgaaatgatggacggcggcacaaaatatggccgaatcgtgatcgacctctatgcgatcgacctgaacaggacacttgttaacgcccctgctctgtccacttgccagattaacttcgaacggctctcacttactgacatctagattgacatcacactcgatcgcgtgatgtcaaccctgatcaacgctatggatgaagctgatctgaataccaattgcgaaaacagatcattctacaagaagctgattgtcca

SEQ ID NO: 181930 - DNA, 367 bp, Zea mays
  Clone ID: MRT4577_97499C.1
ggaaatcataccatagctcttgcagggtgcagaaaaggggtagagagaagaacgggccggggtgcctcaaccggaaggaaacgcggaccacgagagagagacccgtcaagggagtgagtcactactgcagaggtccaggttggtgggtggatgtcaggcaaggcacaatgcaagtgaacatcaggagccgtggccatgtacagtgctcgcatatatagggccggtcgtccaagcgacgctaaactgcgctagtagtaggggaggagaagagagcacggagcatgcaaaagcagtgcaggtgcgcgctgctgagccagtagtagccactgtgtgccaccgctgctaggactactactagcgctcgcac

SEQ ID NO: 181931 - DNA, 327 bp, Zea mays
  Clone ID: MRT4577_9749C.1
gtttttggatcgaagcaactagcactggaggccacacatacatatataatagagggctaccgtccagtatatatatatatcgatcgaggactagtgcacgctggtcctggcgacacagatagctttatgttattccttccctggcttgatgactcgtgcagcgcgcggggcgtacgcgcacgatcggcagggttattagcttggtcggggtaacttacctgagcttgtatgactcggtggacatgctgatggtgaatgcgacggagacgcctgacttgccggggatggaggcgactgggcccatgctgacgctcatgacgctgcggg

SEQ ID NO: 181932 - DNA, 200 bp, Zea mays
  Clone ID: MRT4577_974C.1
ggtttgttttttttaaatttttgtttttttctttttgataccagtaatgaattattagaacccacaaggtaagcataaaatatcaatttaccacaaactcaaaacaatgcgaaggattcttctgcctacaaaaggggaacagaataaaaaattcataagaaaccactaaaattgaataaacatcaaaaagaatgggaatg

SEQ ID NO: 181933 - DNA, 435 bp, Zea mays
  Clone ID: MRT4577_97500C.1
cccgtcgtcatcaatgggggggaccttgccctcgctgcccgactggaaccggacgctgctgctgctggtcggctgccagcgcggaggacgagacgagggggccatggctcagattttgctccacggcacgctccacggggggggggtcgaggccgtgccgctctccaacccgcaccgcgctcctggcggcgccccccagttcatccgccggctcgcggaagggatcgtggcccccgcgggtgtcggcgcgggcgccaccccgatttccgccaccggcgctctggtgatggcccgcgccgcgtggccccggctgcccccccacgtgcccgtggaccctcgcgcggccccgtgcttgcccccctgctgcgcgcccttgccccgccgccgttcgcctcccccggccggcccggcggccgcgtgcgcggcccccccccc

SEQ ID NO: 181934 - DNA, 363 bp, Zea mays
  Clone ID: MRT4577_97501C.1
gactaccacaggcttgctacacccggggaagctgccgcagcaggggcgtccgatcgctgcccccaaaactgtgggacgtatcagtgtcagggtcgctcagagtcgatcgcagcaacagcagcacgtgcccgaagaggaagcccaggcagcaatcgtgctgccgccacaggacgctgcaaatgatgcaacgtaggtggacgtcacagtctccgacacagcagcctttggctgagagcatgatcataatcctcgagtgcagcaggcagtagctgagcagcaccaaacgacacgtccgcatctactcggcgtacatcgatccagtgacgaacactttcaaccagatgcatatggccaagctgatgc

SEQ ID NO: 181935 - DNA, 1780 bp, Zea mays
  Clone ID: MRT4577_97502C.1
cagcgtccgaccacacactctatttcctagaccattcatgcggtgcccgcccgaagtccttggcaggcagctagcttagcacgcacgtcgtccatggcgcccacggaggaatcggttgctgatacgccagcgccaccgccgccgccacctcacttcgttatcgtccccctcgtggcgcagggccacaccatccccatggtcgacctcgccctcctcctggcggagcgcggcgcgcgcgcgagcctggtgacgacaccgctgaacggcgcacggctgcgtggcgtcgccgagcaggccgcgcgcgccaagctgctcctcgagatcgtggagctcccgttcccgacggacgttgacgacctgcccccgggcatcgagaacatggaccaggtcacggacaacggccacttcgtccccttgttcgacgctctgcagaagctcgccggcccgctggaagcgtacctgcgagcgcaggcgccgcgcccgagctgcatcgtctccgactggtgcaacccgtgggcggccggcgcggccagaagcctcgggatccgtcgcctcttcttccacgggccgccgtgcttctactcgctctgcgacctcaacgccaccgaccacgggttacgcgagctggccgcgggcgcggcggcggctgacgtcgacgacggggggcaggagaggttcgtggtgccgggcatgccagtgcacgtagaggtgaccaaggccacggcgccgggcttcttcaactcgccggggtgggaggcgctccggggcgagtgcgtggaggccatgcgcgcggccgacggcgcggtggtgaacacgttcgtgggcctcgagggccagttcgtgtcgtgctacgaggcggcgctcggcaaacccgtgtggacgctggggccgctctgcctccgcagccgggacgccgacgccatgtcgtcgcggggggcggacggcggccagcagcacagcgcggtagccgcctggctcgactccaaggagaccggctccgtcgtgttcgtcagcttcggcagcctcgcgcggaagctcccgaagcagctgttcgaggtggggcatggcctggaggactccggcaggccgttcctgtgggtggtgaagcaggccgaggcgtccccgccggaggtgcgggagtggctgggggccctggaggcgcgcgcggcggggcggggtctcgtggtgcgtgggtgggcgccgcagctcgccatcctgtcccaccgcgccgtggggggcttcgtcacccactgcggatggaactcgctgctggagtccgtcgcgcacggcgtcccggtggtcacgtggccccacttcgccgaccagttcctgaacgagcggctggcggtggacgtgctcggcgtgggcgtgcccatcggcgtgacggcgcccgtgatggtgttcgacgacgagagcgtggcggtggcgcgtggggacgtcgcgcgggcggtgtcggcgctgatgggccaaggggaagaggccggcgagaggaggcggagggccagggagtacggagagaaagctcacggggccatggagaaaggaggctcctcgtatgagaacctgacgcagctcatcgagagcttcgggcaagtggaggcaagaaaaggttagggcaggcttaggctagaacagtgcatgcatggagctagccatggactaccatcgcaatggcagtacagtactggtgcagaatctttatctttacagtgagtgagtgagtgcgtgagtgtgtgtgtgttataatctctcatgccagttacgtaagtcttttctttct

SEQ ID NO: 181936 - DNA, 336 bp, Zea mays
  Clone ID: MRT4577_97503C.1
agagaagcaactaaattgtcatcagttttttcattgcccattaaaattctccacacaccttttttaaaaaaactaaattacaacatttctcaccgataaccaacagaatcatttttttttttgggcaaacacattttatatgaaaattgcaccctactctatcaatctatcacccttttattgttttcaatacacttatcaaaattacatatccgtttaacacatggaaatgcaacttggcgaaaccacaagcccactttttcaattttactttacactgaatttaaaaaactaatctttcgctttacattacaaacaacattccaccataaactt

SEQ ID NO: 181937 - DNA, 295 bp, Zea mays
  Clone ID: MRT4577_97504C.1
gttgggcaagctgtgagaccaaagaccggagtagtagggaggcaggcacaaacaagactgatgttgtctgtggtccccaggatcggctgagagccctggtggtgatccgcatcatcttcgggatcctgtttgccatcctcttggtgctgatctttatcaaaaaggtggccaagaagccaaccaataaggcttccgaccccgagcaggaaccccaggagatcaattttcccgacgtatcttcctggactacaacactgctgctccagtgcaggagactatagctggatgctatcgg

SEQ ID NO: 181938 - DNA, 319 bp, Zea mays
  Clone ID: MRT4577_97505C.1
ctttttcctcacacctctgaaattaaagtgcgcaaaggagcttggcatccctacggcgatctaccgacttggcaggagctgcctcaaccaatgagtctgacacgtcgctgtctttacccttcactaaactgccattcctactccgtctgctgctgctcctcgccacgtctgacaatgatcaccgactacaagcataactcgtaggagtagctatacctcataaaccacctgttctacctcctggttgacaggattcctcactaggaccacatgataccacactctgtctgtacttaacttgcaacttaactcattacaa

SEQ ID NO: 181939 - DNA, 258 bp, Zea mays
  Clone ID: MRT4577_97506C.1
actctcacgtcacacactccacagtgccactcgtctcgctcgctcgcgccagctggtccggcagcagacagcatgggttcgtcggcggcgcttcagccgaagcagctgtaccagctcgtggtgaacaacttcgtcgccgtggtcgctgcgccgctggccgtggcggccgtcgtgaatgcggcgcgcgtcgggccggacgagctgctcggcaggctgcaggcgctccgggcggtgcacgtatttctcgccgtgtttgtc

SEQ ID NO: 181940 - DNA, 524 bp, Zea mays
  Clone ID: MRT4577_97507C.1
aacaacggacaaagccctgtctttcgatttcttggaatacaacaaggatgtttgtgtttctatcactgcgagcaagcccgtttagaagggcagtaagaagatcctttgacagcctaagcctattcctcagagactccttaaaaaaatcagtagccttatcaaattttccttgtctgcataatccatcaaccattatggtataggtgacttcatctggagcaatatttgctacttctgtcatgtacgcaaacatgttgtccgcctcataggcctctcctcttaagtaaaacgaatggatgagtgtattgtatgtcacagcatttgcaggaaacccttgattacagaccagtttcatagctacagaaagcttatcagcgatgcaaagactatgaatgaaaatgttgagcgtgcgtgtgttgggtatgatacatttcttgatcatgtctgccaagagctccagaacagctggccatctgcccatgtcacacagtctgctcatcacagtgttgtaagcaacaacagca

SEQ ID NO: 181941 - DNA, 413 bp, Zea mays
  Clone ID: MRT4577_97508C.1
cggcctgggtggatacctaggatctaacaagggccatgtggactggttcttctacctcatagcagcccttaacgccgtggacctgctggcgtttgtggtgtttgccaagaggtatagaccggctccggtgatcatacatggagaagacgaaaccggtggtgtcgagaaggcccaggatgcggaggaatgcatttgaatgcatatctcaaacattccatgtgtgggtctgtttggatatactccttatacatgcatgtgttattatagcgtggattgatatggaatttaaaactaaattccataccaatccattctaaggcacatagatgaagttagatacataagcattcaaacgaacctttaatctctcacaaaccatattgttggaatattggatttgactgcattcaagc

SEQ ID NO: 181942 - DNA, 3106 bp, Zea mays
  Clone ID: MRT4577_97509C.1
ttcaactttgacacttagtacttgtttgttttaggctttcaatttatgatactttggtttactgctcattttcttggacttgcttacaaaatttgcattgtatttaggcaccatgtatcattccttttcagaacagtatttctttcttgtgtttaaatgtgacctctatctgaatgtatttgcaaagttctccatttatgtgaatatcaattttctggggtttgtggtaccactatttaatttgctcctcaaaatgatacactagaagaagctcaacttagtatggaccaggagatcctcttggagatgaagctaggcgggggcagttcaggtttcagtgcaagatccacaaatgatgaattggcattaatccattagaaccctcaacatcatcattttctattgctggagggcctacattttcaaatggtttttcatctgggattggtcatagttttgtgacagacaatagctttagtcctttattgcaggatgaaatcattatgggcgtctgtctcagcaatggaactaaagatgacactcacggattgagtggattacataacttgggtaatacatgcttcatgaatagtgccatacaatccttggttcatacacctccattggtacagtactttttggaggactatacttgtgaaataaacaaggaaaatccactaggcctgcaaggggaacttgcaatagcatttggagagctacttagaaaactttggtcgtctggtcgaacttctattgctccacgggcatttaaatcgaaactttctcgatttgccccccagttcagtggatataatcagcatgattctcaggagctacttgcgtttctgttggatggtctgcatgaagatctgaaccgtgtaaaagagaaaccatatattgaggcaaaagatgcagatggccgcccagatgatgaatttgctgaagaatgctggaattaccataaagctcgaaatgactccataattgttgataagtttcaaggtcaatacaagtccacattggtgtgcccagtttgtaacaaaatctctgttacctttgatccatttatgtatttgtcgctaccattgccatcaacagttactcggatgattactgtaactgtattcagtggtacgggagatgttcttccaatgccttacactgtgactgtacagaaaaatggaaactgccgtgatcttactaaagcccttgctgatgtctgctgcttaaaaaattctgagacattgttgcttgcagaggtatacgaacgtcggatctaccgctacctaacaaatccaatcgagggacttcatatcataaaagatgaagatatacttgttgcatacaggctccctgttggtcatgaaaaacttttgaggttggagattctgcattcgagggcagacagatttcctgtggagcctcagtttaatatcaataggaagctcattgggtgccccattgtgacttgtattccaaatgactctactgcaaaatctgatatttatgcggctgtatcttctgtcttggttccatttgtaagagcaaaagcacatagccctgatgtgtctgctgtcaagttaaatggcaatgggccaagtttggacggtattgtcctgaccgataatggcaccaccagtgaggagggtctctctacatcaagatcaagggaggacgataatgcagctgacaatgagcttttaccgtttcagctttcattgactgatgaaaaaggtagtacaagaaatgctatagacatggattctaatcgtgttctaggactagttattagggttttgatggattggggtgagaaagagcatgggatgtacaatattgatcacatggatgtacttcctgaagtcttcaagcctggttttatgtcaaagaagacccgtcaagaagcagtcaatttattttcatgcttggatgcttttctgaaggaggagcctctagggccagatgatatgtggtactgtcctgggtgcaaggaacacaggcaagctagcaagaaactggacttgtggaggttgcctgagatattggtagttcatttgaaaaggttctcgtacagccggtatatgaagaataagcttgatacatttgtgaactttccgatccatgacctcaatatgagcaagtatgtgaagcctacatcaagaggtgaccagcaccccgtgtatgaactctatgcagtgataaatcattatgggggtctcggtggtggacactactctgcatatgcgaagctagttgaagaggacaattggtaccattttgatgacagtcatgtttcctctgttaatgaggatgagatcaggcgatctgcagcatatgttcttttctaccgacgagttggaggttcaagtacagcggcaaacggtggtccagttgacattgaaatggttgattcgctagagacatagttccccagatcaaagcctgagtataatatgtggatcgagatatggagatcagaagagttatggaatttgcatgtctgctccggaatggaatatttgtgtatgaagcctttgacattttgaggcatggcagacaactgaggtcgaaatagcgtggtagcttggatctgcacatctatatgattgagggcctggtgtttaggattataatctgcccagattatataacctatcttattttgaactaagtgttagttcaaaataagttagattatataatatggacaaattatattcccaatcaaacaggctatgattggacttactgatacccatttgagtagaactgatcttgacaggtatccgagaaaacgatgaccttaattgaaaattttgctgatacgctgatgcagcacttagggtctactattgttattggtgtagccaagggattgcaactgggaaaaatggtgtaaaaacgctgcatatttttttttgcctaagctacagctgtgctacagcaaattttgattacggttgtttttttaaaatgcccaatcatcaacacttagccttttcaaaaaaaatttaaaataagggtatatttttttgggaatcccttaagaaaaaaattttttaaaaaagggggttaaaaaaagccaaatattccccttttaaaaagg

SEQ ID NO: 181943 - DNA, 391 bp, Zea mays
  Clone ID: MRT4577_9750C.1
ggggggttgggcaccaaaccaagggaacatgcccctacattcccttttttttttttgaaaatcaaattattgcatccaccaatccacgataatggaccatcttttatacaagcgttaaccattttttattcgggaggtaaaaaattattgccggctgggccctgatagaaaactttagagccatccctagagcgcgataaccaaagatgccggcgacccctatgactaatcgggacgggacgtggctcttttgaagccgccccttgggcggatttaaattttccatcttgataacctctaccccgggccctaatccatgcttcccccataactgaagcctgggctgacagtccctgacactcccttaattgtttccaagaaagccctttcc

SEQ ID NO: 181944 - DNA, 413 bp, Zea mays
  unsure (1)..(413): unsure at all n locations
  Clone ID: MRT4577_97510C.1
ctggacaagacggctctgctgattccntatccattaggatgaaactcttctgatggaagtgctacacatgtttggtggggggggtaggacacccttttttttaagcagctggacaggggaagcacatcacatgtgatgcgcacctgagctcgggatcttagttcaagcggctatcttggtcacaagcaagacatgcgcatcctgtgtgtcatacaccagatattgaagtgatagtgatttgctaaccctctctttttgcattttcgctttgtcaggatccttaggctcaaaccatttttgcatcttaacacggttcttattctgagagtcagccagagcacgtaataagcgatgcgagctttggagacaggggaggggtggggtaaatcgcattttttgcaaaagccttgctt

SEQ ID NO: 181945 - DNA, 127 bp, Zea mays
  Clone ID: MRT4577_97511C.1
tggaatttttggtagatatatgcgataagtagtgcaccgtgattattcatgttattcgatgcgatgatttttagaatgttggattagagaaaagtatgacgaaaattagtagtcacacgttggtggt

SEQ ID NO: 181946 - DNA, 661 bp, Zea mays
  Clone ID: MRT4577_97512C.1
caacgccgccggcccgccgccgccgttcccgcgtgaccttctccagcgaggcggcgacgtccgttgatccaggtgcgcctcctcttgctctcctcccttatctattctctgcatcatcccctgccctgctgaagtagcgcccagctcgtatttcaccgccgccgccgccgccaccctggccgccgggagtcgctaccaccggaacccgtgctggattcgcgctggttctgcgacttcccttgactggtgtggtgggctggtggcgcgcttgcgttcctctcttcacaggcccctcggtgcgcagtggtggatttgtccttctgatttgcagctctgacgacagtgggaccactgactgagaaggcagcaattcgttgggagcagacatggatcactttgatgagcatgacagtgatgacatgaaagtaggggcagcttctgatggcccctccagactcagaaaaaagaggtccaaggtttgggacgaatacgagcccatcattgtagatggagcaattcagagcgcggaatgccgctactgccatatgcacatgagttgcagaggtgctgatgggtcagtccaatgggacaagcccatttgtggcgacaccagaaaaatttgccgagcaaaagagaagttttgttcaagccaactgcaaca

SEQ ID NO: 181947 - DNA, 439 bp, Zea mays
  Clone ID: MRT4577_97513C.1
ccggtccaacttcccggtcgcccacgcgtccgggaaagagtacctgttggcagttgggctcttcagattggcgactctaaaaagtaggcaacttgcagatcgctgtttggagattcaacctgactggaggcaggcctgtctctgaagaaagcaatagaagataaaattgccaaagatggtgtgattggcataggaatcgcagcaactgccgtgggacttctggttggtggaatagctgctcttgccaggaagaagtgaggcgaatatattggaccagctcattgaactaggagaggtcccgtctgtaattacatatcttctgttgttgccttggtgatattacagtcgaatcgcaacattgtttatggggacgaacacaaaaaaaaagcttggatgataatagtactcttgagcttttgttaagtaagaagaaaaacga

SEQ ID NO: 181948 - DNA, 1124 bp, Zea mays
  unsure (1)..(1124): unsure at all n locations
  Clone ID: MRT4577_97514C.1
agttacaagttcaaaaattagccaagttagtgacagatagttcactctgaactctgaaggacaactcaaggaaattaaattgtagtttctttcagttcaaaggatcctcagatctgccctgattcgacaccaggttctgcgacttcccttgactggtgtggtgggctggtggttctcttgcgttcctctcttcacaggcccctcggtgcgcagtggtggatttgtccttctgatttgcagctctgacgacagtgggaccactgactgagaaggcaggtcgctctcgggtgttcgctcccagctcccgcagaaagagaaagacaacgccgccgctcgccgccgtcgttccccggcgacctcctccaacgaagtccgttgatccagatatggatcacttggacgaacatgacagtgatgacatgaatgtaggggtagcttcagatggcccctccagactcagaaagaagaggtccaaggtttgggacgactacaagcccatcattgtagatggagcaattcagagcgcggaatgtcgctactgtcatattcacatgagttgcagaggtgctgatggtcaatccaatgggacaagccatttgtggcgacaccagaaaatttgccgagcaaaagatgggatttttccaaacccacttcaacaggacgcatacttgccatatgtggtgaatgaagtagacccgctggaccaaattcttccagattcacttgatgagattaatttagtgactcaaagtgagaatagcaaattcaggtcaaaggtttggaaggattttataccattctatgttcgagggagagtccagggtgctgactgtgttcattgccacaagcgattcagtgcagataaaggtagaagccatttgaaccggcacactcaaacttgtccggcacggagtggaaatagcctaaatcaccagaaaggtgtgttgtaccagtctagtctaccgagttctaaatctagctttcaagatgagctttcaccagcattgacaaatggcaaagttcagattgcagaatatgctagtaagttcctcaagacagccgaggcgatgcaagccttgtggaacatcatgntctagctttaccagcatggatgatatgaatcc

SEQ ID NO: 181949 - DNA, 663 bp, Zea mays
  Clone ID: MRT4577_97515C.1
ccctcctcgagttttttttttctttttttttttttttttttttttttttttttttttttttttttttttttttttttttttttttttttttttttaaaacaaaaaggggggcgggttggagcccaaagaaagccaaatttgacaactttttttaaaaaaaacccagggggggcaaaaacccgcccgggagtttaaaagaaaaaaaatttttcccccccacaaaaacaattggggaaggggaaaaaccccaaaaccgcaggaacggaaaagcggggggggggagcccaaccccccaaacccgaaaggggggggccccgggccctaaagccggaaaacaacgcccaggggggggagggttttacggcgcccggcctcggggaagggaacggggcccggaaaaactttcccaaaaaaaattttgacccccccgggggttcccttgaaaaaaaccccggaaaggggtttaacccccccccggcgggcaaaccttgggaaggggggtttgggaacccccggggggggggcgcccaaaactttggggggacctttccccccccctttgccaaagcctttgccgcctttggggcccccaaaatttttgggcgggaaaacaaaaggagggggaaatttttggttgggggggggggcctcgggccaaatccc

SEQ ID NO: 181950 - DNA, 229 bp, Zea mays
  Clone ID: MRT4577_97517C.1
acgtaaaaatcttttatatccggcgcttttttttatttaaaacaataaaacaaaaaatgggaaggtttaaaacaaataaaaaataaaaaaattaattaaaaacaaaaatatttctttactatttggcatgcacccttgggagcccgcagatgcgctccccaactttcttcccccgactcttaccatcttcaagttctttaacctcaacccctgcccgaacctttagaaa

SEQ ID NO: 181951 - DNA, 313 bp, Zea mays
  Clone ID: MRT4577_97518C.1
aacatataattttatggtgtatttgttgtttactatggaagataaaggcaggatcacagtaggtccagaagccaaaacaggcgagcggactgcaagcacacaagttatatgaaggaaacagccggggcatacaaaaatccaggggcaacaaaatttataaatcccagcaaaaaccccaccatgtaaaaaaaaacacccccgcccggagcattaaaacgggacctgccaacaatatgccaagaaagcttcagtaaaaacaccaccgggggaaagaaaaaagcggggggaaggaaacttggagctggagaacacc

SEQ ID NO: 181952 - DNA, 408 bp, Zea mays
  Clone ID: MRT4577_97519C.1
gccaggcagtcctcgcggccgttgtctcgcaagatgacactgccataggaaaattccattatataaaccacacccgaagcatggagctggcagagtctgttaccacgtacattaatcgtggcatgctttatacaccgttttcacgtgcttctgttccctgatcctcaggtacattgatcatgtcattagtttggccatcgacaaactcaactaatcggttacgtatgtatttgttaattaaccacttagcaaataactacttcactacttgttccatcccaaatagcagcatataattaaaaacacacttttaagctttcaaccatggctatgtttagatccatgggactaaggtttggagcttttaaaatatttttaaatgatgttgcaggttttttttgcattgcc

SEQ ID NO: 181953 - DNA, 351 bp, Zea mays
  Clone ID: MRT4577_9751C.1
cttgggttgggtttttttttttttttttttttttttttttttttccacaccaatagtcgtttaccttgttccacaaacatgaattaccctaaacctgtaataatcatctggcatgctaactagtagttacttgttaccatattccacaaagacagtacagtcacgggccccccccctataacatatatcaatctttataaatgggctgaggacgtttttgtcaatgtattgctccaggatcttttaagaatcaaaatactctttggcccttttgtcatgctgggcctttcatccccataaagattcagacaacgcactgcattctcatagagactattaagaagatctgaa

SEQ ID NO: 181954 - DNA, 765 bp, Zea mays
  Clone ID: MRT4577_97520C.1
gggactctaaaagaatatttcatcctggtcagcgagattctctactctatcctatatactccgcgttcatatttaaccctaaatatctatcctataccaactaccacatattctatcatttttttcccacttttttattcccacccacatgcatgcggctccgtggcgcgcaggccgttgtgcatgtggaggagagagaagcaatagggagagacgttttactgcaaacggcgactgcatgcttgaggtgagagagagcctcccctatcgcagggagagggatgcagtccctcgctgcagggcattttactgtaaacggcgactgcatccgcgcttccagttcgtgagtgcagatagcctaagcatcatccgttacaacatcggtttcgaacaagatggtggcactgacaggagctacacggatcatttgcgcttgctagatgctgccgctgctttcgatggtgaaggacaccggcggttgccctaacggcgggctatttgcttcggattaaagatagttgtttagactactgcaactctatatagtgcactctatatagtgcacatgaagagtgtctggcacgatcgcttaactaatcggtttgccttttttatggtgacgtcttatcctctggccccctccctgtgtgcctgtgtgggccgcgtgtgttgatcaagttataaatactttcggattgtgagagagatgtttaatgtagaggctcttatggacgttaaagaggttttacaaaaaaatcggggagt

SEQ ID NO: 181955 - DNA, 568 bp, Zea mays
  unsure (1)..(568): unsure at all n locations
  Clone ID: MRT4577_97521C.1
ggtaccctccgagggccttggccgggattantcgacgcgccctagcctgaagaacagtagaactcagactcgagcgcatgctcaccttcaacccgctgcagaggatcacagttgcggaggcgctggcgcacccgtatctggagcggctacacgacgtcgacgacgagcccgtctgcacggagccgttctcgttcgacttcgagcggcaggctctgacagaagaccagatgaagcagctgatattcaacgaggccatcgagctgaaccccagtttccgatattagagatggatcggatccgtgcacgattcctcgttaatgcacggtgtttgtaaataggcgtaatataagattggaggctgcatttgtttgtttgtttgttttgatgttcgaaccaaggcaaccatcctgtgtctgtgaggccgtgtaatctgtcgctgcaggtttcaggcgtccctgtaatgactaatgagttgtaccaaacataaaaggttcggatcaaaaggcgatgagttgtaccaactaccaagataaaaaaaggtgatgtgatggttaatggtatcatttac

SEQ ID NO: 181956 - DNA, 304 bp, Zea mays
  Clone ID: MRT4577_97522C.1
agcagtggtaacaacgcagagtacttttttttttttttttttttttttttttctttttttttttttttttttttttttatagaaaacagttaattaagcacattatggtggaggcgctatacaaaaaaaaaagggaagattgacttacgtgcaattagaacacaaaccgagcgaaatagccataagcaggccagaaaaaagaaataacaggccggaggaggacacaaacccaccgctgggggcaaagaaaagaaaaagaccccgcggccacgggggggaaggccaaccgaaaatcggataaaga

SEQ ID NO: 181957 - DNA, 348 bp, Zea mays
  Clone ID: MRT4577_97523C.1
ggggccaaaaaaaaaacaggggcggggcaattatgttacggaggaatattttgacaaaacttcacttaaggggcggggggtgacaaaaaaaacttcagggccaaggggggaacaaaacctaacaccaccataattatgacattggaggtagaccccccaaagcccaaaacaggaatacaaatgtaaacgaacgtttacttttttttgggggaaccaggtttgggctttttgacaccgggggtttttttggccccggtcttccgctctttaatttgcggggggggctttcaaaccttagaggaaagaccattcccggtggggggggatttcggggtccaactttttggg

SEQ ID NO: 181958 - DNA, 270 bp, Zea mays
  unsure (1)..(270): unsure at all n locations
  Clone ID: MRT4577_97524C.1
accggccgggtcaagaaatgaccgagggggaaattgaactcagaaggggggggggaaccgagcgtgaccctgcaatacatgaaattaacaggctaagggattggaacggggcatacccagaaagacgtgaagatgaactggtagaagcttcaaataacgcccacaacaatgatattaaaggaggcttaattttcaaaaaactggctacactgagacaatggctacaggaatatagcgggaatcgcaagaagggagnaaagggagaaaatt

SEQ ID NO: 181959 - DNA, 565 bp, Zea mays
  unsure (1)..(565): unsure at all n locations
  Clone ID: MRT4577_97525C.1
ggggggggggaaaaaaaaaattttttttaagaagtccgtacatatgctgtgacgcataatacaggaacacggccacttttacaaagaaaaaacggaccttttttcaatcactggaaagtncgagttncaaccgtttgtggggggggggggccctatatctaggaagactgacatcncanctgggaggcatactaacaaatcgaagggggcctttgactggtngggctggcgctggtttcccaaagctgcgcgcctgtccggtggcgggggcaacacccgggttggtcatggctcttgcctgctgcggggtgcggtttgaccagtggttctgccggcgggctcattggtcaaacctgtggcgcgcctcgcggggggccgggcgtgtggggctgcgggccgccggggtgggcctgcgcgctgtggggccgcccggggcgggggggcctggggtggcgggggggccgggggggggggggcgcgggggggggggggggggggggcggggggggggctgggcgcgggcggggcgggggggggtgctgaccgggggcgggtggccggtaac

SEQ ID NO: 181960 - DNA, 1718 bp, Zea mays
  Clone ID: MRT4577_97526C.1
cgggactgatgtcatctggtgtgttttgcaaaggcaatatattagtgtgtgccaagtttttttttttttttgatctactttgaagtttggatctttttgtcaattgtcaatcaacatacatatggctcagtcggtgccactatggcgttagttttcatcagtacatctgaaatgctgggtcctcttggtttacccattgcttctgacctctttgatttctgctttgtttaatataatgcaaggagatatcaatgatttcattcaaccttattgtgccagcggttttgtactgtttaaggccttgttgttgcaagatttctctggatttgtcgaagaccagttatttgtattcttgtagaaccaaccttattaatattgcgaatgtattgcttataggatttatatctaatgtttcaacaggtaacaaaaaatgtgttcaaataatgattatccattcttgctacagttaattacaagccgatccttatactatttgttattagctactagtcaaagaatttgttcttttttggaaggtaagtttgacatccggtatttgatcaattgtttctccagccgggattctctttcgcccactcgggcacgtacggcaaccaggaaattgcctgatgaccaagcaattctgcaaccgctggcaggcatgtcacacacaggcttgtaaaatgtccaggcctcgtctcgtttcctcttcgctcccccgtgacgtcagtacgccacccatcctcaccggctgtcggcaccagcccgccgccgacccccgccgccgtgtcacgactcacgacccattgtggtttcagatcagacccgaatcgcgagcagcgatctgtacgtcgtccccgttcgcacgcctagcgcgatggcgcacccgatgtacggctccgggccactcagatccaggaacgcggcgaactcggacgaaatccagctgcggatcgacccggtgcacggggacctcgacgaggagatcgacgggctgcaatccagggtccgcatgctcaaaggggtggcccaggagataaattctgaagccaagtcccagaatgattttcttcatgaactgcaaatgaccctcgcaaaagctcaggctggagtgaagaacaacatgcggaggttgaacaagagcatcatccagcagggctcaaaccatgttctccatgttgttctctttgcactgttttgcttcttcattgtctacctcttgtcaaagttctctagaagataattatgtcttcggtgggcaaatctagaataccatgatttgtatgtagtctaaagggaaagcaaaatgctattgtacttttatttggccttgtatcctcggtctatttgtcgaaagttgaaacaaatgagaaaaaggaaaattagtacctcccacctcaatcttggaaactatcgaagggtacatgaggtacccaaagtagccctgagggttgattatttgaccctcaatcttctccaagatcgaagaggatatgtgaggaaatcacttgctattcacccttgggtgtttcgttgagtgtatgcaacgagttgagcatggatgaaaagtggcatatactgggatgaaaaggacaaatgttaaccacatcattcagaacaattgcatagcttgtatgtgaatccattccttcgttttcttattaacagggtttactttgccagctgtgcagtgcagtattatttttttgggtagccct

SEQ ID NO: 181961 - DNA, 159 bp, Zea mays
  Clone ID: MRT4577_97527C.1
agccgggtcgaccgacgcgtacgaagacatcgagtactccaagcgcgcttctaaggcagatgcaaagacaatgtccagggatgaaccaggcagagtcaaaattgaacctgttagctcaactaaattgcaaggccaagcagatcgcgtccacaagccata

SEQ ID NO: 181962 - DNA, 734 bp, Zea mays
  Clone ID: MRT4577_97528C.1
ccggccgggaacattttccagtcactgaccaggcagcacgacccctggtcatctccggtttcctcgtttcctttcctcttcgtcccagtgacgtcagtacgtcacccatcggcacccgcgccgctgacccccgccaccgtgtcacgatcccgtccccgctcgcacgcctagcgcgatggcgcacccgatgtacggctccggaccgctccgatccaggaacgcggcgagctcggacgaaatccagctgcggatcgacccggtgcacggggacctcgacgaggagatcgacgggctgcactccagggtccgcatgctcaaaggggtggcccaggagataaattctgaagccaagttccagaatgattttcttcatgaactgcaaatgacccttgcaaaagctcaggctggagtgaagaacaacatgcggagattgaacaagagcatcatccagcagggctcaaaccatgttctctatgttgtcctctttgcactgttttgcttcttcattgtctacctcttgtcaaagttctctagaagataattatgtcttcggtgggcaaatctagaataccatgatttgtatgtagtctaaagggaaagcaaaaaactattgtacttttatttggccttgtatcctcagtcttttcgtcgaaaatcgaatcaaactagaaatacccttcaaagatttatgctaacgtcatccactgatccctaaaaaaaaaacaaaaaaaaaa

SEQ ID NO: 181963 - DNA, 355 bp, Zea mays
  Clone ID: MRT4577_97529C.1
aaaataaaaaacagggcttgttcacatttttttttttttgcttttaaaacaaaatatcttctctattcttccaataactcaacacccttatcttcattgcaacctacaaaaggaatgacaaccagaaaaacaaaaagaaaaaaaacatgcttaaagagacattgccaacatggctttcatatatagaaaacagattttaaatctttcaaaacagaacgcattcagtcggaagcaagttgaccaccactcacccgaagatcttctgctctaccactcctttgatacctaaatattgtcctggcaattacaaatattacaatgatgtttatcaaaacattatctctaccgcaaagta

SEQ ID NO: 181964 - DNA, 269 bp, Zea mays
  unsure (1)..(269): unsure at all n locations
  Clone ID: MRT4577_9752C.1
ggcggagcgagacccacagagcggccgcccaacaatnttggaaacgaagcaaaaaaccaaaggaggggaactttaaaaaacagacacaatgacaacgcatacccgcaagggagggaaaacagccaaacaccacgacaaggacacacagaacaaaagaacagggcgacacactcaacacggaaccagagacgagaatgccaccggaaacggcaatagagccaccacacaacgaaaaaaccatgaccccacaacggccacagggacaagca

SEQ ID NO: 181965 - DNA, 1004 bp, Zea mays
  Clone ID: MRT4577_97530C.1
ccggccgggccggggtaaaatgtccaggcctcgtctcgtttcctctccgctcccccgtgacgtcagtacgccacccatcctcaccggctgtcggcaccagcccgccgccgacccccgccgccgtgtcacgactcacgacccattgtggtttcagatcagacccgaatcgcgagcagcgatctgtacgtcgtccccgttcgcacgcctagcgcgatggcgcacccgatgtacggctccgggccactcagatccaggaacgcggcgaactcggacgaaatccagctgcggatcgacccggtgcacggggacctcgacgaggagatcgacgggctgcaatccagggtccgcatgctcaaagggtggcttcgtactgtttaaggccttgctgttgcaagctctgctctattacaggtggcccaggagataaattctgaagccaagtcccagaatgattttcttcatgaactgcaaatgaccctcgcaaaagctcaggctggagtgaagaacaacatgcggaggttgaacaagagcatcatccagcagggctcaaaccatgttctccatgttgttctctttgcactgttttgcttcttcattgtctacctcttgtcaaagttctctagaagataattatgtcttcggtgggcaaatctagaataccatgatttgtatgtagtctaaagggaaagcaaaatgctattgtacttttatttggccttgtatcctcggtctatttgtcgaaagttgaaacaaatgagaaaaggggaaattagtacctctaagggctagtttggaaactcaaatccccttcgggattgaaggggattggagaggaaattaatttatttccacctcaatcttctccaatatcgaaggggatatgaggttcccaaagtagccctgagggttgatttggtgacaagtgaattgaaggggatccatgtgaggaaatcacttgctattcaccgttgggtgtttcgttgagtgtatgcaacgagttgagc

SEQ ID NO: 181966 - DNA, 306 bp, Zea mays
  Clone ID: MRT4577_97531C.1
cggacgcgtgggttcgcagggcctttctggcctatctagggcagtaaatgcatttgaacattgtctcaacaaatctgagtattatgtgaataacacgtatgatatgtgctggaagtagcaggggttaacccagtgcgccgggtgaacaagtatggaatgaacaagtagatgtatgtagtacacgtatgatatgtgccggaagatagcaggggttttacccagtgcgccgggtgaacaattatgaacaattctggaagtggtgaacaattctggaattactattcaaattgtacttctcttcctttc

SEQ ID NO: 181967 - DNA, 750 bp, Zea mays
  Clone ID: MRT4577_97532C.1
ggattcacatacaagctatgcattgttctgaaagatatatgaatagcattagtcttttttatcctactatatgcaacttttgatccacgcttaattcgttgcatacactcaacgaaacacccgagggagagcgtctcggtagataaaattcaatcccaacagttccaatcatagggatcactggatgacgttagcataaatctttgaagggtatttctagtttgattcgattttcgacgaaaagactgaggatacaaggccagacagaagtacaatagttttttttctttagactacatacaagtcatggtatcctagatttgcccaccaaagacgaaactatcttctagagaactttgacaagaggtagacaataaagaagcaaaacagtgcaaagaggacaacatagagaacatggtttgagccctgttggatgatgctcttgttcaatctccgcatgttgttcttcactccagcctgagcttttgcaagggtcatttgcagttcatgaagaaaatcattctggaacttggcttcagaatttatctcctgggccacccctttgagcatgcggaccctggagtgcagcccgtcgatctcctcgtcgaggtccccgtgcaccgggtcgatccgcagctggatttcgtccgagttcgccgcgttcctggatcggagcggtccggagccgtacatcgggtgcgccatcgcgctaggcgtacgagcggcccggccggcctcgaggtacccaat

SEQ ID NO: 181968 - DNA, 829 bp, Zea mays
  Clone ID: MRT4577_97533C.1
gactcctatagggcgattgggtttctcgaggccggccgggagggcacagccctggtcatctccggtttcctcgtttcctttcctcttcgtcccagtgacgtcagtacgtcacccatcggcacccgcgccgctgacccccgccaccgtgtcacgatcccgtccccgctcgcacgcctagcgcgatggcgcacccgatgtacggctccggaccgctccgatccaggaacgcggcgagctcggacgaaatccagctgcggatcgacccggtgcacggggacctcgacgaggagatcgacgggctgcactccagggtccgcatgctcaaaggggtggcccaggagataaattctgaagccaagttccagaatgattttcttcatgaactgcaaatgacccttgcaaaagctcaggctggagtgaagaacaacatgcggagattgaacaagagcatcatccagcagggctcaaaccatgttctctatgttgtcctctttgcactgttttgcttctttattgtctacctcttgtcaaagttctctagaagatagttccgtctttggtgggcaaatctaggataccatgacttgtatgtagtctaaagaaagaaaaaaactattgtacttctgcctggccttgtatcctcagtcttttcgtcgaaaatcgaatcaaactagaaatacccttcaaagatttatgctaacgtcatccactgatccctatgattggaactgttgggattgaattttttctaccaaaaaaaaaaaaaaagcggccgttattgagagtatgcaagtatgcaacgaattgagcgtggatcaaaaagtgcata

SEQ ID NO: 181969 - DNA, 247 bp, Zea mays
  Clone ID: MRT4577_97534C.1
gcaccacgcacgtttctcgacgagacgtcgctccgcagacgagcccaggaaagtgagggcccagaaagggtagaaacgcgaaaaccgcggacatctcaaaagatactgtccaggcgacgggaaactatgcagcgatcaagaggctcttcgcgatcgacctgaagagctccacgggaatcccaatgaacccgcgagaccgaaacccacctccaggcgcaaaagattccatggcctacgcaccaccccg

SEQ ID NO: 181970 - DNA, 128 bp, Zea mays
  Clone ID: MRT4577_97535C.1
gaactatcactgtagcagagcattaagcgcggacaacatactacactacgcacaacgtaaccgatacacttgacagcggtctagtgctcagatgttctgatcgagtccatatattctacggcacattc

SEQ ID NO: 181971 - DNA, 374 bp, Zea mays
  Clone ID: MRT4577_97536C.1
tcgctctagagcactaccaggtgaaaggagagagcttggatttggttaagtacattgacagcaacttcgaaggtccatcgttgctccccgaggtagtatggtttaattttttttgttatagttttaatttagtagccccctcttggatcaatcctggatccgccactggatgggagtgttcactcggtttattcattccctcgatcacattcatatggtagtctgtgccctcattttagtgggcgattttgtgattcctggacttctaggtttttagttttagattattattattattattattattattattattattattattattattattattattattattattattattgataaaagaataaggcaat

SEQ ID NO: 181972 - DNA, 379 bp, Zea mays
  Clone ID: MRT4577_97537C.1
ccaactgagtatggtgcatgggggatacttcttgtcatgcgcgacccctcggatggtgaatggctgcccaatgcaatatgaagaacacaacatgccggtacatattcacttgatgcgatgcaccggcgtcaacaaggaaaaaactgtgtggccgcccaacaccccacataggcacagctaaggaaacgaagaacataggacgtcctgcggacgccgctggacgccgtcgggcgctggcgaccagcgagagcagacggattacaggggctagaaatggcgggctcgtcggcggagaagactgtggctacgtatatgttgcgacctttgcgaggcctactcagttgagctcggactgcatgctagtaccttgctgcctaga

SEQ ID NO: 181973 - DNA, 431 bp, Zea mays
  unsure (1)..(431): unsure at all n locations
  Clone ID: MRT4577_97538C.1
gtgctgtagatacgagatccactagcgttctgttgctgcaccggccggctagctgctggcttgccactaggactacgactacagaggaggaggangtgtgtgactcctggtggcataccacacaagctcgtnnnnnnnnnnnnnnnnnnacagcgagaataaccttggcgatcaagaacaagcagaggagcaccacctgctgcctccgccaggacgggacnacgtnntttannccacgacgaccagtgcaggacataggcgtcnngccagacgactaggacagaagtcctcctccgtcgcgcctagagatgtcggcggcgatccgacgatagcctgatacgacgtgcgcctggaacctaatgagcccgctcagatccctgctgacgccactgccatcgccgaccacggcggcaagtttgctggtcaggtgg

SEQ ID NO: 181974 - DNA, 510 bp, Zea mays
  Clone ID: MRT4577_97539C.1
aatttgcctcttctcgctttcgctacggcgtcaccgccggcggcgcgtgcgaccgcggcccgatggtgcactgacgtgaactaccgatagcggcacatgtatggcatgaacagccaccagacggggatctcctagacccctgctgcgaagatcaggacccctcacacctggatcagaaccagcggcctccaagcgtgccgggaccgatcaagaagatccagggagattgcccatatgacgccagctgaactacagaaacgtctacgtggcctaagaaccatcccaactgggaacagtccctatgggggagaaatatctggaactgtcgatggacatgggatgatcccagatttcctggatgaacagcacatcatcgtcaagaaggtggtggaattacagaagacccttgacgaggcttcctcaagacagtaactctgaaacaaaggtgattcactcttctacaacgatgcaacaccttgttggctactgctattatccatggattactct

SEQ ID NO: 181975 - DNA, 1020 bp, Zea mays
  unsure (1)..(1020): unsure at all n locations
  Clone ID: MRT4577_9753C.1
catgtctcacatgagggccttgttagccgtccgtgtccagaacctgaacctaagagaatggagtatgaagcacccctccttcgaaggttcaactcagtatcaacagcctctcctatgccgcatggtgtcctttttcgagcaattttcgaccgatatttgaaactgtcagcactatgtaccctcaggtacatcactttgccgttgaagaatcttctgctacaccaagtttgttttcaagatacggagttcgtggtttcccagccattcttcttgtaaatgagactacaatggttcgatatcggggttcaaaagatcttagctctctcgtcgaattctataaagaaactacaggtctggatccagttgcatacattgatgttgttgtccagcaagagagcacagcaagcttgaggtcagttgcaccatgggatcgttctccgcttgagatggccaaagacgagccgccgtatctgttggtcgcagttgtcttcatcatcctgaaggccgcagcgcgcttggtacctgctgccatgtctcatctgagggccttcttagccgtccgtgtccagaacctgaacctagggatccgcaggggatcaaaccaggtcctggaacgagccttgaacgtccttgacgtgaggaggctgtgcagcaagctggggctgagcaacagggcaacagatctgaggaagggtgcaagcaatgctcgagcctgggcttcctcgtttgcttccgtctcactgggtgaaccttcatcttcgagacaagcttagccatttttttttgttttttttttggagatgtcgcttgttagggtagctagctgctcacatggtgcaaagaccatataaggtttgcttcccatcctgtttgtttctgtgcagtcaggaggagaggggaaaccttacatgcctgtaaattttgacgacatcatgtgctgttgtatattgtatattaggaatacctttgcatttctctgctggttcggttntnnnnnnnnnnnnnnnnnnnnnnnnnnnn

SEQ ID NO: 181976 - DNA, 288 bp, Zea mays
  Clone ID: MRT4577_97540C.1
ttggacgccacgtatccatgtataggctcactaaaagtgtaaggggctttttttggaataaagccaccgacatctcaaggatagcaagtgaaaatggaagtgtctacacaaaacctaacttgaggagggaagtgagaagatacagcttcagtgcacatatgttgagaaaaagacggagacatgtcagacccgcctaagtggaacaggaaagatgattggggagggaacacagatcatcgaggggaagagggtcatggtggacacgagggtggggactgatcatccttt

SEQ ID NO: 181977 - DNA, 115 bp, Zea mays
  Clone ID: MRT4577_97541C.1
attcggctcgagctttgttgatgaatggtttatttgcatactgagagctgtagggcttaacaagcttttgactactcacattgtggaacgtgactcttttagactggttatagtt

SEQ ID NO: 181978 - DNA, 284 bp, Zea mays
  Clone ID: MRT4577_97542C.1
aattcccagacttcttctttccttttggcccctgttaccttctttacagaaggtgtcagagcgactcttacacttttgcaatctgctggtctgaatgaacaccacgtccttacaaggtgccttttcgcttgcctgttcttccatgcataccacctgatgactcacacgactttgcctatagtgtactcctgtcactcattctgtggtcacctgtcttaaacatccaggcttcattgtaacatcacagctgctcttcaagactccatgttgtattatctactctc

SEQ ID NO: 181979 - DNA, 675 bp, Zea mays
  unsure (1)..(675): unsure at all n locations
  Clone ID: MRT4577_97543C.1
cttttaaatgatgaaagcttgaagaagtgttggaaacaaagatttggacttcctgtactgctggtattgaacaagaaagatctcataaaacccggagaaatcgcaaagaaacttgaggtgcgaaccttataaaattgtcgaaaggtggttccctgtttcttttgtgctttcctctgcataaagacggtattgatttctagacgactcttttaacagtggtaccaaaaatttactaatgttgatgatgttataccaataagtgctaaatttggtcatggagtggatgatatcaaggagtggatattgtcaaagctccctctgggtcctgcttactaccccaaggtattagcagatcattcatatatttttatataatggcatttcctctgtgctttgcttacctttaaatgtcattatctgtccttagagagagtagttcagatgctcagaacattttagtaaatatttttgtctgtgtggtaaagagtgcgctcctgaatatcattatagttgaacttgatatgccaattctaatgctgaatccgacaaatcttgtgttaatcttaatttgatggatggatgcattggcaaatcatccttttgcagatggcatagtggttntctttttctagtattagtgaacttataacatatgaacttgaaaccgctaatgta

SEQ ID NO: 181980 - DNA, 183 bp, Zea mays
  Clone ID: MRT4577_97544C.1
aaaccaaaggctgcaatttattatttaaagcaccaacctaaaaccacacagtatcagttaagtcccaaaatgaacaaaggaagagaaaaaggctgcgcttaagggtctgggagaaaaaaaaattgtattctttccattaccaactacaaaccaggaacattgaaatggcacatacaaaaaggc

SEQ ID NO: 181981 - DNA, 1450 bp, Zea mays
  Clone ID: MRT4577_97545C.1
cggacgcgtggagcggcaccgcagtgggcagcccgccgaggaggaggaggaggacctcctcctgctcgagggcgaggagggctacatcgttggcgatggagggtactactaccctgagctccgctgcaacgacgaggagtactactacgaggacgggcgggaggaagaggacgcggttgccctcgatttggagcgccggatctgccttctcgagcacgatcaggaacctcgcctgcttgagccaccacatgagaaagaggaaggtacccacctttacacagatgaagtgctgccggacatgtctgaacatgaactgggtggcctctatgccgacgagatgttatctaaggaggatgtggaaacaatgaacaacctccacaatgatgatgaagaactgccagagtcgcctactgctggaaatgatgacagggaggaagcaagcgaggctgacggtgctgacagtgtaagtggcagtggcagtgatagggtatacaccattgacaaggtgcatcaaggtgcagcaatgcctattgcaagggtcgtggataagtaccaaggggaggcagtggagccggacattaagaagctttacatgaggctggaggcactggaggccgatagggagtcgatgaggcaggcccttgtggcaatgcgcacagagaaggcacaacttgtgcttcttcgtgagattgcgcagcagcttgccaaagatggagttccagttgggccgggagctggggcggggccaggtgtacaccatttacctagaaaacacacagttgggattgtagaaaggagattcacagaggacaagaaggcgatacttgtgaagacattttccatggctgccttgtttaagtggatcctcgctttattgggcaagaaaaagaagctatctcaaagcaggtatacttttggcttaacaaataataatgttggtttgctcatactcttggataagtgcccacggatccagaaaaccctcacaagaacaaagttaaaccttgccgaaagaagcagcagcagcagcagcctgtacaatgtaaatagatagctttcagttgggaagattgcatttcttttgttaatgtttggtggagcggaagttcttttgattctttagttgatgattttccgatttcccatcttttggtgatgaggattttatgcgttggtcttgcaattgttaagtcacaaaatcgctttcgcttctttctcaccaggaagaactacaatgcatgtatagtgcgcttgtaaatacactggtgttggtttgcttgctcttgcttccaggttgagtaaatatttatgaatgttagtgcaaactctaaacttttgtgaaaaaatgtccttgtattcaaattaaatctgtttatgcttgtattgctcagtagcccttttttggactggcaaaaaaaaaaatgaagacccgaaaaaaaaaaaagcggcc

SEQ ID NO: 181982 - DNA, 147 bp, Zea mays
  Clone ID: MRT4577_97546C.1
tggacgcgtgggctctcccggacgcgagggcgcagcgttgatggcgggagcacccgtcggacgctaaggcggaggccgcccaagatggacctcctcgaggacgatgacgagttcctaggagttcgaagatcgaccaagaattgggat

SEQ ID NO: 181983 - DNA, 259 bp, Zea mays
  Clone ID: MRT4577_97547C.1
ctgactcaccggtctatactacaggttgtttcagcaggctacactacagagtttctcttgtgacacgacataacataaggctgtacagtctgctagtattagctgctgaatgcagatcacataacgcaagacgtttgtaaatggacaattcctcaggccccttgtgttcggcttgaggaaggtcgctgtgtacgactgaacctgatatacccgggcgagccatgaattggattcctaatagtgactcctaaattcaatt

SEQ ID NO: 181984 - DNA, 1120 bp, Zea mays
  Clone ID: MRT4577_97548C.1
tcgaggccggccgggatgatgtgtgacctcacctaccgcctacaggaccagatgccacattgccactgccccgccaccgtatcagatgccagtgctcctgccaccgaaccgctgctctttaccaaccactcccaccaccctctcaccgttgtccgttacatatccagcggcccctcgaggccggccggggtccgcctccacgaccaccatccatcgccatggctggccccaccaccacgctcctcctcctgctgctgtgctccgctgggctcgcgtccggcgccacggcggctgacgacagcgggttcactaccttcaaggtatacttccacgacatcgtggcggggacgagcccgacggccatccgcatcgcgcagggggcggcgtccaacacctcgtccaccagcttcggcgcgatggtggccatcgacgacccgctgacgacgggccccacgcgcgccgcgggcaccgaggtgggccgcgcccagggcacctacacgttcgcggaccagcagacgttcggcctcctcatggtgatggacttcgtgttcacggccggggagcacaagggcagcacgctctccatcctcggccgcaacgaggtgctcagcgacgtccgcgagatgagcatcgtcggcggcagcggaaagttccgcatggcgcgtgggtacgtccaggcgcacaccatcgactccggcttcaaatccggcgagaccgtcgtccagtacaccgtcaacgtcagggcctagctacccgctcgatctaccttgcttgctcctccggcccatggccgactgcccgcccggcttcttgtgcgtcgatccatctccggatgctttgtacacaccttgtcgttcttcgatgttactacatgacatgtatttagtagactgcgatttcaaaaaaaaaaaaaaaaaaaagcggctattgagcgggatctggatctgcagacccgaatctaggtctacgcgaatctgcagaggtacggcgggtcgatcgaaatgtgcgaagaacacgtcagagcctaattctagtagtaaaaaaacaagaattactcctccggcctgtaggaatcaagtttagtcagagaataaagtttagtttctacctatttaatttt

SEQ ID NO: 181985 - DNA, 1335 bp, Zea mays
  Clone ID: MRT4577_97549C.1
cccgtgcgacgttacgccactcattccaagaggcagccgcggtctcctctccaccccggccgccggccgcccccacagtgccgtaccccgaccagccatgcgcatcttcgtgctgtccgggcagagtaacatggccggccgcggcggcgtacaccacaagcactgggacggcgtggtgcccccagaatgcgcgccggatccgtccatcctccgcctttcctcggcgcagcagtgggaggaagcccgcgagccgctccacgccgacatcgacacaaccaagacctgtggcatcgggcccgggatggcattcgcccgcgctgtgctctcgagcctgcaggaggacacccctggcgcggcggcccagatcgggctcgtgccgtgcgccgttggcgggacggccatccgggagtggtccctcgggaaacatctgtacgagcagatggtatcccgggcgcgcgtcgcgaccttgtacggcgagatcgaggccatcctatggtaccagggagagagcgacgccgaatccgatgccgacacgagtgcctacttggagaacgtcgagaggctcatctgtaatgtcagggcagatcttgggatgccgcagttaccctttattcaggttgcacttgcatctgggaataaaaggaacattgaaaaagtcagaaatgctcaatttagtgttaatttgcccaatgttgtaactgtggatccgatgggtatggcactgaatgaagacaagttgcatcttaccaccgagtcacaagtaaaacttggcaaaatgctggcagaagcgtacattttgaacttctctacatcaacttgttaggtgaatacaagtgtctcaagatcttcaatccacaacaagtatatttgataaggtcgcctagtgacaagattactatgtgctcaagcacttaatcaatcgaagacattgtatctatcttatgtccgagaatacgctaaagtgcctcaattcttgtatagcatttcaaactcgcttcataacatttctttcatattgtaataatggttgcagcctaaaaaaaaaaaaaaaaaaaaaaaaaaaaaaaaaaaaaaaaaaaaaaaaaaaaaaaaaaaaaaaaaagggaaaccaataaaaagaaaccaaacctcacacaccgcgcaaaagaaaaaaaaaaaatctcttaaattgagaccccataaaacaaaacacagggcctcggtgttacacaaccggcgacaggggaaaaacccctggggttcccaaaactaattccccttgaaacaaatccccttttcaagagggggcgaaaagccaaagggcccctcccataaccctttccaaaaaatttgcaa

SEQ ID NO: 181986 - DNA, 371 bp, Zea mays
  Clone ID: MRT4577_9754C.1
attatatttgtgtatacgttttcgtaattctaacctaaccagatttaactattactataatccttcatcacttacaacaacagtctaaaggatgcattttgccttaaaagttactttggtgcttgtatgtgctgtatatttggcacactcttatgacggcggccatagttcgacttatcgtaaaccagatgaaaacgggcactactcgtttggataccatataaaggataaaaaaagtgcaacgaactttcgcaaagagtcgggcgatggttggggcaacaaaaaaagttcctatggattgcacgataaaaatggacgcatgcgtgttgttcactatgtggccgataagcacggttttcgagctgtgatca

SEQ ID NO: 181987 - DNA, 339 bp, Zea mays
  Clone ID: MRT4577_97550C.1
ggttgttcgtcccatacctcatctgcgtcgcttgtacgcttttgctctctccctcccgactctcggtttcttctacacactaccagctcgcagcggtagacgtctctcccgtagcacgctaggtcgccgccaacacccggccgtgcttcgttactgtgatcatggccacctctgtcgtacatcatcgtccgaccgagagtacatcgtctaggtggctagtggttagatactcgcgtactcagcacctacaaaggaaagtgtccacgcgttgtgatcgcccgattgcagtgagggtcgagtaaatgcgactatcgctgaatgggtgctggtctacgaaaa

SEQ ID NO: 181988 - DNA, 958 bp, Zea mays
  Clone ID: MRT4577_97551C.1
ccggccgcggcggcgtacaccacaagcactgggacggcgtggtgcccccagaatgcgcgccggatccgtccatcctccgcctttccttggcgcagcagtgggaggaagcccgcgagccgctccacgccgacatcgacacaaccaagacctgtggcatcgggcccgggatggcattcgcccgcgctgtgctctcgagcctgcaggaggacacccctggcgcggcggcccagatcgggctcgtgccgtgcgccgttggcgggacggccatccgggagtggtccctcgggaaacatctgtacgagcagatggtatcccgggcgcgcgtcgcgaccttgtacggcgagatcgaggccatcctatggtaccagggagagagcgacgccgaatccgatgccgacacgagtgcctacttggagaacgtcgagaggctcatctgtaatgtcagggcagatcttgggatgccgcagttaccctttattcagggtggtacgaaggttcttcgaaggttgagcgacacgaagctacgatcctcgaaaaggttgcacttgcatctgggaataaaaggaacattgaaaaagtcagaaatgctcaatttagtgttaatttgcccaatgttgtaactgtggatccgatgggtatggcactgaatgaagacaagttgcatcttacccccgagtcacaagtaaaacttggcaaaatgctggcagaagggtacattttgaacttctctacatcaacttgttaggtgaatacaagtgtttcaagattttcaatccccaacaagtatatttgataaggtcgcctagtgacaagattactatgtgctcaagcccttaatcaatcgaagacattgtatttattttatgtccgagaatacgctaaagtgcctcaattcttgtatagcatttcaaactcgcttcataacatttttttcaaattgtaataatggttgcagcct

SEQ ID NO: 181989 - DNA, 642 bp, Zea mays
  Clone ID: MRT4577_97552C.1
aaaaaaaaaaaaaaaaaaaaaaaaaaaaaaaaaaattaaaaaaaaaaaaaaaaaaaaaaaaaaaaaaaaaaaaaaaaaaaaaaaaaaaaaaaaaaaaaaaaaaaaaaaaaaaaaaaaaaaaggcccccggggggccccccccagtttcttgggggggaattggttaattggtttttccaaggggggggggcaaagtggggggacccttaaaatttccccggccatgggccgccccttcaaccaggtgggggccaaattggggggggaactattgaaaggaaatccagaacttttcaccggggaaagggggttccgcggcccccacttttttttaccgggaaaggtctttggcggaatttttcccgccgaccttgggaaaaagggggttttgggggggggggggaactttcttgggggggttggaaaccggggggggggggtctttttaggggggggaaaaaaggccctttttaaattgggggaattgggggcccgggggcttaatggtaccggtattaatttaccccacgggccaattttcggggggccaaataaacccggcggaaagcttttttttggaaggtttcgggttttcccatgggattaggggccctttttatgggggggacaatttaagggggg

SEQ ID NO: 181990 - DNA, 2067 bp, Zea mays
  Clone ID: MRT4577_97553C.1
cgttttcgtgggctcggagtcggatgatgcttgcagcatgaaggccagaacagggctcaaggagctgaggatcctaaaaaatgaggataccaaggcaaaaattatcagtgggaactctgtgcacacgaccactaccactacgacaattaccaccaccgcattagtaccattggcccctaaatgcagaagccttgctgatgatgaaggctatctccttccggagttcaatgacatggttctcagagaatttggccaagatatagatagcattccatccacacctgcagcgagagtaagggaagatgtatcgaatgaccatgaagtccacaaacttagagatttggtgagatcactgcaagaaagggagaagactctggagctacagcttctggagtgttacggtttgcaggagcaagatgctgcggtgagggagcttgagaatcagctgaagattaacaacgttgaatcaaagttgtacttgctgaagattgaatctttacagactgaaaaccagaggctgcaaacacagctctcagagaactcaaaaatattctctgagcttgaggcgacaagaacaaaatgcaagtttctgaagaagaagtttatatcggatgcagaacaggcaaaggagcaaatcatttctcttcagaaaatggtcgactcattgcagaacaaacagactgatgaggacccacgcgtccggaaaaaatttcttgagtttgaaaataaactgaagagactagaggagctggaaaaagaggcaacagagctaagagcggcaaattcaaggctgcagcaggagaatgcacatcttattaggcgactggaggttacacgcctaccccctgtacctaagcccaaaactagtaaaagcattggaggaggctgatcggttgaaacaagaaactgataggttggctaaagaggttgaacaacttcagagtggcaggtttgcagatgtcgaagaattggtatatctgaaatggataaatgcctgcctacggtatgagctgagaaacaaggatgccccatcagggaagactgttgcacgagatcttagcaagaccctgagccccaagtctgaattgaaggccaaacagctgataatggaatatgccaatgtgggtgcggaggacagtcacttggggcatgtcgaattcggttcagagtgctcttcctcacgggcttcgtcaggtgaaccggatgatgtgtcaattgatattgcttccatgacaaagcatactaataaaaaccccaaaaagaagaagttcttctctaagcttcggaaactggtgctgggaaaagggaaagagaaccgtgaaatttctactctggagaggagagtgtctatttcaagttgttccttcgatgacttcactggaagggattcacatgatagctattcttcgttcatggcagaaccaaacatgcctgatagtcgacggcatggtgatcatggctttggtacacattcttctttggacagcgcaaaatctagtcctcttggcacagaaattgtaggtgaaagaagtgaccattctgtggtgaagagtgtatcttctagagaggaaaaggtaaatgcattcggtcccagcattggccttgatagtagcaaggccatacctgaggatgttgagatccataaatttgctgatgcgctgatcacatcaaggtcaggttccatgtcatcaagaagatcggcatccttccgacactgatataggagtcatctgctactgacccctctgcctggatgtatatttctgccagttcttgatggggggagttataggagatgttactggaatataagttgtcaatactttatttttttgtaccattgcgtatagggtgtagtttacttacctttaataccaactcctactacctgggctcgtcatgtgtaccataaaatggcacatttcaatggcaaacacaagacaattgtaacaccctaaatccatcaattaaggtaacctagattatattattaaaaaaaaaaaaaaaaaaaaagaaaaaaaaaaaaaaaaaatttgcggccgttatgaataaaaaaaaaaaaaaaaa

SEQ ID NO: 181991 - DNA, 316 bp, Zea mays
  Clone ID: MRT4577_97554C.1
attgggggggtggtttttttttgagattccacgagctttccttttaaaaaagggggaaaacatgggccctggggttcattttttatctacagagctaaagtcctggggataaacactgagctggtttgcttaagcattggcaccttcaatttttgcacttttgccaggaacaattaggtttcgcgtttataactgagggtagctggcccccgagttcacagaaggcaatgccgcctggtttgggcacttcgacaccaagcttttaacccaaactcttaggcttggcaaaatttctttttatttaacgctggaaaca

SEQ ID NO: 181992 - DNA, 327 bp, Zea mays
  Clone ID: MRT4577_97555C.1
atgttacagtttttgtttaagctttttaaacacgatcaaccaacacgataaaataaccacagtttaaacttcagagagaacatagccacaaacacacaacatcccatttgatcggagaaactgtcctttggacccattttgtttgccaggccctgtgccgggaaaaaaccatagggccatccgaaacactttgttaatctaaacaaaaaagtaccttccggggggaggctaaaattggagaccccaaaggggctgaaacatgtgcctgaaccaatagggcgacgccttaaaaaaaaaaacaaacgtgttgaagaacacgtatactat

SEQ ID NO: 181993 - DNA, 3921 bp, Zea mays
  unsure (1)..(3921): unsure at all n locations
  Clone ID: MRT4577_97556C.1
gaaaaaagtaaactcatcagaagatgggggatttcaaagccaacatatctggttttgatctttcttgatgtttacataagctccaatgcatttgaatgtaatcaaagaaagtttgaaggaagtgccatcctgattaaaggtttggcattctttaaataccttggtataaaaccttggttctcgatagtgtgttggctatggaaaaaagtaaactcatcagaagatgggggatttcaaagttttttggacaatgtgcagtacaaagccactggaatactacgctatgaacgtatctttggagatggctacgtgagtactggtggagctgagactacaaaagaatttgtggagaaactgaatcttaagcctgggcagaaggtgcttgatgttggatgtggaattgggggaggtgacttttatatggctgagaagtatggtacacatgttgttggtattgacctttccattaacatgataatgtttgcccttgagcgttccattgggtgtaagtgcttagttgagtttgaagttgctgattgcaccacaaagacatacccagaccacatgtttgatgtcatctacagtcgtgacactatccttcatatacaagataaaccctccttgtttaaaagtttcttcaaatggctgaaacctgggggaaaggttctaatcagtgattactgcaagagtcctggaaaaccatcagaagagtttgcaacatacattaagcagaggggttatgatctccatgatgtggaggcttatggacagatgctcaagaatgctggtttcagtcatgtcattgctgaagaccgaactgaccagttcctcagtgttttacagaaggagctagacaaatttgagaagaacaaagatgatttcctgtctgagtttgcccaggaggattatgacgatatcgtgaatggatggaaggcaaaactgcagaggagctctgctggtgagcagaggtgggggctgttcgtcgccaccaagtgatgcgcgtgcgtatggctttattacaaataaatttggagctctgctggtgagcagaggtgggctgttcgtcgccaccaagtgatgcgcgtgcgtgtggctttattacaaataaatttgcttctgcaattcaccgatgggattcgcttcataacgtgattttacataactgaactctgagagtctatcctattgctttgtgctttgggacaatgagactgatataacttttacggtcctgttaaatatagagtgtgctgcactgaanaaaaaaaaaaaaaaaaaaaaaaaaaaaaaaaaaaaaaaaaaaaaaagggnggaagatataaaagataaaaaattaggggcggcggctttaaaggaacaaaatttactttcgcgtgcctgaaatggaatagcttttcttttgtgtaccctaaattaaatttcagtcaaacaggaccgtaaaagttatatcagtctcattgtcccaaagcacaaagcaataggatagactctcagagttcagttatgtaaaatcacgttatgaagcgaatcccatcggtgaattgcagaagcaaatttatttgtaataaagccacacgcacgcgcatcacttggtggcgacgaacagcccacctctgctcaccagcagagctccaaatttatttgtaataaagccatacgcacgcgcatcacttggtggcgacgaacagcccccacctctgctcaccagcagagctcctctgcagttttgccttccatccattcacgatatcgtcataatcctcctgggcaaactcagacaggaaatcatcttggttctgcgtaaatttgtctagcttattctggaaaacgcaatggaactgttcagttcggtttttagcaatgtcttaaataaaaccagcaatcgtgcgtatcttaccataagcctttacgtcatgatgagcataatacctctcctaaaggtatgttaacaaactattggcgttggttttctaaaaatcatgcagtaaacactaatgagaacctcccccccaggtttcagccatttgaagaaacttttaaacaaggagggtttatcttgtatatgatggatagtgtcacgattgtagatgacatcaaacatgtggtctgggtatgtctttgtggtgcaatcagcaacttcaaactcaactaagcacttacacccaatggaacgctcaagggcaaacattatcatgttaatggaaaggtcaataccaacaacatgtgtaccatacttctcagccatataaaagtcacctcccccaatccacatccaacatcaagcaccttctgcccaggcttaagattcagtttctccacaaattcttttgtagtctcagctccaccagtactcacgtagccatctccaaagatacgttcatagcgtagtattccagtggctttgtactgcacattgtccaaaaaactttgaaatcccccatcttctgatgagtttacttttttccatagccaacatatctggttttgatctttcttgatgtttacataagctccaatgcatttgaatgtaatcaaagaaagtttgaaggaagtgccatcctgattaaaggtttggcattctttaaataccttggtataaaaccttggttctcgatagtgtgttggattaaatttcctttctgtatctccggattgatggaagcaagattccctaaagaagatataaccaccgaccttcaaccattttaccattctttctaccaacttgtcaatctcctcatctgaaagatacatcagcaaccagtttgaaaatatcagatcaatggagtttgcttcaatcatcaggtccggggatgtaacatcagcacacataaaggatgtgttgccatagtgatcatttatacttccattctttttaatcacacttccacgaaaatcactgcaaaaacgtttgccagatgttttagcattgggtgtaagtgcttagttgagtttgaagttgctgattgcaccacaaagacatacccagaaaggaagtaaagacagaacctcggggcgctcctccttgtcgagttcggcggcacgggagtcgagcataatggcctcgaggttgagctccccggagtgctcctcccagtagctcttctgcgccttcctctcatgcacgtctcagctgccgtgttcgcaagcggcattaaccacaggggctctggtctgcatgttggggaggcttagggacagatggtcaagaatgctggtttcagtcatgtcattgctgaagaccgaactgcccagttcctcagtgttttccagaaggagctaggcaaatttgagaagaacaaagatgatttcctgtctgagtttgcccaggaggattatgacgatatcgtgaatggatggaaggcaaaactgcagaggagctctgctggtgagcagaggtgggggctgttcgtcgccaccaagtgatgcgcgtgcgtatggctttattacaaataaatttggagctctgctggtgagcagaggtgggctgttcgtcgccaccaagtgatgcgcgtgcgtgtggctttattacaaataaatttgcttctgcaattcaccgatgggattcgcttcataacgtgattttacataactgaactctgagagtctatcctattgctttgtgctttgggacaatgagactgatataacttttacggtcctgttaaatatagagtgtgctgcactgatgctcctcctggctgtggctacatggttgacacatgacatgagatttgttattttcattttttttagaaaaatattttgcatctcaacttttgaccaatgtgcatcagatgcattgaatctgtgcatcattttataattttttaaaacttattagtacgtgtttcactagaattacgaagcatcgccattgtactgaacacgagatttacactgaatatgtaccgaccatgt

SEQ ID NO: 181994 - DNA, 598 bp, Zea mays
  Clone ID: MRT4577_97557C.1
cgagccgccgggccacaccgcatagctcctgccttcttcctagttcctaccttcgcccccccccccccccccccccggcgtcgattcgtgctgcgctcacctcgacccagttcaatatcgccggcgagggaagcagcagcagaagctccggcgagaacccccacctccggctatcgcctggggataaagtggggtcggtaggggcggtgacctagggggagcaaaagggatccgatagggagagatgaagcaatcaatttattcgtccgccgtcgcccctgctaacgcccccactactaaccctaggatcatactgtcttttggcgtttcttctccggctctttttcgtttgcctgtcggttacaaggtggaacgtcttcagaagcttctccactagattagtgtaaatagtagacttgttcaggtttagtttggttggaagaattagtttctgggtcgtggtcatttctgctagcaataatggctgcgatgaacggaaaggtattgggtaaatgtggaaggaacatgaatagtctcaagagaaagcgggagaaccccgctgcatatgatgctgaaaaaaaaaaaaaaaaaagcggcc

SEQ ID NO: 181995 - DNA, 1074 bp, Zea mays
  Clone ID: MRT4577_97558C.1
attgggcctttcgtcgccggcggggcccttctctcccccggcccgctcgccgctggatcagtttcgtggcgctttggagcagcgaagtggttgctgtgcttggtatttctagtgcgtagtatcgccatcagcgctcaataatactactcctcttcctctatgctgcacgccccggcccctttgttttgtagctcttgtcagcgaaccttccccctgaaaaccccacccacccttcctctccgatcctcctagtagcgcctcacttgcttcattccgatccattccaccacccatctccctcctcagctcccctctccgctctccctccctcgctcgcgctctccacgcggatcacaggaggctagctagcaagctcgaccggcgcggccgatctagctcgcgctcggccgctccccctgccgctcgccctggggtccacctgctaggcctcggctacggaggcaccgccgccggcgccggcgcgcagatccacctcaagccgtggatctacgaggcacccggtgctggcgcgggcgggatcatggccaggttcttctagccgtctggctgtccagcactcccgcgggcctggagtgcacttcgttttttaccttaattttctggttaattttttcttgactaaaataacatgtaatttgtggggaaagctgagatgagagagagagccagtgccgcactgtggaagaagagagctagatcatctcaccacctcatagggcagaaaattggacaaatcaaacaatgatccaatatttcaagaggatttcttcaccgacgactctgagcttcatcggatctatggtcttcgccgtcgagcgatgatcaaggccgtcgacgactagcatgcatggatttgggaggaggaggaggacaacatgagaccatggggaagctaaagagagctccaccctcggcagcaaagacggcaagaagttgtacgtgccgcgctgccctgacactactccttgatttgctacttcttggctagcttctccgatccttgggtgttttgtacatagggcatatggtgtggggggtaatcaatatatataa

SEQ ID NO: 181996 - DNA, 236 bp, Zea mays
  unsure (1)..(236): unsure at all n locations
  Clone ID: MRT4577_97559C.1
tgcgatatcatagcttagcgtgcttccccaatgccaatttcatctacatcacaaattgcttccctcgccgttctcatcatttccctcgtcttttctgcgctttcctcctactccgcctcattgtcctcttctatctcactcgcttccactcctactccatcttgaccgtgtcccagttcgtccgctgcttcctgctcttanctatgcaccggcacaacgctaggaatctagcccta

SEQ ID NO: 181997 - DNA, 236 bp, Zea mays
  unsure (1)..(236): unsure at all n locations
  Clone ID: MRT4577_9755C.1
cggaannaccgggtacgacccacgtcgtacggtcggggacgctgctcacgatttcgacgagggatcttctcgagggatgacggagagctcgaggtgggtggcgcaacggagggccgggcattggccgtgggacgtgggcgttggtcttttgctgcggttacatatgggcaagctgggtgctctccgcgccagtcaccgtgttcgatgccagtctgtcgtggaagaaagtgcatgca

SEQ ID NO: 181998 - DNA, 192 bp, Zea mays
  Clone ID: MRT4577_97560C.1
gtacgtaagctcggaattcggctcgagagcgtgtcctccgtctattagcaccccggaggcacgtccaactgggggggctatattaactcgacggggcaaggaataacgcggagcactaacacaagtgcacaggcatccaggctgccggacacatgtagaaagagctatactgagtaacgagcctcctccaag

SEQ ID NO: 181999 - DNA, 998 bp, Zea mays
  unsure (1)..(998): unsure at all n locations
  Clone ID: MRT4577_97561C.1
ccggccgggctagtagcgcctcacttgcttcattccgatccattccaccacccatctccctcctcagctcccctctccgctctccctcgctcgctcgcgctctccacgcggatcaccggaggctagctagcaagctcgaccggcgcggccgatctagctcgcgcttgttggccgcttcagcttagcagcggcggcacgtcgtcaacctgtgctgtgaggaagactagtagagagagatacgtgtaaggatggctggcgcggggggtgcgacggctgtgacattgccggcggcggggccgcccgggtgtacgcctgcaacggcggtattggcggcgctgccgcggcgtggccagacctcaccaactgcggatcctccattgccacgttcttctagccgtctggctgtcccgcactcccgctggcctcgttaacttcgttttttttaccttaattttctggttaattttttcttgactaaaataacatgtaatttgtggggaaagctgagatgagagagagagagagagagagagagagagagagagagagagcgcactgtggaagaagagagctagatcatctcaccacctcatagggcagaaaattcgagaaatcaaacaatggtccaatatttcaagaggatttcttcaccgacgactctgagcttcatcggatctatggtcttcgccgtcgagcgatgatcaaggccgtcgacgactagcatgcatggatttgggaggaggaggacaacatgagaccatggggaagctaaagagagctagcaaagaagccaagaagtgtaagtgcagcgctgccatgacactacttgattccctacttcttggctagctagcttctccttgngtgttttgtacatagagcatatggtgtgtgtggggatacaatagtcaaggtggcccatgagagatcatgcatggtgcaagtcatgaacctctctctctcatctcggcatttgaaatcagtgtgtttaattggct

SEQ ID NO: 182000 - DNA, 359 bp, Zea mays
  Clone ID: MRT4577_97562C.1
ttcgtaatccccgggcggagcggcatcgctggcggggtttatttcaagcgtgtgcaggcaggcacgcggctggtcatagagcgggcatcctctactgacgaggagctgccccacccaaccgatgatctctacacgtacgctataacttcccctccacgacctgacccaatgcgaccaaaccgggagagcaccgaaagcacaagaaggcgctgccacgggcgctactaagatcggcagaaatctcttgcgaacacaagggtgaaagtgagtgcattcattctttatcaagggcacagactgcctgtactctcaaaggagctggtctttgaactgctagtaggacactaaatacccaggcc

SEQ ID NO: 182001 - DNA, 249 bp, Zea mays
  unsure (1)..(249): unsure at all n locations
  Clone ID: MRT4577_97563C.1
aaaagcaaaaccaaaactttgntatattccatncatacccggaacggggccaatttcaaagggttttttctcactccaaaccagaccatatggagagctagttcagtcttgcccaaacatacaaacaaccagaaacagacaactacaccccgtggtctaaacaacaaaaaatgacaatgagaaacaaatctccatattattaattaaatttaaataaaataataaaactcaatattatacaacaaaagc

SEQ ID NO: 182002 - DNA, 354 bp, Zea mays
  Clone ID: MRT4577_97564C.1
aaattaatatcagggatgtgaatatgtttagttcataatcgaacaaatttaacccatgcaagaatcccatccattttggtgatggagggacgtcattaagcggtgctacctgcacccgaagtacaacttaaaacttgacaccctcttttgatgggcgacagttccaggcatgctctggatggctccggtagattctccgtcccgtcatagccactgctaagcatggcgaataccttccccaatatattgccgcttcgcccgatccgaactgtacacatcgatatttgacgtgcacacatccgatcgcctgtcatggccctggcttcttccttttcatgcccaagtctcgaatga

SEQ ID NO: 182003 - DNA, 275 bp, Zea mays
  Clone ID: MRT4577_97565C.1
attcagatcctcacattctcctggatggattatggtgggtacatgcatcaagcattcaagctcacatcttaacttattcagggccttaaggactgaacagaccttttaatacataatacttactcgcacttaggaacgtgggaataacattgactaacccacacagatatatatatatatatacagagagtgggttgattaatatgcaactgcaagggaactaactactgccaagtttgcatgcatactaccttcacatgacggagcaagaattg

SEQ ID NO: 182004 - DNA, 411 bp, Zea mays
  Clone ID: MRT4577_97566C.1
tttgtagaccacgagcccccgccctttttagattgttttttgtaaaattgacatacatcctgctgtacatcaccgtctcatggtgatgtgacaccttcaagatatccgcgataaacgtgccatcttctggcaggggcatgctgtcccctgcgactgtatctattctgcccactggaaaaccggggataagcatgcttccatcccctcctcctgttggaccagtatagctgcggtgtcctattacaccatgacctcacagaccctgatgctgccctgatggattctgtggatcctgctggtctcatggcttctgaagagcccacaaaaaaacataaccacgctttttgagatctttcctctataatgcctgatattccttgatctgtttaacggagccatgcttatatcccc

SEQ ID NO: 182005 - DNA, 536 bp, Zea mays
  unsure (1)..(536): unsure at all n locations
  Clone ID: MRT4577_97567C.1
gccnnggccgggccgggnaaaaaaaaaaaaaaaaaaaaaaaaaaaaaaaaaaaaaaataaaaaaaaaaaaaaaaataaaaaaaaaaaaaaaaaaatttccccacacactagaaaattcaaacaattaaattaatattcccccccccggggattaccccaccttaacctttgtggattccaaagcgtaaaaaaacctatccgggccctgggggggggggccacctccccccatataaccggggtctgggggggacagccacccccaccgatacaagtagcggcgggggtggatatccacccccggggttacttgtaccccccgggggatttcccccccccggggtacctgggcccccccggggaaatgcccccccgggggaatatgtggcgccggggttatctgtgccccccccgatccatgtaccccactcgattgttctggcctcaccctcatgccaatacccaactaagccggcgcgaactgaggtttttccccccgaacaaccttgccggaaccaacggcgttatcaaaaccc

SEQ ID NO: 182006 - DNA, 378 bp, Zea mays
  Clone ID: MRT4577_97568C.1
atgacgagccacgctgagccccaggctataaaggccagggatcggcgtggcgttgaggcaatattgatggtgtcagagttctttgtcgcccacaccgctagccttattgagcgtggccagagaagccaaacgatcgaggcacatacctacaagcacgattttaccgaggcagaacaccctgttataccacgacgcagtagctccttccatgagaagctaccggtaatcgaccctcccgccttggcctataaaaggggagggtcgaccgatacacgaacgaccaggccagagcacatggagaactacgaaggccaaagccaaggagcacaccaccatgatgcccaaggcttagctaggttgagagcatcagattcatag

SEQ ID NO: 182007 - DNA, 354 bp, Zea mays
  Clone ID: MRT4577_97569C.1
tctttctgaattgaccatgatggacaaagatgatccagaaggtgatctatggaggcccaccactactcgtacgacgctcatgtcctgatagctcttcaccgtcttctattttctcatcaacgattcctatgatactttcatattgttccattctcgtcagtactatattcagccaaaagaataaaataactcagcagacatttatattaacttcagctgaaagaaacacaaatgtgtagttttgcagcattatcaattgtgcttgagaatttgaatcacttattgatgggtacattgttattagagccttactgctaaaggatataaagtcttttccattgggatcgtcaacca

SEQ ID NO: 182008 - DNA, 359 bp, Zea mays
  Clone ID: MRT4577_9756C.1
ctgttttctataaaagacgcgtatacacacatatagtcagatttttgttttgttaggatggtgaaataccgtttatggttcgttgaatttgaaatcgttcattgtgaatcggactatttgaatagatataaagctttcacctaatgttttgtgtcgctatgcaaaaatcattttatagaaatctgattagatcaaagaaagaagaagtacaaaacatttaactttatggttattttgttacacgtgtatcaaattggtgggaattagattttttgacgggtgatgctgaatgatggattactattggtttttatgggggtcataaccttactgtctattggaattactatcgccacctt

SEQ ID NO: 182009 - DNA, 378 bp, Zea mays
  Clone ID: MRT4577_97570C.1
agggggactacatgccttattattagagcacgagtaagctttcaatcttggttgtcaaggcctctgatgagatgtatttactggtttcctagggagggctgcgtcctgggcggatgaacactaaacacattggggcccgcaacaaaatggtatcttacgcacattaggattaaaagatgtgaaacagttctaccctgttggagccatctatctttattgcgaagtcgtcgtactggaaatttactgtgagtatcaactatcagatgtgctatggggcttaaataagagacttaacatgctgtatccgatacatactaccagctagagtggtcggccggactggatgaatcaccttacgaacgcatacatgcttatcag

SEQ ID NO: 182010 - DNA, 678 bp, Zea mays
  unsure (1)..(678): unsure at all n locations
  Clone ID: MRT4577_97571C.1
gtgatctcttacctccaacgcaaggagcagcagcttctgggagctcaagttcggatcttgttggatgcgagacagataatggagagtgtttggatccaataatggctgttttggatggcgcactcgaactagaagctgataccttaaatgagttgcttcctgaagtccaagattctttttgggaacagttcattggtgagagcccagtgattggtgagacagatgagttaatctcaggatcagtggaaaatgaactgatattggagcaactagagttacaatcaaccctgagtaatgtgtggagcaagaatcaacaaatgaaccatcttactgaacagatgggacttctcacatcagatgctctcagaaaatgagattgccacaggccacaatctttcctcacgagatgggttaagattttgtggagccgcaacaacaaaaagaatatgaccaaaggaggtactatgtatgtatgtatcaaactgttgtaactctaattcttgtcaatgtataataaaataagagaaatattgccttaaaagatttttgcattgcaatatctttgtttgttactgacagaatgaaaaggagatgcttcaaagtgagagatattcttctgttcttgtgtatgtctttagagantcctnngttattttgttacattaagtgcaaaaattg

SEQ ID NO: 182011 - DNA, 418 bp, Zea mays
  Clone ID: MRT4577_97572C.1
gcatattactgctgttggtacgtgacatgtgtaggaaacaaaaaaaaaaaaaaaaaaaggaaggataaaaaaaaaaaaaaaaaaaaaaaaaaaaaaaaaaaaaaaaaaaaaaaaaaaaaaaaaaaaaaaaaaaaaaaaaaaaaaaaaaaaaaaaaaaaaaaaaagggggcggcctttttaaaaaatcaaattttacttccccgtccttgcaaagtaaaactttttttatagggcaaccaaaataaaattaactgcccgccttttaaaaacgtggaaattgaaaaaaccttggctttaccaaattaaattcctttgaaaaaaatccccttttcccaacttgggaaaaaaccaaaaagccccgaaccaatcccctttccaaaaaattcccaaacttaaatggaaaatggaaccccccttt

SEQ ID NO: 182012 - DNA, 449 bp, Zea mays
  Clone ID: MRT4577_97573C.1
catgtgaatgcatatattcattagtggatgatctatttcctgtcaccaaatccgtgccggaaatatgttctgattcacgagacgccagctccgctgtggatgctcaatataccatcataccctcctattccgatgaaggacaaactgaaacaacgcaaactgcggttgctccatagtgaaccttgttttgatcactcattataaaagggcaactcaaacgctgattgacagctcggacccctggctggctgaaaaagctcctccggacacacacaccattgcagtctagaactgttcgatcttgaaactacgtccaatcatatttgtgctccacccgtgactagcttgtccggccccatcaggagatccttgcccacttataagcaggttgttctgatcttgcagaaactatggtcttgggacatctctgtgctaaatgcaactgcctt

SEQ ID NO: 182013 - DNA, 319 bp, Zea mays
  Clone ID: MRT4577_97574C.1
gtttagcctggtatagaacaaaatgcacatgtttaagggggggctacattgctactgctatatctggtatattgggtgtagtggtcctgttgttaaaccttagttctctcttgtgattccttgctggtactaatagtgccacggcccctgcaaccaatgctgcaccaggtaattggtatattggcctttgtgctacgaaggttctgtacttgtatcactctagtaagcgccggaaattattggctgatcggcagagatggccatcacccactacttcaaaatcaacgcgacatacttaacgtagttggccaactggccg

SEQ ID NO: 182014 - DNA, 114 bp, Zea mays
  Clone ID: MRT4577_97575C.1
ggcaggcgtgtggatcgttctcggttggtggacaggtccgggacatggacataatcaatctgcgagaggacaaaatcctggatgattagtagggttcacagtatggataattcg

SEQ ID NO: 182015 - DNA, 550 bp, Zea mays
  Clone ID: MRT4577_97576C.1
gccggccgggtcgggccctcctggtcgagtggtcctggcctgaggcctcctcggcgggatggcggctggcttggagcttggacaaggacaacacagcaggagcagccgagcagtctgtgacgccggcggccgtgtgcctacggtcgtgcgggcggctgcgggctttatcttgatagcctccactcctccagcagtccagctccagcgggtcagcgcggtccagccgtagcccggcagccctcaggtccgcgaggtgagcccggcagccccagcccctaggtcggccagcgacaggtctccagctttgtgttcatctccgtccgaccgtcccccactcgactcccactctcgctgtccaagcagtccgaccaacagctcccaggccccatcaaggtaatgaagttgatgttttttttattttagtgatctactctatgatccatattcaagtaatgaatccaaattacatattattccagtaggaatgtaggactatgacagtgacagacgaaagctccgaccggaaaaaaaaaaaaaaaaaaggccccta

SEQ ID NO: 182016 - DNA, 181 bp, Zea mays
  Clone ID: MRT4577_97577C.1
gctgatcagctagctgaagctgcttgccagtcttctatttgtggtgttgagcttcgagctgcagcgtctgctctcaagagacttggtgatggacctcgtgctatagtttgttgctcagtgcacacaatcagagacttcagttaaacattcagacaatacaaccatctagcacatcatatgg

SEQ ID NO: 182017 - DNA, 173 bp, Zea mays
  Clone ID: MRT4577_97578C.1
cacattacgtctgggaccaggccgaccttcgacgacgatcttgctcgccaaaaccaaagccgtaacgaagattagtattagaaaaacaataatcacgggcacggtgacagagccatttcactaaaaaggcacgctgacgctgtgccacagcgacgccgccgagttggagctgt

SEQ ID NO: 182018 - DNA, 610 bp, Zea mays
  Clone ID: MRT4577_97579C.1
acttcacacccttagccgcccttatccaagttctgcctgaaccgccgccattactactacaggaagatacaactgttgcgctcttgctctctatttaatatcgcctgatatcgatgctactaccgccgccgtccaaaccctagccctgatgatcgaccacgaggcgaccgactcagatcgtcgtagggtggttcgcgacggaggcgacgatagtcaacgatgagtctccagaggagaggatccaacagccgcctcaacttcgcaggactccggaattcgtgtcgcggatcgcggcgatgattccaccgccacgaacaccgtcgacagcgattctcgtgtttgcggtgtcctcgcctccaccgtctcgctgatttctttgcgactcccctgtctccctcgtggtctctacatcttcgcgctgtgactgttgacgagcgcattgtgtgatcggacgagacaaagccgaagatgaagcagcgcgacgccacctgtagatgatccatgggcctcctcactaactgatgaagtgcagaagattatcttcgaaaccactggagtacaatttcgatgatatgaacctgcacactacagtgcctctgatgagatttat

SEQ ID NO: 182019 - DNA, 313 bp, Zea mays
  Clone ID: MRT4577_9757C.1
aaaagacgaaattgttttcgaggaggcgaggcagttcatcatcaacatccatacggggaacctgcatctgcactcacctttggcgtcgctctactaatttgatttgcccctacaggtaccgcagagaataccgggcccattaagtcagctacacaggactctaaaggtgaagatcatgatataatgagctttggtactgggaaatgcgcgtttgccaagcgcctatatcatgaataggaccaaaacattgttagcttcgaggcagtcgtaccaaaccattgctatgcaaaggggactttgaatagaccgtccc

SEQ ID NO: 182020 - DNA, 442 bp, Zea mays
  Clone ID: MRT4577_97580C.1
cttgtacagtttctgtttgctcagttgttgtcaatctaggttttagttgccaggactctaaaacctttctgagcaggcggcggctgcgactatcgaacgtaaaacggtatactggcccgggtcgtccacccttgttaaccaaccaagcaacacatccccgccccccgggggaaagggggaaaagatcacagggggcccaaaaagctccaagggctgggcgccgaacgccaactgggccccactcacaagggccggcaatccggtcacccccaaagctcttacggtgaccctcgcaggccccccaacggggttggttactgtccgagagaacgtgcccctcgacgctgccgccattgtggtcgaagaacgccctcaaccaccggtacgcgccctcttaccaaaaggacttgttcatggggaccctcgggcggagccccctgcc

SEQ ID NO: 182021 - DNA, 606 bp, Zea mays
  unsure (1)..(606): unsure at all n locations
  Clone ID: MRT4577_97581C.1
atttaatgaggaggttctcnaaagctatgaaaaaatccgattcccctcggcctgcagtttttgcaatgtccaaccctactactaaagctgaatgcactcccgatgatgtattcaagcatgttggagataaagcgatatttgctagtggaagcccttttagtaatgtttctttaggaaatggtaaatctggttatgctaatcaagcaaacaacatgtatctatttcctgggattggtttaggtgcccttctttcaggtgcccggcatgtttcagatggcatgcttcaagcagcagctgcgcagaagcagatgttccattgaaggaatgtatcggatttgatatttttcttaaccatctctaaattagctgctcatctagaaagcatttcggcagagattggtgcccacgcatatggctaatgtatggctacattcatttgctctagacatgatttcgtcaccaggggacactcagttttgaaccgttgagcttcatactgccacgggaaccgtatttttcatcattattgtaatataaggcgccggagtttctgtcctgaaaataagcatgagatcagaagcgatatgatatcctttttataccacc

SEQ ID NO: 182022 - DNA, 2386 bp, Zea mays
  Clone ID: MRT4577_97582C.1
tttttttgatctctcgcgggtgcccgcaccgcaatgcgacgcctccccttcaaatctccctggagctaggggcgccggccaggaccaccgcaccgcaccgtctcggacgcggctgcagctccgagcattggattccgaccaactgaccgagcggcgtgtcagatgatctcgccggcgatgtgtcgttcggcgccgcggcgggccgcgcaggtccggcgcctcctgtcgtcggccgcgcccccggcgcacgccggcgctgccgtgcctgggccctgcatcgtgcacaagcgcggcaacgacatcctccacgatccgtggtacaacaaggatacggcgttccccatgacggagcgcgaccgcctcggtctccgcggcttgctcccgccgcgggtcatgtccttcgagcagcagtacgagcgatttataaactctttccggtcgctggagcacaatacccgcggcgagcctgactccatcgtcgcgctggccaaatggaggatcctcaacaggttgcacgaccggaacgagacattgtactacagggtgctaattgacaatatcaaggattttgccccgataatatacactcccactgttggcttggtctgtgaaaattacagcggtctgttcagacgaccccgtgggatgtatttcagtgcaaaggataagggggagatgatgtcaatgatttacaactggccagcagagaaggttgacatgatagttgtgactgatgggagtcgcattctaggcttaggtgaccttggtgttcagggcataggtatacctattggtaaactggatgtttatgttgcagctgctggtattaacccacagaaggttcttccaataatgcttgatgtgggaacaaataatgaaaagcttctggaggacaagctatatttaggactgaggcaacctcggctggaaggagaagaatacttggctgttgtagatgaattcatggaggctgtccatgcacgttggcctaaagcagttgtgcagtttgaagacttccaaatgaaatgggcctttgagactcttcagaggtatcggaaccgattttgcatgttcaatgatgacgtacaggggacagctggagttgctctagcaggcctacttggtgctgttagagcacagggccgtcctctccaggattttacgaatcaaaagatagtcgttgtgggagctggaagtgctgggataggtgtgcttagcatggctaaacaggcaatgttaaggatgcctgggatccacagaaccggggaagggcataatcaattctgggttctggacaaagatggccttattacgaaagctaggaaggacctggattctgcagtggcgcgttttgccagaggctttggtcctgatgaggtcccagatctctatgagggggctagtcttgttgaagtggtcaagaaagttaagccccatgtgcttttaggactatctggagttgggggcatatttaatgaggaggttctcaaagctatgaaagaatccgattcccctcggcctgcagtttttgcaatgtccaaccctactactaaagctgaatgcactcccgatgatgtattcaagcatgttggagataaagcgatatttgctagtggaagcccttttagtaatgtttctttaggaaatggtaaatctggttatgctaatcaagcaaacaacatgtatctatttcctgggattggtttaggtgcccttctttcaggtgcccggcatgtttcagatggcatgcttcaagcagcagctgagtgcctggcatcatacatcacagacgacgaaattcgaaaaggaatcctcttcccttcggtctccagtattaggcacatcaccgcacgtgtcggcgcagcagtcgtccgtgccgctgttgctgaagacctggctgaggggtgctgtgatgtgggtcctagggagcttgggagtatgtcagagtcggaagcagtggactacgtcgctcggaagatgtggtaccctatttacagccctcttgtgagcgacaaataataaatccgaagatctcgatgcctgcgcagaagcagatgttccattgaaggaatgtatcggatttgatatttttcttaaccatctctaaattagctgctcatctagaaagcatttcggcagagattggtgcccacgcatatggctaatgtatggctacattcatttgctctagacatgatttcgtcaccaggggacactcagttttgaaccgttgagcttcatactgccacgggaaccgtatttttcatcattattgtaatataaggcgccggagtttctgtcctgaaaataagcatgagatcagaagcgatatgatatcctttttaaaaaaaaaacaaaaaaactcgacggggggcccggtacccaa

SEQ ID NO: 182023 - DNA, 792 bp, Zea mays
  Clone ID: MRT4577_97583C.1
ccaccgccacgcgtccatttgctctcgatgatgtattcaagcatgttggagataaagcgatatttgctagtggaagcccttttagtaatgtttctttaggaaatggtaaatctggttatgctaatcaagcaaacaacatgtatctatttcctgggtgcccggcatgtttcagatggcatgcttcaagcagcagctgagtgcctggcatcatacatcacagacgacgaaattcgaaaaggaatcctcttcccttcggtctccagtattaggcacatcaccgcacgtgtcggcgcagcaatcgtccgtgccgctgttgctgaagacctggctgaggggtgctgttatgtgggtcctaaggagcttgggagtatgtcaaagtcggaagcagtggactacgtcgctcggaagatgtggtaccctatttacagcccttttgtgagcggcaaataataaatccgaagatttcgaagcctgcgcaaaaacaaatgttccattgaaggaaagtatcggatttgaattttttttaaccatctttaaaataactggtcatttaaaaagcattttggcaaagattgggggccccgcataagggtaaagtatgggtacattcatttgctttaaacaagattttgtccccagggggcactcagttttgaaccgttgagctttatactgccccgggaaccgtatttttcatcaaaattgtaaaataaggcgccggagtttttgtccttaaaaaaaaaaaaaaaaaaaaaaaaaaaaaaaaaaaaaaaaagaaaaattcgagggggg

SEQ ID NO: 182024 - DNA, 456 bp, Zea mays
  Clone ID: MRT4577_97584C.1
ccggccggggatttctgagtaattcctcgaccatccctgcaaattaccggcatggctcctaagatcctactcatccttgtgttcctcctcgtgggctcaccggcggctctgctcgtctgcgatgtgatagagatgctggccgacaaacccacgtactccacgttcttgaaagtcctgcaggtcaccactgacggggtagacgccaatcggctccgctcggcgacgctactggtcggccccgtacaaacttgccaaacctctggcgtcgctgcccgccgataagccgccgccggagatggagaaccactttctgctcagctacttcgaccgcatcaagctggtctagattaatacacgcaccgccatgctccccaagctgctctccgtcactgacaagaaactcagcgtcctcaactacaccagtgtcgacgacggctagatggacttcggcgctcc

SEQ ID NO: 182025 - DNA, 637 bp, Zea mays
  Clone ID: MRT4577_97585C.1
ccggccgggctcgtgtgtctggaaaccctagccgccatatctcacgatccactcgagcaccaagccgagggaaggtgaggagcgatggcgcgcggcgtggtgtcggcgaagggcggcgcggtcgcgggcaagaagaagggcgtcggtttccttcaccatcgactgcaccaggccagcggaggaccgtatcatgtacgccgcctcgctcgaggagttcctagcatgagcgcatcctaggcgccggtccataatgttgtgctgcatcacttactccctctcgatttctcgctggaatactcaacaccccgttctctctgtctaccccttctccgatatatacctgctattcttgctcttctcgtacacgcaaacacgcaacatttacatctagctactaaggcagtgcttgctattgagaccttcctgcaatatcaccctccttcttcaccttggttcagacatctacgaggactagaatgaactattgctcgcttatactataagaatctccacgttgcgttgattcacctctacccgaacattctaccaatgaacgtgacaaggttggaaattatccacctgtgacagacatacaaccttcatgctctgaatccttgattttgtatcataggaagaa

SEQ ID NO: 182026 - DNA, 435 bp, Zea mays
  Clone ID: MRT4577_97586C.1
acacaaaacagcaccagagggatagagagagggcggcagtcacagtcaggcagtctgcaggcatccatggagtactactacgcctaccagcacagcagcagcggcggcttgagctcaaaggagaagaggccgccgctgaagcgggggcagctcaagcggcagatcgtgaggaccatcagcagcctcgtggtgccgaggcacgccgccgtcgctggcgctgctgctgctgctgggtcgagggagaaggaagatcgcggcagcggattcggcggaggacggagctacgactgacgatggatctctcggagaaggcgtgataagagatacgattcccagcgtcagtttgtgtgtacgtactacaactgatgaattagcttcgtagcagttccttttgtataatatgtacatcttgcggaatgaaagcttgttacattt

SEQ ID NO: 182027 - DNA, 679 bp, Zea mays
  unsure (1)..(679): unsure at all n locations
  Clone ID: MRT4577_97587C.1
ttgggaccctcgaggccggccgggccacggacagtgcccccgagacaccgccctccgcacccaccgcagatctcgccatggcggcgcgcacgtaccccaggtcgcagccccgtcacctttctctcccacctcgaactccgtccccaccgtagatcttgccataccggagcgcatcccccgacgtcctctcctctgtgcgtcatacatcactgcgcgtcatctacgcgtggtcctcaccccctccccccctccccaccgagacacccgctcgtgatgttcgggattccgcgcccaccgtcgagaggtagcgcgacgtcgcacttgtccgcgacgcgcctcagcttctggcgccagcgaagcagggacacgtcggcgtcggtggcgtggtgctgtgggagctacaggaggaggacgctcgcgagaggctggcccgggcgccgctccaccgccgcgtcgcgcacgcggtcctctgcttcctctcggcgctcctgctcctcgcccgcgcccgcggnggcgatgacgacgcgtgctcccacgcctgtgccgccgtccaaaggttcgagaggctggccagcagcgccgccgagatcctcaggtggtgtggagttcggcagcgcgccgctgaggtgcggcggcctgttcggcaacgaccccgtcgctgggaggctcgcgagttacg

SEQ ID NO: 182028 - DNA, 619 bp, Zea mays
  Clone ID: MRT4577_97588C.1
gccggccgggccgggacacacaaacagcccagagagatagatagagggcggcagtcacatcacagtcaggcagtctgcaggcatccatggagtactactacgcctaccagcacagcagcagcagcggcagcggcttgagctcaaaggagaagaggccgccgctgaagcgggggcagctcaagcggcagatcgtgaggaccatcagcagcctcgtggtgccgaggcacgccgccgtggctgggtcgagggagaaggcagatcgcggcagcggattcggcggaggacggagctacaactgatgatggatggatctctcggagaaggcgtgatcagagatacgattcgcagcgtcaggtttgtgtgtacgtactacaactgatgaatttcttagagcttagtattcactcagtttctttttattagtcactagatagtgcgaaattacactatccagcgactaataaaaagaaacggagggagtaatagcttaattatccttgttccccctgttgtactgttagcttcgtagcagttccttttgtataatatgtacatcttgcggaatgaaagcttgttacatttacattgaagagaaaaaaaaaaaaaaaaaaggccccta

SEQ ID NO: 182029 - DNA, 675 bp, Zea mays
  Clone ID: MRT4577_97589C.1
ctccggcccggccgggccggcgtcacgaacacgcaccagagagagagaggacggcagtcacagtcaggcagtctgcaggcacatccatggagtactactacgcctaccagcacagcaacagcaacagcagcggcggcttgagctcaaaggagaagaggccgccgctgaagcgggggcagctcaagcggcagatcgtgaggaccatcagcaacctcgtggtgccgaggcacgccgccgtcgctgggtcgagggagaaggcagatcgcggcagcggattcggcggaggacggagctacaactgatgatggatctctcggagaaggcgtgatcagagatacgattcgcagcgccaggtttgtgtgtacgtactacttgccgatgccgatgcaaaagcagcacgtagcgcatctgttcttcttagagcttagtaatagcttaattatccttgtttttccccctgttgtacaaaacaaaacttgcaggcttttttagatggttgatagagttttgttacataaatgtaatgttagcttcatagcttgtgtgaggtcatgtaaagttccttttgtataatacgtacatcttgcgaagtgaaagcttgttacgtttacattgaagagaacgacatgtttcacagcggaaaaacataaatcagggtggcggccaccctctgct

SEQ ID NO: 182030 - DNA, 208 bp, Zea mays
  Clone ID: MRT4577_9758C.1
gttggacaaacaagggacgcatgacacgggaaaaagacagaatagcgaaagcaaaacaggctaaggggacggcgccaggggagcgcagaaaaaggggggggttttttttttatttaaccaggtggagagaaaacaagaattacatagggtcaagtgtaaaacaagcccacagggggcaaggaccaacccatcaaaggaaaccaccaag

SEQ ID NO: 182031 - DNA, 1422 bp, Zea mays
  Clone ID: MRT4577_97590C.1
ccggccgggagtggatcccataactcaaaaattggcttaatacttggaacagttgggggaattttagggcttattatcgtgggagctctgtttctaatctgtaatgcaaggaggaaaagccatctgcgggaagtttttgtggatgtagcaggcgaggatgatcgacgaattgcgtttggccagctcaaaagatttgcatggcgagaactgcagattgcgactgataatttcaatgaaagaaatgttcttggacagggaggttttggtaaagtgtacaagggagttcttccagatggcactaagattgctgtaaaacgactgactgactatgagagtcctggtggggaggctgccttcttgcgtgaggttgagcttatcagtgttgcagttcaccgcaatctcttaagattaattggcttctgcacaacacaaacagagcgcttgttggtctatccatttatgcagaatttgagtgttgcctaccgcttaagagattttaagcctggagaagccatcctagattggccttcaaggaaacgggtggctataggtacagctcgtggactggagtatctgcatgaacactgcaaccccaagatcatacaccgtgatgttaaagctgcaaatgtattgcttgacgaggatttcgagcctgttgtcggtgattttggcctagcaaagctagtagatgtgcagaagacgtctgtgacaacacaagtccgcggaaccatgggtcacatagcacccgagtacctgtccacagggaagtcttccgagaggacagatgtttttggatatgggatcatgcttcttgaacttgtgactggtcaacgggctattgacttctcacggctggaagacgaagatgatgtgctattgctcgatcatgtaaagaagctacagagagaaggggagctggactccatcgtggacatcaaccttaaccagaattatgacggcgaggatatcgagatgataatacagatagcgctgctctgcactcaggcatcacctgaggaccgtccatcgatgtctgaagtggttaggatgctggaaggcgagggtttggcggaacggtgggaagagtggcagcatgtggaggtgacaaggaggcaagaatatgagcggatgcagcggaggtttgactggggagaggattcgttctacaaccaggaagcgatagagctgtctgcaggtagatgataatctgtggaaacggatggttgtaaatgcgcatcgaagtggtgcctgctgtgccgtatgtaactattatttgtagagtagctattagatagatatgttcataagattattcaaacaaacttgctcggcgatagcatgaatgtggatgaaattagatgcataaataaatggaagtgcatagattgaagtaactgtacttaatctgatggacatcgcagt

SEQ ID NO: 182032 - DNA, 342 bp, Zea mays
  Clone ID: MRT4577_97591C.1
gagcggcgccgcaggaccgaccggaaaccgggcgaccagcgccgacggaagaccgcgcactccagaaagcagaaagagacaaaccaggcgagggagcaagacgggaaaaccccaacgagcggggagaagcgaccggaacgaaagaagagaagaaagaagcaagcgagaggggacaggaggaacgggcacaaaaccaccccaagaaaaaaaaagagagccggaacaccgaagaagcagaccaaaccgcaccgaggaagaagaaaaaaagaagcaaagccgaaaagaaggaagccaaaaaaagaggaaggaaaagaaccaggaggacggcagaaaaacaggaag

SEQ ID NO: 182033 - DNA, 187 bp, Zea mays
  Clone ID: MRT4577_97592C.1
catagcactagtagcttattgatcttgtttactgactggatggtgattcgagcaggcaactagaacctgttggttgtgtttctggtgttacattgtggtgttagaatggtccggctgtttcgttttgagtcctgaccatttcaggtgtggtacgttgagatcagttaactgttcgtttttttttttt

SEQ ID NO: 182034 - DNA, 236 bp, Zea mays
  unsure (1)..(236): unsure at all n locations
  Clone ID: MRT4577_97593C.1
cactcatccnatttcttaatcttatatacnaanttttattatataatttctaaaanataaacatggctntttgtatttatttatagagacaatgtacataataaaatctttcaacttaatntttccaattttctctatcatttcaaatcatttttgtactgtttatcactttttttttttctttcatttacataaaaatactattcttcattctacaattccacacaatttctttt

SEQ ID NO: 182035 - DNA, 191 bp, Zea mays
  Clone ID: MRT4577_97594C.1
acgataggcttaaccacactaacacctactatttactctatctctctaccaatatacgggcacagtataatcatccttccagacaattactgtctatactccatctatcatttcaactttgctactgctgatgacatccagaacaccaacatcttctatatcctatgatctccatccatcctgacatctta

SEQ ID NO: 182036 - DNA, 465 bp, Zea mays
  Clone ID: MRT4577_97595C.1
ccgggggaccaaaaaaaatttttggcccgggaacaatttttttttagggagggcaacttttacgggggggcaaaacccacccttttttggactaagggccctgctaaaggctaattttggttattttttgccggccccgggggtccacccggaatttccggcccgtgccctgggggggtcccctttttccttttaggggggtttattaaagctgggggaaaatttgggtatagttgtttccggggggaaattgtttccccttcaaaattccccacaaaatacaagccggaagcttaaaggtgaaacccgggggggccttaggggggacccaccccccttttttggggtggggctcccggccccttttacaggggggaaacctgttcggccacttgttttaataaatcgaccacccccccgggaaggggggttttttatttggccccccggggggttttttttttc

SEQ ID NO: 182037 - DNA, 277 bp, Zea mays
  Clone ID: MRT4577_97596C.1
ttcccgggcatgtcgacccacgcctccggttcaactcatggtccaaaccttaattttttctagctaaagaccttcagcataggagcaatgaaaggagttagcttggttctccatggatcatctggtctatctcatgaactctctaaagaatgcatatacattttgctcgagaaaatttaatgtgaacactcatgttcttaacaactacctggctgttcctcataaagccccaaaaagactttattcaagtgatggcgtctgctaaatatgcatttaa

SEQ ID NO: 182038 - DNA, 322 bp, Zea mays
  unsure (1)..(322): unsure at all n locations
  Clone ID: MRT4577_97597C.1
caaactgcagtggctctgtnacccttccgcgcggcctgtgctgttcctgctgctcccactgccgtggcggatcatcgctgaggcgctcgcccgtgtgtcccggcgcggctgcgctcgcgcccgcgctctgcttcgcccacccactcgggggggtggggggcgtcgtcttcgttcccgcgcttcgctccttagttctggtggctggtctgcctccgttcctccctgatgtttctcgtgggccctcgcactggggctgagtcccttgtcctcgctggccttggcttggggctaagcgagctttcgctcgcggcgcctgacctgg

SEQ ID NO: 182039 - DNA, 346 bp, Zea mays
  Clone ID: MRT4577_97598C.1
cccacgcgtccgatcactcgcacatgcaagcgctcgaaaaatgcgactggaaaacaggaggccgctgccgtgttaaacatagatgctcctaaacaagccttgacccaaatcgaggattgcgcgaaggatgagcgaagagacatcaagagccagctcgcagactaccctactactgataacgctcctgctgttgatgagctgaccacacctatcatggtgcaatacagacactcgtatattcatccagccccaagctacaagaaacgctacgaaaaaccatgatctttatatcaactcactgctcatgcttatcgggagtgcaacttacaagctgattcgaagaccg

SEQ ID NO: 182040 - DNA, 2470 bp, Zea mays
  Clone ID: MRT4577_97599C.1
gaagcatggtgcacgtatacgccggccggggaagggcacccttctcttctctccagcggcgccgccttcgcccgcatagcccggagagagccgtcatccttacctgcgccgaccgacgcctctgcagcttctccaggggttgcccgttgaggagggttaggcttcgtcatgtcgaagtcggacctggacgatctgcttcttcaggccgccggccggacggggaagaaccagtcccggcctagcaatccgcggtggaactctggggggagcggctccgacggcttcgacgacgacgacgacgaagactctgacgccgcgccgacctactcgaggaagaagccttcgtcgcaggtaccgctcaagaagcggcacaagccggagaagggcggccggcgtggcggtggtgggtggaacgacgaggatgatgaggacgaggatgggcgtcggagtggcggggaggactcggacagcgccccttcagtggggagtgacctatacaaggatgaagacgacaaggagcgtctggagaacatgtctgagttgcaaagggagttgatcctagctgagcggggcacccgcctcgacgactacaagctcaagcagcgggcacgtgcgtcctcctccaagacggacaaggtgggtgcgccaaaggatagcagcccacccccaccgcctagccggatgcggtcttctacccgaactgacaagtctgggtccgccgctaagagcgcgctggacgagctgcgggcaaagcagcggatgcggcaacaagctccggaggcacgcaggttcacggatctactcccacatagtggctcatccattaggcgcagggctgggagcccaccaagtgatgggagcaacgatggcaataacagggggaggctgaatgaccatgggaggattgctggtgatggcagggatgatgaatttgatgaatcgccgagtaggcttgatccactcaagtttgatgatgtgaagagtattaccctcaggaggtcaaaactggtgaaatggttcatggagccattctttgatgatctaatttctggttgttttgtgcggctaggtattggcaagacaaagaatgggaccccgagttacaggctgtgcatagtgaggaacgtggatgcaagcgatccagatcggaattacaaactggaaaactactcgacatgcaaatatctcaatgttgtgtgggatagtgaggctaatgctgctcggtggcagatgactcaggtatcggactccccacccaacgaagaagagttcaaggaatggctgcaagcggcagagaagaatggtgcacgcataccgactcggcaggaagtgctggataagaaagaagccattcagaatgcctataactttgtgtattcagcagcaactgtacaacagatgctgcaagagaaatcagctgtgagacgacctatcaatattgctgctgagaaggatcggttgaggagtgaattggagatggctcttagccgtaggaacgaacatgaagctgagaggattcgtgtgaagctgaaaaatctgcaaagcaggccacaaccagtgtcaaaggataataaggctgcaaagttggaggctatgaaccggaagaaccgtgctgataacttcaagaacgcttcagaactgaaacctgtaaatacatctttgaaggcaggagaagctggttatgaccctttctcgaggaggtggacaagatcaagaaattattatgcatcgaagccaggaggagataatgttgaagaaactgccaatgggtccagtagtaatgtagagcctagcaatggagatataaagagcaaggctcaaactggtacagcagccacaactgcagctcaagtggcagcagctgatgccgggaagctcattgataccaatgcaccagtggatctgggaacagaatcgaatgtgatgcatacatttgagcttcctatatcattgtctgctctgcaagaatttggtggagccaagggcctgtttgatggttacatggcaaggaggcagaagatagaagctacaatggggtacaaggtgcctgacaacgatggaaggaggcatgctttaaccttgagtgtgagtgattacaaaaggcggcggggtctcctctgaatggtatctctgattgtgctggacgctcaacggattcaactatattcctggcgtcagcacctatgcattgctgtgacaattgtgcagatcatctgcattttgccttatcttcctagacgtaacataagacatgcggagtatacaattcttttgcataaatgttacctgatgtatgactgattatgttactgacatcatgtttatatccgtggattgtgtgtgtcatcatcatcatcgtatccttgttagctgcaaaaactggattccataattagttcaattaaaataaatgcagctttcatttttcggatcaaaaaaaaaaaaaacaagatataaacctaacccaaac

SEQ ID NO: 182041 - DNA, 546 bp, Zea mays
  Clone ID: MRT4577_9759C.1
gggggggtttttttttttttttttttttttttttttttttttttttttttttttttttttttttggggagaacacatcaagacccccatcaagaagggcaaaacaaaaagcagggacaatattcaagtcccccgccactgcaactcatcacagcggcggaaaggaacctcaaagcttaaagctaattctcaggagcatctttaggaggggaatcggccctagggcccctaggagcaggagttttgactggagcggctaaaacatccgcgacaatttcatcaaaaaccacgacaccaggtcttttcatcaaaaaacgacccgcacaaatcgccttatccatcgccttatcataccccgccttcaaaacttcatgggtaccctccaaaacctggatgttccgcttggggggatctaactcctgcgacaggaactttttcaaagtttggagggctctaatgatggaattcttggtaaaaagcgaactgctgaaccccaaaatttcctcctgggaccccttaaactcattccttttgcgctctaactcct

SEQ ID NO: 182042 - DNA, 313 bp, Zea mays
  Clone ID: MRT4577_975C.1
ggtggcacaagcgcaatggcaaagcacacgctcagcctgtgcgctgccatcatgctccgaatagagagagacagccagcccacacacggctgctggttctactcagtattttgcctagaaaattgagactatcatgtcacggcccctggtaaatctgctactactactacttgtatggtttagtaagtcggttgaagaggaaggggattaaggaagaattactgttgggctggcctattagggttccaagccgtgtaatagatccaggcgattaggtccagattagcatctataaatacctgcgacagcaacg

SEQ ID NO: 182043 - DNA, 495 bp, Zea mays
  Clone ID: MRT4577_97600C.1
ctttcatttgaacttcctatatcattgtctgctttgcaagaatttgtggcagacaagggcctgtttgatggtacatggcaaggaggcacaagataaaatctacaatgaggtacaaggtgcctgacaacgatggaaggaggcatgctttaaccttgagtgtgagtgattacaaaaggcggcggggtctcctctgaatggtatctctgattgtgctggacgctcaacggattcaactatattcctggcgtcagcacctatgtgcatttgctgtgacaattgtgcagatcatctgcattttgccttatcttcctaggcgtaacataagacatgcagactacaattcttttgcataaatgttacctgatgtatgaccgattatgttgctgacatcacgtttacatctgtggattttgcttacatcttatccttgctagctgcaaaaaaccggattccataattagatgaattaaattcaatgtatctttcatttttctg

SEQ ID NO: 182044 - DNA, 370 bp, Zea mays
  Clone ID: MRT4577_97601C.1
ggggaaaaatgaaagctgcatttattttaattgaactaattatggaatccagtttttgcagctaacaaggatcccatgatgatgatgacccacacaatccacggatttaaacatgatgtcagtttcataatcagtcatacatcaggtaatatttatgaaaagaaattgtttactccgcatgttttatgttacttttaggaagacaaggcaaaatgcagatgatctggacaattgtcacaacaatgcaaaggccctgaaaccaggcaaatagttgaatccgttgggcccccagcacaatcacagataccctttagaggagacccccgcgccttttgtaatcactcacactcagggttaaagcatgcctcct

SEQ ID NO: 182045 - DNA, 983 bp, Zea mays
  Clone ID: MRT4577_97602C.1
ccacgcgtccgctgaagcagaaaggattcgcgtgaagctgaaaaatctgcaaagcaggccacagccggtgtcaaaggataataaggctgcaaagttggaggctatgaaccggaagaatcgtgctgataacttcaagaacgcttcggaactgaaacctgtaaatacatctttgaaggctggagaggctggttatgaccctttctcgaggaggtggacaagatcaagaaactattatgcatcaaagccaggaggagataatgctgaagaaactgccaacaagtccagtagtattgtagagcctagcaatggagatataaagagcaaggctcagactggtacatcagccacaactgcagctcaagtggcagcagctgatgccgggaagctcattgatactaatgcaccagtggatctgggaacagaatcaaatatgctgcatacatttgagcttcctatatcattgtctgctctgcaagaatttggtggagccaagggcctgtttgatggttacatggcaaggaggcagaagatagaagctacaatggggtacaaagtgcctgacaacgatggaaggaggcatgctttaaccctgagtgtgagtgattacaaaaggcgacggggtctcctctgaagtgtatctgtgattgtgctgggtgctcaacggattcaaatatctgcctggcttcagcgcctctgcattgctgtgacaattgtccagatcatctgcattttgccttatcttcctataagtaacataaaacatgcgataaaacatgcggagtatacaatttctttcataaatattacctgatgtatgactgattatgttactgacatcatgtttatatccgtggattgtgtcgttgtcatcatcatcatcgtatccttgttagctgcaaaaactggattccataattagttcaattaaaataaatgcagctttcatttttcggattaaaaaaaaaaaaaaaaaaaaaaaaaaa

SEQ ID NO: 182046 - DNA, 1052 bp, Zea mays
  unsure (1)..(1052): unsure at all n locations
  Clone ID: MRT4577_97603C.1
gcatccgctgctttgcccgcagctcgtccaacgcgctcttagctgcggacccagactgtcagctcgggttgaagaccgcatccggctgggcggcgggggtgggctgctatccttccgtgcgcccaccttgtccgtcttcgacgaggacgctcgtgcccgctgcttgagcttgtaatcatcgaggcgggtgccccgatcagccaggatcatctccctttgcagctcagacatgttctccagacgctccttgtcgtcctcatccttgtataggtcactccccaccgaaggggcgctgtccgagtcctccccgccactccgacgcccgtcttcgtcctcgtcgtcctcgtccttccacccgccactgccacgccggccgccctgctctggctggtgccgcttcttgagcggaacctgcgacgaaggcttcttcctcgagtaggtcggcgcggcgtccgagtcgtcgtcgtcgaagccgtcggagccgcttcccccagagttccaccgcgggttgctcggccgggagtggttcttccccgtccggccggctgcctgcagaagcagatcatctaggttcgacttcgacatggcgaagcccgaacctcctcctcctcgtgcaacccctacacaaccaaaacaaccccataacaaaagatccttccacacctccgaaaacctagataaaacaggaaccgtcggtccgtcctggatctgtgggaggaaccacagctcgcagcagctccgaggaggatggataggacacgcacctggagaagaggctacagaggtgccggtcggcgcaggtaacgatgacggctcaatgcggggtatactggcgaaagcggcgcggttgatcgacgggacggagaagccgccggaagagaagaggagatggtagcgccggccctaaacgcgtcgaagtgtgagaagacgacgattatgaggatcggggtgggccgntgagggcattggtggcctgacctgctatatacatgtgccccgcaggccgcacgcaccctgtggctcagacgaacattcggggttttttttttttt

SEQ ID NO: 182047 - DNA, 297 bp, Zea mays
  Clone ID: MRT4577_97604C.1
gtgcacatatcacaatgccattgtccattcagtaaaccaaacaacaggaatcttccgggggccacgaaagaaagccccacgggcgggaaagaccccccggaataacaccaagatgggaaaaaccttggagaaggctgcaacacgcatactgcgtgcacgcaggcactctcgagagaaacaaaagtgaccccaggcgctgttctggcccaccaaaacgaggaccgcggccgagacggcctttttaaaagccaccacaacccgattcccggacaccctccgcaacgagcggcccgagaa

SEQ ID NO: 182048 - DNA, 424 bp, Zea mays
  Clone ID: MRT4577_97605C.1
cttcccaccctcaacagcgaagagcacacatggataccgccgtcttctcccccgccgatctctgtgcacggagtcgacgacagcgacgacgaccgagatgagatgcaaatctgctccgatggggagaagccggtggcgttggagtatcaggagagagtccacgacttccctgacatggtaagacttccacgattcggccgttttggctcgcatctgtaggaacggtgctcctctggaacccggaaaggcccgggccttgaagcacagtattatctaggtttcttgccttctcgggtttcagtttggattttccttatattagagaatggatgaacaagtaatacctagatgggcagaaacgagtaaagaatattttggtatttcgacgtgctgtggtatttttcttatgggcaagacagtagac

SEQ ID NO: 182049 - DNA, 538 bp, Zea mays
  Clone ID: MRT4577_97606C.1
tagaaaatttgccccaaaacctgtctatctctaaaaaatggtataggagcccagttcttcccagaatttttatctatccctgcgtggcgccatggccagccctctctctcctaccacgagtccacaactccagcgtacggcgccgacaggcggctgcacgcgactggcgtgcagcagccgcggcagcagcgaacgcgcaggaggaggagcagacggcacacaacacggctgcggctcgggaggagcgcatcacagcagcagaggctgcagtggcacgcgcggctgagacatcccgccaggccatgacggctgctgctgccctgagcgcagacgcaggttagcgggagcaagacgccatggccgagcggaacgcgagcgcacagggcctttacaggcaccagcgcgtctctcctttcccagagcgggcaccatggccgggacgcgccggacgtgggcgcatggagccctcaagcaccgacatgtctctcattcctcagagaaacaccctggccaccatgggcggcacaagcttcccgtc

SEQ ID NO: 182050 - DNA, 1214 bp, Zea mays
  Clone ID: MRT4577_97607C.1
gaaggatggtccgggaagccgttggcgccgatgggttctcgttcagcacagtcctttctgggctggcggtgaccgcgagcttggcgagcggtctgcaagttcacgcccagctcgtgaagagtggcttttgtgacgatgtgtgcgtggggaactccttggtggagatgtatatgaagagcaaatgcctagcagatggcgtcatggcattcgccgagatccgctgcaaagatgttgtgtcgtggacagggctcgccgctggatgcttacactgcggcgagcctgccaaggccattggcattctcggtcagatgatgctggacggagtcatgcctaacaactacacatttgcaacgtcagctaatgcctgcgcgagcctcaccgatctggatgaaggaaggaaagttcacgggtatgtgatcaagctgggagacgactcagacgttggtgtcaacaacgcgctcatcgacatgtatgctaaatgcgggtcagtggcctgtgctcacaaggtgttccagtcgatgcaacagcggccagtcatctcctggacggcgatgatcatggctttcgcgcacaacgggcgagctcgggaagctgtggaggtgttcgacaacatgctgctgagaggtgtagctcccaaccgcgtcactttggtctgcgttctctatgcctgcagccaaggtgggttcgtggacgagggttggatctacttcaacgccatgaaggacaagtttggtattcagcctggggaggaccactacgcctgcatggtcgatctccttgggaaagcaggccaaatcgaggaggctgaagagctgatatcagggatgccattccggcctggcgtgctggtctggcaggcgttgcttggcgcctgtcatcttcacggaaacgaggctgtaggcaggagggctgcagagcatgcgcttgcgctcgagaacgatgacccgtcgacatacatgctgctgtgcaacacgcttgccggccagcacgattgggacggcgcacgaagtgtcagagtgctcatgggatcacaaaccctgaagctgcccgggtcttcatggtttcagtccatgtctgacagaagccaggcatgtatcagatgaactctgttctgatggaatggaagctagttctgtattttggctgaatgcatcaagctatggaaagaagccagttctgtatttcagttcataattccatatgatgcgcttgat

SEQ ID NO: 182051 - DNA, 366 bp, Zea mays
  Clone ID: MRT4577_97608C.1
cccacgcgtgcgcccacgcgtccggttacgcgtggggtcgcccgtcaccgcaggtgcgagatccatgttgggatccagcataaggacactaaggaagactccatgaagtggttccaggtcaagttccagggtgtgatcctcaacaaggcctaatccaacacctcctaagcataagcattaccataagatattagactctttaggtctctagtagagctactagttaatggagtatatctggcagtaggatgtgtattagaagataatcagatgcgtcatcattgttgcctgtactggtcctactggaactagttggatccatgttgtagagagtgtcgaatacattgatgttactactgagctacc

SEQ ID NO: 182052 - DNA, 547 bp, Zea mays
  Clone ID: MRT4577_97609C.1
aaagaatgatgatgggcatctgatattattgctagcattcaaaaaatcagaatagccgccgaaagggatgcaagtaaaaatcattcaagggggcggtatcggtgacaacactacagcctttatacatgcccaggcctaagaaaaacgaccaaagagaaaaaaggagccgtaaacaggaactaggtgtggagttacagttagtaatcagccattagctttcatattctgatatcactgcatctgctgggccatcacctggactcggttgtggcccctctagtctggttaaaacatctggtgctccagcagcgtccctgataatctgaaaaggatgacaacaaaaccgtgataaattgtgaaattttcctccatactacagaattaatattaggtaaagtaacatgaggtttgaactgttcatttgcattcatgcagcatgggcaaataaacaatcacagtcgaaggcttcaaggaagaccggaagagtcattcctggcaatcaggtggacaatgacagtgacagggagagccacgtcagaatgatgag

SEQ ID NO: 182053 - DNA, 2566 bp, Zea mays
  Clone ID: MRT4577_9760C.1
tcgggcgcgcgtccaaaaaaaggttccggtcttcatcccttccatttccaaaggacgacgctctcaccattcacgaacggcgactgcggatcgatcgtgcgtcgtctcctgcgccggcctctcttcaagtcagccaagggtcgttttcctcgcttcactgagtctctcacaaacactaatcgaaatttgatttattaacacacatggcgtcattttcaagttcccaagcagcccacagattctattgattgtgggtgtctttcagcatctgagggtttctaccagtccaggttacacacaagcttcaaattatcgcaaaattcctcttacatatctacatctcataccggaccaggtctcataccggaccagaaaaatggaatacactttattacctgatttagcaccgcataagatacatgcaaagattcaagtacatgtatctagaaagtggcttttccgaggtgctactgatagtggaccactacaacatgttgatatggttttgtctgatcgagagggtaatgctatttatgctgaaatccctggaaatttagctgaacaaaaagcaacaaatattgaagaaggaggagtttatgatatcaacagattcagagtgtgcgcagcaaaaactgttttcaaaatagtggatggggacaaaatgatccaattcacatttcataccatagtaaaatgtgccacaagccctccaacaacatttccattatatgtttatcggctaacatcatttgatctaattgagcctcatgttcaaactacaaataactttgttgatgttcttggtgtcataactgaaattcatgaactgacacctgtgcatgtccgaagtcaactaacaccaacagtgacaaggaccattatcatagaagatctcaggtgtctacctaagtggtggtcctgcctgtagatggtacttcaatccaacaattccagaggcagaaccttatcttaccagccagtctacaaaaagaattgtgttacagcttccccaaaatttacaacatcctccagcgatggaaacgaagccaattgtcgaacataaatccctctatgaacttcttacagttaacccatatgatttcccggaaacaggatttgaatgtactatcacaatagcagaaataccagctgaacacaaatggtggtttccatcttgcacaaaatgcaataaagcaacaatccctcacactacaggttatcactgtgaatcatgcaattgggatggatacaaatttaaatacaagctcaaattcctggcatctgatgaaacagatattgcagaaatgttttgttttgacactgtagcaaggcacatcgttgttgcccaaacgtgttccgcattaattctattgttgctgcacatgggagacaacgttctttaccaatgcaaataggaatttctgatcaacaaggaccatcaacacctcaaaacaaatcaaaaccgatgttattggaagactctccatctacaactttggaaaaattatctactacaactcctacaactgtagtaaggaagcttctatattccgaaactgacaacacgccgaaaacgcactcaatttcttttactcaattatcttttattcattataagatttagtgagtattgacagttaaaaatacttatatttgttccatgttgacagtgcaaacaagagtaatatcaatagcccagaaaaagatgatggcgataaggaaaccgcacagcttgatacaatacccactaacaaaggaaaaggaccagcagatacaattgaatcgccacctaaaaggttcaaacaagggacgatacgcatcggaaaagaaatggacatcaaatcctccgagaactaaagtttcactcagatcttcgtcgaccttttgagttgcacaatgtctattttgcaacatatgtataattatatatgatgacctactcagctctttgaaaacaatttatgtaaatataacagcctaattctacgtagtggacaaaaatgttgactctgattacagctcagataactctatttcatataaacatatagcatctgcagtaattaaattagaaaaaatttctaacgcgcgcagggcgcgcgccagtgactagtatttgttaggtcctcgcagatgctagcaagatgatagtgttgtagcatggaggaccattgtctctagtgtctgaaatacgagactggcatgcaggtcgatgtctgagcacagagctcggaagatgtgcgtatcaaccaataggctgtggctgtgcctgcaagatgccctgaaggacgcgcttcttgaaaagtcagaactgcaaaggtgcgcaaaccaaacctctgattgaatgcttccatggctcatagtccctagattcttgtctctatctgatagcccattgtttaccattgtccgttcatgtgtcagctttgctgcatctgatcacaatgatctctcagcttgttgtaacatcgtcttgaccattgtccattgcgctcatatcagctacatacatggttgaaaaacttgttataaaaatgtgccatttcgaaaaaaaaaaaaaaaaaaa

SEQ ID NO: 182054 - DNA, 842 bp, Zea mays
  unsure (1)..(842): unsure at all n locations
  Clone ID: MRT4577_97610C.1
gactacgctaaacccaacctcccagccgttgaaccagaatccaaggcccgataccctccctggtcggccggggttttaacgcggtcctctcgaatcctcagttccccttcccggtccaaggagagcaacttcgagaaggaggcggcgagggcgagcagggagcggaagagatggagaacggcagcagcaaaggcgacgtcacggaggacgccaacgctcattgccctggaacacagtctgatgaggcggggaaggccgattcctgcgccggatgccctaaccagcagatttgcgccaccgcccccaagggccccgatcctgacttggttgctattgctgagcggatggctactgtgaaacacaagatactggttttgtcaggaaagggaggtgttggaaagagcacattttcagcccagctctcatttgccctagctgaaatggaccatcaggttggccttctcgacatagacatatgtggccctagcatcccgaaaatgttaggcgttgaaggccaggatattcatcagagcaaccttgggtggtcaccgatctacgttgagtccaaccttggtgtcatgtcgattggttttatgctgcctaacccagatgatgcggtcatatggaggggtcctcgcaagaacagattgatcaaacagttcctcaaggatgttgactggggtgagattgactaccttgtagtggatgcaccccctggaacatcagacgagcacatctcaatcgtccagtacctaanagccacccgaagttgatggcgcgataatcgtgacgaccccgcagcaagtctctctaatggacgtgaggaaggaaatcatttctgc

SEQ ID NO: 182055 - DNA, 240 bp, Zea mays
  Clone ID: MRT4577_97611C.1
gcttgctcaagggcgttggtctcaacgataacatgatctatataatcaccagcactgatgctcggttcatccaaaacccctggctaaaggcgagctacaagcgaactacatgacatttacagcccatgctagcataatggatcagagtggagggagctcccctatcaggaaggatgagaacaaaggcaatgcccctgcgaggctggcagtagggcaccaaacacacagcttgagccgaat

SEQ ID NO: 182056 - DNA, 155 bp, Zea mays
  Clone ID: MRT4577_97612C.1
cgtcttatgaatagccggaaaagtctttaagtaattccaagacggagtcctgttatatgacaatagactggatgtgggcgtgactctcagacaattaaccaccagcgcggggacacaacacacacgagcgaatgaacgaaacctgcataaaacca

SEQ ID NO: 182057 - DNA, 176 bp, Zea mays
  Clone ID: MRT4577_97613C.1
gacgacccacgcgtgcgcaagaagctagataagatgctcgccaagaagtacctctctattttggcatcaaaggccatcagggggcatttttccccgggcttctgcccccaaacctcaacaaggcaatcaataatcctaccctgagcactcaccacgaacccctcgaatccaaagag

SEQ ID NO: 182058 - DNA, 336 bp, Zea mays
  Clone ID: MRT4577_97614C.1
cccattaaaccagggggttttttttttttcttctaaaacattttcttttaggaaacaaaaaaaaacgggctaagaccttgttcttctagtaaacaaacagaattcggttaaaacaaaccaagggagcgggggcccaatatttacggaataatttttggaagggaaaacgggggaaagggtttttgaaccaaagaacagtaaaaattcacccggggccggcctcctcaataccgcccagctattacacggcccagcttaattctttgggatccctttggctgatttttcccggcgggaaacacattggccaaaagggcgcacttggcaccattgggg

SEQ ID NO: 182059 - DNA, 2361 bp, Zea mays
  Clone ID: MRT4577_97615C.1
aaagttttcgttttgctataacgaaagatggccgggctcatcgttgcttttgcgcgtagcagggatgactgactgggaggaggagggagacgagaacgtgatgccgtgccgcccgcccgcccgcccgcccttgggctcgcttcaccttcaattcttttctttctgtcgcggccagcgccttcgcatcgcaccacgccgctttattctctaagaaccccgtcctctccattccatctcctcctccgtccatcgtgcagatcttgcttcttcgtcttctcctcttcctcctcctcctcctgaccaccctcctgctcagctcgtcgtacgtagacatcgcgatcgccgacgtcgatcggtctcgccaattaagctcttgcttcctccgttcttttctggttcggtttgttcggtgctctccctctacgtgggctgcgtctatatatatgctgtgttggcgccagctgcataaatggcgtactcctcgcggacttgtggtcggtgcaacaaccacgagaggagatccggtttcatgaagtggctctgcaatttcctcaaggggccgaagcccggcgagccgaaccgccggcggccccaggtgacggccggagaggaggaggacgcgctttggcaccaacgaccagttcgaccgaagaatgatccacctagaaatgacaacgaagaagtggaccgtgcaattgcagagtctctcacagaggacgtcagaacccccaaagagaaaacccgcaagggagacaaggacgacgaagatcttgcgagggccatacaggacagcctcaacatgaacccttacacgccttacaacccctatgctccctctcacgcccaacctagagggcacaggctgtgcgcaggctgcaagcatgagatagggcatggccattacttgagctgcatggggatttactggcaccctcagtgcttccgctgcaactcctgcggccaccctatccgtgagaccgagttcacattgctgagtacagatccataccacaagctgtgctacaaggagctgcaccatccgaaatgcgacgtctgccttcagtttattccaacgaacaggagtggcctgatagagtacagagcccacccgttctggggccagaagtattgcccttcgcatgagcacgacaggacgccacgttgctgcagctgtgagaaaatggagccaaggaacacaaagtacatgtcactgggagacggccgcagcctgtgcatggaatgcctggggtctgcggtcatggacaccggtgaatgccagcccctgtaccattctatcagagactactacgaggggatgaacatgaagctggaccagcagatacccatgctcttggttgagcggcaagcgcttaacgaagccatggaaggagagagtagaggcccacaccacatgcctgagacaaggggcctgtgtctgtcggaggagcagactgtgagcagtatacttaggaggcccagaattggtggaaaccggttactggacatgagaactcagccacaaaaactgactaggagatgtgaagttactgcaatacttgtcttgtatggcctccccaggctactaacaggatccatcctcgcccatgagctgatgcacgggtggttgcgcctcaaaggttaccgaaacctaaacgcggaggttgaagaaggaatatgccaggtcatgtcttacctgtggctggaatcagagattcttccgtcgtcctcaaggcacgcgcagccttcatcttcctacgcctcgtcctcctcttcgtcttactcttatccaccgacatcgtccaagaaaggtgggatatctcataccgaaaagaagctgggcgagttcttcatgcaccagattgcccatgacacgtcgacggcgtatggtgacggtttcagaactgcgtatgctgccgtcaacaagtatggccttcgccaaacactgaaccacatacgcctaacaggaggactccctgtataataagagagagagagagagagagagagagagagagagagagagagagagagagagagagagagagagaagacaaaatgtccatgccagacgcaacacaaagatcacatggatatcaaaggttatatacatattgagatgaagttgctggctatggaagcatggtgattcagtttcggtgaccttgagttttcaaagaggtcctgtcggagtaaatcaggaaaaagagctgtatttgctcggattaataggaactggcgatgccatgtgtaataagatcgccaaaaagcacacactaatgtaatgctctgttactcacactaatataatgaagtgtatacttatgtgtctgcagattttcaaccataaaaaaaaacccacaa

SEQ ID NO: 182060 - DNA, 1344 bp, Zea mays
  Clone ID: MRT4577_97616C.1
cgaacgggagtggcttgatagagtacagagcccacccgttctggggccagaagtattgcccttcgcatgagcgcgacaggacgccacgttgctgcagctgcgagaaaatggagccaaggaacacgaagtacatgtcgctgggagacggacgcagcctgtgcatggaatgcctgggatctgcagtgatggacacgggcgaatgccagcctctgtaccattctatcagagactactacgaggggatggacatgagactggaccagcagatacccgtgctcttggttgagcggcaagcgctcaacgaagccatggaaggggagagtaaaggcccacgccacatgcctgagactaggggcctatgtctgtccgaggagcggactgtgagcagtatacttaggaggcccagaattggtggaaaccggttactagacatgacaactcggccacagaagctgactaggagatgtgaagttactgcaatacttgtcctgtatggcctccccaggtctggcaattttatctttatatctggaggacatcacttttttgtacctacccggctacccgattcaaatactgcggttcttctcatattctgtgaccggtggtgtcatcgtttgtgtcacaacgctattgcaggctactgacaggttccatcctcgcccatgagctgatgcacgggtggctgcgtctcaaaggtacatggatggatggacaaaacatttcgtacaaccatttatcatctttatttatgaattttaggttccatcctcgcccatgagctgatgcacgggtggctgcgtctcaaaggtacatggatggatggacaaaacatttcgtacaaccatttatcatctttatttatgaatttcttggaaagctctaccggatcgtacttttcattcaggttaccgaaacctaaacgcggaggtggaagaaggcatatgccaggtcatgtcttacttgtggctggaatcagagattcttccgtcatcctcgaggcacgcgcagccttcatcatcgtcctcctcctcatcctatccagcaacatcatccgagaaaggtggaatatctcataccgggaagaagctgggcgagttcttcatgcaccagattgccaatgacacgtcgacggcctatggtgacgggttcagaactgcgtacgctgccgtcaacaagtatggccttcgccaaacactgagccatatacgcctaacaggaggcttccctgtataataagagtgacaaaaaagacacaaaatgtccatgcatgatcatatcgatatcaaaaggttatatacatattgggatgaagttcgctatggaagcatagttttcagtttc

SEQ ID NO: 182061 - DNA, 307 bp, Zea mays
  Clone ID: MRT4577_97617C.1
tatactctagcggagaagaggtcactatgaaacgcgttgtgggactgttcgggtgtagaaaatgaagagggtgagaaaggacgagttgaacatggaggcgctgcatggagcctgggctttatagatagagttggaagctgccaaaatatagaatcttttgattcccacaagaatttctgtggtaccagacatcatcttcaataacatggaatatgttagattgtctataaaacatgacttgtacgactataaattcattgagcttataatagtcaaccactacgaatgctgggattcgtacaggacc

SEQ ID NO: 182062 - DNA, 229 bp, Zea mays
  Clone ID: MRT4577_97618C.1
atactattatggcgtgacatcagcttttatttttatcaattaggtagaatattcccacggactcccaacatacacttgctaaacatcaaggacagccccccctcaagcctgatgcccaacagattgtccaacggggtatggcgcccaaatggagcttttgttggccacacaccattcgagagcatttttggggcctcgtcaaaatggaaagcccttgccctaattcaag

SEQ ID NO: 182063 - DNA, 423 bp, Zea mays
  Clone ID: MRT4577_97619C.1
ggggtaaaaaggaaaaccacaaaacacaacggggacgaacagatctaggcaaacggggggggggtaaggccaaaggggcgacaaaaacccaaaccggcggggggagaaacccccaacccgccaagcaaaaaggtccccccccgggggcaacccacagccaactttcacccgggaaaaaatccccggggggcgggggtcccatctaggggccccaacaggggaaggggggaaaaaaccccttggggagggggggcttaaaaaaatttttgccggcccaacgctaaaggggaaaacatcttcgccaggggagagggtcccagccctctgccaaattgggggggggggggcccaagggaccctgggaaccacccaatccttgcagggggtccaggaaaaaacaaaaaacttgccgggatggccccc

SEQ ID NO: 182064 - DNA, 1811 bp, Zea mays
  Clone ID: MRT4577_9761C.1
tgagtttgccatcagaacaaggagaaaaaaaggttccggtcttcatcccttccatttccaaaggacgacgctctcaccattcacgaacggcgactgcggatcgatcgtgcgtcgtctcctgcgccggcctctcttcaagtcagttcccaagcagcccacagattctattgattgtgggtgtctttcagcatctgagggtttctaccagtccaggttacacacaagcttcaaattatcgcaaaattcctcttacatatctacatctcataccggaccaggtctcataccggaccagaaaaatggaatacactttattacctgatttagcaccgcataagatacatgcaaagattcaagtacatgtatctagaaagtggcttttccgaggtgctactgatagtggaccactacaacatgttgatatggttttgtctgatcgagagggtaatgctatttatgctgaaatccctggaaatttagctgaacaaaaagcaacaaatattgaagaaggaggagtttatgatatcaacagattcagagtgtgcgcagcaaaaactgttttcaaaatagtggatggggacaaaatgatccaattcacatttcataccatagtaaaatgtgccacaagccctccaacaacatttccattatatgtttatcggctaacatcatttgatctaattgagcctcatgttcaaactacaaataactttgttggtgtctacctaagtggtggtcctgcctgtagatggtacttcaatccaacaattccagaggcagaaccttatcttaccagccagtctacaaaaagaattgtgttacagcttccccaaaatttacaacatcctccagcgatggaaacgaagccaattgtcgaacataaatccctctatgaacttcttacagttaacccatatgatttcccggaaacaggatttgaatgtactatcacaatagcagaaataccagctgaacacaaatggtggtttccatcttgcacaaaatgcaataaagcaacaatccctcacactacaggttatcactgtgaatcatgcaattgggatggatacaaatttaaatacaagctcaaattcctggcatctgatgaaacagatattgcagaaatgttttgttttgacactgtagcaaggcacatcgttggtaaatcctgtgagattgttttacgaagtgtcactgaacagtctcctatcccacctgatctagcacaaatcatatctctgaaatttacattcagagtcacaattgacaatcaatctcttttccaacaaaccagttgcccaaacgtgttccgcattaattctattgttgctgcacatgggagacaacgttctttaccaatgcaaataggaatttctgatcaacaaggaccatcaacacctcaaaacaaatcaaaaccgatgttattggaagactctccatctacaactttggaaaaattatctactacaactcctacaactgtagtaaggaagcttctatattccgaaactgacaacacgccgaaaacgcactcaatttcttttactcaattatcttttattcattttaagatttatgcaaacaagagtaatatcaatagcccagaaaaagatgatggcgataaggaaaccgcacagaacttcgatatatgcagcttgatacaatacccactaacaaaggaaaaggaccagcagatacaattgaatcgccacctaaaaggttcaaacaagggacgatacgcatcggaaaagaaatggacatcaaatcctccgagaactaaagtttcactcagatcttcgtcgaccttttga

SEQ ID NO: 182065 - DNA, 181 bp, Zea mays
  unsure (1)..(181): unsure at all n locations
  Clone ID: MRT4577_97620C.1
aagtctcctcccatctccgccctggcccccttttaaacatccccgcggcgagggagctgcgggtcgcccactaacccgccagcgggggcgggggtgtggcccngntccgggcgccccggacctggccctgcggaccaaagggctgatggagcaagccgattccggcccagtgaaggaggcc

SEQ ID NO: 182066 - DNA, 1694 bp, Zea mays
  unsure (1)..(1694): unsure at all n locations
  Clone ID: MRT4577_97621C.1
tagattcattctggtggatatttgggagaatggaagatggttgttannacggcacatttgagcttatacaggatgagagcaaggctggtgcttgcctttggataacaaaacgacgagggatggagtactggccaacaccagaagaacaaagaaagtatatggtgaatcctaacaaatcaaaaaggatgctgacaaacaatatatatcctagcatccgaatgcctgaattctttgagaagatagttgttcacacactcagccataattttcgcaatgctacaagacttgagcgtgtgcaactgagatttcctatcaaagcgcatagtgctctggttaaaataatatatgctggcgtaaatgctagtgatgtcaacttcagttcaggacgttattttagtggtaatcctaaagaaactgcttcacgccttccatttgatgctggttttgaaggtgtgggaattgttgccgctgttggagattcagtcagtcatatcaaagttggcactcctgtggcacttatgacttttgggagctatgctgaattcacggaggttccagccaaacatcttcttccagtgccaagaccagaccctgaggttgttgcaatgttgacatcaggactgactgcatcaattagtcttgaaaaggcaggacaaatgacatctgggcaagttgttttagttacagcagctgctggtggaacaggacagttcgcagttcagctggcgagattagcaggcaacaaggttgttgccacatgtggaggtgaaagtaaagctgaacttctggcttccttaggagttgatcgtgttatcaattacagaaatgaacgagtcaaagatgttctgaagaaagagtttccaagaggtgtagatatcatatatgaatctgtaggtggggaaatgtttgacttgtgcttgaatgcacttgcagtccatgggcatctcattgtaattggtatgatctcccagtatcaaggagaggatggctggaagccaaagaactacactggactatgtgagaagattctagctaaaagtcaaactgtggctggatttttccttgttcaatatgctcacttgtggcaagatcatcttaacaaactttttgacctgtatgcctctggaaagctaaaggtttccctagaccccaagcaattcttgggtgttgcttcagtcgtagatgcggtcgaatatcttcattctggcaagagtgttggcaaggtcgttgtgtgtattgatccatcatacggtcagatcgttgcaaaattataatccatggacatgatgcgcattgtcttccatggtcacgtaggttactgtcttatagttacacatatacctcaagaccgtattttcccagcgggtgacaaatgaataagggaacatgttggtgtatagtttagtttcatttttccaaagtgtaagatgcacaactatactgaagggcaagcatgggcatggaaatcgattaagtttctaatcccgtgcagtaggatatgcattcgagtggcctcgttccacgttttgtgtatacagtatataaacttgtctcagtgccacatgcttcaattcgaaccggtaacaataattcaaacagttcatgcagatgcattctcaaacacactccttgggccatcgatcttttcttttgaagaaaatttgtttgtgctataatataatttccttgtttgt

SEQ ID NO: 182067 - DNA, 557 bp, Zea mays
  Clone ID: MRT4577_97622C.1
attggggtctttcaggtctcattgcaagcacgatcagtttcccgctggaagtagcaaggaagcgactgatggtcggcgctctgcaggggaagtgcccgccgaacatgattgctgctttgtcagaggtgatccgggaggagggtttcctggggctttaccgtgggtggggggcggcctgcctgaaggtcatgccaaattccggcatgacctgggtgttctacgaggcatggaaggatattcttctgtctgacagggacaggcagcacgcttagcgaacaagctgtttttgaacaatggaggcgttgtcgtagatggagtttgctcattttactgggagttctgaaccattttcagttttgggaatgggtaagataggatgtgtttctcttttcggctgagtggaagcatttgctgtgtcatcaactctgaatctgattgatttataggttaagaaacggacttcatgaactcctaatgtatatctatcatctatgtatcctatataagtggaaccgctaagtgtcttctctggactattgtttagctaatcgagctga

SEQ ID NO: 182068 - DNA, 833 bp, Zea mays
  Clone ID: MRT4577_97623C.1
cctcgaggccggccgggactcagtatcagcaggcgtcaaagcagatttgtagacacagaccttctccaagtccaagcaatggagagtttcgtccagaagcatgtcgttggagttccattgacttcatttgcatacgccgatgaggaaagacgaggaaaaccttcctgttccgccatggttcataagaaaaataagaagggttccttcatttgctggatgaacaaactgagccacaaaacagataactacatgcaagggttcaaagaacacttgtctctgggaccaaaagtttcagaaactataaaagggaaactgagcttcggtgcgaaggttctccaagccggcggcatcgataaagttttcagagaatacttcacagtcgaggaagatgagaagctactgaaggccttccagtgctatctttcgaccacagccggtccgatagccggaatgcttttcatctcaactaagaagatcgctttccacagcgataggcctttgaatctattgtctcccaaaggaggcaggacaagggtgccttacaaggtgttgatccccacgaagaggataaagagtgcgtcggtgcggggaaatctatacaatccagacgagaagtacattgatgtagttactgttgatggcttcgatttttggttcatgggctttgtcagctacgagaagtcattcaggtatcttcagcatgcgattctggagctgagatgatgcgcacagatttgtaacctgaaacatcgtaggtaccatgtcgatatggtatatgtacattgaagagatagaattgatcaatccccttgattgggagcaaagcttttacc

SEQ ID NO: 182069 - DNA, 431 bp, Zea mays
  Clone ID: MRT4577_97624C.1
ggaagaaaacactttattcagaccccaaacagggggtggtacagaaacaggcccaagctttttaacagccatatacagggccgggggactgggactaacaacttaagggtgggaaaaacattaagttggcaaaaaagaggggtttagggggggccggacatacaggtttaaaccagttccgggttccagccgttttgcagttactgcaaaacctatataacgaagccctataagacttgccaactggggagagccaggggggaatccgaagcttataacggggggccctacaggttttatttttcagtagaaccaatgggtcccgtcgtttttttgcgccgggcctgggaaataaggggggggggggctagacatgttgaaaccagagccgaacctgaactccgcgggctggggatgtcccccatctggct

SEQ ID NO: 182070 - DNA, 297 bp, Zea mays
  Clone ID: MRT4577_97625C.1
tcgcgggtcgatacacgcgtctaaaggaagtcatctcaagccagtagcactaacagactggtgataggtagacatgatatgttacttcgctggcgaaagttttcatgagtcagcgctatttggaggggattttaacattcattctttggtgtagagccattcgtcttattattacatcatttaattcattcttggtaaaaaaaaaaaaaaaaaaaaaaaaaaaaaaaaaaaaaaaaaaaaaaaagaaaaaaaaaaaaaaaaaataaaagaaaaaaaaaggggggcagcccaagaggt

SEQ ID NO: 182071 - DNA, 846 bp, Zea mays
  Clone ID: MRT4577_97626C.1
atgcgtcagctctcgtacctctctggtctcgacggcctggacgacggcgtcgcggactgcgacggctcctgcggcctccgcgacgacggaccgccgtgcctcctccacagcggtctctgctgccccatcggtccgctggacgacgaaaccgacaccgtcgccatagcaatcgacaacgacaaggagttgttgcaggaccttgccgtggccgccgggcgcgttgccgcctccccgctgtcgtcgggcaatagcccatccagttcggcggtcgagaccacgacgacgctgccgccgacgccctggcgtttcgtcgtgcccaggaggaaacggaggaaacgacgggaccgcaggcccgtcgtcatgcgcggcagcattaggccaggcatccctacacttcacgcggcggctatgtcgtcgtcttcgtcgtcgtcgggcaataacaggccatgcagtttgacggccgagacgagttcgccgccgcagctctggcgtcttgttgtgcccacgaggaaacgggacagaaggcccgtcgtcatgcgcggcagcattaagcggccgtgctcgctgggcacgacgccaggcatccctacacctcacgcggcgggtaatagcaaccctagcagcagcagcggcggcggcagtacaggagcccgccggcagttggagagcctgcaggtgcggccgcggccgccgccaacgaacaggcagcgagttcagagagtgtgcagcaactgcggcagcacggagacgccgctgtggcgcacggggtccgacgggtctgccaccctgtgcaacaagtgcggcctacggctatcaagaaatcgacaagccgcccaagcttcctga

SEQ ID NO: 182072 - DNA, 657 bp, Zea mays
  Clone ID: MRT4577_97627C.1
atgcgtcagctctcgtacctctctggtctcgacggcctagaagacggcgtcgcggactgcgacggctcctgcgacctccgcgacgacggaccgccgtgcctcctccacagcggtctctgctgccccaccggtccgctggacgatgaaaccgacaccgtcgccatagcaatcgacaacgacaaggagttgttgcaggaccttgccgtggccgcctcgctgtcgtcgggcaatagcccatccagttcggcggtcgagaccacgacgacgctgccgccgacgccctggcgtttcgtcatgcccaggaggaaacggaggaaacgacgggaccgcaggcccgtcgtcatgcgcggcagcattaggccaggcatccctacacttcacgcggcggctatgtcgtcgtcgtcgtcgggcaactggccatgcagtttggcggccgagacgacgccgccgccgcagctctggcgtcttgttgtgcccacgaggaaacggggcagaaggtccgtcgtcatgcgcgacagcattaagcggtcttgctcgctgggcacgacgccaggcatccctacacctcacgtggcgggtaatagcaaccctagcagcagcggcggcggcagcggcggcggcagtacaggagcccgccggcagttggagagcctgcag

SEQ ID NO: 182073 - DNA, 1060 bp, Zea mays
  Clone ID: MRT4577_97628C.1
ttattcggcacgaggcaatcgcgagctcccttcggccactccaccatcatcagcaattcagggagcccgccggcccgccccgccccgcctcgttacccgcccacccaccgctgcttctgcccgactgctccatggaggggaccacgcaacccaccgcgggggcgcgggaaaagctgctccccacctccgccgccgtcttttcgccgccctacctcgacccgcaccccgccgactcctacacctacacggtcttccttgtccccgttcgcctccgccgcggcctctgtcgcggcggccgttgcatcgtcccctgcctcaccgttctcttcctcctcgcgctcgcgggcttcctcctctggcccgcggacccggacatctccctggcccgcctccacctagcgcacgtctccgtcgtggcacgccctgccgtcgccgtcactatatccgccacgctcaaggttcgcgttcgcaatcctgacctcttcgcgctcgactacacccgcctcgacgtcgctatcggctaccgcggtgcggggcttggccgggtaacatccggcggcggacgggtccgggcgcgcgctgtctcgtacgtcgacgccaacctgcagctcgacggcatacgcgtcgtcgaggacgcgatgtacctgctcgaggacctcgcgcaaggatccgtgcccttcgacaccatcgccgaggtcgagggccacctccacttccttttcctcagcatcccggtcaaggggagaatatcttgcgtaatgcatattaatccacacaaccaaaccatagtacatcaggactgctatcctgagtgaattgcttatggcgtggaaatgtggaagggtgtaagctatgttgccttgcgaatggatcgtttgatttgtttctaaccttcgcttccagtcgtggttgtaaaagtaagaaccaaccaaggggtgtttgaatgtaattgagctaatagttagttcgctaaaaaattactaagtagaattagctaactaacaaataacaatctaactattagataatttgatgaaaaaagcttgtttggttggctttt

SEQ ID NO: 182074 - DNA, 205 bp, Zea mays
  unsure (1)..(205): unsure at all n locations
  Clone ID: MRT4577_97629C.1
tgtccactccaccagtacacccccgcgcccgtctattgctcnncctctncgcgcctcatagcagagcagagcatggcgcccccacgccctctcctcggcgccgtctgtctcgccgcggcngttccgctcctcctttttccggcagaagcggtgacagtgggacagtgaactacggccgcctggcgaacaacctgccggacccagc

SEQ ID NO: 182075 - DNA, 531 bp, Zea mays
  unsure (1)..(531): unsure at all n locations
  Clone ID: MRT4577_9762C.1
attcggctcgagatcagaacaaggagaaaaaaaggttccggtcttcatcccttccatttccaaaggacgacgctctcaccattcacgaacggcgactgcggatcgatcgtgcgtcgtctcctgcgccggcctctcttcaagtcaggttacacacaagcttcaaattatcgcaaaattcctcttacatatctacatctcataccggaccaggtctcataccggaccagaaaaatggaatacactttattacctgatttagcaccgcataagatacatgcaaagattcaagtacatgtatctagaaagtggcttttccgaggtgctactgatagtggaccactacaacatgttgatatggttttgtctgatcgagagggtaatgctatttatgctgaaatccctggaatttagctgaacaaaaagcaacanatattgaagaaggaggagtttatgatatcaacagattcagagtgtgcgcagcaaaaacttgtttcaaaatagtggatggggacaaaatgatccattcacatt

SEQ ID NO: 182076 - DNA, 346 bp, Zea mays
  Clone ID: MRT4577_97630C.1
tccatcaccacataacctccataactttactgcaaaaaaaaaccatcccactaaaaacattcaaaacaaatttcctcaccatattctcacaacaccgtatcaaaataaatataaaatatcatccaagattcattaactcaaccaactcacctaccaactcataccttattttaacaactaaacccaatcctccactccttttaacacctaacctccatcaacgtttcactattcttttactcaacttattttcccttacaaatcaaccccaaacactatcattagaacaatcataataaaaggccttaccctctatcacttaaaatcacaccttcaaaaataccct

SEQ ID NO: 182077 - DNA, 264 bp, Zea mays
  Clone ID: MRT4577_97631C.1
ctcctccttcacatccagtacgggtcttctttcgtaaggtcctcctaagttctgtggggtgggttatcacatccagatggacgccaaatacgttcagtacccctcctttgtctgcggcatctactatcccactatcgaccacttacatatactctcacttaactcctaccatacagatcatatacccaagaccctattcaatcggtcgactcacatcatcctctgcttcaacatcatcttctagctcacccaggaggagtatct

SEQ ID NO: 182078 - DNA, 441 bp, Zea mays
  unsure (1)..(441): unsure at all n locations
  Clone ID: MRT4577_97633C.1
tagctccaggttgctccacaaccaaattattgggatgacaagtcttctcaaagaagcgtacaacagtaaccatggactctgtatcttaaaacaacaatatttccaatcaaattgagctggctaagatgccttcacggggtcaaagacagcgatgaatggcatcagacggaccctatccaaagcatcttgtccttctccacttcgatgatagctctcaccacctctcccttgcatatgggggatcatagtttgcaaaatgactggaagtacctccaagcagaccaatgccaactacaaataatcaggaaagaaaaaaaaacatgaatgtaatcttcagccatgttgaggataaacaaaagggacttcgattggacgtgaacggggaagcgagaatcctgggtcacggtcgtcgtcgcggacgaggggcggnggcatggtgca

SEQ ID NO: 182079 - DNA, 2136 bp, Zea mays
  Clone ID: MRT4577_97634C.1
cgggaaaccttcctgacggcgactgcgcagccatatcctcctgacctcctctccatctcctctctttcgctgtctaccctcaccaactcctacctcccgagacaaattccgaggtcgacacaagaaaagggaaagaaccacaggtaattgccttcctgtgtcgggattgtagctccaatccactccgcgccggccgggtgcgctgccatccggatcagacgccctcgcatctctcgcccttccggcatcgtatcccctgggcggcagcggagtaaagatccgacccgcttgggattgtttgcttctcctttttgcggtgcgccgctggactccagtgctgcacatgctcgacgacggtgctgagctcctgcaatggcccgaagaaatgccggcgcaatgcagcgggagggttcggcggggtcggttaaggactggtcggaattcgacccttcgccgtctcccaagctggcgtactcgcagtcctacgtcgccatgagagggctgttgacgtcggtggcttctctggaccctgtcctgacgtcgagcagcctcaagtctctgtgggcagccttgtcatcgcacaggcacgctcggtccttggagaggccaaagtacaaggggatgaactggaagaggcccatgttccacctgcttgtgtgcttcttagtaggagttttcattggattcacaccactcttctctctcgatttatccagtaacatagattctgaaaacgagacgcttccgtttgacggggatgtggttaacagacagatgctggaacttaaaagtacaaggttggagccgattgtggctgcggcagagactgaagccgcccaagaacaacaggttgatgagagtcctccagttcctgcgatgctggatgatgaggcggacttcattgaagcgtcacatgtccaaccttctgttaatgattctgacattggtgcaaagaagcagctgataattgtgacaacaacttctgttcgaccacaccaagcttattacttgaaccgcctggctcatgttttaaaaaatgtaccacctcctcttctgtggattgtggcggaatggccatatcagtcccgtgaagcagcggagatcctgaggtcttctggggttatgtacagacatcttatctgcaatcggaacagtacaaatataaggaagattattgtctgccaaaagaacaatgcaatttttcatatcaagaagcaccgtttagatggtatagtacattttgctgatgaggagcgagtgtactcagttgatttatttgaagacatgcgaaaaatcaggcgctttggtacgtggccagtagcgacacatgttggagccaggtacaaggtggttttggaagggcctgtctgtaggggtaatcaagtcactggatggcatacaaacaagagagggggtgtacctcgtcggtttccaattggtttctctggttttgcttttaacagcactatactttgggatccccagaggtggaacagccccactttagagtctattatactccattcaggtggcagaggtggcttgcaggagtcaagattcatcgagaagcttgtcgaggacgagactcagatggaaggcctcgcagacaactgcactcgggttatggtctggaatttggacttggaacctccacagctgaattaccctactagctggcagctgcagaagaacctagacatcgtcgtgccaataacataaaccgcgatgctgctgctgcccctttttgttcgcgcctcctagtgagtgtggtggaatgatgacgacaatgcccatgccttcctgaacttggtagcgtccaggatcacgcgaagctgctctgccaagacctggttcgaataatgtggtactagtaacaatagttggaaagcgaagaagcctgcctgacaaaaggaaaaattctttctccccccgttgcgctgcattaccaatgatcctcaacatagataggcttgtatatttcttttccttccatttttcgattattcctgttcgttacatataccatgcatacatacatacatacataaatacatatacaccttcattcattcataagtacatacatacatcttacagtactttacagatgcgaaaaaaaaaaaaaaaaaagcggcc

SEQ ID NO: 182080 - DNA, 790 bp, Zea mays
  Clone ID: MRT4577_97635C.1
gacatacaggtaagtagcatccatgtatatcgtcaaggagaaaacacgctcgtctagaaagaaccaagtaatcaagatcgatacacaatctagctagctgtacatacatacgagcgaaccatttcgcagtactattttacataacagatgatatacatactagtagtatggatgtgttttttctgcagttacgtccggtggcttggggctagaccctaccagtcagtcactaccgaaaacgtatatttttaccagagcgttctgatatatatttaccgagtgtaaagtcttggacacttggtaaaaaaatatttacagaggatcccgccggtagctagtagtataaactcacactcgctagcaggttcagcaccgggatccatcggcgaaggcgacggcgcgcggtcctccggctccgggacgccgacggggacgtcggagaaggcggctagcacgcggcggacgctcatgctccgcatcgggcggaagctgaacgacctggccgtcatccccgccgccggggcgaacacgccggacgacttgcgcaggatcaggtagaccagcgcctgcaccaccgcgaacacggccaccttgagcagcgcgtcgccaagcagaagctccggtgccacgatggacgacgtcgtcgtcgcctccacgttgcccattgctcgctcgctgctgcgcgacgacggaggcgcggtgtacgatgctctctgcgacgacgactgtacgtactgtgcgagctctagcttagtggatgatgatcccggcccggccgagctcgacaatg

SEQ ID NO: 182081 - DNA, 536 bp, Zea mays
  unsure (1)..(536): unsure at all n locations
  Clone ID: MRT4577_97636C.1
gggtacctcgagcncggcgggacttctcttccagccagacatcagtcacactggtgagttctgtactctagctgatgctcctagcttctgggccttgcgctgtgtggctccgcagtccaacaaaacaagacatacgtcgagctggagtgcaccgatgcacgcggcggcagtgagagcgcccgagtggaggtccaggggagaagtctgccgaggtggccgccgctaccggcgctcagataatgagcaaggaaaccggtgcatcctgggcgcagagcgaggtatccgtcagtaactatccgtcgtcgtgaaagtccaacagtgagtttcatcactctcagtctaagatatcaggccgaggccgaggccgctagtgagactgatccgaccgaactacaccgcgatgacgacttgccgtcatgagagacgaccagctaggaaagacagtcgaaggctgcgatgtcgtcatcatagacgcaggatggtgctgcaccgcccgaatgagctgagacgacctctttcacctagacgccggaatc

SEQ ID NO: 182082 - DNA, 209 bp, Zea mays
  Clone ID: MRT4577_97637C.1
gatttatgtgcttgtcggattgtcgggcggacgagaggcataacgatgatgagaagaatgttaagacctctgaagcggatactggtaagttagggtggtatggccttaagaggtgtggtggtagtggtggtggtaattactattagctgttgcgtctgatgacgattcttgagtagaatagttggagtcatgtgattacgttggagctg

SEQ ID NO: 182083 - DNA, 102 bp, Zea mays
  Clone ID: MRT4577_97638C.1
ttgcagtatgcatttcttcacaccagtacattcttaagtgtacttgggtataaggcataacatagaccaatctgtacctttatatatatgtgtgtgtacata

SEQ ID NO: 182084 - DNA, 519 bp, Zea mays
  Clone ID: MRT4577_97639C.1
attcattaacatctatacggttcgctgcttgaaattcagtaaacggttccaagcacgcacacacaagcgagcaacctccttactttgattccaggacggtgatggaaccaaccttttattgactactacgactagcgtactacgcgagcgctgttgcttgccattcatttccattggggcatacgctcccgtctactatctaacagaggacctccacgagctcaggacggtacatgaggctctggtttctgatcagggagggagcataaccggcatgcgtcatggtacccgcgggtgaacaagccccaccgacagcactggtagacttctgcagcgccttactactgaccaaggaaaggcgtcagctacgtgccaccttttggaccttcagactctcttgcctctttgggacaaatacttcgctcatgacacgaatgcaccaaactacgtatcatacagcatgatctttagtgctaggagcgcatggctcgccttgatactgactatcatgaagagctc

SEQ ID NO: 182085 - DNA, 685 bp, Zea mays
  unsure (1)..(685): unsure at all n locations
  Clone ID: MRT4577_9763C.1
cggncgcgtgggnatggactgctccacgccgtcgtcccggnanaagcagacgaggaggaggtcgcgcccgcagcgacgaccacgagcagcagcgccaccgccacgggcggggacgagggcgcccacgtgctcctcctcctcctcctcctgctgtaactgtcccggcagcagtgcccgtcccgggggcccccgccccgaccaccgtcgtcgtcccgccgctgccgccagtcgaggtcggccgcgagctggccacgttatccaccgccgcgtcctccgacggggcggcctcgagcagagtccaccggtgctccatctgccacaaggagttcccgaccggccaggcgctcggcggccacaagaggaagcactacgacggaggcgccgcgacgtccgaggtggggagctccgggaacggaagctccgccgcccgcgcgttcgacctcaacctcccggccgtgccggagttcgccttccggtgcggcgccaagcccggcaagatgtgggacgaggaccaggaggtgcagagccccctcgccttcaagaagccccgcctcctcatgaccgcgtgagcctgagcctgagccgaggcgcggatctgatgttgatccgcacgagacttttttggatgttcggtggaacactattcgttcgttcaaaaaaaatttttattattttttatgttttt

SEQ ID NO: 182086 - DNA, 258 bp, Zea mays
  Clone ID: MRT4577_97640C.1
tgtcaagtttgtgcattgctgtgttcgattgggttgatctgcccgtctacccccacggctgcttttgatcttgctatatgcgatgtgcctgttgctctcggcaacagctgccactgtaatgagaattttgcaaacatggcaccggctacgacgggcttcagaaatttggcaccgccatcgtggcaattgaattcgtagcattataatcctacacggtttaaaaatttagctcaggtctctctaaatggccattagcac

SEQ ID NO: 182087 - DNA, 362 bp, Zea mays
  Clone ID: MRT4577_97641C.1
ccacccgtgcgaggatatataagcacgattctgttgtagttcccttgttttttttctcatcgcatgtagtccctgtctcggatagctcctcctacatcaacgccaaaaagccacacggcacgaggccaaaagctgttgttaccttgcttctaccgctgtttacttggttttaatttgaaacagattttaccttttcaaaaaaaaaaaaaaataaaaacaaaataaaaaaaaaaaaaaaaaaaaataaatataaaaacaaaaatactaaaaaaaattattaataaattaaaatgggcggcctctctcaaaggttcaatgttttctcaagcgtttataaaaacttatattttttttatatggat

SEQ ID NO: 182088 - DNA, 237 bp, Zea mays
  Clone ID: MRT4577_97642C.1
gggaagagggtcggctgcgtcggccggcgacacgccgtacgccacgatcaaccgggcggccgccgccgaggacgtgcggcgccggacgaccaccgccaccaccacgccgctgtcgttccaccgcaacagcctgttcggatacctgcgctccaacccggcgatccacagcatcagcaggaagctggggggcagcggccactccggctcgtcctcgtcctccagccgcggaagcagcag

SEQ ID NO: 182089 - DNA, 843 bp, Zea mays
  Clone ID: MRT4577_97643C.1
cctcgaggccggccgggccgggaacggctctgctccgtgtccgcttttcagaaagacagagaggaaaggaagaaaaaactcgcccccctctctctctctcttgtgtgtgaggtggcgaacccgaggagcggaggccacaagtccaatccgcccgtatctaatccgctgcgacgaggtgggggcgcggcggggcggtcttgatccgggctctttcctcgcgggagcgcacggttggcatttcaagtgcgagaccttggcttctttgaatcccacaaagcacggttgagccatggctggctcccttgctgcctcagccttcttccctggcccaggggcttctccggcagcatccgccaaaacatcaaagaacttggctggtgaattaccggataatttgagcgtgcgtggtattgtcgcaacgcctaatgccccttcggggaacatgcaagtcaaggctcaagcacaagcccttcccaaggttaatggtaccaaggttaacctcaagaatgcaagcccagacacagaggaggcgataccctacattgctcccaagacattctacaaccaactgccagattggagcatgcttcttgcggctgtcactaccatctttcttgcagcagagaagcagttgacactgcttgactggaagccgaagaaacccgacatgcttgttgatacatttggttttggtaggatcattcaggatgggctggtttttaggcaaaacttctggattcggtcctatgagattggtgccgatcgtacggcttctatagagacattaatgaatcatttacaggaaacagctcttaatcatgtgaaaacagctggccttcttgg

SEQ ID NO: 182090 - DNA, 317 bp, Zea mays
  Clone ID: MRT4577_97644C.1
aaaggcaaacaccacttctttaagggggccaaaaaaaaaggaaaattaggggggagcaggtaaaaaaaattcttggacaccgaccatttcaggccccacaatacaatcaaatttttgggaaaagcaacaccccccagtttggcaaaagaaacccaacccccccctacaaaagaccctgaggggaaaaatcccggggaaaagcaaaaaaaggccggctaggaaacggggtggaaaagtgcaacacccggccaaccccccaaatgttcccccttcaaaacatttccggaaattggcggacacattgccctacctttttc

SEQ ID NO: 182091 - DNA, 2212 bp, Zea mays
  unsure (1)..(2212): unsure at all n locations
  Clone ID: MRT4577_97645C.1
gtaacggtagaccacttgtgcaaactatgatcagaaaaaaaaaatcagttcgtccttgcaaactggtttattttttttcacaaatatcacaccgcccactacatgtacgtgaaaccggacaacgagaaaaagaacaataaagcccggacgggcggggccgcttcgcgggcccccttttttagagaaaacagagggaggaaagaaaaagctcacccccctctctcttcccaccacctctctcacgtgtgtgaggtggcgagcccaaggaggagcgggaggccacaagtccgatccgcccgtatctaatccgctcgagcgcagcggctcgttcctcgcgggggcgcacggttggcatttcgagtgctgagacatcggcttcattgaatcctaaagcacggttgagccatggctggctcccttgctgcctcagccttcttccctggcccaggggcgtctccagcagcatccgcgaagaacttggctggtgaagtaccggatagtttgagcgtccgtggtattgtcgcaaagcctaatgccaattctgggaacatgcaagtgaaggctcaagcacaaacccttcccaaggttaatggcaccaaggttaacctcaagaatgcaagctcagacacagaggaggcgataccctacactgctcccaagacattctacaaccaactgccagattggagcatgcttcttgcggctgtcactaccatcttcctggcagcagagaagcagtggacactgcttgactggaagccgaagaaacccgacatgcttgttgatacatttggttttggtgggatcatccaggatgggatggtgtttaggcaaaacttcattattcggtcctatgagattggtgccgatcgtactgcttctatagagacattaatgaatcacttacaggaaacagctcttaaccatgtgaagacagctggccttcttggagatggttttggcgccacgccagagatgagcaaacgaaacttgatctgggttgtcagcaaaattcagcttcttgttgagaagtaccccttgtgggaagacacggttcaagtggacacgtgggtagctgccgctgggaaaaatggcatgcgtcgagactggcatgtcctcgactgcaagtctggatgtacgatcttgagagctacaagtgtttgggtgatgatgaataagaacactagaaggctttcaaaaatgccggacgaagtaagggctgagataggcccgtatttcaacgcccgcgcagccataacagatgagcagagcgagaaactggctaagccagggagcactgctggtggcgatgctatgaagcagttcatgagaaaggggctcactcctaggtggtggggtgaccttgatgtcaaccagcacgtgaataacgtcaagtacatcggttggattcttgagagtgctccgatcgcgatcctggagaagcacgagctcgcaagcatgacgctggattacaggaaggagtgcggacgcgacagcgtgctgcagtcgctcaccaccgtcgcgggtgaatgcgtagacggcgacacagactccaccatccagtgcgaccacctgctccagctggaaacaggagccgatattgtgaaggcgcacacggagtggcgcccgaagcgggcgcatggtgaggggacccccatggggggtttcccggcggagagcgcgtgaatccatatttggcagggtgagggggacggctgtgaagcacagatcctatgtttatgggtacactaacgcccaactgagttgagtgtgttttggttggttggttggtcgcgacaagtatggcaggcacatgggggagcgccgcattacccacacccaacctggggatttggccaagacaaaagcccagcggtatgaggatcgaggaagcagaccagagttgttgcggagcgagaggactggggatcagtgtgtgttgtgggttgctgggcaaggatacatgcagggggagctgatggttttgcaggggatgatgttgtgtagctggttggttggttggggtgtgtagaaggcattcattcccctttgtaacagcctaatctgtacattcttaccatcatctttgtcttgttgattgatcgagtcgcagacctcctgcgtttatttgcaaaaaaaaaaaaaaaaaaaaaaaaaaaaaaaaaaaaaaaaagggggcggggccggtaccgatctanagntctagatcgcg

SEQ ID NO: 182092 - DNA, 317 bp, Zea mays
  unsure (1)..(317): unsure at all n locations
  Clone ID: MRT4577_97646C.1
tgggtacccctccgggccggccgggagggcccaggctgaggtagccccgtgcctgtgcggctgtgccgctgcgcgcctgcgcagtagcgtactagcgcgccgtgcctcaagtgcctgactgcaggggcactgcctgactgactgtgccgctgcgtggtcagccgtccaaacacactgcgcgccggcggccggaccattatggcgacaccggcgggcctccttctcgcctcgccgccggtgatatcaggtgtcgcggnncggtggcggcgtgcgctgcgatggcagtattctaacgtcgctgtcctctatgccccgac

SEQ ID NO: 182093 - DNA, 723 bp, Zea mays
  unsure (1)..(723): unsure at all n locations
  Clone ID: MRT4577_97647C.1
ctcgaaaatttccaatcaacatcaaacattggatggatacagctcttacttaagccaagatcacatctgatgatctgaagacatccaaattattacaccaagtatacagtagttcattaaaagaatgattccgccttaccaagagcagaagtttccatttctgaccatcctgttgggtagtacgtggcacggaagctgatgtacacgacagcgaccgcaccaatggccatcaccagcacaccgaacaggatggcaggtctcttcccccaccgtcccatgacgccnagcgcaaacgggtacagaagcacaaggatccacacgttgaacaccatcccaagcagcgcgtgctgcgcatgccgcgtgagcagcccccaggtcgccgccttgcctaccgccacgcccaccgccgngacgttcacggccagaaccgcgatggtcgggaccagcaacggcacccacctcacgacgtacaggtcggcgaacttgtcaccgccggagcaggcctccgtctgcttcgacgtgagcctgaagtggatgcccttccccgtgacgagcttcagcgccatgtacagcaccgccgtcgggtacaccccggtcgcgccgatcatgtagaactgctcgttgcggcaccagtccagcagcgtgatgcccgcccacctcacctcgaacatgccgatcacgtggatcatggcgatggtcgccacgaggtacaggacgtacgtg

SEQ ID NO: 182094 - DNA, 423 bp, Zea mays
  Clone ID: MRT4577_97648C.1
cgcccgcgccgccgtcgccacgcccacttcctacttgtagtagcagtagcttatacgtcttgttgtatagggtactggtacctagctaactgatcgattagagtgagtgagtagagtggattttggcaggcgtgcatgcaaatgtaaataaaaccaaaccccagcgcggattcttctcgatcaaccagtcctgggggacgatcttgctcttgctccaccctcgggcacgggttttgctttcgctccagctccacggcggcggcggtcagatccgtctctcaacgtaagctcgtgcatgtacataagctagcgtcctccagtccagacgccgccgccgccgccgcacgggatctcctgacagtggcttgatgcacctgcacctgcccaggaaacgatggatggaactgcttcctcagcttcttc

SEQ ID NO: 182095 - DNA, 247 bp, Zea mays
  Clone ID: MRT4577_97649C.1
gccggggatatcggggttcgcccgatagctaggcgtgggacgcggtcgggttcgttgggttctggatgacaggtggggtcacgcgcgcacagactgggtccgagcgcgagagtgccgcatagagactgccccgtggggccctgctgtcggcacgcacagggaggagacgggctgcgcggtggggaaaacggtagtgggccgaaatgtggtaggtcggcccaggtaagctcttttcccttttctattt

SEQ ID NO: 182096 - DNA, 1450 bp, Zea mays
  Clone ID: MRT4577_9764C.1
ccgggagatgcagcagcaagggagattcactgatgccacaacagaagacggcatcgctgggacagatgaagagccggtggtgccgaacaacgtcacactcatgaccctgctccctggctgcgcgatgctggcggcgccagcgaaggggaaggagatccatggctatgcgatgcgccacgccttggactcggacatcgccgtcgggagcgcgctggtggacatgtacgccaagtgcggctgcctggcgctgtcgagggccgtgttcgaccggctgccgaagaggaacgtcatcacctggaacgttctcatcatggcctacggcatgcatgggctcggtgatgaggccatcgctctgttcgaccgaatggtgatgagcaacgaggctaagccgaacgaggtcaccttcatcgccgcactagcagcctgcagccactccggcatggtcgaccgcggcatggagctattccatagcatgaagaggaaccatggggtccagccaacaccagatcttcacgcctgcgctgttgacattctcggtcgggctggcaggctggatgaggcctacagtatcatcacctcaatggagccaggagagcagcaggtgtccgcgtggagcagcttccttggagcatgccggctgcaccggaacgtccctcttggcgagattgctgccgagcggctgttccagctggagcccgacgaggcgagccattacgtgctcctgtgcaacatttactccgctgccggcctatgggagaaatcatcagaggtgcggaacaggatgcggcagaggggcgtcagcaaggaacccggctgcagctggatcgaactcgacggcgtcatccacaggttcatggctggcgagtctgcgcacccagagagcacgctggtgcacgcgcacatggacgcactctgggagcggatgaggaaccaggggtacacgccagacacgtcgtctgtgcttcacgacattgaggagagcgagaaggcggcgatcctccggtaccacagcgagaagctcgccattgccttcgggctgctgcggacgccacctggcgcaaccatcagggtggccaagaacctgagggtgtgcaacgactgccatgaggctgctaaattcatctccaggatggtggggagggaaattgtgctgagggacgtgagaaggtttcaccatttcgtggacggggcctgctcctgtggggattactggtagaagaaacgtcatagtgtttcaattaaaaatcaaacatttaatttcaattaaatatataaaaaacattaatacttgttttaaataataagtattattatataaattactgaatatatttttataatggatttatttagaaatatcaggttcaaagtttgatgtctagggtaattcgaactgttaggacaaatttaatattttaaaatagatatgtataaaatttgatattaatct

SEQ ID NO: 182097 - DNA, 613 bp, Zea mays
  unsure (1)..(613): unsure at all n locations
  Clone ID: MRT4577_97650C.1
ggcccattatactagtagnaatgatggtagaatggggaaaagnaaagtagnncaactgggaaattgggttacccaaacatttggttaccaannacaaaacattnnnctacactgnatnntccagtggnacgntnngatttctatcatatttggtttaanagnannntatcgatcggtagtgtgaatgattggagagtggcaccaagcctnnattgctggataactattttatcctgtgtaatgctgtggcattctatttgtggagggatnnggcgagcaaagnaagctgtnnnctgtacttgnngtagaacaggtnnncaattgnngaggtnntccagtatttaaaggggagtggaccaanatagnnagctttaatgcttanncacaggnnaggcttannctccatttgatgatgnnnggaaatggcgtncnngccgtaggcgcccctaaatgnannaacagtnnctgtnnctcgnnnataagcaattggtnngaaggaacnttcattatttacaaggnnaaaataccttatgtnncaaaatagatcccacaagggagaaaggggagctcgnnngtggcgttcggtaccatttttggccaggggaatatatta

SEQ ID NO: 182098 - DNA, 297 bp, Zea mays
  unsure (1)..(297): unsure at all n locations
  Clone ID: MRT4577_97651C.1
gtcggatatnaaataaagccctctctgcatccattccactctccactcttgctcattctctcctgccctctaaaaggtgatctgtctttggcagattcaatcacttgcctttctcattctctcctgagcccactattccactctggtccccagcggttcgcccagaacttcgntgaaccatcgcactgcaacctgttgcttagcccctccatctagtctcaatcgttaggactgactgcccagcagaggctggtgcaacaatcagtcctgtagtaagttctcctgggttcactcttc

SEQ ID NO: 182099 - DNA, 658 bp, Zea mays
  unsure (1)..(658): unsure at all n locations
  Clone ID: MRT4577_97652C.1
gnttccgattggttacctcgaggcggccggggaatgactcctttcacgctgctagtcggcagcaatttctagcgatcccttgctccgttgccgcaccgatgtctccgtgcggcgcttgctgcaacctgcctgctgctgaggtacccaaggccgaaacagaacatgaattgcatctcccgtgcccctcggtgggcgcaatgtgcgccccaagcagctagtgatcaactctttagactccggatcaaatggactgactggatatgcgactttgatgtcgctcatggaggagcttatcagtctggaaatgtaataggtcatgctagcttatgccttaagctaatgcttctcgcggctatgatgctctctactgacaaggaaatttgctccgcgttacctggtaactagcgagtttgcgggaatggccaaacgacatcgagtcatgtacatgccacttgatgatgctgtgcaatttcgttcatgactttattgggtctgaattatgagcttctctttttttttccaggaaggcattccatgggagggcatcaactcgggttgacaagttctcaaagagtgacatcatcgacctccccttcgattctgtccgcaaactttgcgaagcttgctgatcaggcaaaacctgtgtaggcggcacgat

SEQ ID NO: 182100 - DNA, 498 bp, Zea mays
  Clone ID: MRT4577_97653C.1
cgccggccgacggcagaggccggggtcttcggcggggaccaacacccaccagggacggcgaccacagcacggccccgggccccgcggcggcccgcaggcgaagccgggctgcgattggctacaaaggcaaatgcgcaaacaactaacggatatagacatctgaatgacacgaacctaagcgcggtcaaagagacatgtacgcaactaaagggtgaggacaagagcaatcctgaactccagaaagacatgaaagagcccagcgagaaacctgatggggtgaaagaagaacaaaggccgagctaaggagacgactgagacaatacacaagggaggggatgatgcttggagtgaagctgaggagacatctacaaaggatactgcaaatggcaaagaaccaatgttcgctgacacagaagaggataaggaaagtgttggaggtgggaaagaagagagtacaagctgcaaggatggcttgcctgaacggtcaaaacatgagaa

SEQ ID NO: 182101 - DNA, 350 bp, Zea mays
  unsure (1)..(350): unsure at all n locations
  Clone ID: MRT4577_97654C.1
gggtgacctctagtcgtcgccagtcagtcacctctccagcctccagcaccaaccatccaccaccgagctagcagctgtctgctcgcctcccccacctaggctaggactaggagccaccaaactctgccccgccatgccgggcctcgccgccaacgacaactcgcccccggcggcggcgccggccccgcgccgtctctcgtcgccgctgcccgggcgggggcgggctntcccggtggcctacgcatggactggattgccgtcaagtgcccatacattgaggttgacgtgattgacatattctagtcctgtgttgaggtctgtaacagagacaccgtgccgatctacgagcc

SEQ ID NO: 182102 - DNA, 1642 bp, Zea mays
  Clone ID: MRT4577_97655C.1
ccggccgggatagaagcgttaagaaagtggaacgagaacgagaccaagcgaattgggggcggcgcggcagccagagtcatctggaaggttcgatcgcctgtcgcctcgccgccatccattccttcccttgcgcccgaagaaagacacggaaattccccccaactgataaaaggaccatggtactcgcaaagcgataggaagccaccgaaggagagaattggatagcagagagtttgcgtgtggaagcagagatggggtccggcatgagccgcggccggcggcgcggtttcggcgcaggggcgtcgggagggatgctcccactgctggcgcttcaggttctgatcgagtacggccgcgcgggcgcctctcggccgcccgtgacggcggcgttgctcgccggcaacgcgctcatctatctccgtcccggggcgctcgacgggatcctgccctctgtcacacgcgtctccttcaatccgcggctcatcgtcgagaatggcgacttggtgcgcttcttcttgtcaccattctaccacttgagcgaaagccacctgttctacaatatgacatcgctcctatggaagggtattcagcttgaaacatccatgggtagtgtcgagttcgcttccatggttgctgcattgcttgggctgtcacagggcatcgcgctgctcttgtccaaaggcctactcttgcttggtgattatactgcgtactacgaccaatacgcggttgggttctctggtgttctgtttgccatgaaggttgtgctgaacgcctggtcagaagattttgtctatctgcatgggatggtcattccggcgaaatacgctgcctgggctgagttgatcctcatccaggttttcattcctggcacatcttttcttggccatcttagtggaatacttgctggattggtttacctttggctgaagcgggcgtttaatgggccagatcccctcactcttctggtgtcaagcattaccaaagtcgtgacctggccagtaagatttgctcgggatcttctatggtctgcccatccacagggacgctttagaggccggggcagggttgggcgccggcaatcagcaagagatactcctcgaggtctatggagatgctcagcctgcacctatgacaactcagtttccacagatatctgtgagatgtgcagcactgcacgagaggaccatgatttttcgctgaggcagtatcatcaggctggaggtactggagaactcacagttgatgagatacgccgaaggaggctgcaaagattcagtagatgatgtaaatccattgttatcagcacactttgtgcggcgctgaacgaagctctatatgagtatgtatgatagctccattcctctgctacatagcgtaggcatatttggttcttctcgtgatggagaatgctttacattattgagttgtttctcatttttgaaggagacagttactgatgtaattttaggtacatcaaagccatagaagtatagtaatacaaattatcaagggcatatatataaatgattgcgctaatctgtgcgccgcgttgtttattattcgaagacccgggccaactccaaaaaaaccaacccaggaagggcggccgccgtctagaaggcgagtcggcccgggaaat

SEQ ID NO: 182103 - DNA, 118 bp, Zea mays
  unsure (1)..(118): unsure at all n locations
  Clone ID: MRT4577_97656C.1
caatcccggctcgcctgcacaccaccgggcaccggagccaagctttatacaccccgccagcgtancacgccgacgtagcctcgcagagctaagctgaactatatantcctagctagcg

SEQ ID NO: 182104 - DNA, 429 bp, Zea mays
  unsure (1)..(429): unsure at all n locations
  Clone ID: MRT4577_97657C.1
cnctcntttttgttcttttactttgtgggggcgggcaagttttcaataacccaccagggacccccgcacggagacaaaatcgaggtatgaagccgtaggacaccaaaatgtttgaatggggtctatttccggcgcccaaaaaaaacttggaacaagcactggatggaagtagaatctcgctctgactgaacagaacaaaacaagctacaaaggacgggtgcttgacttgaggtgtcccttctctgtgtgagaagacttcttctggggggcacccaggcgcctattgttaatccggtcaagggggatcttgtcatagagccgaaacgccgttatctcatccgcgaactttacaacctctacagagcgcttttaaccccgagggattgggatgagtgcaccctgtcccttggcttcagtgggaagctcctc

SEQ ID NO: 182105 - DNA, 388 bp, Zea mays
  Clone ID: MRT4577_97658C.1
gaacgacagaagccaggcgacaacgcgggtaaggggatcacttccaagcagattctgattggtactattggtgatcaggttttggcactcgataagcgctatcttgatccacgccgttcagtgaacccgacacaacaaaagtaccaatcagaatctgctgacaacgcagtcacctctgttagctatgatgaggatcaagacgattttgacgaatcagctgatgaagatgaatatgatgattacgacgatgaagatgacgagattgacagctagtggtttggaattgtttcttgtgatgtgccgctctgaattagtgattctctggacgttgtacttctgtctctgggacatttcgtggtacgagaaaacaaagttgcttcttgtgttc

SEQ ID NO: 182106 - DNA, 813 bp, Zea mays
  unsure (1)..(813): unsure at all n locations
  Clone ID: MRT4577_97659C.1
attgggtacctcgaggccggccggggtgcattatccctccccatcccctatacgatttgcacccgtagtggataataaaccattttaaacaaaaaataaaaataaaaatacgaaccacttcctatcgttctgaaatctctttcctttctcgccttctctactactgccctggtggattcaccaccccatctatttagtgagttactcctcaccttgcaccgtctgtcttcctacccgtccaactatattttttatttatttataacttctcctgatccctgtccactccagtatttctagcaacctagccttttgtccaccttctgttctttcgcccgtcaccatctcttttgagaccgcaagtttccaacgcgaaaatggtaacgaagaacatggccaagatgccccgatttctcatgatcattggcatcatcatcagcatcacgatcgtcagcagaaccgaagctctttccttagatgtatcggagttattgcacaagggcgacgacatcccctgcgccttaaaccaagactgtgatcacaccaaactgtcggagtctagctacgacaattactacaagaccgacaagagtagttgggactcgttaggcttggaccccaacctattgcacatcaaccagatttccgtcggcttcgtcccagcttttcgcgaaaagaagaaccccaactctcctgagaaatcaacagcaagttgttcaaacccatggccattatgggcgattacatcagtctttcatcttgngacccggagctgaaagccattgactggcacaccggaatcgtgcgtaaatt

SEQ ID NO: 182107 - DNA, 277 bp, Zea mays
  Clone ID: MRT4577_9765C.1
ataacaagtttttcaaccatgtatgtagctgatatgagcgcaatggacaatggtcaagacgatgttacaacaagctgagagatcattgtgatcagatgcagcaaagctttgcagttctgacttttcaagaagcgcgtccttcagggcatcttgcaggcacagccacagcctattggttgatacgcacatcttccgagctctgtgctcagacatcgacctgcatgccagtctcgtatttcagacactagagacaatggtcctccatgctacaacacta

SEQ ID NO: 182108 - DNA, 2600 bp, Zea mays
  Clone ID: MRT4577_97660C.1
tcttgcttctgggttttgggcatcgccctccctgttagtgcaaaccgaaataatgcccccctagccccctgcactatttttctattttcattgcaactagaccttatagcatcatcaggccaacaaaccaacggcaaataaaaacagaaagtgctaaatttacagtagtggatttgagactcaacatgttcctggaacacaaactaaatttctagctgttttgcagagagcactaccaaatggtgattatagtttcataggcatcagcgttagaatcaaattgtatgctcagtacagtacaaaaggcaccgaggcctaccgagtggagtgtgtaggtttggcaaggcttggccgaaaccagagttgcccccacacacacactaacgtccagaagagcatgcaatatcaccagttcaatgacggaggtaatcgaattcagccttcgcgagtcagtgggtacccgcagagaggaaggaatcaggaatagcagcaggatccagctcgtagaagccacagagctcgccacccttctctgttgtcagctggaaagagggtatccggtgagaaaacagcaagtcatcctttgttggcacctccagaatactcctctcattgtctggcttgaatacagttttgtagccatctacctgagtcagaaataagactttcgtgctagcttcattgcgctcagttatctcgccaatggcatattcgcaggtatctttgctaggaacccagccaggtgaccaattgtggtagatcgcccaaatttcccctacttctgggtggatttcaaagttccgcttcgaaccaccttgtgtttctactacatgagagaatgcatcgtttatgtcgtacttcatcctccagttatgaagtttaaatgtcccacagctcacgggtaagtcatgctctaaccatgtgttctcatgctctgatcgagggcaagcttccagccaagtcaggtgcactccaaatggatctgaatcaacttttgtaacccaaccatagtatttgggaaggccatcaaaatcactgtaaagagcccatatctgtcctcgttcaaacttattatatgaccggtcttcttcaaagttgtagaacaatgaatctggatatgtgaaaacagaggtggatgcacagacttggggagcagaataaccagacatgctagcaaggcgggcattatgctgctgagtttgaacggattgttttctccacttgcctgcatttctatggttgcccttatgagcacttcgtccatttccatggctgggtgtagtattgtcagtcaaatcaacagactcgctgcccattgttctattggtagccacacatgaatcaagatcaacaggtggaaatgctacgtccaggttactaggaagcgatacggtatctagttcaagaaacccacaagggacaccaaccttctcgtttcccactgttctgaaaaatgggatgctgtgggaaaagcgaagtagttcacttgatggtataacaaatgatggtttgtcctttgctggtgcaaacagactcacaaaacctttaaccttgaccaaggggataacagtcacaccagcttccactgtgaagtttgaaaggacctccaccacttcatactcgtaggatctatgactgtctgcatctgagacccactgcatactccagcccttataaagagcccaaacctcacctatatttggatatattacataagaacccctttttcttcctttaacccacgaaaccatgtgagaaaacatgaggggatcttgtgactcctctgtgtttcctaacgtaaagttcccacaagccacaggaagtttattatcaatccatttttcctcatcatcattcactgtagaatgctccagccaagtgtacttaactctgaagttggtggtattaacatgtcttattctagcatagaatcttggcatggcatcgaattcatcataaagtgcccatatctgatcaactgcaaacagtttgacatctctgcacttgtcgaagtcaaaaaattctgggtcagggtacgtgaaactcccagtattccaaggcttctcagcaggtggatcacaagttgttttagtgtttcttttattgccttcattgacaacacaactatcttgattatctgttttgctagacacatgaggttcactaacatgtccatcagcatgggcaacattatcatcaactactttattagaactggaggtagcatttgagaaccaatctttgggtgtccgactctttttctttggagaattcaggatgttgttggcatcagcacaagcctttctcctagaagatctccgtggagtagggatttctgcagaacctggccctgctgatgtatccaccccaccacctaggtttttcctgtcaccaaaatctggtacagtagaattctttgctgaaaatttaactccttccatcacaggcccctctttgttctctctagaaaagatatttgtagagcagccttgctgcgcagcactatttgctgtttttgatgagaatgcagaaggcaccccgtctgtacttgtgggtaccgcaaagaaattctgcctgcaattctgacagcggatctgaca

SEQ ID NO: 182109 - DNA, 155 bp, Zea mays
  Clone ID: MRT4577_97661C.1
gacaccccctggatcctagattgattccctccgcctaccaagcgacggctcctagactgctcttccacgcattctagggcgtcgacacctgcccagaacacccgttgccgtgctcttctgatggcgaccagcgacgagctcgcccagatcgacat

SEQ ID NO: 182110 - DNA, 589 bp, Zea mays
  unsure (1)..(589): unsure at all n locations
  Clone ID: MRT4577_97662C.1
ctccaggccgtcncgggtagcgagccagtgggataagcaattggttcgattaacctggcttccataggctgtgcacctcggccttggctgctttagttttgtcatctgacatgttctgcagtcattgcttttcaggcgcactaacgagtcgatgcctaggctgtgctcgatgatagagtggctgaccctgaccagatcgagggcagaccaagcgaagacgtccttgtttctggatagacagaaaaggagtttttcctcgtctcgtgatctgctaggagatcctcggtggcagggagatcctcggtggcataaaatcggggcttcccttcaaaagctgaggctgcagggagatcctcggtggcaggctctggagctggctcctagacttactcttgggcaacttcttgctcggggatgagcacgtactctccgtcagcgaggttgcaatctaaatgaatgcaatgagtaagatacatgtatgctatggtatggtaagtttaataattaaaatgctaggtgaagtactcgagttagcaagacgggtcttagtcttactattgaaaattttagtggtatacttggtaattag

SEQ ID NO: 182111 - DNA, 238 bp, Zea mays
  Clone ID: MRT4577_97663C.1
cgatgaacgacttcaagcacttatgctgtggatagtcaccctgtcttatcgttctcattcattctaccatgtacaagagctccgaggcacattacatgcaggctgagagtatgaggtctgctctcgagaaatggcatgtgatgctcaaggattacttggtgtctgcagtgcacgttcatgctatatgaaagatcataccggacttctaatgtgagctacgacataacgtcggcagatc

SEQ ID NO: 182112 - DNA, 382 bp, Zea mays
  Clone ID: MRT4577_97664C.1
cgcagcacacaggaacggaatgaattgccggtcgacgagctcactagtcggcggccgcccttttttttttttttttttttttttttttttttttttttttttttttttttttttttttttttggagatcaatctaccaaaaaatattcttttaaatttcaaaaagttattataaaacaacaaaaaaaggcccatatggaaggaaaaaaaaaacctttaaaaaaagggctaaactattgcgctacaaaactttaaaatattttatggaacttcgaaatctcaccccaacaggaaaaagacaaaaaaaaaaaaggatgggccaaaaaaactggcccgcagatggggaaaggctagaacaacgccaaggtgggaggggagtgtaa

SEQ ID NO: 182113 - DNA, 486 bp, Zea mays
  Clone ID: MRT4577_97665C.1
accaagtaagctgtctcatacacacgtttagttccagacagtacgtcgtgttgtgatacacgccacacacgcttatggggcgcgaagcggacactacgcccgaaggctaggaatttgctggcctaggcctgggctttagttcttataacgtggaagaagagcacaaccacatcgggcaggaggcttgtgacttggcagtgcatccactatgatcaggtactacggccgggaatctccgggcgggtcctggttgccggccggcatgttctatacggagcccacttcgagcataccgcaatcctgttgtaggagccgacccggtccattggggattcggtgccaattgcggaaccatactggccggaatcttaaacaccgaagacggtggtggccgtaaagtgggattacgggaatttattcggggggggttacggggcgggtgggacacagtaaacctttatcaccatgtggaacaagggcttgggc

SEQ ID NO: 182114 - DNA, 870 bp, Zea mays
  Clone ID: MRT4577_97666C.1
cattgggtacctcgatgccggccggggctcgcactgcttaatcacaacctgacaagttagctaccccgcctacccgcgcagcgccgcgcgccatggccacgacgaaccaccgcattgtgcccctcctgctggtcgcggccacactgctcgcgccggccgcggcctgcccctactgcccaacgccgaagccgccgccgccgccgccgccgtcgtcgtccacgccgtgccctcccccgccctactcgccgtcgccgtccacgccgacgggcaagtgccccgtgaacacgctcaagctgctcgcgtgcgtggacgcgctcaacggcctcgtgcacgccgtcatcgggaccaaggccagcgacacctgctgcccgctgctctccggcgtggccgacctcgacgccgcgctctgcctctgcaccaccatcaaggccaaggcgctcagcgtcagcctcgtgcttcccgtcgccatctcggtgctcgttaacgagtgcggcaagcacgtgccctccagcttccagtgcccgtaatctatagtacaacaattaagcccatactgatcatcggctgcatatatgtgctagctactatgatgtatcaccaccactaatctatatccgcatgcatgcatcaatgcatgggtgattaagggtttatacgcggtcaagttatacacgcatacatatatcacaaatatatatagcttatattaagcatgcatatatatgtagcttcatacatggagctttatttgggttgtgcattcatttttcaatcatgtaccagtgtattatatattgtatcataagccagtacgtgtgagagttgtggcctttgtagggccgcttgtaagtcatccttaaaaaaaccatg

SEQ ID NO: 182115 - DNA, 831 bp, Zea mays
  Clone ID: MRT4577_97667C.1
caacctgacaagttagctacctgcgctgcgcagcgccgcgcgccatggccacgatgacgaaccaccgcattgtgcccctcctgctggtcgcggccacactgctcgcgcaggccgcggcctgcccgtactgcccgacgccgaagccgccgccgccgcctccgccgccgtcgtcgtccacgccgtgccctcccccgccctactcgccgtcgccgtccacgccgacgggcaagtgccccgtgaacacgctcaagctgctcgcgtgcgtggacgcgctcaacggcctcgtgcacgccgtcatcgggaccaaggccagcgacacctgctgcccgctgctctccggcgtggccgacctcgacgccgcgctctgcctctgcaccaccatcaaggccaaggcgctcagcgtcagcctcgtgctccccgtcgccatctcggtgctcgttaacgagtgcggcaagcacgtgccctccagcttccagtgcccgtaatctatagtacaacaattaagcccatactgatcatcagctgcatatatgtgctactatgatgtatcaccaccactaatctatatccgcatgcatgcatcaatgcatgggtgattaagggtttatacacggtcaagttatacacgcatcaatatttatatagcttatattaaacatatatatgtagcttcatacatggagctgtgggttgtgcattcattttcaaatcatgtaccactgtattatattgtatcatatataagccagtacgtgtgagagttgtggccttggtggggccgcttgtaagtcatcattaagaaaaaccatgaataaaatgtgtgtaacatat

SEQ ID NO: 182116 - DNA, 599 bp, Zea mays
  Clone ID: MRT4577_97668C.1
aatttttttcccgtccataatcattgaactgacctgctttcttctcgtgacgagtaaaaatgtaaaatatacgagcaactttgtcatttttgttgactgctttggtgtgggggtgacggatagcaaattccttccctcttcatctttctcttcctggagaattatggcgtgaggaaactggaggcatttttcgctgtactgattgcaactatggctgtttcatttgcggttatgtttggtgaaacaaagcctagtggcaaggaacttctgatcggtttggtggttccaaaattgagttcaaagacaattaagcaagcggttggaattgtgggctgcatcatcatgcctcacaatgttttcttgcattcagcactagtgcagtccaggaagattgacacaaacaagaaatctcgtgttctagaagcagtttactactataacatcgagtcaattcttgcactcatcgtgtccttcttcattaacatctgtgtcacaactgtttttgccaaaggattttatgggtctaaacaggctgacagtataggtcttgagaatgctgggcagtacttacaagaaaaatatggaactgcattctttcc

SEQ ID NO: 182117 - DNA, 775 bp, Zea mays
  Clone ID: MRT4577_97669C.1
gggtacctcgaggccggccgggaccgcttaatcacaacctgacaagttagctacccgcgcagcgccgcgcgccatggccacgatgacgaaccaccgcattgtgcccctcctgctggtcgcggccacactgctcgcgcaggccgcggcctgcccctactgcccgacgccgaagccgccgccgccgccgccgccgtcgtcgtccacgccgtgccctcccccgccctactcgccgtcgccgtccacgccgacgggcaagtgccccgtgaacacgctcaagctgctcgcgtgcgtggacgcgctcaacggcctcgtgcacgccgtcatcgggaccaaggccagcgacacctgctgcccgctgctctccggcgtggccgacctcgacgccgcgctctgcctctgcaccaccatcaaggccaaggcgctcagcgtcagcctcgtgctccccgtcgccatctcggtgctcgttaacgagtgcggcaagcacgtgccctccagcttccagtgcccgtaatctatagtacaacaattaagcccatactgatcatcagctgcatatatgtgctactatgatgtatcacaccaccactaatctatatccgcatgcatgcatcaatgcatgggtgattaagggtttatacacggtcaaagttatacacgcatacatatatcacaaatatatatagcttatattaagcatatatatgtagcttcatacatggagctgtgggttgtgcgttcattttcaaatcatgtaccagtgtattatattgtatca

SEQ ID NO: 182118 - DNA, 637 bp, Zea mays
  unsure (1)..(637): unsure at all n locations
  Clone ID: MRT4577_9766C.1
gcgttcgtcctgctgtaactgtcccggcagcagtgcccgtcccggaggcccccgccccgaccaccgtcgtcgtcccgccgctgccgccagtcgaggtcggccgcgagccggccacgtcatccaccgccgcgtcctccgacggggcggcctcgagcagagtccaccggtgctccgccgcgcgtgcgggggagggaacctcccggccgtgccggagttcgtgttccggtgcggcaagcccggcaagatgtgggaggaggacgaggaggtgcagagccccctcgccttcaagaagccccgcctcctcatgaccgcgtgaaaccgctgcgcgcgcgggcggcggatctcatctcatcacccgtccaagattttggtccgcagctgccgagttcagcggtggaagtggaacacactattcgttcattcatttcgtatggtgccagtagcgctattgtttgatttttgtggctgctcctcttgtacagtaccgagtgcgagaaatgatgcatagtcatcgtatacataccaatncaataccgtacctattggtctttctattcctgtggaagagttgtactttgttccttattagctgtcngttcatacacacttggttctcattntcagagatcatcggtgg

SEQ ID NO: 182119 - DNA, 1012 bp, Zea mays
  Clone ID: MRT4577_97670C.1
aaaaaaaaaaaaaaaaaaaaaaaaaaaaaaaaaaaaaaaaaatctcttcgtctcccccatcgcacgaggtttgcgcccctccccactcgccgtcgccccgtctcggcccctgaccctccaccgccaccgactccctctcttgccaccgagggaattcggatctaggagaaccatgccactacagctctccccccgcccacgattggcccccggcccgggagatgccgacgcccgtcgtgaccgcggtttgctctccgtgtcctcggcctcttcctccactctcatcctccctcctccccccgtccccggctgttttcgtcgcctccgccgcgagttctgctctccccacagcccttgtccaccgcatcatcctcggttgttctcggcgccccgctccacgcccgccctcgcccaacgaccctcgccgcaccccctccctcgtcctcgacgactccccttctggccccgtcctcgtcggcatcggcgcctactttctccgtcgtgggggaggggaaagcgaaggaggaagaagagccaagcgtttaagccagctcggccgctcgcctcccaccaaaacccccccgagacctcatcgacggggagatggagatggagtccagccccgccgcatcgcccttttcgtcgagtcgtcgccctgtgcctacacccccacagttccttggcatcgcaatcgctgcctcctgcgatgcacccttggatccacttctcatgcgacgcccctgatcggcaagcacgtcgtgcgtctgaaccgcctccctgaccggcaagcacgtcatggctccaggcacttgcagcctccgcgcttcttcggtcagcgagcacacgaccatgcctcccactgttcagtcgtggtggctccaggtgcttcttgcctctgtgtttccctgactggcgagtgtgcaaggagggacctcccctgccctggcgttaaacagaattaggggaataccgtcaacctcccatggctgctgccgggtaggcgatctgatag

SEQ ID NO: 182120 - DNA, 457 bp, Zea mays
  Clone ID: MRT4577_97671C.1
gtgacgagtaaaatatacgagcaactttgtcatttttgttgactgctttggtgtgggggtgacggatagcaaattccttccctgaaaaaatcagtacgaatgcatcccttggattaaaaattgcagttctctgcttcatctttctcttcctggagaattatggcgtgaggaaactcgaggcatttttcgctgtactgattgcaactatggctgtttcatttgcggttatgtttggtgaaacaaagcctagtggcaaggaacttctgatcggtttggtggttccaaaattgagttcaaagacaattaagcaagcggttggaattgtgggctgcatcatcatgcctcacaatgttttcttgcattcagcactagtgcagtccaggaagattgacacaaacaagaaatctcgtgttctagaagcagtttactactataacatcgagtcaattcttgcact

SEQ ID NO: 182121 - DNA, 910 bp, Zea mays
  Clone ID: MRT4577_97672C.1
cattgggtacctcgaggccggccgggcgctcgcaccgcttaatcaacaacctgacaagttagctacccgcgcagcgccgcgcgccatggccacgatgaaccaccgcattgtgcccctcctgctggtcgcagccacactgctcgcgcaggccgcggcctgcccctactgcccgacgccgaagccgccgccgcctccgccgccgtcgtcgtcgtccacgccgtgccctcccccgccctactcgccgtcgccgtccacgccgacgggtaagtgccccgtgaacacgctcaagctgctcgcgtgcgtggacgcgctcaacggcctcgtgcacgccgtcatcgggaccaaggccagcgacacctgctgcccgctgctctccggcgtggccgacctcgacgccgcgctctgcctctgcaccaccatcaaggccaaggcgctcagcgtcagcctcgtgctccccgtcgccatctcggtgctcgttaacgagtgcggcaagcatgtgccctccagcttccagtgcccgtaatcacatcagctgcatatatgtgctactatgatgtatcaccaccactaatctatatccgcatgcatgcatcaatgcatgggtgattaagggtttatacgcggtcaaagttatacacgcatatatatgtagcttcatacatggagctgtgggttgtgcattcattttcaaatcatgtaccagtattatattgtagtatcataaaccagtgtgagagttgtggccttggtgggggtgcttgtaagtcatcattaagtaaaaccatgaataaaacgtgtgtaacataaaaaaaaaaaaaaaaaaaaaaaaaaaaaaaaaaaaaaagggcgtcagctcgcgatctagaacaccaggtcccggacgcgtggacggacctggaacgcgactggc

SEQ ID NO: 182122 - DNA, 2488 bp, Zea mays
  Clone ID: MRT4577_97673C.1
attgggtacctcgaggccggccgggagtcctggttctagagcaactctcatcctcactccccccactcgcccgcatcttccggtcttccccatggcgtcgagcgacctcgccgagagcctcctccccggcggcgggggcggagcctccgcctcacatgacgaatacgaggagcgcgcgtacgactccgaggacaagatctccatcgccgtctcggattccgacggtgaagacgacggcgcgccggcgtcgcgcccgcccttctcgtggcggaagctctggcgcttcacgggcccgggtttcctcatgtgcatcgcgttcctggacccgggcaatctggagggggacctacaggcgggcgccgcggcggggtaccagctgctgtggctgctcttgtgggcgacgatcatgggcgcgctgatgcagctgctctccgcccggctcggcgtggccacggggaagcacctcgccgagctctgccgccaggagtaccctccctgggccactcgcgcgctctgggccatgacggagctcgcgctcgtcggcgcagacatacaggaggtgattggcagcgcgattgccatcaagatcctctcggggggtgccgtaccgctctggggtggcgtcgtcatcaccgcgctcgattgcttcatctttctcttcctggagaattatggcgtgaggaaactcgaggcatttttcgctgtactgattgcaactatggctgtttcatttgcggttatgtttggtgaaacaaagcctagtggcaaggaacttctgatcggtttggtggttccaaaattgagttcaaagacaattaagcaagcggttggaattgtgggctgcatcatcatgcctcacaatgttttcttgcattcagcactagtgcagtccaggaagattgacacaaacaagaaatctcgtgttctagaagcagtttactactataacatcgagtcaattcttgcactcatcgtgtccttcttcattaacatctgtgtcacaactgtttttgccaaaggattttatgggtctaaacaggctgacagtataggtcttgagaatgctgggcagtacttacaagaaaaatatggaactgcattctttcccatcctctatatctgggctgttggtttgttagcatctgggcagagtagcacaattactggcacatatgcaggacagtttgttatgggaggtttccttaatcttcgattgaagaagtggctacgggcaatgattactcgaagttttgccattattccaactatgattgtggctttatttttcgatactgaagatcctactatggacattctgaatgaagcactcaatgttcttcagtccatacagattccgtttgctctaattcctctcatcaccctcgtttcaaaggagcaaatcatggggtcgttcgtaattggtcccatcaccaaagtgattagctggattgttacggtatttctgatgcttatcaacgggtatcttatactatctttctacattactgatgtccggggtgcattgcttcgctcaagcttgtgtgttgtgttggttgtttaccttgcattcatcgtctatcttattgtgcgaaatacttcgctgtattctcgcctttgctcatcaacgtcaaagagctcgtgagcatttcaatgtcgtcatctgctgctttgatgggttggaacagtgctgtagatccatgcaaagcttgtgctgctgcttatttattggcttcagagaagactatgtatgctgtatgcatatcccgtgtatgcttgcatttatgggatatttggtagtagggctccttcccttttaggatgctatattttcacctccagtcacacgttgcagatagatttcttatttctgaggtttatggtgatgtgaaaagactactggcaaaaaaactggcattgctgttcctcctgaaactgagcagatgaaatttactgaatgatctgtaaagctcgatgttgcagttctgaattccaggagctcaatgcatattctgctgaagcttgaatggaatgtcgtgtaagatatgaatgagttgtactttgtgatccgccaaaaaaaaaattggtacaaggagatcacgagaagattggagagatttctcctcaatcctctccaattctctctagagatgatttggtgataatgagatcacccctcaatcccctccaactctctggtgaccgtgatttctggtcaccaaatcagcccttagagctagtttgggaacacctttttccaagagattctaattttctcaaggaaaaatgaactaattttccttagaaaaatagaaatctcttagaaaaacaggtttcccaaactagcaacacagacactagggattgatgtgatcgtgtgagaggcgtctcatactctcatctttgtgtcggcgtgcgcacgcagaagcgtctgtgtcagtgtgtcacacagctctgttccaacttacttgaagatataatactcgggagc

SEQ ID NO: 182123 - DNA, 1145 bp, Zea mays
  Clone ID: MRT4577_97674C.1
attttatccatggttttcttactgatgatgactaccaggcgcccctaccaaggccacaactctcacacgtactggcttatgatacaatataatacactggtacatgatttgaaaatgaatgcacaacccacagctccatgtatgaagctacatatatatgcttaatataagctatatatatttgtgatatatgtatgcgtgtataactttgaccgcgtataaacccttaatcacccatgcactgatgcatgcatgcggatatagattagtggtggtgatacatcatagtagctagcacatatatgcagccgatgatcagtatgggcttaattgttgtactatagattacgggcactggaagctggagggcacgtgcttgccgcactcgttaacgagcaccgagatggcgacggggagcacgaggctgacgctgagcgccttggccttgatggtggtgcagaggcagagcgcggcgtcgaggtcggccacgccggagagcagcgggcagcacggacgcgtgggcggacgcgtgggcggacgcgtgggcggacgcgtgggaccgcattgtgcccctcctgctggtcgcagccacactgctcgcgcaggccgcggcctgcccctactgcccgacgccgaagccgccgccgcctccgccgccgtcgtcgtcgtccacgccgtgccctcccccgccctactcgccgtcgccgtccacgccgacgggtaagtgccccgtgaacacgctcaagctgctcgcgtgcgtggacgcgctcaacggcctcgtgcacgccgtcatcgggaccaaggccagcgacacctgctgcccgctgctctccggcgtggccgacctcgacgccgcgctctgcctctgcaccaccatcaaggccaaggcgctcagcgtcagcctcgtgctccccgtcgccatctcggtgctcgttaacgagtgcggcaagcatgtgccctccagcttccagtgcccgtaatcacatcagctgcatatatgtgctactatgatgtatcaccaccactaatctatatccgcatgcatgcatcaatgcatgggtgattaaagggttatacgcggtcaaagttatacacgcatatatatgtagcttcatacatggagctgtgggttgtgcattcatttt

SEQ ID NO: 182124 - DNA, 649 bp, Zea mays
  Clone ID: MRT4577_97675C.1
gtacccttcgaagggccggccggggccgggaagaaacagcaagcatctacagagagccgccattgctgtaagcgactaggcgagagctccattctattcgtgactcgagagcatagtccgtgtactgggaataggagtgctaggaacagatgagagggatgtagctggaaatgtgcctgagcctaagcgtgctcatcgactcctccgaggagcaatggatgcgcgaggccctccccgccgatgaatcaccgtgcgagcggcgatgctacgatcgactgagagactccgatgatcctgcgcacgccgatcacgaaagtgaaccaggacatggggatgtatgaacctgattttgccttggaaaatctctgattctatatgctctatattctaccagtgtgtctagagatggatattctatgctaacggtataggagctgcatgggggatggaacattgcgttatctgcggcgtgtttcctgataggtatctgatgttagatgctgatatgactaatgcaactggtgcggatatatcccacgatggaatcgagacttgcgcgtgaacttcagatagcctgttatcagatctatggaaacgaggccagcgatttatgtatgccagtgatccatagtgttgagacatgctggca

SEQ ID NO: 182125 - DNA, 125 bp, Zea mays
  unsure (1)..(125): unsure at all n locations
  Clone ID: MRT4577_97677C.1
tcctgcgatatcccctgtattctgtgaataaccgnattaccngcctttgtttcgcgttgataccgtctcgtcgtcagtcgaacgacctgagngcagtcgagtcatgtgagtgaggtatgtggatg

SEQ ID NO: 182126 - DNA, 407 bp, Zea mays
  Clone ID: MRT4577_97678C.1
gagtacttcaacaccgacctcaccgagctgggtgatcaccccatcgggtcccacggtccaggcgtgcacccagtagcaacccctctcgtggccctcggcgatcacggtgccggacgaggcggcgcgaagaatgagctcctggccatgcgtgctgagcaagaacaggaggagcagcctgctgttgtccagaaggtgattgacatgcgagggccgcaggcgtgggtgctgacagacttgaaggggctcaatgaagaacaagagatggaggcgaatgacgtgcccatgccagagctgcagtacaatgtgcgtttgcttgttgatgaggctagggctgatattgtcaggttggacgcgcagctgcggcgggagcaagagaaggtagctagcttggtgcgggagagggaaaa

SEQ ID NO: 182127 - DNA, 537 bp, Zea mays
  Clone ID: MRT4577_97679C.1
atcgctactatgttgtatttatagcgttctcatactgtaatgactacagttggccactagcataggtataatgggattcgtggacacacacgttggatcatagtcactcacagggctacaaatgcataacgagaatatccgggtgagagattgacatatagatgggcagggcatgagaatacttgcttgagcacttgcaatttcatcaagagatgccatatgggttggatgtctttaaaacactgtgatatgcggactgaagcgctaagcattcatagttagctattgcggcgtccactacagaagcataggcaaggtgcagcatgcccgctccttaggaccttgcagagagaggcctctgcatgcttagtaaatgaaagagtgctaccatgacagtgaacaccagacttgcatacacatacaacgaatatgtgctctgcgatcacattgctgcatacagtgcataaacgatactgccctcatggaacactgacacaagtggacagagtgacggagatgcatgtgaataccggcgtg

SEQ ID NO: 182128 - DNA, 439 bp, Zea mays
  Clone ID: MRT4577_9767C.1
agaagatctcagcgacaaaacaatgaagatcactttatgggcagattaggcgataatggtcaagcttcatgacgtgtacgatgcaaatacaaataaaccgattcttgtgctattcgtcgggtgcttaccaaaatttttcaaaggtgtctacctaagtggtggtcctgcctgtagatggtacttcaatccaacaattccagaggcagaaccttatcttaccagccagtctacaaaaagaattgtgttacagcttccccaaaatttacaacatcctccagcgatggaaacgaagccaattgtcgaacataaatccctctatgaacttcttacagttaacccatatgatttcccggaaacaggatttgaatgtactatcacaatagcagaaataccagctgaacacaaatggtggtttccatcttgcacaaaatgcaataaa

SEQ ID NO: 182129 - DNA, 453 bp, Zea mays
  Clone ID: MRT4577_97680C.1
ggccgatacggccacttcttttgggcccggaaaccccccaccccgggggagtggggggaaatgaaacaaaacaaaagtcccccttggttttttcgattcaaggccccggggaacttggctaaaaaccccccaaaaccattaaaaaaaaggtcccccgggggggcgggatcaaaaaaattagaaaccttaccccccacgggccaaaaaaaaaccgggggcacggggggggaaccctgtttattggaaaaaaatgggaaaaaacggccccctcctcggcaaccaaaaaggcaaaaaaaggggctaacttggccctttcgaactgggggcaaaagagcttaaaaaccgaaaccattttggccaaggggggcttgaccccctttaacttccgggttttggggccccaaggggggttcacccaaagaattttggggttcaaaacggccaaaatttttt

SEQ ID NO: 182130 - DNA, 279 bp, Zea mays
  Clone ID: MRT4577_97681C.1
cctcctcccttacctaagcattgaattcggggcgagccatctggccactttccccacctccaagccatatctagcatcctagggtggaggcaacaatgatggccgagtctctagagctgcgcccaatccctcgtattactgcgtcaagaaatcgctgcgcattcacaatatccgcgcatagtctccttgatctgcatatacaaccattctatcaatgtgcaaggtcataacaaggtttacaagctacataacactcgattatgccctgtcgtttatgta

SEQ ID NO: 182131 - DNA, 308 bp, Zea mays
  Clone ID: MRT4577_97682C.1
cggcgcggaatcccggtggacgccaccacgcgcgcggtctattgtgcggacccgtgtgctgtctcaagggcatatgcccactcgagggtggctgacgcgcggcacaggcggtctcgatgcagaagcacaagcggctctaagtcaaaaaagcaaaactacagccatgatccctgatgtagaggacgtcgtagtctttgcaggcgcaggcaccggagatgtagatccgcttaagagacagatgcagctgttagggcacgatctccatccagatgcggtcctattactacctgctgtgacaaggctgcaag

SEQ ID NO: 182132 - DNA, 682 bp, Zea mays
  Clone ID: MRT4577_97683C.1
cgcctccaacgcgctttaaagcgcgcgtttcctcttccgcgataaacccgacggcccggcggctgtctgatcagccatcgctccgttacccctctcttctcacaaaaggcatctgcttgcttgctccggctagccggggagctagcgcgcgggcaatcgagcaatgcacatcgcgacctgcgtgtggcaagagaaggcggcgccggccggcggcatggggggagctcgagttgctggtggaggtggtggcggcgagtggggtgcgagggcggcggcggcgctggtcgtggccggtcgcgcgctcaactgcgcggtgagcttcgtggtgttcttggcgctggacgtgctggacgtggtgctgtgcctggcgtacaagctggcggactacgcggcggaggcggagtggaggccgtgctactgctccgcggcggcgggtccgcacgtggcgcagcagctgccccccaagcccaaggtggtgcggcccaggatgcacttgcagctggaggacgtgtcggacacgctgtacgcgcggccgtcgctgctggccgacgccacccgagccggcggcgacggcgtcgcccccgcgttcaccgtgagccccgccgccatcgcggcgctgatccgcgagaagacggaccgcgctccgcgggcgccgcggcaggcgccgcgctggtctgactgc

SEQ ID NO: 182133 - DNA, 921 bp, Zea mays
  Clone ID: MRT4577_97684C.1
cggttcgcggccggataagatccgagcttttgctgcgcgcctccgccgaccgcagcgtatccacctcctgcggcggcaaacttcctcccgccacagagcaccgggtacccgccgcccgcttccgcttctctctatccgccagtggaaggattgttgtccccacgcaactacccacctccgccgccgccggcttatccacagtttccagccccgaacaacacgagctacacgtcaccggctgctgctactactacagcatacccactgccacccgcgtcatgtgcagcctgtccggcgcctcctccggcagagctcaccaggtacccgtcgccgctgacggcggcatacccaccaccgcctgcgtcgtgtgcagcctgcccggcgcctccgccgccggcacagtacaccagttacccgccgccaccgtcgaccaactacccaccggcgccgccgagtgggtatccaccactagcactaggtccactaccggcgtccaatttggcccctccgaccagcacgtacccgccaccgccggagtcaggctcggcctactcagtttatccaaggtcggcgacgccaggcacactggaccgtgcgctaccgtactatccggcgcctcccgtcggctcgtattaccctccgccggggacacggtatttcgaggtcgacggcgcggccaggacgccgtcttactacccaccgccgagtcaatacccgtaggagttcggcggataatctgcaacgttgtggaacagtggacgatgtttccaaggttgctccgccgcttcccgccatgattgccattgaagacaggtcagattgccgcggtgcgtggcgtgggtgctaggctgcaatatgccggcttgttcgggccaattaaccttacattgttttcagtatttccaacaagatccttttttt

SEQ ID NO: 182134 - DNA, 371 bp, Zea mays
  Clone ID: MRT4577_97685C.1
aaatccagagtctcgctcaaaatttgggggttttagacagaacagatcagagagaggagagggagatggcggactggggcccggtgatcgtcgcgacggtgctgttcgtgctgctgacgccggggctactgtgcacgctgccggggcgcgggcgggtggcggagttcggcagcatgcacaccagcggcctctccatcctcatccacgccgtcctctacttcgcgctcgtcaccatcttcctcatcgccgtcggcgtccacgtctacaccggctagccgggcgcgcccgccgccagcatcgatcggttcgagctcctccgctggattttagtttaagatctgtctgtctgcagagctatcagctatggttgt

SEQ ID NO: 182135 - DNA, 268 bp, Zea mays
  Clone ID: MRT4577_97686C.1
gcgggggcgcggcgcggccccacaactcgcggaggcgaggaaacgcacgaggattcccctagtctcggcgagcgagccgggagcagcccagcattgagagtcgggcggcctcgccgcccgaattcgattcaggagaggcggcctcagcgacgggccggggggcggctgctctggtgagggacgcctgggagggggagaggcccgtccggcccggaccctggcgtaccgcgggcgcccgcggcgagtccgctctggtcgcgcaggcagc

SEQ ID NO: 182136 - DNA, 872 bp, Zea mays
  unsure (1)..(872): unsure at all n locations
  Clone ID: MRT4577_97687C.1
accctctcgaggccggggactatcaggatagcaagacaagtcttctacagccatccaccttcacaacatccacatttgactcttgcgtgtttcttccagaatcctgaccatggagctcaccaaattcctcgctgctctcgcagtcttcctgcccatcgtctacggtgcccctaccgccgccgccaacgacctccaccccgagatcctggctgccatgaagcgcgacttgggccttgatgccgacgctgctcgtgtccgcgttgcccgcgagatccaggccaccgaggtcattgaccagctccgcgcaaaggctggcagcgccttcggtggtgcctggctcgtcgacggcgagatcaaggtcgccgtcactgacgaggccttgacctccgaggtcactgctgctggtgccaccgccttggttgttgacactcccctcgagaagctccaggaggcccagaaggccatcgacgccctcaacgtcccaaccaccaagcgcgcagaggaggctgccaacggaattgcctcctactatgttgacgttgccgccaacaagcttgtcttcgaggccatttccagcggcaccgctaaggctgaggagctcgccaagaaggttggcctgactgaggctgactacgagatccgcactgttgaggcgctgcccactaccttcgccactatccgtggtggtgatgcctactacattggaggcggccgatgctccgtcggtttctccgtcaccactggtttcgtctctgccggccactgcggtcgtgccggtactgctgccaccactagcggtggtactaacattnggaccttctcaggctccgtcttccccggaagcggtgacttcgctttcatccgcggtagca

SEQ ID NO: 182137 - DNA, 248 bp, Zea mays
  unsure (1)..(248): unsure at all n locations
  Clone ID: MRT4577_97688C.1
tgttagacaatacgcctatggcacaggagatgcgccctagtgaagcattagttacatagatcacgggcgcgcctagcactggaagtgtatgaaccgcgcacccgtatggacaagcgcacccaactactgatagcatcccacattgctatgtgcgatcgatagatcaataaaaagcgtgtacagatgaactgctcctttcacgacctntaacaggtcgaccattgcccgtgcatcgaactaatgcacac

SEQ ID NO: 182138 - DNA, 151 bp, Zea mays
  Clone ID: MRT4577_97689C.1
gcttctctctctgctcctccgctccgcctgtccatccagacagggatcgccatgtcggctcggggagcaccacttcgaatcgaagccgcgctggggcgccaagacctcccgcacagctggaccgtcgtaagaacggttatgggcttaagaa

SEQ ID NO: 182139 - DNA, 1134 bp, Zea mays
  Clone ID: MRT4577_9768C.1
aattcggcacgagggccaagcaaccagtaaccacagccagccaccaccgcgagaacaagtcgcagccaagagaagtcgtcctcgcgcgcgtctcgatctcccagcgaagctagagcttgccgtgtgccgtgacttccatggagctactccacgccgtcatccatggagctgcgacgacgacgacgaccaccaccaccaccaccacgagcagcagcgccaccgtcaccagcggcgacgagggcgcccacctgccccaggggtgggccaagaagaagcgctcgcggcgccagcgctcagaggaggagaacctcgcgctgtgcctgctcatgctctcccgcggcgaccgccaccgcgtccaggcgccgccgccgccggtcccgtccgcggagttcaggtgctccgtctgcgggaagtccttcggctcctaccaggcgctggggggccacaagaccagccaccgggtcaagctgccgacccctcctgccgctcatgtccagctcccggcaccaccggcagtggccctcttggtggaggcccccgcaccaccaccagtcactgccaccccgcccccgctgccgctagtcgcggtcgccgtcgccgtccgtgagccggccacgtcgtccacctccgacggggcggccgcgagcagagtccacaggtgctccatctgccacaaggagttcccgaccggccaggcgctcggcgggcacaagaggaagcactacgacgggggggtgggcagcgccgccgcgtccaccgaggtcccgggggcgcccgccgagacgtcccccgaggtcgggagctcccccgcgcgtgcgtttgacctcaacctcccggccgtgccggagttcgtgttccggtgcggcaagcccggcaaaatgtgggaggaggacgaggaggtgcagagccccctcgccttcaagaagccccgccccctcatgaccgcgtgaaacccctgcgcgcgcgggcggcggatccccccccatcacccgtccaagattttggtccgcagctgccgagttcagcggtggaagtggaacacactattcgttcattcatttcgtatggtgccagtagcgctattgtttgattttaaaaaaaaaaaaaaaaaaaaaaaaaaaaaccacaaaaacc

SEQ ID NO: 182140 - DNA, 421 bp, Zea mays
  Clone ID: MRT4577_97690C.1
gtgcgagcttacatggagacgctcaagaagaaccatcagaggctgctctgcgaggggctttcaagatcaaagaagtcgtccacagaccctcggcgcacgttctgccgcccgcatcccgcatccgcgccgcaacccgcagccgtccggcaaacgcccgcatctgcggtagcgccgcagccgcggtttccatcctcctgcaatcgccagcgcgccctccgcgctcctgccgtgatccactcctagatcccggaggcatgcgtcaagggcggcggtgaccatctcagtgggcatccgctgttgcgtcgcggccgagcgggatggcgtcgacaaggtcaaatctcgcccactgcatcactttgcgccacccctagggtccctcggttgttgatccccaacacagaccaccagccaccgaggcgcc

SEQ ID NO: 182141 - DNA, 681 bp, Zea mays
  Clone ID: MRT4577_97691C.1
cctcgaggccggccgggagcatcttcagagatgagcgtagatctataactcaagtattgcttgttctccataagaaacaaagtacactaccaacaatggccgccggctcctcaacctcggccataatgctgctcctggccgtcgccttgattgcaatgagagaaaacgccgacagcttcaccatcaccaacaactgctgtctcaccgtgtggcccgcgcgcaccccgatgagcggaggcactcatctgaacccgggcggaaagcgaatcgacgacctgccaggagccaccaggtccggcctgatgaggatccgaaacgactgctccttcaaggtcaacagtgagagctaccaaaggctccactgcttgggatgactaaatatgcactgctgtctggtcacccgccgctgacgtctcgtacaaagttcactcatctttcgtgagtctatacttactaccacatcgcatacatcgatgactactagctctccatgtctcttctcctgcaaaaacaaagtgagggtgctgcgaactccactctgtatgccccgacacgtaccaccaccccaacgactggaagacccatgcctgtggctgcaacatgaactaccaagtcatcttctgcccatgatcagaatatgctctgcatgaatgagagagtgatttgcatttgcacaataat

SEQ ID NO: 182142 - DNA, 641 bp, Zea mays
  Clone ID: MRT4577_97692C.1
gccgggccgggtattcccagactactactacgcaattaccacaattctttttttcccccaaactcgcaagtcccaacgggcatgtctccgctgacccgccggctcgtggacatcatgcctcctcgccgacgccgccgccgccacggcgtccgccgcgttgctcaccggggaggggaacgacctgatgctcaagcacaacctcccgaacgtcatcatcccttactcctgcacctcctacagcttcaactacgcgacggaggccgtctagatccacctcgccagatgctggtacttccacttcggatctcacctcgtctactactagaggaccataaccgcaaagctctccagtagcgccatctcggacctcatccggcgtttaggcctcagaagctcttcctctgagtctacgacacgcgtatggacgagcaccccgatcagggcacacatcgagttccaaggcggattcgtctcacagtcggtatcaccctccatgcttgaagaggagcgcacctgttattctcgaggtggcgcacagctgcgcagtgtgtctgtcgtcatcgcacatgcttgagatgctccacgttgcgaaggatgaaatctcgagtttgataatccacgctaacggagaaccgcaggag

SEQ ID NO: 182143 - DNA, 1023 bp, Zea mays
  unsure (1)..(1023): unsure at all n locations
  Clone ID: MRT4577_97693C.1
gaaggctgattcgtttttagacacccccccgcccccccccacggtcacaacaccggtaacggccgcctccccacacctgtgcctgtccgccagcgccccaacacccacacagtacctccccccaacccaaccgcccgtacccccgtctcaagaagcacatcctcgcgaaacacccaccgccaagacaaccccccccagcggcacccttctcacaccattgataatgccaacgttaagaattaggaaaaggagggtatttttttagaataatattggtttatttttgttggtaataaatttgatgattggtgtatgtttgtttgattataatatttatatagagaatattttttattttgttgtttttttttatgtgatgtatgtatatttttgtgaaaatttttattgttaatattattattttttatgtggattttttttttatattttttttattaattttttaatggtttaattatttatgtatataggtattggtattttttttttaataatttatttattntgttttttattttttttttttgtgatattattttttgatgcatttgtttgttattntttttnttgatttattaatatttttataatgattatttattttttttattttttttgttttttttttattttgatgttatttnttatttttttttttaatatttttttattgtgttattattattattttttgtatttttgattttttattatatttattttataattttttatatttnttaattatttatgtatatggtatgttttttttntttttattattatttatttggnttttttttttgtttttgtaaatttatttttttatgttatttttttntatgttttttttttttttttatattattttattatttattatttattttttnatttttggtttttttttgttttttatttgttagttttttttattttttttgttttttattcattttattttttctatttttatttantttttgtattttttattttttt

SEQ ID NO: 182144 - DNA, 200 bp, Zea mays
  Clone ID: MRT4577_97694C.1
ccctcaccgatgcgacgacgcacgcatccgagctccactcctacgccggcgccttcttctggtgggcggtcccgcgccggagcgggcttcctcaccctttcgcccgtcggccgcccctctactggtctagcggagcggtgaacccatccgtccggccgttggttgctcttcgctcgtcttgtggtttgtctgatatgaaa

SEQ ID NO: 182145 - DNA, 353 bp, Zea mays
  Clone ID: MRT4577_97695C.1
caggagacctctaactctatatgattcaggtggaattcgtgatggttgatcaactgagagataggatattttgcttgcagttggtgaggggctgcttgccttcatgagtatgaaattagttgaatgcgtgggatctcgctcctgagtatgcgagacatggtagaacgtcacataaaggtgcctgagtcaggagctccactctattagcatatcgtcgaggcacctatttaggcgactatttgaggtgctagaactatactatcttgagcttacactaacattctttatagaatctatgacaaatacgcaagctgaattacattgctaggcacactcgacatgaacaacattgt

SEQ ID NO: 182146 - DNA, 313 bp, Zea mays
  Clone ID: MRT4577_97696C.1
cctggttctttggtttttggtttttttattttttttcatggaggaggttatgcttttcggcagcaccgacaagaaccattttttgcttgggggtcacttaaaaaaagtcctgacgggagatacaggagttcatcgtccacagtccatgctggttgatgcatgggtctggtggggcccgggttcaacacaggactaacaactgacacagagcgaccttgcagtcaaaaacacaggtgggtaacaacaaaccggaggaacgagagttaaccctttgggctagggtaaacataacggtggcgaacaggataacttg

SEQ ID NO: 182147 - DNA, 482 bp, Zea mays
  Clone ID: MRT4577_97697C.1
attggttccctcgaggccggccgggatcttcctttccctctccacccgagatcccctcgttgttacgccacactatcccttaagacaccatgaacaagatctaccgtgccgtccctggtgtcaagctcaagatgaccctgggtctacctgtcggtgtcgtcatgcactgcgctgacaactccgacgtccgaaacctctacatactcgccgtcaaggaacattcgacgctctcctgaacccattgcccgctgatggtgacgatgacatgatcatgaccaccgtaaagaagtcaacgaccgaactcccaaagaagcgtccaccccgtcgatatcgtccgacagtccaagccctgcatacgactcgacggtgtcttcctgtacttcaacgacaacgctggagacatcgacaaccacaacgacgagatgaagggctccctcattacctacctcatcgtcaacaaagctgctgagttgtggacccgt

SEQ ID NO: 182148 - DNA, 2526 bp, Zea mays
  Clone ID: MRT4577_97698C.1
atgaagaaccttcacaagcttctaaagggagaacatgtgataggtttaactaatgtgcaattcgaaaaagatagaccttgtgtagcttgtcaagcaggcaaacaggtgggaagctctcatcacaccaaaaatgtgatgaccacatcaagacctttggagatgcttcacatggacctcttcggacccgtcacctatctaagcataggaggaagtaagtatggtttagttattgttgataacttttcccgcttcacttgggtgttctttttgcaggataagtctgaaacccaagggaccctcaagcgcttcctaaggagagctcaaaacgagtttgagctcatggtgaagaagataaggagcgacaatgggtccaaattcaagaaccttcaagtagaagagtatcttgaggaggaagggatcaagcacgagttctccgctccttacacaccacaacaaaatggtgtggtagagaggaagaacaggacgctaattgatatggcgaggatgatgcttggagagttcaagacccccgagcgtttttggtcggaagccgtgaacacgcttgccacgccatcaacagggtctacctgcatcgcctcctcaagaagacgtctttttgggagtaaatgctacattctagtgaagaagggtaggaattccaaatttgctcccaaagccgtagaagggtttttgttaggttatgactcaaatacaaaggcgtatagagtcttcaacaaatcatcgggtttggttgaagtctctagcgacgttgtatttgatgagactaatggctctccaagagagcaagttgttgattttgatgatgtagatgaagaagaagttccaacagccgcaatacgcaccatggcgattggagatgtgcggccacaggaacaagatgaacaagatcaaccttcttcctcaacatttgtgcatcccccaactcaagatgatgaacatgagacgtgtgatcaagggggagcacaagatgatcatcctttcagggtagaggaagccttgctagatccggactgggtgttggccatgcaggaggagctcaacaacttcaaaagaaatgaagtttggacactagtgcctcgtcccaagcaaaatgttgtgggaaccaagtgggtgttccgcaacaaacaagacgagcacagggtggtgacgaggaacaaggctagacttgtggcaaaaggttatgcccaagtcgcaggtttggactttgaggagacttttgctcctgtggctaggctagagtccattcgtattttgctagcatatgccgctcaccattccttcaggttgttccaaatggatgtgaagagcgctttcctcaacgggccaatcaaggaggaggtgtacgtggagcaaccccctggcttcgaggatgaacggtaccctgaccacgtgtgtaagctctctaaggcgctctatggacttaagcaagccccaagagcatggtatgaatgccttagagactttttaattgctaattctttcaaggttgggaaagccgatccaactctttttactaagacttgtgatggtgatctttttgtgtgccaaatttatgtcgatgacataatatttggttctactaaccaaaagtcttgtgaagagtttagcagggtgatgactcaaaagtttgagatgtcgatgatgggcgagttaagctatttccttgggttccaagtgaggcaactcaaagatgggaccttcatctcccaaacgaagtacacgcaagacttgatcaagcggtttgggatgaaggacgccaaacccgcaaagacgccaatgggaaccgacggacacaccgacctcaacaaaggaggtaagtccgttgatcaaaaagcataccggtctatgatagggtctttactttatttatgtgctagtagaccggatattatgcttagtgtatgcatgtgtgctagatttcaatctgatcctaaggagtgtcacttagtggtcgtgaagcgaattcttagatatttagttgctacgccttgcttcgggatctggtatccaaaggggtctacctttgacttgattggatattcaaacttcgactatgctggatgtaaggtcgataggaagagtacatcagggacgtgccaattcttgggaaggtccctggtgtcatggagttctaagaaacaaacttccgttgctctatccaccgctgaggccgagtacgttgccgcaggacagtgttgcatgcaactactttggatgaggcaaaccctccgggactttggctacaatctgagcaaagtcccactcctatgtgataatgagagtgctatccgcatggcggataatcctattgagcacagccgcacaaagcacatagacatccggcatcactttttgagagaccacgagcaaaagagagatatcgaagtgtttcatgttagctccgagaaccagctagccgatatctttaccaagcctttagatgagcagaccttttgcaagttgcgtactgagctaaatgtcttagattcgcggaacttggattga

SEQ ID NO: 182149 - DNA, 2254 bp, Zea mays
  Clone ID: MRT4577_97699C.1
cttgtcaagcaggaaaacaggtgggaagctctcatcataccaaaaatgtgatgaccacatcaagacggacaaaactgaaacccaagggaccctcaaacgcttcctaaggagagctcaaaatgagtttgagctcaaggtgaagaagataaggagcgacaacgggtccgagttcaagaatcttcaagtggaggagtaccttgaggaggaagggatcaagcacgaattctccgctccctacacaccacagcaaaatggtgtggtagagaggaagaatagaacgctcatcgatatggcgaggacgatgcttggagagttcaagacccccgagcgcttttggtcggaagccgtgaacacggcttgccacgccatcaaccaggtctaccttcaccacctcctcaagaagacttcatatgagcttcttaccggtaacaaacccaatgtgtcttactttcgtgtatttgggagcaaatgctatattatagtgaagaaaggtagaaattctaagtttgctcccaaagctgtagaagggtttttgttaggttatgattcaaatacaaaggcgtatagagttttcaacaaatcatcgggtttggttgaagtctctagcgatgttgtatttgatgagactaatggctctccaagagagcaagttgttgatcttgatgatgtagatgaagaagacgttccaacggccgcaatacacaccatggcgattggcgatcctttcaaggtagaagaggccttgctagatccggactgggtgttggccatgcaggaagagctcaacaacttcaagcgtaatgaagtttggacactggtgccgcgtcccaagaaaaatgttgtgggaaccaagtgcgtgttccgcaacaaacaggacgagcacggggtggtgacaaggaacaaggctcgacttgtggcaaaaggttatgcccaagtcgcaggtttggactttgaggagacttttgctcctgtggctaggctagagtccattcgtattttgctagcatatgccgctcaccattctttcaggttgttccaaatggatgtgaagagcgctttcctcaacgagccaatcaaggaggaggtgtacgtggagcaaccccctgctggcttcgaggatgaacggtaccccgaccacgtatgtaagctctctaaggcgctctatggacttaagcaagccccaagagcatggtatgaatgccttagagactttttaattgctaatgctttcaaggttgggaaagccgatccaactctcttcactaagacttgtgatggtgatttgtttgtgtgccaaatttatgtcgatgacataatatttggttctactaaccaaaagtcttgtgaagagtttagcagggtgatgatgcagaaattcgagatgtcgatgatgggcgagttgaactacttccttgggttccaagtgaagcaactcaaggacggtaccttcatctcccaaacgaagtacacgcaagacttgctaaagcggtttgggatgaaggacgccaagcccgcaaagactccaatgggaactgacggacacaccaacctcaacaaaggaggtaagtccgttgatcaaaaggcataccggtcaatgatagggtctttactttatttatgtgctagtagaccggatattatgcttagcgtatgcatgtgtgctagatttcaatctgatccaagggagtgtcaccttgtggccgtgaagcgaatccttagatatttagtcgctacgccttgcttcgggatctggtatccaaaggggtctaactttgacttgattggatattcagactctgactatgctggatgtaaggtcgataggaagagtacatcggggacgtgccaattcttaggaaggtccctggtgtcatggaattctaagaaacaaacttccattgccctatccaccactgaggccgagtatgttgccgcaggacagtgttgcgcgcaactactttggatgaggcaaaccctccgggactttggctacaatctgagcaaagtcccactcctatgtgacaatgagagtgctatccgcatagcggaaaatcctgttgagcacagccgcacaaagcacattgacatccggcatcattttttgagagaccaccagcaaaagggagatatcgaagtgttttatgttagcaccgagaaccagctagccgatatctttaccaagcctttagatgagaagaccttttgcaggctgcgtagtgagctaaatgtcttagattcgcggaacttggattga

SEQ ID NO: 182150 - DNA, 834 bp, Zea mays
  unsure (1)..(834): unsure at all n locations
  Clone ID: MRT4577_9769C.1
cggacgcgtgggcagctcctaccaggcgctggggggccacaagaccagccaccgggtcaagctgccgacgcctcctcctcctcctactgccgccgctgtaactgtctcggcagcagtgcccgtcccggaggcccccgccccgatcaccgtcgtcgtcccgccgctgccgccagtcgaggtcggccgcgagccggccacgtcatccaccgccgcgtcctccgacggggcggcctcgagcagagtccacaggtgctccgtctgccacaaggagttcccgaccggccaggcgctcggcgggcacaagaggaagcactacgacgggggcgtcggcagcgccgccgcgtccaccgacgtcccggcggcgcccgccgagacgtccgccgaggtcgggagctccgccgcgcgtgcgttcgacctcaacctcccggccgtgccggagttcgtgttccggtgcggcaagcccggcaagatgtgggacgaggaccaggaggtgcagagccccctcgccttcaagaagccccgcctcctcatgaccgcgtgagcctgagcctgagccgaggcgcggatctgatgttgatccgcacgagactttttttaatcttaatccatttataaataagcttatgttacagagcactaactaatccatcaatcatctcttgcaatgagaacgaagtatgtatggactacactatactgacagctaaggatacagatcccaggaacaggaagacctatatggctatatgtattgtatggtatactatgcgtgagtgtggtgactacgcatctctcacaccagctctctctgtactgtacaagaagagcatcanc

SEQ ID NO: 182151 - DNA, 153 bp, Zea mays
  Clone ID: MRT4577_976C.1
ttccgacatctgctgcaacttgcgtgttcaatgcaactcgtgagcgctttctcctcgttccattcacgctatctttttggtagatacgactcttgtttcttctcaccggtaccgcaacatcgggtaaagcccttataggtaccgaacagatac

SEQ ID NO: 182152 - DNA, 1487 bp, Zea mays
  unsure (1)..(1487): unsure at all n locations
  Clone ID: MRT4577_97700C.1
ccggccgggacccggcccgacaatcctcttcgccgtccggctgggaagccatcccttcgtcaatccagacaagagaacaaatccgtcaagatggctccctccaacctgccctccgtcatgaacgccaccagccaggacatcgagaccctgctggccgctcagtgccacctcggctccaagaacctccaggttcacatggagaactacctctggaagacccgtcaggatggtgtcaacgtcatcaacgtcggcaagacctgggagaagattgtcctggccgcccgtgtcatcgctgccattgacaaccccgccgacatctgtgtcatctctgcccgtccctacggtcagcgtgctgtcctcaagttcgccgcccacactggtgccactgccattgctggtcgcttcacccccggttctttcaccaactacatcacccgatctttcaaggagccccgtctgatcatcgtcaccgacccccgaaccgacgcccaggccatcaaggaagcttcttacgtcaacatccccgtcattgccctcgccgacactgactctcccaccgagtacgtcgatgttgccatccccaccaacaacaagggtcgccacgctatcggtgccgtctggtggatgctcgcccgtgaggtcctccgcctccgcggtaccatctacaaccgcgagaccccctgggacgtcatggtcgatctttacttctaccgtgaccccgaggctgaggccgaggacaaggtcgaggaggagaaggtccccggcgctgacgaggagggccctgccgccatcgagtccggcttccaggcctccgctggtgctgactgggaggctcccgcctctggcttcgccggtgcttctggcgctgctggcgctcctggctgggacggcgctgccggtgaggagtggggtgctgcccccgctaacaccgagtgggctgcttccgccgagccccccaaggagtctcagtggtagggtactgaggcccaagagggttccggcgctcaagttcctgaggcgattgaatggtaaagaaatcaaaaaagaggataccaaaaaaattcaaacgagtgaatttgacacaaggtcctggaatgggagagcagaaaaagcattgaaggatgtgtggatgttgtggttcaatcaaactattcgacaaacatttcctgtttcttctatccccatcttacgacaaaacacaataacttgctgaccttttttcttactacgaactttgcatggggactaaaggtttttgttttctttcaaaacttggcggtgctaatgagggaaagatactcgcctccttttctcattgagaaggatggagagggaaagccctgcgctgccgaggggatggacttgatcgttatcccgcctttgtttctgtgnaaatttgtattgatgcgagcagagtcaaaaatgagtcgtcttagctgggtttaccaaaaaaaaaaaaaaacccgcggcctcgagctcagctttgt

SEQ ID NO: 182153 - DNA, 3548 bp, Zea mays
  Clone ID: MRT4577_97701C.1
atggatcctaaggggaagggaattgtgatcaatgataagaagaaggagtcctttgtcaacgagccgaaggatgacaagcctaccgactcaggcttgggccacaaacgcaaagatgggaagaagaagaagacaagacgcatcaaggagatcatctactacgatgacaacgatgagtccacttcttcccataaggacaacgacgacaacgactacgacaaaagaaagacggttaattcaaacttttctttcgattactctcgtattccgcatagctcaaatgcacatttgctttccatccctcttggcaaacctccacactttgatggggaggactacggattttggagtcacaaaatggacgagtaccataaggtgagcggcttggacaatgccaagcagatctgggacaccctcaagatctctcatgaggggaacgacgtcaccttgctcaccaagatggagttggtagagggcgagctcgggagatttgcaatgataaggggcgaggagccaacccaaacatacaaccggctcaagaccctcatcaacaaaataaggagctacggaagcacacgatggatggaccacgacgtcgttcgcctaatgctaaggtcctttactgtacttgatccacatctggtgaacaatattcgtgaaaatcctaggtacaccaagatgtcgcctgaagaagttcttgggaagttcgtgagcgggcgaatgatgatcaaggaggcgagatacgtggacgacgcattgaatggtccaatcaatgagcctcaaccctttgctcttaaagcaacaagaagcaaggaggcgctacctagcaaggtggcacaagttgaggcggcagggctaagtgatgaagagatggctctcatcatcaagcgcttcaagacagcgctaaagggtcacaagggacagccaagcaagaccaagacaaaggggaagcactcatgcttcaagtgtggtaagattggtcattttatcgctaactgtcccgataatgatagtgaccaggaacaggggaacaagagggagaagaagaagacatacaaaaaggctaaaggcgaggcacaccttggcaaggagtgggactcggattgttcgtcatccgactccgacaatgaaggactcgccgccaccgccttcaacaagtcatccctttttcccaacgagcgtcacacatgcctcatggcgaaggagaagaaggtttatgcatccgggggttcaagctggattatcgacagcggatgcacaaaccatatgacgggggagaagaagatgttcacctcctatgtcaaaaacaaggattcccaagattcaataatattcggtgatgggaaccaaggcaaggataagtctgaaacccaagggaccctcaagcgcttcctaaggagagctcaaaacgagtttgagctcaaagtgaagaagataaggagcgacaatgggtccgagttcaagaacttcaagtggaggagttccttgaggagaaggggatcaagcacgagttctccgctccctacacaccacagcaaaatggtgtggtagagaggaagaacaggacgctcattgatatggcgaggactatgcttggagagttcaagacccccgagtgtttttggtcggaagccgtgaacacggcttgccacgccatcaacagagtctatcttcaccgcctcctcaagaagacctcatacgaactgctaactggtaacaaacccaatgtatcgtactttcgtgtatttgggagtaaatgctacattctagtgaagaagggtaggatttccaaatttactcccaaagttgtagaagggtttttattaggttataattcaaatacaaaggcgtatagggtcttcaacaaatcatcgggtttggttgaagtctctagcgacgttgtatttgatgagactaatggctctccaagagagcaagttgttgatcttgatgatgtagatgacgaagacgttccaacggccgcgatacgcaccatgacgattggagatgtacggcctcgggagcaattggagcaagatcaaccatcttcctcaactatggtgcatcccccaactcaagacgatgaacaggttcatcaaaaggaggcgtgtgatcaatggggagcacaagatgatcacgtgatggaggaagaagcgcaaccgacacctccaactcaagtccgagcggtgattcaaagggatcatcccgtcgaccaaattttgggtgacattagcaagggagtaactactcgatctcgattagttaatttctgtgagcattactcttttgtctcttctattgagcctttcagggtagaggaggccttgctagatccggactgggtattggccatgcaggaggaactcaacaacttcaagcgcaatgaagtttggacactggtgcctcgtcctaagcaaaatgttgtgggaaccaagtgggtgttccgcaacaaacaagacgagcacggagtggtgacaaggaacaaggctcgacttgtggcaaaaggttatgcccaagtcgcaggtttggactttgaggagacttttgctcctgtggctaggctagagtctattcgtatcttgctagcatatgctgctcaccattctttcaggttgtaccaaatggatgtgaagagtgctttcctcaatgggccgatcaaggaggaggtgtacgtggagcaaccccctggcttcgaggatgaacggtaccccgaccacgtgtgtaagctctctaaggcgctctatggacttaagcaagccccaagagcatggtatgaatgccttagagaatttttaattgctaatgctttcaaggttgggaaagccgatccaactctttttacaaagacatgtgatggtgatttgtttgtgtgccaaatttatgtcgatgacataatatttggttatactaaccaaaagtcttgtaaagagtttagcagggtgatgacgcagaaattcgagatgtcgatgttgggcgagttgaactacttccttgggttccaagtgaagcaactcaaggacggcaccttcatctcccaaacgaaatacacgcaagacttgctaaagcggtttgggatgaaggacgccaagcccgcaaaaactccaatgggaaccaacggacacaccgacctcaacaaaggaagtaagtccgttgatcaaaaagcataccggtccatgataggttctttgctttatttatgtgctagtagaccggatattatgcttagcgtatgcatgtgtgctagatttcaatccgatcctaaggagtgtcacttagtggcggtgaagcgaatactgagatatttagtcgctacgccttgcttcgggatctggtatcctaaggggtctaactttgacttaattggatactcagattccgactatgctggatgtaaggtcgataggaagagtacatcggggacgtgccaattcttaggaaggtccctggtgtcgtggaactctaagaaacaaacttccgttgccctatccaccgctgaggccgagtacgttgccgcaggacagtgttgcgcgcaactactttggatgaggtaa

SEQ ID NO: 182154 - DNA, 2737 bp, Zea mays
  Clone ID: MRT4577_97702C.1
aaaggatagaaaggtgattgctaggaaattaggggcaaaatgcaagggtgataaaacttgcatttgggtccctaagacaattgtgactaaccttgtaggacccaacaagagttgggtttatgcatccgggggttcaagctggattatcgacagcggatgcacaaaccatatgacgggggagaagaagatgttcacctcctacgtcaagaacaaggattcccaagattcaattatattcggtgatgggaatcaaggcaaggataagtctgaaacccaagggaccctcaagcgcttcctcaggagagctcaaaatgagtttgagctcaaggtgaagaagataaggagcgacaacgggtccgagttcaagaaccttcaagtggaggagttccttgaggaggaagggatcaagcacgagttctccgctccctacacaccacagcaaaatggtgtggtagagaggaagaacaggacgctaatcgatatggcgaggacgatgcttggagaattcaagacccccgagtgtttctggtcggaagccgtgaacacagcttgccacgccatcaacagggtctaccttcatcgcctcctcaagaggacttcgtatgagctactaaccggtaacaaacccaatgtatcttactttcgtgtatttgggagcaagtgctacattctagtaaagaagggtagaaattctaagtttgctcccaaagctgtagaagggtttttgttaggttataactcaaatacaaaggcgtatagagtcttcaacaaatcatcgggtttggttgaagtctctagcgacgttgtatttgatgagactaatggctctccaagagagcaagttgttgattgtgatgatgtagatgaagaagatgttccaacggccgctatacgaaccatggcgattggagaagtgcggccacaggaacaagatgaacgaaatcaaccttcttcctcaacaacggtgcatcccccaactcaagacgatgaacaggttcatcaaaaggagacgtgtgatcaagggggagcacaagatgatcacgtgatggaggaagaagcgcaaccggcacctccaacccaagttcgagcgatgattcaaagggatcatcccgtcgaccaaattctgggtgatattagcaagggagtaactactcgatctcgattagttaatttttgtgagcattactcttttgtctcttctattgagcctttcagggtagaagaggccctgctagatccggactgggtgttagccatgcaggaggaactcaacaacttcaagcgcaatgaagtttggacactggtgcctcgtcccaagcaaaatgttgtgggaaccaagtgggtgttccgcaacaaacaggacgagcacggggtggtgacaaggaacaaggctcgacttgtggcaaaaggttatgcccaagtcgcaggtttggactttgaggagacgtttgctcctgtggctaggctagagtcaattcgcatcttgctagcatatgccgctcaccattctttcaggttgtaccaaatggatgtgaagagcgctttcctcaacgggccgatcaaggaggaggtgtacgtggagcaaccccctggcttcgaggatgaacggtaccccgaccacgtgtgtaagctctctaaggcgctctatggacttaagcaagccccaagagcatggtatgaatgccttagagactttctaattgttaatgctttcaaggttgggaaagccgatccaactctctttactaagacatgtgatggtgatttgtttgtgtgccaaatttatgtcgatgacataatatttggttctactaaccaaaagtcttgtgaagagtttagcagggtgatgacgcagaaattcgagatgtcgatgatgggcgagttgaactatttccttgggttccaagtgaagcaactcaaggacggcaccttcatctcccaaacgaagtacacgcaagatctgctaaagcggtttgggatgaaggacgccaagcccgcaaagacgccgatgggaaccgacggacacaccgacctcaacaaaggaggtaagtccgttgatcaaaaagcataccggtcaatgatagggtctttactttatttatgtgctagtagaccggatattatgcttagcgtatgcatgtgtgctagatttcaatccgatcctaaggagtgtcacttagtagcggtgaagcgaattctaagatatttggttgctacgccttgcttcgggctctggtatccaaaagggtctacctttgacttggttggatactcagattccgactatgctggatgtaaggtcgataggaagagtacatcggggacgtgccaattcttaggaaggtccctggtgtcgtggaactctaagaaacaaacttccgttgccctatccaccgctaaggccgagtatgttgccgcaggacagtgttgcgcgcaactactttggatgaggcaaaccctccgggactttggctacaatctgagcaaagtcccactcctatgtgacaatgagagtgctattcgcatggcaaaaaatcctgttgagcacagccgcacaaagcacatagacatccgacatcactttttgagagaccaccagcaaaagggagatatcgaagtgtttcatgttagcaccgagaaccagctagacgatatctttaccaagcctctagatgagaaaaccttttgcaggttgcgtagtgagctaaatgtcttagattcgcggaacttggattga

SEQ ID NO: 182155 - DNA, 753 bp, Zea mays
  Clone ID: MRT4577_97703C.1
tatgctgctgagcttgtcgagtatgttcgcacctttctggaacgtacacatgaaagatgccgggcatcatatatggaggctgttcttgagaaacaaagttatattctcctctcacggagtgatgttgaaagtttaatgcgtctggaccctgcaaatgcttctttgcaaaagtcttttggtcaacttgataacgacattccagatgcaggaattgaagtggagattgaactaagtgatctcctattggatatgtgcccgataaaacaggaaaacttgatccatgatgaccagaaattgatattgctggcatctcttagcgactccttggaatatttagcagattcagttgaaaggcttggtgagtcatttataagtccatccaccatctcagaaaacaaaagtgacatacaccaaagtcaccatactcgcacatctagtgcaattccgaaaagccttgcatctcttgctaatgagtacagaaggctagcaaccgattgtgttagagtcttgagattggaaatgcagttggagacaatatatcacatgcaggacatgacaaaaagagaatatgtagaagatcaagacgctgaagatcctgatgacttcatcatctctcttacaactcagattgcacgtagggataaagaaatggctccttacatcccagaatcgaaaaggaactatgtatttggtgggatttctagtgttgctgctaatgcatcaataaaggcactcgcactaatgaagtccatc

SEQ ID NO: 182156 - DNA, 2898 bp, Zea mays
  Clone ID: MRT4577_97704C.1
atggctagtagtgctaaaaggaaccatgctttcttgtaccatgataggagacatgctggaaatgcttataatgattttgattcacatgtttatgattctcatgccatgtttgcttctagttcttcctataagcatgatagagatatgtgtaggagaaatgttgtgcatatgcctaggagaaattctgctcatgttcctagaaaagttgtgaacaaaccttctaccatttattatgcttgcaatgctccctttgctatttgtagaaagggtaagaaggtttatgcatccgggggatcaagctggattatcgacagcggatgcacaaaccatatgacgggggagaagaagatgttcacttcctacgtcaagaataaagattcccaggattcaattatattcggtgatgggaatcaaggcaaggataagtctgaaacccaagggaccctcaagcgcttcctcaggagagctcaaaatgagtttgagctcaaggtgaagaagataaggagcgacaacgggtccgaattcaagaaccttcaagtggaggaatttcttgaggaggaagggatcaagcacgagttctccgctccctacacaccacagcaaaatggtgtggtagagaggaagaacaggacgctaatcgacatggcgaggactatgcttggagagttcaagacccccgagcgtttttggtcggaagccgtgaacacggcttgccacgtcatcaacagggtctaccttcaccgcctcctcaagaagacgtcgtatgaacttctaaccggtaacaaacccaatgtatcatactttcgtgtatttgggagcaagtgctacattctagtgaagaagggtagaaattctaagtttgctcccaaagcagtagaagggtttttgttaggttatgactcaaatacaaaggcgtatagagtcttcaacaaatcatcgggtttggttgaagtctctagcgacgttgtatttgatgaaactaatggctctccaagagagcaaattgttgattgtgatgatgtagatgaagaagaggttccgacggccgctatacgaaccatggcgattggagaagtacggccacaggaacaagatgaacgagatcaatcctcttcctcaattatggtgcatcccccgactcaagacgatgaacaggttcatcaaaaggaggcgtgtgatcaagggggagcacaagatgatcacgtgatggaggaagaagcgcaaccggcacctccaacccaagttcgagcgacgatccaaagggatcatcccgttgaccaaattctgggtgacattagcaagggagtaactactcggtctcgattagttaatttttgtgaacattactcttttgtctcttctattgagcctttcagggtagaagaggccttgctagatccggactgggtgttggccatgcaagaggagctaaacaacttcaagcgcaatgaagtttggacactggtgcctcgtcccaagcaaaatgttgtgggaaccaagtgggtgttccgcaacaaacaggacgagcacggggtggtgacgagaaacaaggctcgacttgtggcaaaaggttatgcccaagtcgcaggtttggatttcgaggagacttttgctcctgtggctaggctagaatcaattcgtatcttgctagcatatgccgctcaccattctttcaggttgttccaaatggatgtgaagagcgcgttcctcaacggaccaatcaaggaggaggtgtacgtggagcaaccccctggctttgaggatgaacggtaccccgaccatgtgtgtaagctctctaaggcgctctatggacttaagcaagccccaagagcatggtatgaatgccttagagatttcttaattgttaatgctttcaaggttgggaaagccgatccaactctttttacaaagacatgtgatggtgatttgtttgtgtgccaaatttatgttgacgacataatatttggttcaactaaccaaaagtcttgtgaagagtttagcagggtgatgacgcagaaattcgagatgtcgatgatgggcgagttgaactacttccttgggttccaagtgaagcaactcaaggacggcaccttcatatcccaaacgaagtacacgcaagatctgctaaagcggtttgggatgaaggacgccaagcccgcaaagactccgatgggaacagacggacacaccgacctcaacaaaggaggtaagtccgttgatcaaaaagcataccggtccatgataggttctttgctttacttatgtgctagtagaccggatattatgcttagtgtatgcatgtgtgctagatttcaatccgatcctaaggagtgccacttagtggcggtgaagcgaattctgagatatttagttgctacgccttgtttcggactctggtatccaaaggggtccacctttgacttggttggatactcagactccgactatgctgggtgtaaggtcgataggaagagtacatcagggacgtgccaattcttaggaaggtccctggtgtcgtggaactctaagaaacaaacctccgttgccctatccaccgctgaggccgagtatgttgccgcaggacagtgttgcgcgcaactactttggatgaggcaaaccctcagggactttggctacaatctgagcaaagtcccactcctatgtgataatgagagtgctatacgcatggcggagaatcctgttgagcacagccgcacaaagcacattgacatccggcatcactttttgagagaccaccagcaaaagggagatatcgaagtgtttcatgttagcaccgagaaccagctagccgatatcttcactaagcctctagatgagaagaccttttgcaagttgcgtagtgagctaaatgtcttagattcgcggaacctggattga

SEQ ID NO: 182157 - DNA, 4803 bp, Zea mays
  Clone ID: MRT4577_97705C.1
atggatcctaaggggaagggaatcgtgatcaacgacaaggaaaaggagtccttcgtcaacgagccaaaagatgacaaatccaacgactccggctcgggccacagacgtaaagatgggaagaagaagaagacaagacgtatcaaggagatcgtctactacgacagcgacgagtctacttcttcccacaaggacgacgacaacgactacaggaagacggtcaattcgaacttttcatttgattattctcgtattccacatagttcgaattcgcatttgctttccattcctcttggcaaacctccacactttgatggggaggactacggattttggagtcacaaaatgcgtagccatttattctctctccatccaagcatatgggagattgtagagagtggaatgaaatttgatagctcggatagccctatgtttattaacgaacaaattcataaaaatgcacaagctactactgtgttgctagcctctttgtgcagggacgagtacaataaggtgagcggcttggacaatgccaagcagatatgggacaccctcaagatttctcacgaggggaacgacatcaccatgctcactaaaatggagttggtggagggcgagcttggaaggtttgcaatgataaggggcgaggagccaacccaaacatacaaccggctcaagacccttatcaacaaaataaggagttatggaagcacgcgatggacggaccatgacgtcgtccgactattgctaaggtcctttaccattcttgatcctcatttggtgaataatattcgtgagaatcccaggtacaccaaaatgtcgcccgaagaagtcctaggaaaattcgtcagcgggcgaatgatgattaaggaagcaaggtacgtggacgacgccttgaatggaccaatcaacgagccgcaacctcttgctctcaaagcaacaagaagcaaggaggcgctacctagcaaggtggcacaaattgaggcagccggacttaatgatgaagagatggctctcatcatcaaacgcttcaagacggtgctaaaaggtcacaaggggcagccaagcaagaccaagacaaaagggaagcgctcatgcttcaagtgcggtaagattggtcattttatcgctaactgccctgataacgatattgaccaggaacaggggaacaagagggaaaagaagaagaattacaagaaggccaagggcgaggcacacatcggaaaggagtgggattcggattgctcctccgactccgacaatgaaggactcgccgccaccgccttcaacaagtcatccctcttccccaacgagcgtcacacatgccttatggcaagggagaagaaggtgagtactcgagactccacttatgcttcttctagtgataatgagtctagtgatgatgatgacatagactattcatacttattcaagggtttagatagatctaagatagacaaaattaatgaattgattgatgccttgaatgatatgaataggcttttagaaaagcaagaggatttgttgtatgatgagcatgataagtttgtagaggcacaaaaatcctatgctttagaagttaaaagaaatgaagtactttctagtgaattatcttcttgtcatgaaaacattgctactttaaagagcgttaatgatgatttaaatgctaagctagaaaaatctagtaaattaacatcttgtgtagaacatgttgtgatttgcactaggagtaaagactttaatgttgatgcttgtagtgaacacctagagtgcatttctaaattaaatgatgaagtagctagtcttaatgcccaacttaagactagcaagagtgatttggataaactaaaatttgcaagggatgcctacacaattggtagacacccctcaattaaggatgggcttggcttcaagagggaagtcaagaacttgacaagccataaggctcccatctccgccaaggagaaagggaaggcccctatggctactagtgttaaaaagaaccatgcctttttgtatcatgataggaaaaattctagaaatgcttttagaagatatgatgcttttgattcacatgcttatgattcttatgctatgactgcttctagttctcatgttgtgcatgatagaaaagttggtaggaggaatgttgttcataatatgcctaggagaaatgttgttaatattcctaggaaagttaatgagccttctacaatatatcatgctttgaatgcttcctttgcaatttataaaaatgatagaaaggtttatgcatccgggggttcaagctggattatcgacagcggatgcacaaaccatatgacgggggagaagaagatgttcacctcctacgtcaagaataaggattcccaagattcaattatattcggtgatgggaatcaaggcaaggataagtctgaaacccaagggaccctcaagcgcttcctcaggagagctcaaaatgagtttgagctcaaggtgaagaagataaggagcgacaacgggtccgagttcaagaaccttcaagtggaggagttccttgaggaggaagggatcaagcatgagttctccgctccctacacaccacagcaaaatggtgtggtagagaggaagaacaggacgctaatcgacatggcgaggactatgcttggagagttcaagacccccgagcgtttttggtcggaagccgtgaacacggcttgccacgccatcaacagggtctaccttcatcgcctcctcaagaagacttcatatgagcttctaaccggtaacaaacccaatgtatcttactttcgtgtatttgggagcaagtgctacattctagtgaagaagggtagaaattctaagtttgctcccaaagctgtagaagggtttttattaggttatgactcaaatacaaaggcgtatagagtcttcaacaaatcatcaggtttggttgaagtctctagcgacgttgtatttgatgagactaatggctctccaagagagcaagttgttgattgtgatgatgtagatgaagaagatgttccaacggtcgctatacgaaccatggcgattggagaagttcatcaacaggaggcgtgtgatcaagggggagcacaagatgatcgtgtgatggaggaagatgcgcaaccagcacctccaacccaagttcgagcgatgattcaaagggatcatcccgtcgaccaaattctgggtgacattagcaagggagtaactactcgatctcgattagttaatttttgtgagcattactcctttgtctcttctattgagcctttcagggtagaggaggccttgctagatccggactgggtgttggccatgcaggaggagctcaacaacttcaagagaaatgaagtttggacgctggtgcctcgtccgaagcaaaatgttgtgggaaccaagtgggtgttccgcaacaaacaggacgaacacggggtggtgacgagaaacatggctcgacttgtggcaaaaggttatgcccaagtcgcaggtttggatttcgaggagacttttgctcctgtggctaggctagagtctattcgtatcctgctagcatatgccgctcaccattctttcaggctgttccaaatggatgtgaagagcgctttcctcaacgggccaatcaaggaggaggtgtacgtggagcaaccccctggcttcgaggatgaacggtaccccaaccacgtgtgtaagctctctaaggcgctctatggacttaagcaagccccaagagcatggtatgaatgccttagagactttctaattgctaatgctttcaaggttgggaaagccgatccaactctttttactaagacatgtgatggtgatttgtttgtgtgccaaatttatgtcgatgacataatatttggttctactaaccaaaagtcttgtgaagagtttagcagggtgatgacgcagaaattcgagatgtcgatgatgggcgagttgaactacttccttgggttccaagtgaagcaactcaaggacggcaccttcatctcccaaacgaagtacacgcaagatctgctaaagcggtttgggatgaaggacgccaagcccccaaagactccgatggggaccgacggacacaccgacctcaacaaaggaggtaagtccgttgatcaaaaagcataccggtcaatgataggttctttgctttacttatgtgctagtagaccggatattatgcttagcgtatgcatgtgtgctagatttcaatccaatcctaaggagtgtcacttagtggcggtaaagcgaattcttagatatttggttgctacgccttgcttcgggctctggtatccaaaggggtctacctttgacttagttggatactcagactccgactatgctggatgtaaggtcgataggaagagtacatcggggacgtgccaattcttaggaaggtccctggtgtcatggaactctaagaaacaaacctccgttgccctatccaccgctgaggccgagtacgttgccgcaggtcagtgttgcgcgcaactactttggatgaggcaaaccctccgggactttggctacaatctgagcaaagtcccactcctatgtgacaatgagagtgctatccgcatggcggagaatcctgttgagcgcagccgcacaaagcacatagacatccggcatcactttttgagagaccaccagcaaaagggagatatcgaagtgtttcatgttagcaccgagaaccagctagccgatatcttcactaagcctctagatgagaagaccttttgcaggttgcatagtgagctaaatgtcttagattcgcggaacctggattga

SEQ ID NO: 182158 - DNA, 4788 bp, Zea mays
  Clone ID: MRT4577_97706C.1
atggatcctaaggggaagggaattgtgatcaacgacaaggagaaggagtccttcgtcaacgagccaagggatgacaagtccaatgactcgggctcgggccacaagcgaaaagatgggaagaagaagaagacaagacgcatcaaggagatcgtctactacgacagcgatgagtcctcttcttcccaaaaggacgacgaccacgactacaaaaagacggtcaattcgaacttttcatttgattattctcgtattcaacatagttcgaattcgcatttgctttccattcctcttggcaaacccccacactttgatggggaggactacggattttggagtcacaaaatgcgtagtcacttattctctctccatccaagcatatgggagattgtggagaatggaatgaaatttgatagctcggatagccctatgcttataaatgaacaaattcatagaaatgcacaagctactactgttctcttagcatctttgtgcagggaagaatacaataaggtgagtggcttggacaatgccaagcagatatgggacaccctcaagatctctcacgaggggaacgacatcaccatgctcaccaagatggagttggtggagggcgagcttggacgattcgccatgataaggggagaggagccaactcaaacctacaaccggctcaagacccttatcaacaaaataaggagctacggaagcacgcgttggacggatcacgacgtcgtccgcctaatgctcaggtcctttaccgttcttgatcctcatctcgtgaacaatattcgtgagaatcccaggtacatgatgatgacgcccgaggaagtgcttggaaaattcgtgagcgggcggatgatgatcaaggaggcaagatacgttgacgacgcattgaacggtccactccacgagcctcaacccattgctctaaaggcaacgaggagcaaggagtcgcttcctagcaaggtggcgcaaattgaggcggccggtcttaatgaagaagaaatggccctcattatcaagagattcaagacggtgctaaagggtcgcaatggacagccgagcaagactaagaccaaggggaagcgatcatgcttcaaatgcggtaagcttggtcattttattgctaactgtcccgataatgatagtgaccaggaaaagggaaacaagagggaaaagaagaagcattacaagaaggcaaagggcgaggcgcatctaggcaaggagtgggactcggattgctcctcgtccgactccgacaatgaaggactcgccgccaccgccttcaacaaatcggctctcttccccaacgagcatcacacttgcctcatggcaagggaaaagaaggtaatcactcgtaatgctaatacttatgattcttctagtgatgatgaatctagtgaggatgaaattgattactctagcttattcaagggattggatagaactaagatagctaagattaatgagttgattgatgccttaaatgaaaaggatagaaccttagagaaacaagaagatctcttatatgaagaacatgataaatttgttagtgctcaaaattcacttgctctagaagttaaaagaaatggaatactttcttgtgaactttctacttgtaatgaaaccatttcttctttaaaaggtgaaattaaagatttaactactaaactagaagtagcaagtaactcgtatgttgaaaatattacaatttgcactaggtgtaaggattttgatgttaatgcttgtagtgaacacttagtttccatttcaaaattaagtgatgaagtggctagtcttaatgctcaacttaagactagcaaaagtgattttgaaaaactaaaatttgctagggatgcctacacggttggtagacacccctcaattaaggatggacttggcttcaagagggaagccaagaacttaacaagccataaggctcccattcccgccaaggagaaagggaaggcccctatggctactagtgctaagaggaaccatgcctttttgtatcatgaaagaagacatactagaaatgatgtttttgattcacatgcttatgactcttatgctatgactgcttctagttctcatgttatgcatgatagaagaaatgttgttcaccaaatgcctaggaaaaatgtagttcataatgctcctaggaaagtttatgcatccgggggttcaagctggattatcgacagcggatgcacaaaccatatgacgggggagaagaaaatgttcacctcctacgtcaagaataaagattcccaagattcaatcatattcggtgatgggaatcaaggcaaggataagtctgaaacccaagggaccctcaagcgcttcctcaggagagctcaaaatgagtttgagctcaaggtgaagaagataaggagtgacaacgggtccgagttcaagaaccttcaagtggaagagtttcttgaggaggaagggatcaagcatgagttctctgctccctacacaccacagcaaaatggtgtggtagagaggaagaacaggacgctaatcgacatggcaaggactatgcttggagagttcaagacccccgagtgcttttggacggaagccgtgaacacggcttgccacgccatcaacagggtctaccttcaccgactcctcaagaagacgtcgtatgagctactaaccggtaacaaacccaatgtatcgtactttcgtgtatttgggagtaaatgctacattctagtgaagaagggtagaaattctaagtttgctcccaaagctgtagaagggtttttgttaggttatgactcaaatacaaaggcgtatagagtcttcaacaaatcatcgggtttggttgaagtctctagcgacgttgtatttgatgagactaatggctctccaagagagcaagttgttgatcttgatgatgtagatgaagaagatgttccgacggccgctatacgaaccatggcgattggtgatgtgcgaccacaggaacaagaagagcaagatcaaccttcttcctcaactatggtgaatcccccaactcaagacgatgaacaggttcatcaacaggaggcgtgtgatcaagggggagcacaagatgatcttgtggtggaggaagaagcgcaaccggcacctccaacccaagttcgagcgatgattcaaagggatcatcccgtcgaccaaattctgggtgacattagcaagggagtaactactcgatctcgattagttaatttttgtgaacattactcctttgtctcttctattgagcctttcagggtagaagaggccttgctagatccggattgggtgtcggccatgcaagaggagttaaacaacttcaagcgcaatgaagtttggacactggtgcctcgtcccaagcaaaatgttgtgggaaccaagtgggtgttccgcaacaaacaagacgagcacggggtggtgacgagaaacaaggctcgacttgtggcaaaaggttatgcccaagtcgcaggtttggatttcgaggagacttttgctcctgtggctaggctagaatcaattcgtatcttgctagcatatgccgctcaccattctttcaggttgttccaaatggatgtgaagagcgctttcctcaacgggccaatcaaggaggaggtgtacgtggagcaaccccctggcttcgaggatgaacggtaccccgaccatgtgtgtaagctctctaaggcgctctatggacttaagcaagccccaagagcatggtatgaatgccttagagatttcttaattgctaatgctttcaaggttgggaaagccgatccaactctttttaccaagacttgtgatggtgatttgtttgtgtgccaaatttatgtcgatgacataatatttggttctactaaccaaaagtcttgtgaagagtttagcagggtgatgacgcagaaattcgagatgtcgatgatgggcgagttgaactacttccttgggttccaagtgaagcaactcaaggacggcaccttcatctcccaaacgaagtacacgcaagatctgctaaagcggtttgggatgaaggacgccaagcccgcaaagactccgatggggaccgacggacacaccgacctcaacaaaggaggtaagtctgttgatcaaaaagcataccggtcaatgataggttctttgctttacttatgtgctagtagaccggatattatgcttagcgtatgcatgtgtgctagatttcaatccgatcctaaggaatgtcacttagtggcggtgaagcgaattcttagatatttggttgctacgccttgcttcgggctctggtatccaaaggggtctacctttgacttagttggatactcagactccgactatgctggatgtaaggtcgataggaagagtacatcggggacgtgccaattcttaggaaggtccctggtgtcatggaactctaagaaacaaacatccgttgccctatccaccgctgaggccgagtacgttgccgcaggtcagtgttgcgcgcaactactttggatgaggcaaaccctccgggactttggctacaatctgagcaaagtcccactcctatgtgacaatgagagtgctatccgcatggcggagaatcctgttgagcacagccgcacaaagcacatagacatccggcatcactttttgagagaccaccagcaaaagggagatatcgaagtgtttcatgttagcaccgagaaccagctagccgatatctttaccaagcctctagatgagaagaccttttgcaggctgcgtagtgagctaaatgtcttagattcgcggaacttggattga

SEQ ID NO: 182159 - DNA, 582 bp, Zea mays
  Clone ID: MRT4577_97707C.1
aaaaaaccaattggcttgggggattaaagaaggcgttcctcatttttttaggcccaagggcggattcctttaaaacccttttggccccctaacccaatcccggaaaaaaacccccctttttttttttttttgggaaaaaaaaaacattgggacccggacctaaactttttttaggggcggttccccttttatggccacctttaaaaccgggttcatggttggcccaaagttgggggggaaaactaaaatcccaaggggccagggggttaaaaaagtttttttcattattgttttggccaacctggggccccctgggcctaattgggggcccccccaacggggttggtttctttaaaataacggggggcaaaagaaaccgggggggggttttaaaggatccgtttacccctgggggggcccccggggaaaataatcccctggaccttgaaaaggggggacttggatccggggtccgccgtatcccaagaaccccccgggggggaaaccagggacccaccccccgaaatatcggggttccgggcccaaaaaagaaaaacctttccctttccgaaaaaggggggg

SEQ ID NO: 182160 - DNA, 4989 bp, Zea mays
  Clone ID: MRT4577_97708C.1
atggatcctaaggggaagggaatcgtgatcaacgacaaggagaaggaatccttcgtcaacgagcccaaagaagacaagcctaccgactctggctcgggccatagacggagggaagggaagaagaagaagacaaggcgcatcaaggagatcgtctactacgacgacagcgacgaatcttcctcttcccaaaaggacgacgaccacaacgactacgagcaaaggaaaccggttaattctaacttttcctttgactactctcgtattccgcaaagttcaaattcacatttgctttccattccactcggcaagcccccacactttgatggagaggactacggattttggagccacaaaatgcgtagtcacctattttctctccatcctagtatatgggagattgtagatagtggaatgcactttaatagttcggatagtcctatattcattaatgagcaaatccataagaatgcacaagctactactgttcttctagcttcattgtgcagggatgaatataacaaagtgagtggcttagataacgccaagcaaatctgggataccctcaagatctctcatgagggaaatgacgctaccttgctcaccaaaatggagttggtggagggcgagcttggacggttcgcgatgataaggggcgaggagccaactcaaacatacaaccggctcaagacccttatcaacaaaataaggagctacggaagcacgcgatggacggaccacgacgtcgtccgactaatgctaaggtcctttaccgttcttgatcctcatttggtgaataatattcgtgagaatcccaggtacaccaaaatgtcgcccgaagaagtcttaggaaaattcgtcagcgggcgaatgatgatcaaggaggcaaggtacgtggacgacgccttgaatggaccgatcaacgaaccacaaccttttgctctcaaagcaacaagaagtaaggaggcgctacctagcaaggtggcacaaattgaggcggtaggacttaatgatgaagagatggctctcatcatcaaacgcttcaagacggtgctgaagggtcacaaggggcagccaagcaagaccaagacgaaggggaagcgctcatgcttcaagtgcggtaagattggtcattttattgctaactgccccgataatgatagtgaccaggaaaagggaaacaagagggaaaagaagaagcattacaagaaagcaaagggcgaggcacatctaggcaaggagtgggactcggattgctcctcttccgactccgacaatgaaggactcgccgccaccgccttcaacaaatcaaccctcttccccaacgagcgtcacacatgccttatggcaagggagaagaaggtatgtactcgcaactctacctatgcttcttcaagtgaggacgaatctagtgatgatgatgaagtagattattcatgtttgttcaagggcttagatagatctaagatagacaaaattaatgaattaattgatgccttgaatgaaaagaatatacttttagaaaagcaagaggatttgttatatgaagaacatgataagtttgtagaggcacaaaaatcccttgcattagaaattaagagaaatgaaatgcttgcttgtgaagtgtcaacatgccatgattctatttctaacttaaagagcataaacgatgatttaaatgctaaactagtagaagcaaataaatccaactcgtgtgttgaatatgttgaaatttgcactaggtgtaaggatattgatattaatgcttgtagcgaacacttagtttctatttcaaaattgaatgatgaattagctagtcttaatgctcaacttaagactagcaagagtaattttgataaactaaaatttgctagggatgcctacacggttggtagacacccctcaattaaggatgggcttggcttcaagagagaagtcaagaacttgacaagccataaggctcctatctccgccaaggagaaagggaaggctcctatggctagtagcactaaaaagaaccatgcttttttgtatcatgatagaagtgcttataggggttataatgcttatgatgattgtgatgctcatagttcttcctttatgcatggtagaaatatgtctaggaaaaatgctatgcctagaaagaatgttattcatgctcctaggaaagtagtgaatgaaccttctacaatttattgtgctttaaatgcttcctttgttatttgtagaaaggataagaaaattgttgctaggaagttaggggcaaaatgcaagggagacaaaacttgcatttgggtccctaaggatatttgcactaaccttgtaggacccaacatgagttgggtttatgcatccgggggttcaagctggattatcgacagcggatgcacaaaccatatgacgggggagaagaagatgttcacctcctacgtcaagaataaggattcccaagattcaatcatattcggtgatgggaatcaaggcaagatagaccttgtgcagcttgtcaagcaggataagtctgaaacccaagggaccctcaagcgcttcctcaggagagctcaaaatgagtttgagctcaaggtgaagaagataaggagcgacaacgggtccgagtttaagaaccttcaagtggaggagttccttgaagaggaagggatcaagcacgagttctccgctccctacacaccacagcaaaatggtgtggtagagaggaagaacaggacgctcatcgacatggcgaggacgatgctaggagagttcaagacccccgagtacttttggacggaagccgtaaacacggcttgccacgccatcaacagggtctaccttcatcgcctcctcaagaagacgtcgtatgagctactaaccggtaacaaacccaatgtatcctactttcgtgtatttgggagcaagtgctacattctagtgaagaagggtagaaattcaaaatttgctcccaaagctgtagaagggtttttgttaggttatgactcaaatacaaaggcgtatagagtcttcaacaaatcatcaggtttggttgaagtctctagtgacgttgtatttgatgagactaatggctctccaagagagcaagttgttgattgtgatgatgtagatgaagaagatgttccaacggccgcaatacgaaccatggcgattggagacgttcggccacaggaacaagatgaacgagatcaaccttcttcctcaactatggtgcatcccccaactcaatacattgaacaggttcatcaacaggaggcgtgtgatcaagggggagcacaagatgatcatatgatggaggaagaagcgcaaccggcacctccaacccaagttcgagcggtgattcaaagggatcatcccgtcgaccaaattctgggtgacattagcaagggagtaactactcggtctcgattagttaatttttgtgaacattactcctttgtctcttctattgagcctttcagggtagaggaggccttgctagatccggactgggtgttggccatgcaggaggagcttaacaacttcaagcgcaatgaagtttggacactggtgcctcgtccgaagcaaaatgttgtgggaaccaagtgggtgttccgcaacaaacaggacgagcacggggtggtgacgaggaacaaggctcgacttgtggcaaaaggttatgcccaagtcgcaggtttggactttgaggagacgtttgctcctgtggctaggctagaatcaattcgtatcttgctagcatatgccgctcaccattctttcaggttgtaccaaatggatgtgaagagcgctttcctcaacgggccaatcaaggaggaggtgtacgtggagcaaccccctggcttcgaggatgaacggtaccccgaccatgtgtgtaaactctctaaggcgctctatggacttaagcaagccccaagagcatggtatgaatgccttagagactttttaattgctaatgctttcaaggttgggaaagccgatccaactctttttacaaagacatgtgatggtgatttgtttgtgtgccaaatttatgtcgatgacataatatttggttctactaaccaaaagtcttgtgaagagtttagcagggtgatgacgcagaaattcgagatgtcgatgatgggcgagttgaactacttccttgggttccaagtgaagcaactcaaggacggcaccttcatctcccaaacgaagtacacgcaagatctgctaaagcggtttgggatgaaggacgccaagcccgcaaagactccgatggggaccgacggacacaccgacctcaacaaaggaggtaagtccgttgatcaaaaagcataccggtcaatgataggttctttgctttacttatgtgctagtagaccggatattatgcttagcgtatgcatgtgtgctagatttcaatccgatcctaaggagtgtcacttagtggcggtgaagcgaattcttagatatttggttgctacgccttgcttcgggctctggtatccaaaggggtctacctttgacttagttggatactcagactccgactatgctggatgtaaggtcgataggaagagtacatcggggacgtgccaattcttaggaaggtccctggtgtcatggaactctaagaaacaaacatccgttgccctatccaccgctgaggccgagtacgttgccgcaggtcagtgttgcgcgcagctactttggatgaggcaaaccctccgggactttggctacaatctgagcaaagtcccactcctatgtgacaatgagagtgctatccgcatggcggagaatcctgttgagcacagccgcacaaagcacatagacatccggcatcactttttgagagaccaccagcaaaagggagatatcgaagtgtttcatgttagcaccgagaaccagctagccgatatcttcactaagcctctagatgagaagaccttttgcaagttgcgtagtgagcttaatgtcttagattcgcggaacctggattga

SEQ ID NO: 182161 - DNA, 5433 bp, Zea mays
  Clone ID: MRT4577_97709C.1
atggatcctaaggggaagggaatcgtgatcaacgacaaggagaaggagtccttcgtcaacgagccaaaggatgacaagtccaacgacttgggctcaggccatagacgaaaagatgggaagaagaagaagacaaggcgcatcaaggagattgtctactacgacagcgacgaatcttcctcttctcaaaaggacgacgacaacaactacaggaagacggtcaattcgaacttttcatttgactattctcgtattccacataattcgaattcgcatttgctttccattcctcttggcaaacctccacacttcgatggggaggactacggattttggagtcacaaaatgcgtagtcacttattctctctccatccaagtatatgggagattgtagagaatggaatgaaatttgatagctcggatagtcctatgcttataaatgaacaaatccatagaaatgcacaagctactactgttctcttagcatctttgtgcagggaagaatacaataaggtgagcggcttggacaatgccaagcagatatgggacaccctcaagatctctcacgagggcaatgacgtcaccatgctcaccaagatggagttggtggagggcgaacttggaagattcgctatgataaggggggaggaccacttggcattaactgagccaagggatgacaagtccaacaactcgggctcgggacacaagcgaaaagatgggaagaagaagaagacaagacgcatcaaggagatcgtctactacgacagcgatgagtcctcttcttcccaaaagaacgacgaccacgacaaacaaaggaaaccggttaattcgaacttctcatttgattattctcgtattccacatagttcgaattcgcatttactttccattcctcttggtaaacctccacattttgatggggaagactacggattttggagtcacaaaatgcgtagtcatttattctctctccatccaagcatatgggagattgtagagaatggaatgaaatttgatagctcggatagccctatgtttatcaatgaacaaattcataaaaatgcacaagctactactgttctcttagcatctttgtgcagggaagagtacaataaggtgagcggcttggacaatgccaagcagatatgggacaccctcaagatctctcacgaggggaacgacatcaccatgctcaccaagatggagttggtggagggcgagcttggacgattcgccatgataaggggagaagagccaactcaaacttacaaccggctcaagacccttatcaacaagataaggagctacggaagcacgcgttggacggatcacgacgtcgtccgcctaatgctcaggtcatttaccgttcttgatcctcatctcgtgaacaatattcgtgagaaccccaggtacacgatgatgacgcccgaagaagtacttggaaaattcgtgagcgggcggatgatgatcaaggaggcaaggtacgtcgatgacgcgttgaacggtccaatccacgagcctcaacccattgctctcaaggcatcgaggagcaaggaggcactaccaagcaaggtggcgcaaattgaggcggccgggcttaatgatgaagaaatggctctcatcattaagcgcttcaagacggtgctaaagggtcgcaatggacagccgagcaagactaagaccaaggggaagcgatcatgcttcaaatgcggtaagcttggtcattttattgctaactgtcctgataatgaaagtgaccaggaaaagggaaacaagagggaaaagaagaagcattataagaaggcaaagggtgaggcgcatctaggcaaggagtgggactcggattgctcctcatccgactccgacaatgaaggactcgccgccaccgccttcaacaaatcaaccctcttccccaacgagcgtcacacatgccttatggcaagggagaagaagatatgtactcgcaactctacctatgcttcttcaagtgaggacgaatctagtgatgaggatgaagtagattattcatgtttgttcaagggcttagatagatctaagatagacaaaattaatgaattaattgatgccttgaatgaaaagaatatacttttagaaaagcaagaggatttgttgtatgaagagcatgataaatttgttgaggcacaaaaatcctatgctttagaggttaaaagaaatgaaatgctttcttttgaactatctacttgtcatgaaaccatttctactttgaaaggtgtcaacaatgatttaaatgctaaattagaagtagcaaataaatccaactcttgtgttgaacatgttgaaatttgcactaggtgtaaggatgttgatattaatgcctgtagtgaacacttagtttccatttcaaaattgagtgatgaagtagctagtcttaatgctcgacttaagactagcaaaagtgattttgaaaaactaaaatttgctagggatgcctacacggttggtagacacccctcaattaaggatggacttggcttcaagagggaagccaagaacttaacaagtcataaggctcccattcccgccaaggagaaagggaaggcccctatggctactagtgctaaaaggaaccatgcctttttgtatcatgataaaagacaaactagaaatagaagttatgatgcttttgattcatatgtttatgattctcatgccataaaggatagaaaagtaattgctaggaagttaggggcaaaatgcaaaggtgataaaacttgcatttgggtccctaaggaaattgtgactaaccttgtaggacccaacaagagttgggtttatgcatccgggggttcaagctggattatcgacagcggatgcacaaaccatatgacgggggagaagaagatgttcacctcctacgtcaagaataaagattcccaagattcaattgtattcggtgatgggaatcaaggcaaggaaaaatccgaaacccaagggactctcaaacgcttcctcaggagagctcaaaatgagtttgagctcaaagtgaaaaagataagaagcgacaacgggtccgagttcaagaaccttcaagtggaggagttccttgaagaggaagggatcaagcacgagttctccgttccctacacaccacagcaaaatggtgtggtagagaggaagaacaggacactcatcgacatggcgaggacgatgctaggagagtacaagacccccgagtgcttttggacggaagccgtgaacacggcgtgccacgccatcaacagggtctaccttcatcgcctcctcaagaagacgtcgtatgagctactaaccggtaacaaacccaatgtatcgtactttcgtgtatttgggagtaaatgctacattctagtgaagaagggtagaaattctaagtttgctcccaaagctgtagaagggtttttgttaggttatgactcaaatacaaaggcgtatagagtcttcaacaaatcatcgggtttggttgaagtctctagcgacgttgtatttgatgagactaatggctctccaagagagcaagttgttgattgtgatgatgtagatgaagaagatgttccgacggccgctatacggaccatggcgattggagaagtacggccacaggaacaagatgaacgaaatcaaccttcttcctcaactatggtgcatcccccaaccgaagatgacgaacaggtacctcaagtggaggcgctcgatcaagggggagcacaagataatcatgtgatggaggaagaagtgcaaccggcacctccaacccaagttcgagcgatgattcaaagggatcatcccgtcgaccaaattctgggtgacattagcaagggagtaactactcgatctcgattagttaatttttgtgagcattactcttttgtctcttctattgagcctttcagggtagaggaggccttgctagatccggactgggtgttggccatgcaagaggagctaaacaacttcaagcgcaatgaagtttggacactggtgcctcgtccgaagcaaaatgttgtgggaaccaagtgggtgttccgcaacaaacaggacgagcacggggtggtgacgaggaacaaggctcgacttgtggcaaaaggttatgcccaagtcgcaggtttggactttgaggagacctttgctcctgtggctaggcttgagtccattcgtattttgctagcatatgccgctcaccattctttcaggttgtaccaaatggatgtgaagagcgctttcctcaacgggccaatcaaggaggaggtgtacgtggagcaaccccctggcttcgaggatgaacggtaccccgaccacgtgtgtaagctctctaaggcgctctatggacttaagcaagccccaagagcatggtatgaatgccttagagactttttacttgctaatgctttcaaggttgggaaggccgatccaactctttttacaaagacaagtgatggtgatttgtttgtgtgccaaatttatgtcgatgacataatatttggttctactaaccaaaagtcttgtgaagagtttagcagggtgatgacgcagaaattcgagatgtcgatgatgggcgagttgaactacttccttgggttccaagtgaagcaactcaaggaaggcaccttcatctcccaaacgaagtacacgcaagatctgctaaagcggtttgggatgaaggacgccaagcccgcaaagactccgatggggaccgacggacacaccgacctcaacaaaggaggtaagtccgttgatcaaaaagcataccggtcaatgataggttctttgctttacttatgtgctagtagaccggatattatgcttagcgtatgcatgtgtgctagatttcaatccgatcctaaggaatgtcacttagtggcggtgaagcgaattcttagatatttagttgctacgccttgcttcggactctggtatccaaaggggtctacctttgacttagttggatactcagactccgactatgctggatgtaaggtcgataggaagagtacatcggggacgtgccaattcttaggaaggtccctggtgtcatggaactctaagaaacaaacctccgttgccctatccaccgctgaggccgagtatgttgccgcaggacagtgttgcgtgcaactactttggatgaggcaaaccctcagggactttggctacaatctgagcaaagtcccactcctatgtgacaatgagagtgctatccgcatggcggaaaatcctgttgaacacagccgcacaaagcacatagacatccggcatcactttttgagagaccaccagcaaaagggagatatcgaagtgtttcatgttagcaccgagaaccagctagccgatatctttaccaagcctctagatgagaagaccttttgcaggctgcgtagtgagctaaatgtcttagattcgcggaacttggattga

SEQ ID NO: 182162 - DNA, 1453 bp, Zea mays
  Clone ID: MRT4577_9770C.1
attaccgcaaggaggtctcgggcggtcggggccggatcgcccacctcgcaccgtctcaccacagcgagcgagagcaaggcgcccaagcaaccaccgcgagaacaagtcgcagccaaacagccccgtctcccagcgaagcttgagcttgcattattctaccatgtcttccatggagctgctccacgccgtcgtcccggagaagcagagcgaggaggaggtcgcgcccgcagcgacgaccacgagcagcagcgccaccgccacgggcggggacgagggcgcccacgtgctccaggggtgggccaagaggaagcgctcgcgccgccagcgatcggaggaggagaacctcgcgctctgcctcctcatgctctcccgcggtggccaccaccgcgtccaggcgccgccaacgccggtcccgtccgcggcgccggccgccgcggagttcaggtgctccgtctgcggcaagtccttcagctcctaccaggcgctggggggccacaagaccagccaccgcgtcaagctgcccacccctcctcctcctcctcctcctgctgtaactgtcccggcagcagtgcccgtcccggaggcccccgccccgaccaccgtcgtcgtcccgccgctgccgccagtcgaggtcggccgcgagccggccacgtcatccaccgccgcgtcctccgacggggcggcctcgagcagagtccaccggtgctccatctgccacaaggagttcccgaccggccaggcgctcggcgggcacaagaggaagcactacgacgggggcgtcggcagcgccgccgcgtccaccgacgtcccggcggcgcccgccgagacgtccgccgaggtcgggagctccgccgcgcgtgcgttcgacctcaacctcccggccgtgccggagttcgtgttccggtgcggcaagcccggcaagatgtgggaggaggacgaggaggtgcagagccccctcgccttcaagaagccccgcctcctcatgaccgcgtgaaaccgctgcgcgcgcgggcggcggatctcatctcatcacccgtccaagattttggtccgcagctgccgagttcagcggtggaagtggaacacactattcgttcattcatttcgtatggtgccagtagcgctattgtttgatttttgtggctgctcctcttgtacagtaccgagtgcgagaaaagatgcatagtcatcgtatacataccaatacaataccgtacctataggtcttcctattcctgtggaagagtagaacttgtatccttattagctgtcagttcatacacacttggttctcattaccagagatcattggtgaattagtggttttgtatcataagcttattgtaaatgatggattggagattagtatggaatcagataccccatttgttccaaacctggttcaagtcccagacttttttggatgttcggtggaacactattcgttcgttcc

SEQ ID NO: 182163 - DNA, 1495 bp, Zea mays
  Clone ID: MRT4577_97710C.1
ccggtctagccttcccgaggctgtcacgccgtcccgctccctctcccgccagccgccgcctccgccggggggcccaccccgccgggcgtcaccgcgcccgcccccgcggcgcagcagcagcagcagccgcccccgctcgcggagctggagcgcgtgcgccgcgtcggcagcggcgcgggcgggacggtgtggatggtgcggcaccgcggcacggggcgcccctacgcgctcaaggtgctgtacggcaaccacgacgacgcggtgcggcggcagatcacgcgcgagatcgccatcctccgcaccgccgagcacccggccgtggtgcgctgccacggcatgtacgagcaggccggggagctccagatcctgctggagtacatggaccaggggtcgctcgagagccaccgcatcgccgacgagcgcttcctggcgcacgtggcgcgccaggtgctgtcgggcatcgcctacctccaccgccgccacatcgtgcaccgcgacatcaagccctccaacctgctcatcgactccgggcgccgcgtcaagatcgccgacttcggcgtgggccgcatcctgaaccagaccatggacccctgcaactcctccgtgggcaccatcgcctacatgagccccgagcgcatcaacaccgacctcaacgacggcacctacgacggctacgccggcgacatctggagcttcggcctcagcatcctcgagttctacttgggcaggttccccttcggggagaacctcggcaggcagggcgactgggccgcgctcatgtgcgccatctgctacaacgacccgcccgagccaccgcccaccgcctcgcgcgagttcagggggttcatcgcctgctgcctgcagaagaacccggccaagcgcctcacggccgcgcagctgctgcagcaccccttcgtcgccggcccgcacccgcagcccctcgctgctcctcccccgtcatgaccacaccaccatttcggcgggttgggagttgggaccaaagtacggatctcgtctcagtttggcctccctcccttggctgcaggcagtgtgggactccaatcaatccggcgttcccttggatacaatacacggatctgatccctgatgtgtcaagggaatttgctggccaatttcgggttctatcctccatcatcgacgtccgcatccatccatggttgcttctgctgcagttaaggtctcctaccaattttgagtgctgtgtccatctccatcatcaattcatcaccacgatcgtcctcaacccgctcctcgctgctgcgatttaaggtttctttctccttcctgttgtttgatgctcttttcttttttcttccagcgatgatagcataacgagaaagagaaaaaaaaaggtgtgtacaaatgattttgtaaaagatcatatcatatgtcaagtacagagagaggttcacttgctaccgattttcattgttcgaaaaaggtttgcttagaaacttaaacttctccttttttt

SEQ ID NO: 182164 - DNA, 166 bp, Zea mays
  unsure (1)..(166): unsure at all n locations
  Clone ID: MRT4577_97711C.1
ttnntttttttttgatattaacaaataccgggttctttatattgttgaatagtggcatagggggagcaggcaaagagaacaaaaagggttccgggacctaagcggggggtggtagggaaactaacacggggacagcaggtaaccggatcacggtcctattaataga

SEQ ID NO: 182165 - DNA, 1723 bp, Zea mays
  unsure (1)..(1723): unsure at all n locations
  Clone ID: MRT4577_97712C.1
cccgacctccgcctctgcctgctcctcccgcttttctcccatctcccatccccggaggcccaaacgcgacgcgacgcaacgccacgcgaacgtgacgggagcgagccacccgaatccaccagaccacgcgcagccgtcacgcccgggcgcttctccccccccgaccccatcctccgcaccgccgagcacccggccgtggtgcggtgccacggggtgggcgagcaggccggggagctccagatcctgctggagtacatggacggcgggtccctcgagaaccgccgcatcgccgacgagcgcttcctggcgcacgtggcgcggcaggtgctgtcgggcatcgcctacctccaccgccgccacatcgtgcaccgcgacatcaagccctccaacctgctcatcgactccggccgccgcgtcaagatcgccgacttcggcgtcggccgcatcctcaaccagggcatnggaccggggcaactcctccgtgggcaccatcgcgtacatgagccccgagcgcatcaacaccgacctcaacgacggcgcctacgacggctacgccggcgacatctggagcttcggcctcagcatcctcgagttctacctgggccgcttcccgctcggcgagaacctggggaagcagggcgactgggccgcgctcatgttcgccatctgctactccgactcggcggacgcgtgggcggacgcccgtgcaacgcctcgcgggacttcaagaacttcatcagcctctgcctacagaagaacccggtgaaccgtccgtccgcgatgcggctgctgcagcacccgttcgtggcccagccgcagccgcagcccctggccgccccgccgtcatgatggctcgccgaaatccacaattcatgaccgatttgattgattgattgcttcccgtcgtggtacaactgaaggcggcgggcggattgatctctcaccttgtcgcctgacctttggggtggatggatggttggttgcatgattggttgtggatggccatgagatgcggtacctagagacgttcctcctaatcctagctaggcatgcaagtggctcaggacaagccgctaacccgcagggctgaccgcacctcgccgcaacgacccgcatccgcataccccgacggcgtactggagctcggaaaggcgcgcacatggcgttccgcggattatggcgccgccttgtatttccctgtccgatcgttgaagcagcagcagagggatcgagttgatgcagagcagcagaagacgagagccacgccgccgccgcagaagtgtcatcgtcggcgccgtttgtctccaactccttgcaggaaaggaagaggaatgcggaggcataggtcacggtcggtcggtgccatggccgaggcggggatgaagcgcagcttgattggtgtcccatgttccatgtgcaaccacctgatagcacgcggcacttgcatccacattgctagcccattatgggaattggtaattgaggcctcctccacagcaatcatcaccgcatcatcatccatcgttgctgaatgctgctgtcgtctcagcacttctttttctcccccctttcatcctttcaatgttcatgttcttccaagtcatcatataaactgggttgttagttaaaaccaaaaaaaaaaaaaaaaaaaaaaaaaaaaaaaaaaaaaaaaaaaaaaaaaggggggacaaaaattggggggcccgtctaaaccggaaattaa

SEQ ID NO: 182166 - DNA, 257 bp, Zea mays
  unsure (1)..(257): unsure at all n locations
  Clone ID: MRT4577_97713C.1
tcggttgcgaacgagcgaaagacccgcacggggggggccagcagtcgacccaagggcggtcccccgggaggcaagccaccacacagccagacggcaaagcgaaagacagagaagcaccacangaggacaagccaagccacgaggacaacaaaggcgaacgccagaaacgacacgccacgagcaaaacagncacgcggaccggcaacaggggcgaaagacgaccccaacgaaagaggagcaggataccaacacagtac

SEQ ID NO: 182167 - DNA, 222 bp, Zea mays
  Clone ID: MRT4577_97714C.1
cagccatccttctggctgactgtctctactctcgctctattcttgcgcggtttcagattcgctgctcagcgcagataggcgcgcggtcagtaggaagatgagaggctgagggccgtaagtgttccggcgagcagcctagcggaggctcaagacagcactgtccaggctgccagtgcatcggtcttcgaagtgggggcccgggctcgaaggagccccgactgc

SEQ ID NO: 182168 - DNA, 431 bp, Zea mays
  Clone ID: MRT4577_97715C.1
gggacgaaccggaccagaacacccgggacgacccacgcgcccgtttcattaccaccaaccaccatccatcctaggggggaaggcaccaaaacaaaggggcaacaacaaacaactaactccaaaaaccatgaagcaggagcaagaggcaaccgcaaacaatgcccaagaataaagcgagaccagcacacagacaggcggatgcagctgtggccaacaacaaagccatgagcagcaacaccaaccacaacaacacccagccacaaaaacaacaaccacaaccaccaccacaacaaaaccaacagcagcaccaccaaaacaacaagcacacatgcaaccacaaaaacaagacgcaacacaagaggtgaaggacaacaacaacacaaacaaccggagtacaacacaacaacaacaacacgggaccaacaacaaca

SEQ ID NO: 182169 - DNA, 820 bp, Zea mays
  Clone ID: MRT4577_97716C.1
ccggccgggacaatgagcgcccaagatcccctctcctctaccaacccatcgtcagtgacaaacaacactcaagatgcctcgggacgacagccctcctccgccgccgccggttcctccgaactctccagtgcaaagataagcctgcgcaagtcgctgcgcagcttccccgacttccctatcccgggaatcaactttgtcgacattatgcctcttttcgccgacccaactgctcatgccacccttgtcgaggctctcgaactccagatcgccgaggctttccctaccaagcctgatattatcgttggcctcgacgcccgtggcttcctattcggtcctggacttgcgctccgtctcggcgttcctttcgctgccgttcgcaagcagggcaagcttcccggtccctgcgttactgctgagtacatcaaggagtacggcaaggatcttttccaaatgcaggaagacgctgtccgcgagggccagaaggtcctgattgtggacgatatcattgccaccggcggttccgcaaaggctgcagctgaactcgtccaacagcttaagggcgaggtcatgggatacttgttcatccttgaaatccctggactcaacggtcgtgataagcttggtgcccctcctaccaagattctccttgaagacgcatagttcggttgatattgagctcctctttccccgctttcaacaattaaacgatatggggccatagatgggcctcagtcaactcgttgtgagcacacgacggcgcatgtggggggattctgctagacctgcaaagtctattttgccctgtttgtttttgacttga

SEQ ID NO: 182170 - DNA, 195 bp, Zea mays
  Clone ID: MRT4577_97717C.1
acccactcatccgcccactcatccacacactcaaccttcatatccacacatccatcatcaataaccgtcgcactatttaaaaattttacacgactatccatctcactctatctatcatacaacaacatcaacaaccacccacatacaaactacaaccatatcaaacccatactcccatatatacacaacaacaca

SEQ ID NO: 182171 - DNA, 270 bp, Zea mays
  unsure (1)..(270): unsure at all n locations
  Clone ID: MRT4577_97718C.1
ccgcccagcgtccgcccagcgtccgcggagcgtgggcggtcgcgtgggtggctgcgtgggtagactcggtatttnggggctggtgactggtggcttatcggtaaactgtatgttgattagtgttgtaatacatatctctagaggtttttgtacgcctattgatttgtcagggagaggggagcaaattgtttttngcaaaccatgtttggggtggtttaacttgttgtctccctttgaattatatggagaataatgggggggcggtctttg

SEQ ID NO: 182172 - DNA, 334 bp, Zea mays
  Clone ID: MRT4577_97719C.1
gttaattttttttttcttaaacaacctgagagggcgcttccacacgcaatgcggccctcatctgaacacataccacgccctggagctccgtcttcatactggccgagaagcttactaagtggtggatgcagccagcctcactcgctgttcggctctgtaggagcatctatgccttggcgtccttcgagttttgatgtattgaacacatcactgtgtgcatgcaggttgcagtgcaggggtgtggaccgagaatcatacgccacagttggcattgatacttacttattgacgctgctagggacacacagcaatacgctactactagctctagatc

SEQ ID NO: 182173 - DNA, 1881 bp, Zea mays
  Clone ID: MRT4577_9771C.1
atggccacgctggttcgtcccgatcactaccagaccgaggcggcgctcgacacagtggccatctttgtccacttctgtgagatgtttgtgggagtggcggcttgcacttcccttttccaccagtttttcgtgctggtgaggtctgggaagggcaaggatcacctcggggcctactacttccagtcaaggtcaaatccaacagtgacctacattgcctcccttggcggggaggccgcgtctgagttgctggtttaccggccccagcgacattggtacgatccagcatgggcctgggaacgatctgacctgggaggagttggaaattttggtgaggggacgttctgtccccgccggccgccatgcctgccggggggtctggttcccatcgacatacgcttgccaggaacgtcgccgacaatccatcagcagctaccatggatgttccttcctcgtcggccgcccatgcccaccggcgagactggtccccatcagcatacatctgctgggaatgttacctgcgatatgtcaacggctacagcagccccatcagtgtcggtgccaagcccaccatcggcggcgaccgagggggttccagctgcatctgcccccaccgtgcaggatgacgctggcactgaggtggcgccatcgggcccccaagattcgcctgtcaccgtcgaggcaacacctttgggttcccaagttccagctaggggtccaggagtggcggtgccaccaacaactgttgcagacccaacaacagcgataccgtcagatgcaccaccggtggtaggcgtggggggcgcgttcgactctgtcccccagccacctccgaagggtccggaggttattcttgggcgtccactccggtctggtatcgagcctggagcgacgctgactcctctccctcagcggcgcactaaggcggcatcctgccaattcgcctcgcagcgggccgagcttgagcaggagcgtgaggacttcaaggaggacatctggaaggtgtctgaccgagaggaggaggtgacccggaacgagagaagcttggcgaagaataaaaaacacctagaccaaaaagaggaggccgtcatagcactccatgataagctgaaagcttataatgcagtgctggagaaacagtgggacaagcaagctgcggctgaggcgaagctacagcaggaactctccgacaaggccagtgatattactcgcgttgagggaaacctcaaggcaagggaagcctccctggcgaaacgaacaactgacctcacttggcaggaggaggacctcaccttcagggaggagatgtgggcaaggcagaacaagctgctggatgagcttgagctcgaggcagaggagaaagtgaagcgtctggagggggaagtgcgggcgctggaggggcaggtccgccagttccaggcagcgcaggcgacacagtcggccctgggcccccaagcagtggaggtgttgaggaagacacttgacgacctccgggcagagcaacgcgccggagctcagcgcatcgccgcttgggctggcgaggcaagcacagcgctagtaccgttggggatgagtcccatcccggcattggtgcggccagcgtccatcttcgacgtgctcccaatactggattccgctgctaaccgcctccgacgtctggatcaggttcttggcacccgcttggaggccgagggcggcagactctgccggtcggccatcaagtacgtcttaacgtgcttccagagtcacgacccgactatctccttggggccggttattgcgggtccggtggccgacactgaagatgctgcccgggagggcgtacaggatgttgtggacgtggtggttgggcgcttccagcgggatcctgttgacgatgagtag

SEQ ID NO: 182174 - DNA, 382 bp, Zea mays
  Clone ID: MRT4577_97720C.1
gtctgtggatccggattgccaccggcacgcgttactgtcaaacctctagtatactgaccgactgacgagcctacattatcggtcttagcgcgtgccatcttttggcgatgttactattggggaatcatgagaaagggttaatggcttgatgctatttgaacaattttatatcacaaactagcgattggaatcatctctgttgacaatagcccttacattgcacgtgatctgattcaccctaaagagtttatatatagggaggacattactgactacccaagaacatcttcactgggtactatggattaccaaaccttcacagaataaaaatggatctctgattgtcaaaattaacacacggacatgctgttccagtactcaa

SEQ ID NO: 182175 - DNA, 422 bp, Zea mays
  unsure (1)..(422): unsure at all n locations
  Clone ID: MRT4577_97721C.1
agttctggtgctctgcctcccaattcaagtggtccatgcgccatgcccatgcgcgcggtgccggaggactaggtccttgtctccggggacaagagaaataaggaacgcaccaaccttaactggtgcactcggcgctacaaacattttgggggtagaagggacctnaatgacgaaggtcataatacaacctaaaaataacatgaatgtgtcccactgccatctactagccctatcagctgacaaatgacacgtgggcaatgagatccagctgacgaacatggtagggaacttgacgctttggttgagccccgaattgcggatggagtcctggacgcgtaccagctatccctatactgagtcacacttagagtttggcacatatcatagtcatacctccttcctgtgtaaaattcctatgagct

SEQ ID NO: 182176 - DNA, 248 bp, Zea mays
  Clone ID: MRT4577_97722C.1
gtcgacgcattccctgagaatcaccttccgtatgcggatcggcttctgcttaaccgatcatcggatagggatggggaagagggtcgcctgatccggttgaaaaaagccactggaccctatgcgccctcggcagccgtcctccatacggacggtattcgcgcgccaatgacgcgccctttgcggctctgcgctataacggactgtgtgcttccaatccgacacttttttgaacacggaccaagaagtat

SEQ ID NO: 182177 - DNA, 181 bp, Zea mays
  Clone ID: MRT4577_97723C.1
ggcctaggtgattttttttccattctctacaaaacagggcctattattggtcctagagggcatagcattggggggagtccatttaactcccatattcaagatatggaccctgtctacaaatccgtatcaaataaaaaacctaagtttgctttattcatcaacataactagctcgtatggat

SEQ ID NO: 182178 - DNA, 391 bp, Zea mays
  Clone ID: MRT4577_97724C.1
aaaaacaaattaaaaacccagcttacagataataaaaacaacaggtgtagcacagacacgaaaaatggggacctcacatgcatgtaacaatattgacgcatagaaaaacataagcaactgaccacagatagctacgaccatagcacaaacggctcaataaaatagatacagagtctgcacaaacagatactggaagaagcagaaaaaaaaacaacaataaatgaatcagatccaactgtcgaatgaaggcatgtgatcaaagctaaatagaagaggaacacaagctatatatattgggagctagaagtacggatcgtgcaaagcaccaagaacaggtgaggtagaactaggtgaaagcacagaacatgcatgcatgaaaacaactacggac

SEQ ID NO: 182179 - DNA, 383 bp, Zea mays
  Clone ID: MRT4577_97725C.1
ggaaacagggaaacaaaaaatatttttgggggcttttttcgttttttttagccggaaaaataaagttcaaggggaggggggggatcagaattgaagaattttgaaaactgttcccactgataaaatttttttttcaccccggctaaaaggaacccgaagccattttccttggaatggaataataccggtgataaaactggattttttggggggccctttgttttaaagcgacgatgttttccttggtctggacgtaaatcccggcggggaacttacggatttccttgtttttgacggggcaaagctgggggatctgggcggcctcctgcgagacgttgttgatggagttgcccttggggacaagcttgtccttggggggcttg

SEQ ID NO: 182180 - DNA, 3645 bp, Zea mays
  Clone ID: MRT4577_97726C.1
ctactcacccagaaactccctggacctaataatggcagcacctaggcctaagccctcaagatgcttggcaccggctagaccccaacattctaactcttccaagaaaactttttgaattctgcttatggaaggactgacaccctcgaaaactgccttattacgatgaatccataaacaccaagcccccatgatgatgacgctgttaatgcctcttcttttggatttgtgcacttgcttacacaccttcctccaccactcagcaaaagatatctcaatagaagcaggagaaagattagcaagccccaacggtgcaagaatgcaatgccaaaactgtctagcaaagatgcaactgcaaaggagatgttggatattctccggctcctgatcacatagaggacagacctcaggatgatccagccctctcttctgaagtctatcagctgtccaacatttattccttattgccaaccataggaagaatttgcatttgggtggagcccaagattcccataacctcttccaaggttcaaaggtaatcgaacccatgaaaaaagccttatagcatgatctagaagagaactgcccagaggaagaatgaatccacacatgtctatcagcctcttgtgtgagcaccactcctcttaaagcgtcccaaagctgtaggtactgctgcagcccaatcaaattaagaggggtctctaagtcgctgacccactgccagttctcaagagcatgggccaccgttctggaagaactagcccttttcccaacactagcaactacatcaggggcaagatcatggatacaagacccatccaaccacctatctgtccagaataaagtagtagacccgtctccaaccaaggtaataattgaagaagcaaagaatctcctgacatgctgctgaatagggaatttcagcccaacccaaggcctatttggatctgtttttttcaaccataaccatttagtctgcagcgcccagctttggtaaagtaagttagaaatcccaaggccaccaagatataaaggccttgtaattatatcccaagagacaagacaacaacctccagttacctcctttcttcctttccaaagaaatcctcttcgaatcttatctatagaattaatcacccacttgggaatattcatggcaatgagaaggtataccgggatggccgaaagcacgaagcgcactatagctgtcctgccagccagattaagcagccgggccttccaattaggaagtcgatcagcaattttgtcgacccaaaccatgagatcattccttctgagcttcttgtctgatatcggcaagcccaaataagtgcaagggaaagatgaagaagagcactgaagaatattgcagcccacctgcaccgcttgctgattacacctaattggaataacatagcttttttgcaagttagacaccaacccagaggctgaaccaaagcaatccaaaattgttctgacgcagtgaagatcttcctcaaaaggctgaacaaaaaggactacatcatcagcataaatggacagcctgtttcgaatattagcgccctccaatctatgcagcagccccctgttttcagccagcttgaataaactgttgagcacatccataaccaagacgaacaacataggagaaagaggatccccctggcgaagccctctccggtgcttaataggaataccaggagacccattcaaaagcacctgagtggaggacgaggtcagcaaatttgaaatcatacttcgccacacaggaccaaaaccaagatgtgaaagcacttcagtcaaaaaagcccaagaaactgaatcaaaggctttggagatatccaacttcaagaacaaactagagactttcttcttgtggagagatttaattgaatgctgcaccaacatgaagttgtcatgaatcgatcttcctctcacaaaagcactttggttagcagccaccaactcctgtaggtgaggacccaacctattagcaagcattttggtgaccaacttagcaaaactatgaattaagctaattggtctaaagtcccttgctgtcaaggcatcaattttcttaggaagaagagctataaaagcagaattcagcagccccaacttgtaagcatttccttgatgaagcgaatttatagctgccaacaaatctgacttaataatatgccaacaacgcttataaaacctccctgtaaacccatcaggaccaggagccttatcagaggggagagctccaatcgtgtcttgaacctccttttccgagaaaggagcctccaggagactcaaatcaatagcatctctatggcaactagccagatcaagagtaaaaggcctctggacaatagaacccaaaagattggaaaagaagtcatccagaacttcctgcatctgatcatggctggtgactaaccttccctcatcctccaaatgagagataaaattcctcttcttgcggtggcgagcctgcaagtggaaaaattttgtgttggcatctccttccctcaaataatggacccgggatcttaaccgtgcaactgtcctttccaaagaagcaaggacaaggcaatgctgcttcaatttgcgcagcagccacacttcctcagacgacaacaccctgctgtcctgagccatctccatcctatgcagcacctcacgagccacccccagctgagaactgacattgccgaccgcgttatgcccccaagattgcaatcttctcgctaatcttttaaactttatcgacaccctctcgaaagggcaagaagcctgaaccggctggtcccaagaagcagcaacctcttccataaaacccgggagtttaggccaaaagctctcgaaatgaaatctacgcttccctttaagatccaaactgagtttaaggattagaggacaatgatcagaagtttcagatgcactgctgtaaagaaagcaatcggggaaagcctcctcccaacaggtagaacagaaaacatgatccaacttaacaagagtgggattttccctctggtttgaccaagtaaatctcctaccattcaaaggaatctccttcagatccaaagagttgatcaaatctctgaaattgcccaataaagccctattgacatttgagttattcttgtcctctgacttgtaaatctgattgaagtcaccagcaatgatccacgggcctacacaggcattcctgatgtctctcaactcttgaagaaaggcaggctttaagctatcttggtagggcccataaaccccagtgaaccaccaaagaggaccagaaacgctcttcaactgaaccgagacagaattatccttgaccactgaggccactgatgcaaaagatccatcatgccaagcgactaataaaccccctctagacccatgagcagggccataaacaaaattactataccctgacccaagaatagaaagaatgtcaaaatctgaaacggagcacattttggtttcctgaagacaaataacagcaggtttgaggcttacaaccagcgacttaacaaagtctctcttagcacgattattgagacccctcacattccaaatcaaaaaacagccagattccatggaaaacaaaaaggaggctaccaaaccgaccacaacaaccagctcagatctgctccacat

SEQ ID NO: 182181 - DNA, 255 bp, Zea mays
  unsure (1)..(255): unsure at all n locations
  Clone ID: MRT4577_97727C.1
aagaaaaaaaaaaaaggggggagggcgaaaccagcagcacacacacanggcagccaccacaacgagcacgaggaagcagagagggcagaccgaaaaacaccggaaaccccgggaccgcacaacgccgacggcgggacgagcaaaacccagcagcacggcagcagggacgcgcccagcgacggaaacggaaacaaggaggacgggggccccaacaaaagaaacagcgaccaccagagacgaaacgccacgggcgcc

SEQ ID NO: 182182 - DNA, 310 bp, Zea mays
  Clone ID: MRT4577_97728C.1
ggccaaaaacccaaaccccggcgggggggggcacatgcccatactcacttaggggacccgggggcccgggggaaaatcgacttggcccaaaaaaatagggaacctccggggaactggggggaacaaattcatggggggggaaaaaaaaactttggttcaccaggaaaccccaaccaggaaaggaacctacgcctggaattcccccggggaaaggttttaaaggactttccaacaaaaaacaaagttaaaggccaaacaggactcccattttttttccctttggttccgggactaaaaaacaaaacttttg

SEQ ID NO: 182183 - DNA, 450 bp, Zea mays
  Clone ID: MRT4577_97729C.1
aaaagccccaaccggaatcaaccctcaattcagggttttttcagacggccatccattcccttggggtttgcaacccagagggcccctcccttggtaaggccaaagtttcacgggaacaaaaatcgggggggggcccccaatattatttctaaaaaaaatctgaaacagggggtcccctggaacccccctggaagaggggaagcaatctaaaatctttggaagaagataaataaccctcaggggtcaagactagacaacttggccccccaaaaaattagccttttttagccggggcccccgggaatttaatccaaatgggcaaccccagcatcgggaacttccggggggggggtggtaccccccaaaacctttgttttggacgggccttaaaaaacaacacccttaactggcgttttgagccgggcccaaaatgacgggaaccgcaaatgc

SEQ ID NO: 182184 - DNA, 281 bp, Zea mays
  Clone ID: MRT4577_9772C.1
ccggaaccggccttcccggggtcactgggaaacctataatgcaaactaggcaatcgcttcttatgggggggtggggttagattgcatcaaacaaaggaacttgtaacactacctataaactggtcagactgagacagttatcatggaattctttagctcaatcgttgcatgcatctttgttagtctcatacaagtactctattcttttagctttcggatcgaaatggcggggggggatggatgatattgttctggaaaaaataaaaaactataaatataaa

SEQ ID NO: 182185 - DNA, 323 bp, Zea mays
  Clone ID: MRT4577_97730C.1
ctcgggcgtgtgcaggcagccatcatgctcggatggagaagcggccaccgggttcttgaaccaccacagcagggacgaggagcagcccgtcggcgagtacgggtactccgagaccgaggtggtcaccgccaccggcgagggcgagtacgagaggtacaagaaggaggagaaggagcacaagcacaagcagcacctcggcgaggccggcgccatcgccgccggcgccttcgcactctacgagaagtgaggtgcgcaccagatccggcatgttcctagagacgaagcatgatgaagtagtaacgatgatagaggagaggatatct

SEQ ID NO: 182186 - DNA, 364 bp, Zea mays
  Clone ID: MRT4577_97731C.1
ggggggggaaacatttggtaggaacggggctaaaaaaccgcataagccctggccaaaaggggggaaccccattttttaaaactcccgggttttttaaaaaaaatgggggggacggggaagccctttccggtcaaattttggttttaaaacccgggggggaacaagggctgaaaccttgggggggggaaaaaaggggccccctggtgccttgatttttttttgggggaccttggaaaaaaacttggcctttaaaaaaaggggttgggggggaaaaccccctttccggggacctttaagaaaccaaactgggggaagtttaattggggggccttttgcccccccgcctcccccccctttttggggg

SEQ ID NO: 182187 - DNA, 258 bp, Zea mays
  Clone ID: MRT4577_97732C.1
gtggccatcgacggcaaggacatccggacgctgaacctgaagtcattgcggctcaagatcggcctcgtgcagcaggagccggtcctcttcgcatcgagcatcctagacaacattgcgtacggcaaggaaggcgcgagcgaggaggaggtggtggaggcggcgaagacggcgaacgtgcacggcttcgtcagccagctgcccgaaggctacaggacggcggtcggcgagcaggggatgcagctgtcaggcgggcagaag

SEQ ID NO: 182188 - DNA, 151 bp, Zea mays
  Clone ID: MRT4577_97733C.1
tttttaaggaaaaaccagtggggcccatcattttttcgtggggaagataatgtcttctccttcaatcgtaaactccaaaatctaaagcaagtgaccaaaaccaactcaaactattgatatacaagttacaagcaagcattcttcctaataa

SEQ ID NO: 182189 - DNA, 214 bp, Zea mays
  Clone ID: MRT4577_97734C.1
gtgcctcgtgtggctcgccgcgtcccgttcgggacgccagccccccctccggcgataatggccccctaagcgaggtggtcagggctgaccgagtgccggctcaagcaggaggacggatcaagtgacgaaccctctattcgcagaagaggcgcgaagcagttcggaatcggcggggcgttgccgcccaagaaggacccgcaccggttcgtcaagt

SEQ ID NO: 182190 - DNA, 336 bp, Zea mays
  Clone ID: MRT4577_97735C.1
ttccccaatctttaaatattaatagagctcctgcagagatctgggggggggggggggggggctctcccccacccttgctgcagctacggcctctgaccctatgacattcccatgccctacgactgactcactctcaagtagtagtagtgcacgccggatcacgtaggaggacctcgcccaggccccaccctgaaaccgataactattgaacttcgccaccgctagctcgcttctaagccatagcaataagaacgccaaccccgcgcgtgaacactaaatcaggatgggagttgacagaagaggatgaacacgaacaactagatgcagaacaactat

SEQ ID NO: 182191 - DNA, 288 bp, Zea mays
  Clone ID: MRT4577_97736C.1
cctctttttttttttgttttttttttttttttttttagtttttcactgttatgccagaaacgtagaatgattactccacgacgctgacatgtagaacatcctggacaccagagacccaaaaaacacaggggcaaattaaacaaaaaacagaaacaaaacaaagacacaacacaaacaaaatagacgaaacaaaaaaatagagaagcataaccgataaaaaactgcaactcaggatttagcgaaggggcatggggacggccaaccacatcaaaaacagggcaaccccaa

SEQ ID NO: 182192 - DNA, 217 bp, Zea mays
  Clone ID: MRT4577_97737C.1
atcacgactagtcgatcgctcactgacgtcgtggcgtcacatacaacctctgctctgatgtctctcaccctcacgagctctgatgctcacacgcagcagctgcctgcacgcaccggcgtgtgtcagctcagttgtgcgttctctctcgcacgtgcgcgtatccagtctccggcgcgcgcgcgttctctctggtctctgcgaaagcaacatcactgag

SEQ ID NO: 182193 - DNA, 534 bp, Zea mays
  Clone ID: MRT4577_97738C.1
cattgggtacctcgaggccggccgattcaccgcctcctcgcgccccgatcgcttccttctctacatgtgcgggtgccgctgctgtctcagatcagcgtgaataatcgagggcaacatgtcaagaggccccaccctcgatcgctattggcgccctacttcgaggtggcgctgggcacaggcgagtgactctcgagccacaaggtgctgcactgcatggaccttgatgctcacccttgcttatggctctgtgaacacgacaagtcactacctccccgacaaatgcaagcaagttgtggcccgcatcgcccgtgagctggagttggtcatgatgcgcaccaggccctaatgctctgaaattgttcgccacgtgtccactatgatccggaccaacatcatgtggcgcgctgcgcacctcgcatcgagttcaccatcaagcttgttaggctccgctgacagcaggacgacaactctggcctcttgtcttaacgacgaactggacgctgcaattcgattctgtaggaaactactttgctt

SEQ ID NO: 182194 - DNA, 596 bp, Zea mays
  Clone ID: MRT4577_97739C.1
cattggtacctcgagccggcgggtcgcgacgaaatactcacttcctccttcgacctacccctatacacgtcctctgctcattgatctccctccacacaggctcatctctctcttggatgctagtgcgttcgacactcggtcatctactatccgtgtcgaacatgcgatcgattatgccgattcagctctaacatatcgcgcagggctcctatgcccaccgcgcgaaaagagttctatggcgaagatgctgtgtattgaaataccgatgagcccctgtccaccgacgaagggcaactgtatcctgctccggacaggaaaaatgatcctccaactatcgtaaactcactctgacccaaccaccccgacttaccgggagctaaagaatcacgagctgccatctttgctctacgcaccactatgctcactctaaagagaagcatgggaaatgagtcacatgaccaacgacctccatgaagggaaagcacatggcttcaagtgagtcgcaagtccaatcgagtccatgaaggtgaagcatgcgacgtccaagtgcatctcgaaagaataacggagcaagtaggttggacttataatagggg

SEQ ID NO: 182195 - DNA, 450 bp, Zea mays
  Clone ID: MRT4577_9773C.1
aattcggcacgaggcgctcatcttgcctccaggttcggtcgcccgggcggcgccgcgaggagagaatgggctcacacggggtggtcgcaggggctggagaggggggtcgccatccgagctatcgccagagcgctgccggttctaggcttgggtgctgcaccagctgggcgttgttcatgactagaagaatccgaaccccgtggccattatgttataggaaaagctagtgcaaagtgggacacagatggtgataaacaaacattactatatgaggctatctgcgacaacgaacaagctcaagagcctgggggtcgacacggcctgtgactctcgcgacataaccagaggggagctgacacatcaaaaactttggaagagagacgatccatggcgttgatgctcttggaaggaagcgcatacatatcaacttgtaacgatcgaagggcaata

SEQ ID NO: 182196 - DNA, 873 bp, Zea mays
  Clone ID: MRT4577_97740C.1
atggagtggccagccgcaggtgcttcctggcagccggttttggctattggcaacagtaaaaaaacagaaagagagaagacagtgccgaaacccactaagcctacagtaggctcacctcaggatgaccttaagatggcacagtacaacatctataagggggagaaaagaagtctcgttaagggacggattctccatcacctagacttcacggacttagagcaatgcagagattgcattaagggtaaatttgcgaagcagattaagaaagatgctaagcatagtacgagagtgttagaaattattcatacagatatctgtggtccttttccagttaggacagtagatgggtttaattcattcgtaaccttcacagatgactactctcgctacggttatgtttatcccgttaaggaaatatcagaagctttagacaagtttaaacaattcaaggctgaagtagagaatcaacacgatttgaagataaagattgttcgatcagatcgtgggggggagtactgtgggcaccatactgagtatggacagaaagctcacgctcaactacttccacatatgggttgtccaacagaagctagaatatttaatcctgggcaggaaaagctagatgagagaaccactagctatcattttattggctatcctgagagatcgaagtgttacagattctactgcccaggcagacaaaccaagtttatagaaaccagacatgccattttcctagaagatgacatgatcaaggggagtaaggagagttcacatgacagtagcagtgtcacgccaagtgatgcactaatgcaggagccccagaacgaaccagaactagaaacaaagtttatgaaggtctcaaaggtctag

SEQ ID NO: 182197 - DNA, 288 bp, Zea mays
  Clone ID: MRT4577_97741C.1
gggaaccaaaccattcatgcaaaaacattttgaattccttttactttcacatgctgaaaatggggggtaccaagagaacagttcgtacgtgctcattttggcaagggtttttcaccagttcacatacagtcttaggtttgagagggttgggacacacacattacaatttggacgggggtgccaactggcaaataactttgctaggactgggaacccttggttatactcgctatttacccttgggttgttttttaaacatgggcctttttttctgggttggggcccaaa

SEQ ID NO: 182198 - DNA, 647 bp, Zea mays
  Clone ID: MRT4577_97742C.1
cctatggcgtgcggcttgaccagacgccggcaaacccggagacagagatcacggtgccgatcaacatcgggctggcggtgttcgacgtgatcgacgacatcaaggaggggctggaggagccgtgcccctgcacggtgttgtgcgcggacatcgtggtgtacgcggcgcggatcgtgtgcagcatgctcagcaactggcgcgtgcgcttcgccgcgctagacgggctggtgtaccgcgtggtctaccgcgccggcgacgtgcaggactacctgttgaactccaccttgatcgtggccgacctggtccggaacttctgcccgaagaacttgatagtggtggtgctagtgatcctgtcgggcgcgcacgccgtctgcttctggcactgctcctggttgcgggcccggctgtccgagatggcggcccagatcgtgcacgtgttccgggacctgctgtgggccaagtgcggcgcagacgggcccggagccgaccacatcgtgcccaacaacgtgcgcgacgaggacccgggtgccttggcggctgtgttcccgaagttgctcgggaagatgcacttgaccaacgacttgttgtacaacagctactaccacagcatcgtgacgcggattgtcacctgtaatttcctctgggag

SEQ ID NO: 182199 - DNA, 2430 bp, Zea mays
  Clone ID: MRT4577_97743C.1
ctgctttctgcggcagagaaccagttagctgaagtagctaaggatgccaagagcacaaaaagatccaaattactgtaaagtattgagctcaacattaagctcaataatgggctggacagagaaaagacttctggcatatcatgaaaccttcaatacaagtaatattgagtctatgcaaggcattgtctccattggagtgtcagctgcaagggttcttgttgaagatatatcccatgaataccgccgtagaagaaaagaagagactgatgtagctcgaagcagggtagagacatacataaggtcttcactacggacagcttttgctcaaagaatggaagaagcagattcaaaacgatcatcaagaaaccctactccagttctttctatccttgcgaaggacattagtgacctagctacgaaggagaaaaaattgtacagtccaatactgaagacatggcatcctcttgcttctggtgttgctgttgcaacccttcattcttgttatggaaatgagctgaagcagtttgtagctgggcttacagagctgacccctgatacagttcaagtacttaaatcagcagataaattagaagaaggaccttgttaaatagctgtagaagattctgtggatagtgatgatggaggcaagtcacttatcagagagagccgccatcatgaagctgaaaatgcaattgctaatctggtgaaagtgtggataaaagaaagagtagacagactcaagggatgggttgaccggaatttgaagcaagagacctggaatccaggtgccaacagggataattttgctccctcttccgtggagatgcttcgagttattggtgaaacgttggatgcatttttccaattgcctataccaatgcatccggctcttcttcctgatctgacagttgggctcgacagaagcctacagctttatgttgctaaagcaaaatctggctgcggagcacgaaattcttttatgccccaactacccccactaacgcgatgcgaggttggctccaagttattattcaagaaaaaggagaagccacaaaatctgcaggttcgtgtatcacaaaatggagcatcaaacggaaatgatcccttgggccttcctcaactctgtgtgcgcctgaatactcttcagtacatccgtggtgagtttgagaatctagagaagaaaattaaaacgagcttacgaaatgttgagtcagctcaggcagatatcactgatggattgaacatcaagtttgagctttgccaggcagcctgtcaagaaggcattcagcagatttgtgagacgactgcatataaggtgatgttttatgacttgggacatgtcctctgggacaccctttatgttggtgatactgcatcaaacagggttgaggtactgttgagggaacttgaccctgtccttgagacggtatctagtatggtgcacaacaaagtgcggaaccgtgctattactgcactgatgaaagcaacttttgatggtttcttgctggtgcttcttgctggtgggcctttgcgtactttcacccgtcaagactctcagataatagaagatgacttcagggccctcagagatctgtacttagcagatggggatggtttgccagaggaattagttgacaaggcatcctcccaggtcaagaatgtcctgcccctctttcgagcagactctgaaagtctcattgagcgattcaaacgcatgatggttgaatcgaatcggcctgcgtccaagaacaggttaccattgcctccaacaacagggcattggagtccaaatgagcctaacacagtcctgcgagttctgtgctaccggaatgatgagacagctacaaagttcctcaagaaaacttacaacctaccgaagaagatttgacttgtgggatagatcacaaaccatatgtacatgttcctgtcactacaaaaaggtttctctatgcctgtcacattctctggctgaggaccccgaggaaataccccctgtaaagtttccacatcaaaggtttcaagtgatcatcagcaagaaggtttattctgtggtgctgtagagatgtgactgggtgttttcggtggttcgtgtcattgataggttttgcggtgaagggtggatttacttacagctcgatttgttcattatattatatgtttgcctaatccagttcttttgctgaccttgcgctcgtgtaatttggttcattctagtctgcaacagctaaatccagcgtgtgaataagttgtgtactcgcgtgacactgtccggtgcttttgctgtgacaatatgcggggagcatttgtatattatactgaatcgtgcactccatctctctccatatcctcgttggatccgttcttcagtcaatcgatcctgttcaaagtaaaaatactccgtggtcgagatgatgaaaaaaaaaaaatata

SEQ ID NO: 182200 - DNA, 1417 bp, Zea mays
  Clone ID: MRT4577_97744C.1
ccgcggaaaaaaaaaaaaaaaaaaaaaaaaaaaaaaaaaaaaaaaaaaaaaaaaaaaaaaatgacccgcgaggcattcgttcgcgcgcctcgcggccagttccagcacgaatcctcgtccaatccacgcctgctgctcgcgagccatcgccacagtgctggccatgcctggagccgttgcgcttgcgcccacgctcgcggcagcgagcagctccgccgccgcggcctccacgctggctccgaacccgacaagccgaggcgacccgctaactattaggttgtgccgcaatgctcctgctagcgcaactccacttgttccacttgtagccacccgtcgctacgtgcgtggctgccgcggcgcggctctagtcgccagtccccaccacgctccaaaccctcgcctccgattcgcgtctgcggcagaggggatggctgcggaagcgagcacggcgggtgcggcgtcggcagccgaggcgaagcccttcgccgtcctcttcgtgtgcctcgggaatatttgccggagtcctgcggctgaagctgtgtttcggaccctcgtaagcaagcgtgggcttgactccaagtttctcatagactctgctggtaccatcgggtatcatgagggtaataaggcagactcaaggatgagagcagcttcaaagaagcgggggattgaggtcacatcaatatccaggcctatcaaaccctcggattttcgtgattttgatcttatccttgcaatggacaggcagaactatgaagatatattgaactcgtttgagagatggagacgcaaagagcccctccctgatagtgcacccaataaggttaagctgatgtgctcctactgcaaacatcatactgagtctgaagttccagatccttattatggaggccctcagggatttgaaaaggtgctggacttattggaagatgcttgcgagtcgctgcttgatagtatcgtcgcaaacaatgcaagcatttctgggtgacatcgatgtaaatctccacatacagacatctattttcagacgcaccgaaggctgtagcatccatgcacaaccggagtaatttggtttctaatgcaacattgatcatgtcgtcattacccaggtcttggtctggtttgtatataccaccatccttatacctggttatgtgataagtgacaaaaaaactgctcatcatcacttttttccactaaagataatcagaaacaatcagaatgaccgacaaagcatgcttatgtccatttgaaacttactattttcgcataaggcatactcggttcctcaggaaccatgcttggaacaattgtttgactaatttatatgacatttgatgagctggaacagtttctgggttctggctagatttctagctaaaaaaatcaaatccatcaaccttaccaaaattaaaaa

SEQ ID NO: 182201 - DNA, 381 bp, Zea mays
  unsure (1)..(381): unsure at all n locations
  Clone ID: MRT4577_97745C.1
ggggcggggggcacccaaaacaccgagaagaagcggccgccgccgacgaagaggccacacccggaccgccccaaggccccacaagcacaagccggggagcccacccccagcgccagcgcaccacgcgccagcagagcccagaaacgaaggcgacgcacacaagaaccccaggagggggaccggacccacaagaacaacaagcaccaccncaccaccagcccaaacaaggcccacgagaccacagagggacaggagcaccggcgagccaagcacaacaaaacagaccggagcaacacggacaacaacaacagcaccaccgaaaacaagggaaaacacccagcgcacggcacagcggcaccacccgaagccacgaaaaggcac

SEQ ID NO: 182202 - DNA, 641 bp, Zea mays
  Clone ID: MRT4577_97746C.1
ccgggttgactccaagtttctcatagactctgctggtaccatcgggtatcatgagggtaataaggcagactcaaggatgagagcagcttcaaagaagcgggggattgaggtcacatcaatatccaggcctatcaaaccctcggattttcgtgattttgatcttatccttgcaatggacaggcagaactatggttgtctctcaggctctattatttgtgtttcagtacctctctgaatttgttgttatatgctgcttgatgcattggagcatttctgttttgaacaatatgcagaagatatattgaactcgtttgagagatggagacgcaaagagcccctccctgatagtgcacccaataaggttaagctgatgtgctcctactgcaaacaacatactgagtctgaagttccagatccttattatggaggtcctcagggatttgaaaaggtgttggacttattggaagatgcttgcgagtcgctgcttgatagtatcgtcgcaaacaatgcaagcatttctgggtgacatcgatgtaaatctccacatagacatctattttcagacgcaccggctgtagcatccatgcacaaccggagtaatttggtcgctaatgcacattgatcattgtcgttattaccct

SEQ ID NO: 182203 - DNA, 362 bp, Zea mays
  unsure (1)..(362): unsure at all n locations
  Clone ID: MRT4577_97747C.1
actctctaggaagtttttcaaaataaaagataaatataaaatttgtctatattccatgtttgtcgccataaaatcaactcanagacgccacctatatcaaatcaaagtcctcgttatgtcactcctcttgaaccacctattcttctcctttgggagaattgagaaacagcaaggataacctcacacattttcatctctcaacaagtattttcgaataatattgcatcaactcaccaaatatgttaattcatctaatctgtaaagctcatcaacattaattttcaaaaactatcttcccatttaataaatacctcaaaatctattatcatttacttaataataagtaatttccaaaccataat

SEQ ID NO: 182204 - DNA, 820 bp, Zea mays
  Clone ID: MRT4577_97748C.1
cctcgaggccggccgggccgggtagtgagctaccgagaagaagaaggaggcagggccatcttccgacccacttgtaggctgtaagcagtcacctctcagccacagacatggtgggcatgagaggcgcctacggtggtgcttgcaatgacgacagcaagagccggcctcaccattgccagcctcgccattcctcagggcattagctacgcgaagctggcaagcttgcctcccataatcgggctgtattcgagcttcgtgccgccgatggtgtacgcggtgctggggagctcccgtgacctggcggtgggcccggtgtcgatctcgtcgctgatcatggggtccatgctgcggcaggccgtgagccccaccgcggagccgacgctgttcctgcagctggccttcacctccaccctgttcgcggggctggtgcaggcctccctgggcatcctcaggctcggcttcgtcatcgacttcctgtccaaggcgacgctggtggggttcatggccggcgccgccatcatcgtggcgctgcagcagctcaaggcgctgctgggcatcgtccacttcaccaccgagatgggcatcgtccccgtcatggcatccgtcttccaccacaccagcgagtggtcgtggcagacgattctcatgggcgtctgcttcctcgtcttcctgctgtcggcgaggcatgtgagcatcagatggcaaagctattctggggtttcggcgtgcgcgcccctggcatcggtcaccatctcggacgctgcttggttcccctcttcaagctcagaaccatggcatcagcatcattggggcagctcaa

SEQ ID NO: 182205 - DNA, 338 bp, Zea mays
  Clone ID: MRT4577_97749C.1
tcccatcgacgtccgtcgttttagtcaagccgatctgttggctcagaaagaaaactaagaggcgcagaaaattttaaaaataagaaggcagaagaatgacacaatgatggagcctgataggaaaattggacagccagattcgcgcagaagatgtggctggcggaagacaatacagattgctatgcacatgccttctgaaagtatgcagatacaccaataaagtgaaggtctggtcctggaaacctcgttgcaacaacaggcgtatgccaatggtgaactgtcttccagcatttgcgctggtatcggacgatgatgcatctcgcgaacatggggcacta

SEQ ID NO: 182206 - DNA, 276 bp, Zea mays
  Clone ID: MRT4577_9774C.1
cggctcgagactgacgggcagccacgcagaacaatacgagtatcacacgcgcaaagcgattccgatccccatgctccacacaatagggcactagagctacgagagggggaaacgggaggacgggaataggcatcgtcggccatgtcgtcgtcgtggaactcggtaagtctggcgatcctgtagcaggtgctggactgagtcgccttcgccgcgtagtcctgcagctgctacccgcaggtcctcctcaactgaaagcgcaagaatgtgatgggcctg

SEQ ID NO: 182207 - DNA, 2651 bp, Zea mays
  Clone ID: MRT4577_97750C.1
ctcgaggccggccgggccggaaaatctggcaattaaagcgagagtaaaagtgttggtgtggatggtttgtttctctgccatcacaagctacgatggggggtggtggtatcaaatccatgggatggatgaaaactgctgccaattttttagatgtgtgcctcgctaaaattattggacaccaaccctaccatttttgtgtcgcgagcgcctctccctttctcaaagttgcgtaccgcttttcctcttcatctgaagctgctgccatataccgccctcttcatctcctttatatctaccccttggacctggaggagaggagctagtgagctaccgagaagaagaaggaggcagggccatcttccgacccacttgtaggcgctgtaagcctgtaagcagtcacctctcagccacagacatggtgggcatgagaggcgcctacggtggtgcttgcaatgacgacagcaagagccggctgcacggaggcaaggcggcggagccggagatcgcgtcgatggcagtgcacaaggtggcgccgccgccggcgcggagcacggcgagcaagatgaaggtgagggtgaaggagaccttcttccccgacgacccgttccgggcgttcaaggggcagccgccggggacgcagtggctcatggcggtcaggtacctcttccccatcctggactgggtgccgagctactccttgtcgctcttcaagtccgacctcgtcgccggcctcaccattgccagcctcgccattcctcagggcattagctacgcgaagctggcaagcttgcctcccataatcgggctgtattcgagcttcgtgccgccgatggtgtacgcggtgctggggagctcccgtgacctggcggtgggcccggtgtcgatctcgtcgctgatcatggggtccatgctgcggcaggccgtgagccccaccgcggagccgacgctgttcctgcagctggccttcacctccaccctgttcgcggggctggtgcaggcctccctgggcatcctcaggctcggcttcgtcatcgacttcctgtccaaggcgacgctggtggggttcatggccggcgccgccatcatcgtggcgctgcagcagctcaaggcgctgctgggcatcgtccacttcaccaccgagatgggcatcgtcccagtcatggcctccgtcttccaccacaccagcgagtggtcgtggcagacgatcctcatgggcgtctgcttcctcgtcttcctgctgtcggcgaggcatgtgagcatcagatggccaaagcttttctgggtttcggcgtgcgcgcccctggcatcggtcaccatctcgacgctgcttgttttcctcttcaaagctcagaaccatggcatcagcatcattgggcagctcaagtgcggcctgaatcgcccctcgtgggacaagctcctgtttgacacggcgtatttaggcctcaccatgaagactggccttgtcaccggaatcatctcactgacggaaggaatagcggttggtagaacatttgcctcactcaaggactaccagatagatggaaacaaggagatgatggccatagggttgatgaatgttgttgggtcctgcacatcatgctacgtaacaacaggtgcgttctcccgctctgctgtaaaccacaacgccggctgcaagactgccatgtccaacgtgatcatggcgctgactgtgatggtcacgctgctgttcctcatgccactgttcgtgtacacacccaacgttgtcctcggagcgatcatcatcgccgcggtgatcggcctgatcgatttccccgcggtgtaccacatctggaagatggacaagatggattttctggtgtgcgtttgcgcgtttgccggcgtcatcttcatctcagtccaagaaggccttgcgatagcggttggtatatctatatttagggtgttgatgcagatcacgaggcccaagatgatggttcaagggaacatcaaggggactgatatttacagagacctgcatcactacaaggaggcccaaagagtttctgggttcttgatcttggccattgaagcaccgataaacttcgccaactccaactacctgaatgaaaggattaaaagatggatagaggaagaatcttttgaacaggataaacatactgaactccatttcataatcttggatctgtcagctgttcctgcaattgacacaagtggcatagcgttcctcattgacataaagaaatcaatagagaaacgtggtctggagcttgtgcttgtcaatccaactggagaagtcatggagaaaatacaacgtgcaaacgaggctgaaaactattttaggccagattgcttgtatctgaccactggcgaagcaatcgcttcactttctgcacttgccaagatgacaaaaccctaaatggattgctgaattgtcattgtgttcatccctagcactgttaaaagttttcggtgcaggattttctgtaatggggagtgcatccaataggagtacatcacagctatgtttgtatctagtagaattcttcagatccatgtgatgcaaattcaatggaaaacaaatatgacagtacaatagtagatcttacagaaattttctgctgcagcgataaatattaggtgtcataagagtatagagtatatttgaattc

SEQ ID NO: 182208 - DNA, 221 bp, Zea mays
  Clone ID: MRT4577_97751C.1
ggggtatgaattttatttttttacctgggggaaaaatttgaattgcccgggcaaaatcaggggtgcatttttttcaacccccttggtcattcttcccattccaggtgaacaacataaattctttgggatctcaaaactttcatttactcccaattatatttgccatttgctttaaataaccctaaggcccgcccccaaaataaaataatgagccttgacct

SEQ ID NO: 182209 - DNA, 250 bp, Zea mays
  Clone ID: MRT4577_97752C.1
atgaggggaccgcgttttttcttttaaaaagggtatagtggcagtggcccttgaccagggaacattgtttccacaaagccaaagggatgctactttgattaagcagaagcatttcttattgctccataacaagaaacaactgttgttatgcaaccgactacaagggtccagttcagaactctactgaaataaaggttgaataagttacattgtgtcattaccatcctcaccggttgtatcaaccagcagt

SEQ ID NO: 182210 - DNA, 341 bp, Zea mays
  Clone ID: MRT4577_97753C.1
aaaaaaaaaaacatttaatttttttgcgggttcaaaaaatttttttaacatttttccctttttttccagggatgtttgggaaaaaacaattgggacaactttttgaaggcctaacatttttggacccataaaaaaacttttttatttttgggggattttgggatgccccaaaaaaagggggcccaaaaaattatttgggggtgcccggtgggctttatgggggcgggcccccttaacttgtttttggcccccatttttaaaaaggcccccaataatgtttccggggtaaacgggggccccaaggaaaacagttgagagggcgggggaaaaccctgggtggg

SEQ ID NO: 182211 - DNA, 331 bp, Zea mays
  unsure (1)..(331): unsure at all n locations
  Clone ID: MRT4577_97754C.1
atanttttttttcaaaaacaaactgaatcttgggggaatttacagtaagggcagcaaagccctccaaggcacatagattgaggctcatattttgcccatgaccataactatgctcgaagaccagagtattgaccttggcttttcgcaagggcataggccactgcaacttcaaaacctcacccctttcctaaataggacgtaggtgctgaacacaagcaccctgtatgttacaccctatgcctctgtggacagaccaaccaagtgtcacgcttattatacactgatctacagcaacagccaggtgacaaagcacctgcaacataagacatta

SEQ ID NO: 182212 - DNA, 570 bp, Zea mays
  Clone ID: MRT4577_97755C.1
gcccaaaaacaaaaatgggtggtcttattttatttctataaaaaattaactttccaaaaaccaaaaaaaagttcccggaggaaaactccttacccactgggggaatcaacacccgggatggcctcccgtgaacaactcatcaattggtggaaaaggtgcgcccaaactttaacccccccggggggaaaaaaccaagcatggccacccccccctaagggggagcccccaaaaaatccccctgggcctgccccaagttgggaaggaacctgtccccgcgggaagaatccaaaaaagcccagctaacggacattccccggggggttacccccttttttatggggaaggacaccaccctgggccaccccgcctggctggtcattatttcctgggcgaaatccgggtctaacaaaaaggtggggaaggcccggttcccggccaaagcctttttgatggggtcccaaaaaaaggggcggaagatgcacccccccctccaaaaactgggcaagtcccccagggtgaaccccccacctttttccccgctcttgggcttgaagaagttcatgccccgcg

SEQ ID NO: 182213 - DNA, 960 bp, Zea mays
  Clone ID: MRT4577_97756C.1
atgggcctggtggagtctaccaagatcaccctcgataacaaggaggaccttgtggtggatttgtccaccgagctggtggagaaggatctccaggtggaacagatggccaaccacatacaagagctcgaggatcaggtggaagccagggagaacactattgaggttctagaagaccagctccagaacactcatcagcagctcgaggaagccaaccaacacttagacttgcaccatcaagagatcgaggacatggaggcagaaggggcccatgaggacatagatatcgagagaggagaggagccggagcccgcatctagcttgtacactactggctcaggaggaccaccttcccccgagtctatcgttgcctcgtttgctcctcactcagcgtcagccaccacctcagcactatggggtggtgatcaccaccagcgtgccctggtagcagcaacctacttggagtttctcagtactcagccgcctttgttcaccaaggcggaagatccgcttgatgctgatatctggctcaaggtggtggaatcaatgttcccgctacttcatggagagtgctcagatgcggccaagccgactgaccatgtagttgagtgggaagagttcaagatggcatttagagggcatcacataccagcaggcatcatggaccgcaagctcaacgagtttttggcactcattcaagggagtcgtaccgtgttgcagtacgcccaagcttttaatgacctgtgtcaatacgcaggctaccatgatgacactaatgagaagaagagacacagattcaggaggggcctcaacactaagctccatgaccctctcaacacagtcaaggcccatagctacaatgagttggtcaatttggccatctctcaggaggattgcatctccgctcgacaggccgagaagaagaggaagatccatatggcagggccatcagcacagccttag

SEQ ID NO: 182214 - DNA, 1088 bp, Zea mays
  Clone ID: MRT4577_97757C.1
ccccacgcgtccggcgacgcgtccggtcgccagcagccagcccatgtctggtggcgctcccgacgagcttccaccggtggccaagacctctgccacgcccgaaccgtacgcatctctgaacgtcgccggcggcgggcagcccaacgagccggcggcggggaggccgccgaagctgtcgatggagacgttctcggggatgatcaagaggccgttcgccaagttcctgagcccggtgatcaagggcgtgtgcgccaagacggagtacccggaggactgcgagtcgtcgatcgggggcctcccgggggccgcgtcggcggcggccacggacagcgtgggcgtgctgaagctggccatggaggcggtgcggcagaaggccatcgaggcgatgaacgcggccacggacaggatgaacgcgccgggcacggacccgacgaccaaggaggcgctcgactcgtgcacgtcgtcgtacagcgacatcaagacgagcctggagacggtggacgacgcgctcaagcgcggcgacgtcgacacggcgcacaccaacctcgactcggtggagacggacatcaccacctgcgacgacggcttccaggagcgcggcaccccgtcagtcatgaccgaccacgaccaggagctccagaagctcgccagcaacctcctctccatcggcgccgccatccaccactagaaagagaggagggaggtgcggcgtccacacacgcatgcatgcatgcatgcatgcattgcgtttgcgtctcaagagttcacttgtaaatttgtaatcgaggaagaaaagcacctctcgatcgattaacatgtctagctgctacgatcctgtgattcgacgatgttaattaatcggcagctttcattatgatgtgtagcagtatactgtatgattaattgtggatcttttcgaaaacaaaaactgtaatattcgtgaaattgtagagccttcacctattattaatctatcaagtaatcgagaaaatgtaattaatcccaaacgtgaatacatggtgcaaaaacatgaatgatggtaggaaaatgaaaacaacatttgaaaaaaaaagaaaaaaaaggggggg

SEQ ID NO: 182215 - DNA, 1046 bp, Zea mays
  Clone ID: MRT4577_97758C.1
agaagagctatgacgtcgcatgcacgcgtacgtaagctcggaattcggctcgagcttaacatgaagttagcaccttacggggtaatgaaagtggtaaagatgtaggcgacgtcaaatatgtacctgacaacaaggctgaaacagtacacaagctttttaagtttattgaagacggggacttatggagatggaaaattccaaatagcaaggccttcagcagtggacttaaagatttggacattgaattcaatgtcaatacaaataataaattgtttgatcagttgttggagttggatcctgagcgtgtcatttcccatggacaagcgacattattagagaagcaaagattaatagatgattgtttggagaaatcctatgaaatttcccttggatgtggccaagttgggagtgtctggctgtgatgctgatgctatttcaaatttgagaagcgaacttggaaatcaactagctagcaagagccgtgattttaatctaaggggtattggggctgttgtatacaaagttcctgagttgaataatgaccagatactgaaagtaagtctaagaagtttagaacaagaagacacaacctgtatctctcaggaatacggtggtgggggacatcggaatgcaagctcgtttattttgagtgtgactgagtttgacaggtggaaagtcggatcttctcgaccaaaaggtgcataaccatctggctttcttcattgctctacaagattaatgaagaaacacatgcagagggaacaaaaccccaaacttgggggtgtgggacatgagaaacatcatagctgcatatcagacaattctcgacacttacgcagcattctgctatcatgccatatcttaccctatggcacttattcataggctgctgtgtgggcacttagttttacaaaatctgctgaaatctaattggagaactctacatgtctcacgtactagcttagacactgaatatattagtccttaaatgcgtctttttacattttatttatgcaagtgctactttgattaatgtgtagttctgt

SEQ ID NO: 182216 - DNA, 1711 bp, Zea mays
  Clone ID: MRT4577_97759C.1
ccggccgggaggtcctccgcgctccgtgcctgccagcctgccactgctcggttctagaatccactccctgacctgtgcggcgctccgtgcctggctgccagcctgccactgctcggttctagaatccactccctgacctgtgcggcgttcccgtgcccggccggagtattgatcgcatggcctgcgccggcgccgcacggaaggtctcagcggtgctctaccactacccgtgcccggacggcgcgttcgcagcgctcgccgctcacctctatttttccggcgccgcccatccggtccgattcttccccaataccgtctacgaccccatcaggagtgattcacttccactggaagaaataaaagatgtttaccttcttgactttgtgggacctcctggttttgttgaagatatagcccctaaagtcgaaagaataacaatcctggaccatcataagaccgcttttgaaagtttgtgtgtgaatgccacacttgggcaaaatgtgaccaaggtgatagacatgcagcgtagtggtgcgacaattgcatttgacttctttagaaacaagctcttaacagaagttagcacctcacggggtaatgaaagtggtaaagatgtagccaaggtcaaatatgtacctgacaacaaggctgaaacagtacacaagctttttaagtttattgaagacggggacttatggagatggaaaattccaaatagcaaggccttcagcagtggacttaaagatttggacattgaattcaatgtcaatgcaaataataaattgtttgatcagttgttggagttggatcctgagcatgtcatttcccatggacaagcgacattattagagaagcaaagattaatagatgattgtttggagaaatcctatgaaatttccctgggatgtggccagtttgggagttgtctggctgttgatgctgatgctatttcaaatttgagaagcgaacttggaaatcaactagctagcaagagccgtgattttaatctaaggggtattggggctgttgtatacaaagttcctgagttgaataatgaccagatactgaaagtaagtctaagaagtttagaacaagaagacacaacctgtatctctcaggaatacggtggtgggggacatcggaatgcaagctcgtttattttgagtgtgactgagtttgacaggtggaaagtcggatcttctcgaccaaaagttttgaagacatgaactgtcgtgtggatgaggtttcacgtgcttggccaacgtcagtaacaaaacggcagcaggtgggcatctttgaagcagtattggttgatgagctatgaattctcagggaagacgcccgaatgaacttcaagaaacgctccgtgcgacttttttcattgctttccaagattaatgaagaaacccatgcagagggacaaaaccccaaacttggggatgtgggacatgagaaacatcatagctgcatatcagacaatttttgacccttacgcagcattttgctatcatgccatatcttaccctatggcccttattaataggcggctatttgggcccttagttttacaaaagctgctgaaatcaaaattggagaactctacatgtctcacggactgggttaaaccctgaacatattagtcctttaaagcgacgggcgacagccaaacgaggcaaaaaaaaaaaaaaaaaaagggaggccggaccagagg

SEQ ID NO: 182217 - DNA, 486 bp, Zea mays
  Clone ID: MRT4577_9775C.1
gatcagcaaaatgaaaaggatgcacgaatcagctttgcaagagaagaccgaagaactgttcaggctcaaacgggagaaggggtcacattctctcaagaatgacatcgaatttgaacctttgagaaagaaaattccagagcttgtattgagaatggaccaaatcatttccaagaatataaaggtacctgcaatctgcatgacccatgatgaactcgatgaaagatgcagattgatgagcagaatcgatgctttgttctatgaaaatcagcattttcgagggttgcttgcagacaggatgaaggacgttaaggcattatcatcccagctatctgaagccagtacagaactgtcaatgcagatgctgtcggaagaagagctcctgagacaaatcgataaagttagagaagactgtgaggacctccgaattgaatgtgatgttagagaaggaatgtaccaaactgttacaaaacatttgcttgatgacta

SEQ ID NO: 182218 - DNA, 318 bp, Zea mays
  Clone ID: MRT4577_97761C.1
tcgcagaatgtcgcgcgccgctagcccgcaatgcttcaaccaaacagaccggtttttggagcccggggatctttagcactaggacggccatcggcaccgttgctgcatacgcgcaactctgttaatgtaccccgggagcagctggtcgtcgtggcagcgcgggtacctgatgagctacttacacaggtccaacatcacggtcctgaacaggttctacacactgaccctgtcggcgaacagctcgctgcacggcattgtcattcggctgcgggcactctcagagcgtgctgatcaaccgcgttctacaggcttctgggc

SEQ ID NO: 182219 - DNA, 604 bp, Zea mays
  Clone ID: MRT4577_97762C.1
tagcctttcgtctctttcagctttagggccaccagcgcctggacgctcgcgccccggcctcgccgccatggcttcctccctggccgccctccactcagccgccgccagccacctcccacaccctcgacgtcagaggaccgccgccctcgcgcgcgcctctcctctcctccgcctgccgcttcgcctccgctcccgccgggtccccgggtcgccgccaagttggcgaccggcgccgctggcggcacggcaaccggcagggcgaggcggagcgtgggcgtcgacgtcgccgccctcgccgcggcgctgcgcgacgccagaacggccgacgacgtggagtcctcggtgaacgccttcttgagcgacgacgaggcccggctcctgccgctccaggtgtacacgtgcgtcatccgggggctcggcaagggcaacagcccggacgccgcgttcgccgtcgtcgagcacctcaagcggagaggggtggtgccgaaccagttcgtgtacaactgcctcctcggcgccgtcaagagctgcggcgagctcggccgggtccaggccgtcctcgatgacatggaggcgcagggggtgcccaccaacatcggcacct

SEQ ID NO: 182220 - DNA, 297 bp, Zea mays
  Clone ID: MRT4577_97763C.1
acggacggacccactcatgctatgactcaaaaactgctacgggcctgcgatattagatgacagagctactgcagagacgggggcacgcccacccatctctgaggtgcacatctacactgccgctggctacgcaactgcatgccgtggagggagcaaacatctcaggtactgttgacacgcattgaaatgtgcatcttactaacacaactcacgattgaccgccggtatgtatcccacgattatgaacaacacctggcgaccgctgtcatgcaactactacacatttcaagccacaag

SEQ ID NO: 182221 - DNA, 385 bp, Zea mays
  Clone ID: MRT4577_97764C.1
ccatcaagggtcacggcaggcctgtccttataaagttgaagggagatcctggttcgctgtgacctgaccaagctgcaccttgatgcgagaaacccatttccttggaaaaccttttactttctttctttaaaaaactggggaaaatcttgctttaataggtatagcatgttgccccaaaaattaagaatacaagcatctgaacccaacccccaaagcaaactcacatcgcctcaagaaaaaaaacccggagacaatttaaactacttgctggtccaaatccctggggccaaaagccacaattcatccttgagggccttatatttcaaaaagattcaactccttccttttggccgctttatttctgccaattttttaactgaaagcc

SEQ ID NO: 182222 - DNA, 484 bp, Zea mays
  Clone ID: MRT4577_97765C.1
aaaaaaaccgaaaatggggggggtttggaaaaacaggtttttaaccctggggccagttgggaggttttccatgccggggaaaaaaagggccaggggatggggctttttttgaccccggttcctagaaaggtccacaaagcggggttttgaaaaaaaccggggggcccccccctcccccagcggggggcattcgggttgccaaggggggggcaccctaaaacaacccccggggttggagttggcctaaaaatgggacccctgaagggggggcaagaaacgtatccccccccccccttcggaaaaaaggccaaaggggagggttttcccccgggttttccaaaaaggccccccttaaagttaggcctatttttggggcccctttttggagaaaatttaaccagttggcccactcccttttggtccaggaccttaaaggggttttgtggggggatcccctgggcaaaaaaaccgggaaggaacttcc

SEQ ID NO: 182223 - DNA, 136 bp, Zea mays
  Clone ID: MRT4577_97766C.1
agctcggaattcggctcaggttggtatgcatcgttttttttgtggactattgcggacaaatctaccaataggttgtaatgaacactcctgcgtaatcgagaacgctggaaccaataacggggcgaatggcttggtc

SEQ ID NO: 182224 - DNA, 655 bp, Zea mays
  Clone ID: MRT4577_97767C.1
gccggccgggttttcgttccagtctaagaagcaaaaatcctatggccaaaatctggtccaaaaattccatggattcgagcgatgggatgggcgacatggttcctagcggcggtgtgcttctttgccgcgaccgaactcttcgtccctgacgctctccattcccccctccggcgtaggctccatcacgtccgccaagctggctcacgtcctctcctttgccaccttctggggcgccaccctctggcccaccttcattagcgccgccctctagaaatccaagaaaggcagcaaccaaaacagaggaggtgtgcaggaggaggaggtggtgctggaggggaagatctcacaagcgagtgaagaccacacagtctcgcgcactcgcaaacccagtgcacgctgcggttttcctcttcgcccaccttcttggagcggggaggttggccatgaggaggtggtgcccggctgccctgctgggctgcgtagtggcgctgtccgttctggtggccgccgtggaatgcgctgtggcttacgacaagaaggcagtgctgattgatgggcagatgcggattctcttctccggatccatacacttccccaggagcacccctgatgtaactgcattttacaaaatctctttctccccccactattccct

SEQ ID NO: 182225 - DNA, 302 bp, Zea mays
  Clone ID: MRT4577_97768C.1
gggttctcgggcgaggagctggacgacgtgcactgctacgacccggccacccgggagtgggccgcggtccagaccacgggcgacaggcccagcccccggagcgtgttctgcgccgccgggttcgggaggcacgtggtactgttcggcggcgaggtggaccccagtgacctcggccacctcggcgccggcaagttctcggccgaggcgttcgcgctggacacggagaccggcgcgtggacgcggctggacgacagggcggaggccgagcaccacccggggcatcgcgggtggtgtgcgttcac

SEQ ID NO: 182226 - DNA, 708 bp, Zea mays
  Clone ID: MRT4577_97769C.1
cgggaaaaaaaatcttctataacatatccattcatgtccaatctacacggcctgcagctcaaaatacttgttaacatagcctcaattctgaagaacgtgtttgctgccactattactattgcgtgcaacattttgcaaaatactgcagtgacacaaaagcagagaggcactgctaatggcatctctgttactatgatgtcaatgttcaaagctgcagctccggcagcagcaggaattattttttcatgggctcagaagcacatatatgggctattcttacctggtaaccagatcttgttcctgacgctaaacatggtgtcaataattgggctagtgctgacattcaagccatttctctcccagccaatccaatgaggcattaataaatatgtgtatatgaagtttgttacctatgaattacatctggagtgcattgtcaggttacacacaagaaatatggggatccatgacgaacaccatgtgacatttcagtagaatgtcataacaatcttgtgataaaatggttagctaccatggatgtttcatctacacaccagcttggtttgttatttatactaaggaaaaacaaactctagccttatgatcaactacagtcaggttttgaactgcaagagatcatatcttaagtggtccatacatttcgtcttatgttcaattaagtcatcaaatgtaaaggcttctctgaag

SEQ ID NO: 182227 - DNA, 686 bp, Zea mays
  Clone ID: MRT4577_9776C.1
gtgtgtgtgtgtgtgtgtgtgtgtgtgtgtgtgtgtcataagcgcgagggtttctggcgaggttgctaaagcgttagcgggggcgcccatggagcttgacgaggagacgttcttggacgagctcatgtcgctgcggcgggaggcggcggcggcggcgtccgggcagtggcaagcagctgccgcctacacgggcggcggcggagacgaaggcatgatgatgggcgacctcctcttctacggcggggcgacggaggccgccgcgactgccaccagcggcggcggcatggaccagctctcgccgttccaccagcacgcgccgctgcaggtgcaggtgcaggcgcccgcggcggccccgcaccctcactcgcacgaggagttcaacttcgactgcctcagcgaggtttgcaacccgtacaggggggccggcgtcgccgtaataacgggggccgaggccgccgcggtgcctggaagggcgctcgccgctctccacgacgccatggtggaggacgagacgagcggtcacctgccgcaggggcggcaacatggagccggcgggtccccgacgttcgtgttcggcggtgccgccggcgagagctccgagcagatgcccgtcgtcctcaggggtgccggcggcggccccccccccaggaggcagggccacggcggcgcgccgcccaagaatctca

SEQ ID NO: 182228 - DNA, 413 bp, Zea mays
  Clone ID: MRT4577_97770C.1
ctaccgtcggagttgactgactaagacggtgttgacgcctacctcaccaaataagggcccgaccttttacggcattcacaggggggacaggaaatcagcggccatggcctcgattccggcgacgaccttcggcagcatgcttatccgtcctattgtgtgccgcggctggcacctgcgtcgacaggctaccttctagactacatcatccagggccgcgtctactgcgacacctgccgcgccggggtcgtgaccaatgtgcaccgagtacatcgcgggctgccaaggtgaggctgaagggcaagcacttgggctccggcaagctcgagcgctccatcgacggggtgaccgacgcgaaccgcacgtacacgatcgagcttaaggacagccacgaggaggacatctgccaggtggtc

SEQ ID NO: 182229 - DNA, 429 bp, Zea mays
  Clone ID: MRT4577_97771C.1
aaaaaaaaggaaaaacggggtcccatgaattttatcaacaacaaaggggggggcggggaagcggggaaacttcacaaacaaaaaaacgcccgggaataaagggtttagccccaatgggtaaaaaaaatatgggcggaacgaacattagggccccaaaagggaacccagttcaaaaatttgaacaccccaaaaattttttccctaaaattaaaaggaaccccccaaggtccggccccccctttgggggcaaaaaaaaaagggttttttgggcccagggattcaacttcaaaaaggcctggtccggggtccaaaggccccgcccaaaaacaacccgtttttggggaacgggtttttgcccccccacaagtttcccggcaaaaaaaccccgggggaaaaatgttggcccaggaactgcctggcccaattttt

SEQ ID NO: 182230 - DNA, 192 bp, Zea mays
  Clone ID: MRT4577_97772C.1
acggggacacctgggcggacgcgtgggcgccgttccgccaggttctttgaggaccacttgccgatccggctgagcatgatccgagcgcttacctgggggtgcggtaccctggcagccagtcgatcaagctctactcctgcctgtgtacctcctacgactggactacccgccctggcccccacaagacggact

SEQ ID NO: 182231 - DNA, 450 bp, Zea mays
  Clone ID: MRT4577_97773C.1
gcgggcaggttccgggctgttgtgttcttgtctgccctctggtgctaagatattcggaagacaaaagatctggaagctttaactagcgatggagcgcaaggctaagcgacggaaaaggagactgtttcggttgccctgggttaaagcatattgtacaagcagatgctaggcacacatttctttttgccgctaaaaattgggtaatgcagagccacctcgctctttttgtttggaacattgaccatcttgaggtatttatgggttcattccgctccatataaccaatattgtccttggtacggaatagggttcgcgggtgggatcgctatagaatgagaaataatacttctatatgttacaattgtaactttttaagatgaatataccatttggatagagcagcttctgagtatacacagacttaggtaggcttatgggtatgctctgttg

SEQ ID NO: 182232 - DNA, 233 bp, Zea mays
  Clone ID: MRT4577_97774C.1
gtattattaggtatattttcttaagtgtgctggggacttttttggttcaaccaagagggccaacatattaacaggcaataaaaaaacccggatactccaagacatttgatcgaagagtatgagaatattccgttatttgaaatggatgttaaaatgttgacctaactggtgcataaacccgacaggccgcagcattattaaaaacatatacctaataatacacaaaaggggtg

SEQ ID NO: 182233 - DNA, 731 bp, Zea mays
  Clone ID: MRT4577_97775C.1
tcgaggccggccgggattcgaatgtggacggaatcgtgaacacatatagacaacaaaaatggatgatttagactcactgctgtctgacttgggtaagaggagagatgataattcatcgaccagaaagacaaggcctccgacctcaagagtcgatttaaatgagctggcctcgctgatggaggtcctcgcagctcctacgcctcaacaagcggagaccaaacaagctgccccctctcgaagtgcgagagagaccaccacagtagatgatttggacgccttgatggagtcactctcagcagcttcaggcaataacaaccgcgggactcagcgtatcggcacaacttctgccaagcagatgggaaatgtctctgcctacgcagaacccgtagtggaatccgccagcacttataattcactcagatcaccagatctaagtaatcctgcatatcaatctcgccctgtctctaccgtctataattcaccaggtttagagtcgaggtccggtggttatgtccctgctgcttctgcatctcataatgataacagctatcaatcgagtccatacagccccaacaacggctctgcatacaactctcgccctgtcaccagcgtttacagcggaggtgtagaccacacccctcccgcgtacaacgccccacccaattatgctggacacagggaatcacagaatcttggcggtcctgcaccaggtgttcgtaagccagatgagc

SEQ ID NO: 182234 - DNA, 2074 bp, Zea mays
  Clone ID: MRT4577_97776C.1
ccggccggggcttcttccggttcctgccctccttgctgacctcggagcggagcgcagcggagccaggatccgacaggagggaaggaaaggtgcacatgggccagatgcgcgtacgacaaccccttccagggcaggccacgcgacggaggcgctttcaccgagatcaacgacgacgaccgacggatcgccaaatattctgaggacgagctctacctcacgttggttccctcgaggccggccgggaggtgagacatccacgcggagtccgctgaaattttggtcgccccatgcccgttctagacgccatggacgatgcggcggcggcggcggtagataggcacggcggcttctagaccgtctccgttttctgcgcgttggccgtcgggggaagtacacaataaacaaagcaagagcagaggtccaactgggctgctgcgtcctctgcctcttctccttcctgtcgttctgcgctgccccgacccccgagtgcccctggtcttgtcctcctctccctgctgacctcggagcggagcaagcagccgccaggagggaaggatccatggccgggagatcgcggtacgacaaccccttcgaggagggcggcgccgacgaggtcaaccctttcgcggaccaagctaagagaggaggatcgactgctcagtccggctactctggtggcgcgttctacacgacgcaatcgcaacgccctgctcctcctagcacacgcctttcgcctcttcctcctgaacctgccgacttctacaacgacttcgctaccccagtggatatccccatggacacaaacaaggacatgaagacaagggagaaggagcttctggccaaggaggccgagctgaacaggcgtgagaaggaaataaaaaggcgagaagatgctgcggcacgagctggtatcgtgttggaagagaaaaactggcccccgtttttccccatcattcataacgatatcggcaacgagatacctgtccatctgcaaagaacgctgtacgtcgcgttcgcgtcgctcttagggttggtcgggatgcctgttttgatcagttttctgggcgacagcgtgattgtcgggatcttctacttcattggctttgcactgttctgcctagagtcttcgctaagcatgtgtgtcattcagcgtgtttacctctacttccgaggaagtgggaaggaagcggagatgaggcgggaagcagcacgcagtgctggagaggggcagcattttgacgaaccgtgtgtgtatatatagcacggcgtgtgttttgttcatagtttgcagtgctgtttctccttcaattctcttcgtggtaaaaatcgttaaccgggattttgccagcaatcagcttgataggcgacagcgtcattgttgggatcttctacttcattggctttgcattgttctgcctggaggctttgctaagcgtgtgggtcattcagcgcgtctacctgtacttccgagggagcgggaaagaagcggagatgaggcgtgaagcagcacgcggtgcagcgagggcagcgttttgatgaaaaccgtatatagatgatatatataggcacgacttacatactgttcataatagtttgaagtgctttaggtcaagaggcatgtgtgtacagtagggttggcgtcttgtacatctttaaggccggtttggtgaaacatggaaatggaatgaatccataaaggagagatccgttgttattcaaaattaaataacaaggatctcttctccatgggtcccatccatttccctctccaccaaaccagccctgagttcctatcgccacggtgttttgagccctccagattgatcaatcgtggtacatatgacagtgttagtatatggagtaaatacacatggacgggtaaacctaaaaaaaaaaaaaaaaaaaaaaaaaaaaaaagacgtaaaaaaaaattgtaatgaagttcccccccaagatttttgggggaaaaaaaaaaacctacgtgtcaagggggttgggctcaaaccccccctccaaattaaagagcttttttttccataaaaccagccaataataaatttttcgacctttgggg

SEQ ID NO: 182235 - DNA, 424 bp, Zea mays
  Clone ID: MRT4577_97777C.1
gtaagtataacctgaggaggcagcaggggacctttattattggaggaggattccacagaaaggaatcggacggacggcatgcaatggaagtggaggaaagccccgaaacaagaaacaatacttttttttggccggcgagggggcctaactaaaatgctgtgcatgactagcgggtgcatgcatacacaagcaaacaaaacggggaggggaaaataaatccgcaaaccatgggccctgcgatgcaacagccagggccaaacgcggagaaaaccgtcacgacaccgtccatgggagccttaggactttcagaccacggtggacttggtgaacatggaggtgaccacgtaggggtacatgttggacgccttccacccgtactagaacgagcccttggcgagctggtccaacttgcggtccaaccgca

SEQ ID NO: 182236 - DNA, 938 bp, Zea mays
  unsure (1)..(938): unsure at all n locations
  Clone ID: MRT4577_97778C.1
ctcgttccgattcggctcgagggaaaggaaaggtccatggcggggagatcgacgtacgacaaccccttcgaggagggcgccgccgcggccgaggtcaaccctttcgcggaccaagctaaacgaggaggaccgacggctcagtccagctattctggcggcgcgttctacacgacggtgagtgcaatgttttcagtaaccaaaaaaaaggggggtaaaaaataaaaatgttttggatggatgaccatacgatagcaacaatgagttcacggacgcctgggctgcagcgtcctctgcctcttctccttcctgtcgttctgcgctgccccgacccccgagtgcccctggtcttgtcctcctctccctgctgacctcggagcggagcaagcagccgccaggagggaaggatccatggccgggagatcgcggtacgacaaccccttcgaggagggcggcgccgacgaggtcaaccctttcgcggaccaagctaagagaggaggatcgactgctcagtccggctactctggtggcgcgttctacacgacgcaatcgcaacgccctgctcctcctagcacacgcctttcgcctcttcctcctgaacctgccgacttctacaacgacttcgctaccccagtggatatccccatggacacaaacaaggacatgaagacaagggagaaggagcttctggccaaggaggccgagctgaacaggcgtgagaaggaaataaaaaggcgagaagatgctgcggcacgaggtggagtctcagagttcatcgtctgacgtcgcttcgctattgttntttgggcatcaattcctcacatcgataataacatcatcgtcatcgtcatcgtcatccatgttctcttgcagctggtatcgtgttggaagagaagaactgccccccgtttttcccatcattcataacgatatcggcaacg

SEQ ID NO: 182237 - DNA, 881 bp, Zea mays
  Clone ID: MRT4577_97779C.1
cattggtacctcgaggcggcggcagacttcatggaaacggcagcgagccgcgagcttcccgtgcgcgcagtgtttgatgattgatcaccaatcctgcaccgctgcgcggccgatcgaggctgagccttgcaggcgtccatgttctcgtcagcaaggcaggtaagcatgctgtccctcaaggattgatttttttttttaatgagcaacgctgcatgctgtttgtccagcgtcttcttcacatgtctgaggtctgagcaattgcgggtggacatccatggatgagcattgccgctgcaagggaagatcgtccggctcacacttgagttgggataccatgcactactcttgcttgtagttagattagataccatgcgcttgaaccgtgcaatagcatagcgaggaagacgaacccagagaggactcagaaagagatgttctctatttcatccagtgctcatctagtcatctagtctgcctgcgggtgtctgcaatgaacgctgacgctgctgccggagacctactctgctactggtgtggagtggacaaacagggagggaaggcgtctgctatagaagacggacacagggaggaccaacaggactaaagaccgtcgtacgtgttgaagctgaaacgtgttgaagctgaaggactttcttattacgtgtggcgcttcggaataaagccagcggcaattcatagagctgctacaaatctctactacttattagtgcagtatgttgcgtgcgttctctagaatgtgtcgagcgtattgtgaatatggttgtgtaaaacacaattttaaactgtagacaacactctttgcatgatagagtttgaaataaatgatgagttaggagaaaaaaaaaaaaaaaaaaggtctt

SEQ ID NO: 182238 - DNA, 818 bp, Zea mays
  unsure (1)..(818): unsure at all n locations
  Clone ID: MRT4577_9777C.1
aaagttgtcgaactggaagcttcaagccgccgccattatttgcattgcaccaccaaaagaactgctgctttgctgctgaatagctccggcgccggcgacgcggccggatgggtgccgaacgcgctcggcgctggaagctcctgcccttccggtcgctgtccctgccaccgccggcagcatccaagcccaagaacaggccacaggacgtcactgtccctccgctccggacgacgaaggagaagggagaggaggaggtgccggcggacttcctgtgctgccccatccttggcacaccgttggcggacccggtcatcctgccgtcggggcggacgtacgagcgcgcgtgcgtcctggcctgcgcggagctcggcctgtccctcggtcctgacggagtggtggcgggcaacagggacccaccgggcggtggcgttgccgccgctatacccaacgacgcgctccgggcggccgtccggacatggtgcgcgctcgctgatcgcgcggcgcccgtggcgccttcgggcgaggaggcgaaggtggccgtgctgcgcgcggtggcggcaccagggacacagcctccggctaggtcgtcgtcgaatctgtcgtgctcgtcggagggggctccggcgccagcgaggtcggcgtcgaacctgtcgtgctcgtcggagggagcttctgctgcatcaacgtcgtcctcgtcgtcgggtaagtcgtcgagggatatggcgccggtcgaggtgaaggtggtgcgcgggaaggagggcgcaaaggaggaagagtcgaacacgagcgtgttgctgactcannaggagaggtcgtgg

SEQ ID NO: 182239 - DNA, 1650 bp, Zea mays
  Clone ID: MRT4577_97780C.1
aacaaagcaagagcagaggtgcaactgggggctgctgcgtcctctgcctcttctccttcctgtcgttctgcgctgccccgacccccgagtgcccctggtcttgtcctcctctccctgctgacctcggagcggagcggaagcaagcagccgccaggagggaaggatccatggccgggagatcgcggtacgacaaccccttcgaggagggcggcgccgacgaggtcaaccctttcgcggaccaagctaagagaggaggatcgactgctcagtccggctactctggtggcgcgttctacacgacgcaatcgcaacgccctgctcctcctagcacacgcctttcgcctcttcctcctgaacctgccgacttctacaacgacttcgctaccccagtggatatccccatggacacaaacaaggacatgaagacaagggagaaggagcttctggccaaggaggccgagctgaacaggcgtgagaaggaaataaaaaggcgagaagatgctgcggcacgagctggtatcgtgttggaagagaagaactggcccccgtttttccccatcattcataacgatatcggcaacgagatacctgtccatctgcaaagaacgctgtacgtcgcgttcgcgtcgctcttagggttggtcttgtgcctgttttggaacataatctgcgttactgctgcctgggcaaaagggtcaggtcctaagatatggtttctcgcaatcatatacttcatcctcggatgccccggtgcatactacctttggtaccggccactataccgcgcaatgaggaacgagagcgctctcaagttcggatggtttttcctcttctacttgattcatatcgccttctgcgcgtacgcagctgcttctccttcaattctcttcgtgggaaaatcgttaaccgggattttgccagcaatcaacttgataggcgacagcgtcattgttgggatcttctacttcattggctttgcattgttctgcctggaggctttgctaagcgtgtgggtcattcagcgcgtctacctgtacttccgagggagcgggaaagaagcggagatgaggcgtgaagcagcacgcggtgcagcgagggcagcgttttgatgaaaaccgtatatagatgatatatataggcacgacttacatactgttcataatagtttgaagtgctttaggtcaagaggcatgtgtgtacagtagggttggcgtcttgtacatctttaaggccggtttggtgaaacatggaaatggaatgaatccataaaggagagatccgttgttattcaaaattaaataacaaggatctcttctccatgggtcccatccatttccctctccaccaaaccagccctgagttcctatcgccacggtgttttgagccctccagattgatcaatcgtggtacatatgacagtgttagtatatggagtaaatacacatggacgggtaaacctagctagactctttgttccatatgtgcatttttgtgtcaccgccttgtatcaattatttatagacgtaatgaagttgtaatgatgttctcactcgagatttttgagtggggaaattgcaaaagcatacttatgtcaagggagttgtactcatacccacactccaaattaaagagctttcgtttttctctctc

SEQ ID NO: 182240 - DNA, 257 bp, Zea mays
  Clone ID: MRT4577_97781C.1
ctcggaggccggccgggctctacaaaccctagccccctgctccatatctcagccgccgcccatccctctcccgctgctccgcacccgctgagtgagaataagagatgcccgccaggccgatggccctcctatcgcgatccatcccgtcaccacgcactctcgcgtagccgcatgcaatactaccgtcctaggagtattgccaaccaccagcgctacccgagcacgccctcccacgtctacttcaccgactccaagcg

SEQ ID NO: 182241 - DNA, 1477 bp, Zea mays
  Clone ID: MRT4577_97782C.1
tcatccagaggaggagcccgaccacgccagtgtagccgcccgattcgccgtcgcggcggccacgtttcccctccaatggccaccagctccaccgccttgctgcaccttgtcatcccggcctcccgccgccgccggcacttggtgcctcgggccgcacactccgagtccgccccgcccgccgcctccgtcgaccggcgccgcttcatcgcccacaccgccgccgcggccgccgtctcccctctcgtcttgccccgctggacccccgcggctcgcgcggacgaagtgccggcgctctccgagtgggagcgcatcttcctgcccatcgactccggcgtcgtcctcctcgacatcgccttcgtcccagacgacccctcccatggttttctccttggaacaagacagacaatactggagacgaaagacggcggcaacacctggttccctcgctccatcccttccgcagaggacgaagatttcaactacaggttcaactcggtaagcttcaagggcagagagggatggattatcggcaagcctgcaattctactgcacacctcagatgctggcgagagctgggaaagaatacccctgagtgcccaacttcctgggaacatggtttacataaaagctactggggagcagagcgcagagatggttaccgatgagggagcaatctatgttacctctaaccgtggatacaactggaaggctgccgtgcaggagaccgtttcagctactctgaacagaacagtttcaagtggcattagcggtgcaagctactacactgggactttcaacacggtgaacagatcggccgacggacgctacgtggctgtgtccagccgagggaacttctatctgacgtgggagcccgggcagccgttctggcaaccccacaacagggcggtggcacggaggattcagaacatggggtggagagcggacggtggactttggctgctggtgcgcggtggtggcctcttcctcagcagaggaaccgggataactgaagattttgaggaggtgcaggtgcagagccgggggtttgggatcctggacgtgggctaccgctcgcaggaggaggcctgggctgctggtggcagcggcgtgctgctcaagaccacaaacggagggaagagctggatgcgcgacaaggctgccgacaacatcgccgccaatctctactccgtcaagttccttgatgacaggaaaggcttcgtgctgggcaacgacggcgtgttgcttcggtatcttggctgacattctatgtatatgtgtgtacagcgaacggcatgtgctgctgctactactactgtaaaaggctgcttactgtgcttgcgttctctcttctgcaacccaaattgagtgtaaagatgcatgtgctgcttgctaggaacttgaaaaccttgtatacccgtatctactatctatatatatgctaccttgttgcaagaaaaaaaaaaaaaaaaaagcggcc

SEQ ID NO: 182242 - DNA, 430 bp, Zea mays
  Clone ID: MRT4577_97783C.1
ctttctctctatactaaaaaagcaaaatacttttcgaatctggttaaatttatatattatttaatcccttacacttactacattatacacggagatgtctcaacaatgctttgccacaacatacacattacccaaattatatctttttttacttaaccacatcaccttaatttacttattaccattttactaatctgtttctaaccaataacataatttctgttaaccgccaatatttctcttctctgatactcttaatctactgttatttccctaaaaatcccatgtaccctcattaatgactataatagggccatcctcctttatcagtttttttattcatgtcctgaaacactttacttactttctttctccttcatctaacaactatataccccttttccatatgctgctcaacatcccaaattaa

SEQ ID NO: 182243 - DNA, 398 bp, Zea mays
  Clone ID: MRT4577_97784C.1
taaaaaaaaaaaaaaaaaaaaaaaaaaaaaaaaaaaaaaaaaaaaaaaaaatttaagagaagggaatttaaaatagggggggggtagaagaaaaaaaattgggtttgcggttttctaaattcaaatttactggcctgggctttcaactgtatcgttttttttaaaccgtgccttaaccaaattaaattgcctggggttaaaacccctttgacttggaaaacctttggtttaaccaacttaacccgcttggctttccatccctttttgccagctggggtgaaaaggaaaagggcccgtccctgtggctttaccaaaaggggggtggcttttatggccaattggaccccccccttttgcgtggctttaaccccgggggcgttggggtttccccctttcct

SEQ ID NO: 182244 - DNA, 960 bp, Zea mays
  Clone ID: MRT4577_97785C.1
attcccgggctagtttacataaaagcactggggagcagagcgcagagaggttaccgatgagggagcaatctatgttacctctaaccgtggatacaactggaaggctgccgtgcaggagaccgtttcagctactctgaacagtgcaataccttgttcctgtttgtgatgcagaacagtttcaagtggcattagcggtgcaagctactacactgggactttcaacacggtgaacagatcggccgacgggcgctacgtggctgtgtccagccgagggaacttctatctgacgtgggagcccgggcagccgttctggcaaccccacaacagggcggtggcacggaggattcagaacatggggtggagagcggacggtggactttggctgctggtgcgcggtggtggcctcttcctcagcagaggaaccgggataactgaagattttgaggaggtgcaggtgcagagccgggggtttgggatcctggacgtgggctaccgctcgcaggaggaggcctgggctgctggtggcagcggcgtgctgctcaagaccacaaacggagggaagagctggatgcgcgacaaggctgccgacaacatcgccgccaatctctactccgtcaagtaaccatactctgctgctgctgctgcgctctcttgcttgtcacaaacactttgtacgtaattgtgacgctggctgctgccacaggttccttgatgacaggaaaggcttcgtgctgggcaacgacggcgtgttgcttcggtatcttggctgacattctatgtatatgtgtgtacagcgaacggcatgtgctgctgctactactactgtaaaaggctgcttactgtgcttgcgttctctcttctgcaacccaaattgagtgtaaagatgcatgtgctgcttgctaggaacttgaaaaccttgtatacccgtatctactatctatatatatgctaccttgttgc

SEQ ID NO: 182245 - DNA, 186 bp, Zea mays
  Clone ID: MRT4577_97788C.1
aattgacggacgcacccacgcatccgcacataaactcctgctgtggattttacgcttactaatgcgacgctctaactggaggacggccaaatatgcaacgggtcagggtatatcctatctatcttaagacgttcaagaaactatctcgtccttatgataatgaacgtctttatcctgaacttaatc

SEQ ID NO: 182246 - DNA, 507 bp, Zea mays
  Clone ID: MRT4577_97789C.1
tttttttttttttttttttttttttttttttttttttttttttttttttttttttttttttttttttttttttttttttttttttttttttttttttttttatttttttttttttttttttttttttattaattagcccaaccccccggggggggggggggggaaacccgctcagggcattaacaaagggggcaaaaaaaggaaaaggggtaaattgggtggaccaaaaaaaaaaggaaaaaaaaatggaagagttttaaaaaaacctctagtgagacccgggaaatcttggggaaaacccggacaaagaccagagttgtgtaaaatagggatattttaaaaatttggaaaaatttggaaaaaggggtccctaagggtaaaatgggggcgccctaaatagtgggcaaaattacaaaaaataaccaacacttaataaaaaggggggaataaaaagggcgggaacacaaattaaataaattatatatagcaaaccgctttgcggggccg

SEQ ID NO: 182247 - DNA, 658 bp, Zea mays
  Clone ID: MRT4577_9778C.1
ttgaaagaaaagacctggaaagggaactcttggccaagcttttggtgtacttgtgcacagctcaagagcacttgctgagccagaggcagctactccaggggttccaacatgttctatctaccttggaggatgccgtgaccgatgcgccgaaagcgaccaagttcctgggccaaatatttgccagagtcgtactggaagacgggatctcgctgacggaggtaggagggctgctgcaggagtgggatggcagggaagagccagcaggacagcatgccctggaggacagcctcgcatccgaggttctagggagcatgctagagtccatcagagtagagaggggcgacaacgccgtggacgaaatccgcgcaaaatccaacctgcagaggcgtggggtgtgtgcctgacgcctgatgcaggaagcagggtgcttagattgcaattttgttaggttgtcgggatcctaaccttagaaataaaggttagataagattttgctggtcttttgttttccttgtgttaccactacttttgcagaagaacttgttgagttttctgtgctggttcgtggctggcttttaaacataactcatgatggtttcgaatctcatgatgatttgtaccatctttgttcctatgaagcatcagtttctttggtttc

SEQ ID NO: 182248 - DNA, 364 bp, Zea mays
  Clone ID: MRT4577_97790C.1
gcctccagaacagttccaacctgtgatctacttaacctgtatgccttggaagagttttggagaccaagcaaacaggcacagatccaagatattcaacaacagataagagatggttcgtttcggcgtccatgcagggtgtggaatggatccagtttgtcccagttcggaaatcggaatcggaatagtgaacacagatgagatgaagttcccggatctgtacgtaatatgagcgttcccttcctgtaattctgtgtagtgtaggaggcttacctgctctgtaagcttccttgtattgttctacaaaggctttaatacattatacagtcaggtattatcaagaaaacaagaagaaaagaaacggatg

SEQ ID NO: 182249 - DNA, 388 bp, Zea mays
  Clone ID: MRT4577_97791C.1
aagcctgcgagggacattattttatccagggaagctttttcaacagacatatccacaagagtgctaactgttaatgggggattggctccagagtcatcactgatgcctgtaataggcaggaattttcttttcctgaattttttaaggggggtgttgcttcacataaaagcagctttgcctgaggaagcatacagagcctgaaaggctcagcaaataataagacgtccatggcgtgctattgagaaggatgcccaatcaatatcacatgtatgtcaccctatttgtgtattaccaatttacggcttttatctttaacaagcaacattttctttttcagtgaatcgccaggaaccatttctagttcctaagaaactaatctctactggta

SEQ ID NO: 182250 - DNA, 528 bp, Zea mays
  Clone ID: MRT4577_97792C.1
ggccgcttttttttttttttttttcttttttttttttttttttttttttttttttttttttttttttttttttttttttttttttttttaccggaaatttattcatataagggctacacaaataggggccaaaaaggcccaatagttttgacaggtgacacaacaaacccaggcaccatccattatttataaaacactacgacaatggaaaacacctatgcataaggcccgggccacagcacactagggaaacaacaaaagatcattcttttttttgctccaagcagcagtataataggggcaggggaatggataaaaattcggggctgggcttaagggcatttgaaaccctgacagacagaggggataatgaccagaaggggggcgatgattattcccaggacgatgagcttgattttaatgttttgaaaccacatttttctcctgacattggttccctggtgtctgaaatcttgggcctgggagcgaaaattctcggttttggcgacaagcagttaaatttttttt

SEQ ID NO: 182251 - DNA, 355 bp, Zea mays
  unsure (1)..(355): unsure at all n locations
  Clone ID: MRT4577_97793C.1
nttaagtgtccgagcacgccttcgcttgaactatcaggctggtgatcttgagcacatgggctgatgcacgtcactagagcctgacctatatctatagtgtacggtttgaccacagggagcgtcacagcactaggcaactcaacaaaaatcctctagcttgctgatgcgaaactctgcatctaccatgtgagctagtctgtgtttaacagactgcctattgcagtcatgactctgaataacatacagactcactggtatctcacactgctgctgactagacctctgatgtctacgaagcgtgtgagacttccgtatatggacaagcttataaacctgtaatcaagatcctaacagc

SEQ ID NO: 182252 - DNA, 160 bp, Zea mays
  Clone ID: MRT4577_97794C.1
ggtaccggtcaaatatagcagcccactttacatattataagtcgacaaggtccacaattcatgacccaacaaacgaatttgtctctgcagccaacagaattccatgccatctaaaacataggatatttacatgggcaaggttcttgatgaaatgaacagc

SEQ ID NO: 182253 - DNA, 649 bp, Zea mays
  unsure (1)..(649): unsure at all n locations
  Clone ID: MRT4577_97795C.1
gggctggcaccagatggagccccgtcgatctttattagggttctcggtcttgcgctttggatccacgaaccttttggtacagatgatcattggatgtccagctttggaacgggggcgttccgttccatgtgagtgaaagcgaggctgccggagcacgcactgccggcggtcgctgaagcacgccgagatttgttttttatactgctcggcgaggaggcggtggactgttccccgagaaagtgcggtcagagtggcattatcaaatggacacgctccgtcttgtgctccaaagatgataaactgcgcgccgagatcccgtgtgtgtttgcagtttccagtggcattccggcagcgcgcgcatggatcttgctttttagatcagctggatgctagcaacaaaatacatgctaaaaccttgaggatggagccacttctatacctcaagtacctacaggtcagcgcccatcaatccaacatccatcaatgcttcagtcctttttccaaacatgctaatgaaatgtaaccacccggtgatgccaatgagcccgctgatctcaagcatgctaccccctgccgcgcctacanatatatgacaaactacgggttgcagcatctacgattaggataatctaaaattttaggggacttt

SEQ ID NO: 182254 - DNA, 384 bp, Zea mays
  Clone ID: MRT4577_97796C.1
aattcccgggccgacccacgacgtcaacccacgcgtccgcccacgcgtccgcggacgcgtgggcgcacggagtgaacaaggctgagcgtcgcctcattccgacttccgatccccaacggaaagcggagccaggaccgggagctggaccagttgtcttcccccctcgtctccgtcaactggtctttaattctctctttacacatatcttggtatttaattctctcatcaccagcgtaaggtaaaaatctaatctgttatgtttattttcatcttttttctgtattgtttcttgtctattctgtattgggttgggtctattctgtatttttttagctagactataaattatgcatatgcaatcgtgtgtatgtctttttatgtatt

SEQ ID NO: 182255 - DNA, 333 bp, Zea mays
  Clone ID: MRT4577_97797C.1
gttcgtcacaataggtatcagtgttccacacataccgtgggttgtttcccatatagttatcatgaaaccgcttcggggttgaaaattctagtctcgcgaacacctctgcgctgtgtaaagtcttctatatctggttgctcgccccacaggagtagtttgtattaggttgctgtactgtagcctctattctcgtggataggcatcccatttgtccctttggtacgaaaagtaagcaacggcctcttgtgccggtaaacaatcaatgaatggttacttgagtaaaacacccatggtgtattggacaagcagttaggaatcttaatttcttggcgt

SEQ ID NO: 182256 - DNA, 519 bp, Zea mays
  Clone ID: MRT4577_97798C.1
gtcgacctacgcgttcggtcattatagaacagctcattcaatcagttgcttatatggtaggaaacacatgcaggcgtgcgagcccacatgctacagctcagcgcatgtggaaagcaaatgacagcacccaaaaggacagttgcgtcaacaggcactgggcaatataaacatacggacgattggaacgaatcatcaacaacaacaacagaaggtggcatcaatgggccaactaactgccaatgaaccatgtcacctacttgcatcaggagatgactgaatacaacccaatagatctagctaacggaattgaataccatgaacaacgtcagctgcaacagttgatacaagtagttaagcaactagtcatgcaagaacgctgcacgatatgtacatactacgttcatatatccatgtcgcggtggagaatgctcctacatacctactacaacaggagctgcaacataatgatgcagttctgactgagctaggtgatgaaaagcctgatgtctacttacaaca

SEQ ID NO: 182257 - DNA, 430 bp, Zea mays
  Clone ID: MRT4577_97799C.1
cgcagccgcgcccttctgcttggctatggccaccgtcgtgccgaggatttgtggatcgctctgtgttcggcctcgacagaaactctggacgctcggacctcgccgtggacgctgatcgcctctgtttttctctggtgcgcgcccctgtgcttgggtccttgctagcagccgagcagctccttcgcgccgcagtgctacctcgtgtgcgcgccctgccgaagccccttacgactgtcggcaactccccatcctctagttgtgctcgctgctggccctgtggtgagctccctgcttcatcctcgccatggacgccatctagcacgcgcgcgccggatgtatttcctccttcgcgcagtgccttggtgactgtcgagtagcacaccaggcctgcgcagcctcgtcgcgtctgtatagccccagttgcaatgca

SEQ ID NO: 182258 - DNA, 422 bp, Zea mays
  Clone ID: MRT4577_9779C.1
acttacaacaagtgcgggcgggaacactccgcgacatcatgacacccaacaatttcgcacctagcggctttattaaaggggggttggatgaatacaaataagccggtttgtgggtcggttatactgaggcgacagaccgagcccagcacaaaccgggcacaaaaaactcgacaacaagagaactcagtaaaaaaaaaacaaaaagttaaataaatttacaaaagcttttaacgaaaaaaaaaccttgaaaatggtggccatgtaaaatgcctcgtccacgagagggaaaggggtggcgaaaccgaagactgtaaccacggggggtaataacctgtgaaagcagcggtcggcaatgaacgcggcaatcaacgccccgaagcccccggagagaggagcctcgtggataacgaggagcttcccgg

SEQ ID NO: 182259 - DNA, 335 bp, Zea mays
  unsure (1)..(335): unsure at all n locations
  Clone ID: MRT4577_977C.1
gctaggaagagcgaatgcactgggtacgtaacgctcggaattcggcttcgagaatcaagcacgaggangagannccaagacaccgaggcgcggtggtggaacgacactcattatgttgaggcctcccacatctatggcctcctacttctgcctaggtgaccgatcctttctaagcttactactcggctctgttctttcttaatcctctcaagctctgccattagagcttcaagtgtcgtcgtcatcatcatcttcaaaggtctcgccatatatttttaggacccaaaaagagtatgccggagaatgtgtatgctacacgaatgtaccattgttat

SEQ ID NO: 182260 - DNA, 1140 bp, Zea mays
  Clone ID: MRT4577_97800C.1
gggtacctcgggggagcccggggtcgaataaaggtgacgtttctctttcttggttccggcgccccaccgggagagtgagctgctgcctgcgcaactcgagcgccgcttgtcgcgagcaccgcggcctcgatccgtcaagctaaaagcatgtctggacagcaggaccacgctagtaaaagctctagctcaagcatcagcagcagtactcaagagagcgaggaggaagcacctgtccgaagcgtcaccattggtagcctccttgcccaagcaaatagcaccagtggacatagtcttgggaagcgcctgtcccatttggggtcaatcccgtatactccccgagttaatggaaaaatccccaatgttggtaatgcaacactggaccacgaacgattgctggaaaggttgggcacttatggtctagctgaatttcagatagagggggatgggaattgtcagttccgagctttggctgatcagatatatcacaatcctgactatcataagcatgtgagaaaagctgtcatgaaacagctgaaggaattcagaaaacaatatgaaagttacgtaccgatggaatataaggtgtacttgaagaaaatgaaaagatctggggaatggggagatcatctgaccttacaagcagctgcagatcggtttggtgccaaaatttgtttgctgacatcatttaaagacacctgtttaattgagatagtccctagggatctaactcccacaaaagagctttggctaagcttctggtgtgaagtacactacaattccttgtatggaatcgacgatctcctgacccgcaagacgaagaagaagcactggctgttctaggagggttctgaaggatccaaattctttcagcagctcctgctctgtccagccagcgcagcctctgtcttagtacttactagttggccaacactgtatcatatcctaagttgagtctaggctttacgcttttatgtacagtcgatctagatcttgtaaaattccctcaaggagcaacaggaactgtacaactcttagatccatgagattttggtgatctctcctccatgggaatgatagtgcttgggtgtatgtacattataaaagctaccaggggcattttgacgtgggcgtttggatgcc

SEQ ID NO: 182261 - DNA, 693 bp, Zea mays
  Clone ID: MRT4577_97801C.1
ggtaccggcgccccttctcgagtttttttttttttttttttttttttttttttggatatctctaacagggttgctttttctttttcttttttgcgctctgaggttgacacagcacaactctccccgtaagctaaggagatttttgccattataaaacacgacatactcggtttcgtcgaaatagaggcgtagggaagtgattcgacaatttggaaatccacaccacgcgtggtcgctgatatggacttaaaatctcttttaggcgctgaagacaattattaagcagctagagttcacgtcgtcaccttgccgtgactcctccaccatccgccgtcaccttgccgggcacgcagtaaaagagcgcccatgaggccaccacggccgctagcgtcccggtggccacctccttcctcctccacagcaccacatccgcaaccgcaacggcgccgccgccgaggaaatcgtgcggcgatctctgggcaccgaacagccggcaactgggggagtccatcgcacactgccggacggatctctcgtcctcctccgatgggaaagggaaaggggagtggatgaatggcacagcatcatatctggccttgaaacagaaaaatatgaagaaaagcatggcaaccgcgtctctatgcagttcgcacatagcagttacagcagtttaagtttttaagcccggtcagt

SEQ ID NO: 182262 - DNA, 203 bp, Zea mays
  Clone ID: MRT4577_97802C.1
ccacgcgtccacataagctctaatactgatctcactgatccactatgactatgccaaatgcaaactctccgagggtctctgttgcccagcttgttatctttctgctatcactcctcagcactgtcgcctgccctgacgacgcacaaaactgcagctgccaaccaaacgtatgctgcaacaagtttggctactgaggcacgacc

SEQ ID NO: 182263 - DNA, 402 bp, Zea mays
  unsure (1)..(402): unsure at all n locations
  Clone ID: MRT4577_97803C.1
cttccgctgcgcacggcgcacacccaatccagtacaaacagcagcagcttcgcctccacctccacgcgagccaagcgcccggcccggctcccgcagcgcaaaaccctagcctcgcccgccccaaacccttggcggctacggtctctgatcccggtccaatggcgtcgtcgccggacttgttccctaacgttgccttctccgacgtctctgccgccgcccccgcggccgaggccaccgccgcgttcgggctcggcgccaccaccggggccccgcgcctctgcctcgtcaagtccgggaaggacgaggcggagcccacggtcgacatcggacctcgccgatgcnngcaggtatttaagttgggnaccgatggnagtnnggctgtgccgtgtgcgaaacgagtcg

SEQ ID NO: 182264 - DNA, 588 bp, Zea mays
  Clone ID: MRT4577_97804C.1
cattgggtccctcgaggccggccggactcccactcgtccactcctcctccacgtcaagcgaagccactcctgatcgccgatcgctcgccacctcacgcggaccgcccctcgagctgcaacgaccggcctcccctgctccggctcccaccgagcctcgatcgatcgccgcagcagtcgccaatggctgatgcagtggagagccgcggcgggcgggcgcgcctggtctcggacctgggccgcgtgcaggacctggtgcgccagctcgagctgcagctgcgcgcgcccggggacgcagcctccgtcgacctctgccgccgcctcgtccaccagatcgtcgcgctcaccgacagctccatcggcatgctccactcatccccggacctcgcctcgccgctgcccgccattgggaccgggagcccgatcagcagcgacgccgcctccgaccaccccttccgcgccgccgccagcgccagcgccagccccaagaagcgcaaggccacggggcgctggaccacccagcaagtgcgcgtcagcgccgcgggcggcagcggcgccgagggccccgtcgacgacggctacagctggcgc

SEQ ID NO: 182265 - DNA, 729 bp, Zea mays
  Clone ID: MRT4577_97805C.1
ggtacccgcggcccctcctcgagtttttttttttttttttttttttttttttttttttttttttttttttttttttttttttttttaaaaaaaaaaaccaaattgggggggcccgggaaaaaattttccacagggacatacacaggccctaaataaattttcttgggccgggaacccatagggggggcaaaaaacaaaagggtggtctcacctggggaccacccgaacgatctcacggattgctaataaaccattgcattaaggccccccttttggccaggaaaaacctaaaaaagggaatttttggggaggtttaaccgggcgggtattcacctaacaggctaataaccccgggcccggagagcaaaaaaaaacgggatggggggcccttataggcttcactggggccacacaaataatcggccaccaaaaacggccagccccccttcgggaccacgggggccccccgacccgcccccgttcttcaggcccaacttatcggccatgaagggtggacccagatctgacccaccctccaaaattttgaggggaaaaggggttgggatatcggggcattttctgagtggcaaagttaaacactctccgctgggaaggcaccccctggccatgaaggggccataaaccccgggggggacccccgggggggggcataaaaaccctccccccccgaaatgggggggggggaaaaggccttggccccggggggcc

SEQ ID NO: 182266 - DNA, 335 bp, Zea mays
  Clone ID: MRT4577_97806C.1
gagcttactagtcgggggccgcccttttttttttttttgtaacttgattaaaggtaatatttgtaaggaaaattgtccggctgggacggagggtagactcgacacacactatgagcatgtgttggggacccatgccaccacctagtatgacagccgcgagagatttgagatcaatgattacggccaagaccgatgtcgggaaaaatgtatgacataaattattaatttattcgatatgaaagggaaagactagaccagatcctgactgggctggacacggggcgaactagtgttgatggccattatttttgtgcatttgagcaccgccggagccg

SEQ ID NO: 182267 - DNA, 578 bp, Zea mays
  Clone ID: MRT4577_97807C.1
agctggcacgcctgcaggagccgggcttcaatagaggggcggacctaggcgctcggtgaaatcgaggaggaccgtcgactgcccgaatactataggcgttgctccacctactgctgccgctgctgtgaggcgccggcaggaccggccaccgctcttgctaacagcgcatggaccggccatcggcgtgaccttctgattcacggcgtgagctatacaccgagacgagccgccaagctgccgccggcacgccaccactcggacctggggaatctgatcgaacgtaccgcaccgatgttatagaagagattctgcgggagctaatgctatgccggagtccatgagaaacaagaaagacagattccacagggaccggacaccacagatgaacacgcgcgcgaagccatagaccagccggaaagatctgaccacatgacagatataaaggatgcagaggacccatactcactctgaacacctgagcgcggtgacagcagactcacatgaacggaatgatgaaaggcctcatgatacggtgagtccgaccgatacagtgcaagacactgctatgagaactatga

SEQ ID NO: 182268 - DNA, 352 bp, Zea mays
  Clone ID: MRT4577_97808C.1
gtcgagctaaactaaataacaccatctagcaactctctctttcatcacactgatgtgggtatcttgttctactatgaggccatgttggacatgtgtggccgattcctggacattgagctcctaatgtacaccaacctcaacaggcttgtgtccaaagtcatgtaatcacttactgactacatgaagtgcgatggtgctcctaacgtggatgataacgaggatcacaccaacctagtaccgtactccaggatacatgtcatgctttctacgtacgctccagtcatatctgatgagaaggcctactacgagcagatcaatgacgttgatatcaccaacagtgccttcgagctat

SEQ ID NO: 182269 - DNA, 838 bp, Zea mays
  unsure (1)..(838): unsure at all n locations
  Clone ID: MRT4577_97809C.1
tgactcgtcctccacgacagcttcctcatcgcgtcggcccgttgaagctggctcaggttgtgtggatcctttgaccgagcaaaccctagtcgctacgcccgccggttgtgaagaagagtggccacggttgggatcgatagatccccagcgtggtggttcgtcgcctctgatgtattcgaaagcaagaaaccctaactaggatcgttgagggcagaaggacactcctcatggtgtgcagtcttgggggaataatcgtaatctcagctggagattgaagccttcccctgggaaagctgattccaaagaggatctccttacctcctcgcctggcaatggggcctaatcagagatggaaagaaggacggtggagctaggaaggaagttcatcagaaggacgacaagtgaggcgatgagtcgcgcttatggatggagaccagtggctagacgtattgccggttgattcgtgtgttctggtttcgcttgtctggtctacctggtggtgttccttttggctgcttcgcatttgctttatggttgtaatgatgcttgtactcctttgtgttgtgtgtggtttttctcgtttcctgtctggagagatgttgtaataagtggtatatgtgcgctgtgcgttcttccagtaggttgtgcctctctgtgcttgtgagagtgcctggtttggtatgatgtcaagtgtgttgccaatagtacgggtagtttgttggcatattgtggtgtttttgcagtcctatgtcttgtaatgaactttcatgtcctatttcctaatgaaatactccctccggtcttcaaataaaaaaaaaaaannnaagggcggccgccc

SEQ ID NO: 182270 - DNA, 471 bp, Zea mays
  unsure (1)..(471): unsure at all n locations
  Clone ID: MRT4577_9780C.1
caacaaatcaaagctatggngacaccggatggggctgcttgaatctcaagagaaaaaccaagagttagtgcacaaagtagaggactcagatagcaaaattgttctgcttgaagattcagtaaaaagactcgaagaaagtactgcagataaagattctttattggctatagaaagcagggggcagtgaaaccaagaaagaattagttggttctcagaaaaagattgcggaattgctaactgaagtgcaagatactcgtgcaaatgttgcagaacttgaggacttgattaggagactcgaaggaaaattggcaataactgaagctttattgctaactgaaaaggaacagaatgcttccaccttaaaattacttgcagaagcacaattgagaatcgaagaattaataaaaaagcttgaaggttcaaatagaaaatctgatagtcttcaggatacaataacaagacttgaacaag

SEQ ID NO: 182271 - DNA, 545 bp, Zea mays
  Clone ID: MRT4577_97810C.1
ggtgtttttttttttttttttttttttttttttttttttttttttttttttttttttttttttttttttttttttttttttttttttttttttttttttgggaaaataggaggggaactgcaaacccctaattaattagactgggggggggggggaaaacttgtagaggggggacaaaaaccggcaaaaaacccctatcacgttggaggggaaaaaaaaaagggggttttttaaaaccattacgggaataaaccccaggcaggcactggttaaaattcctactaaagggggggctttcttaacttgaaaacaaaacccaaagcctaaaacttttcctttttgaaagaaaaagggtccgggttcgggttcttttccacctccgggtggtccttggccttttttttctcctccacgggcgcgttggggcttaaggccaagcccttttgcacccacttttaaattctggaccccaaccccttggggggggggggggtgaacccctttttcattaggggcctttggaacaccaaccttgccgggggctt

SEQ ID NO: 182272 - DNA, 253 bp, Zea mays
  Clone ID: MRT4577_97811C.1
cattgggtacctcgaggccggccaaacctataaaaactctgtcaaagttatcctagatgttaagaaggaaaaaacagataaagtgctcaatctgaggttaatattgtcactgaccatatatttgtacctttgtcatcttcacctcgtctgttaatgaaaacatgtgttttgtgaacattggttgtttctgaaattgtacactgtaaaaactaagacatgacactagatcaaaaaaaaaaaaaaaaaagcggcc

SEQ ID NO: 182273 - DNA, 492 bp, Zea mays
  Clone ID: MRT4577_97812C.1
tggctctggacctttgggctgatttatgtgcttgtttatgtgcttgtggatgtgcgggttggttattctcctcctttttgcgtagtctgagtcgacctggtgggtctcgttttaatacttatttattcctgcttaactttgacttaagattgcgttgcgacttggtagtagtccttgtgtggttacgggtatgggtgtggcggtggcggtggtgttggattgggttaagtaggggtgggttggtggctattcgcggaagaaggtatcgtcttatcctctttctcgtcctgctacgggtcctcctatgggtcctgtgttccttcttcgtcttcttcggaagcttgttgttgatatttcttagtattatttgatgtattgctttggggattgttctgttgatctttgtgcggttgctgatgtgtgtgttatttcgctcttgaatgtggaggttgctgacgtgtctcttgctggagttatggcggatccgggtga

SEQ ID NO: 182274 - DNA, 273 bp, Zea mays
  Clone ID: MRT4577_97813C.1
ttcgtttgctcgtagaaatgttggtaataatgctgcaccatcattgtaaggagtgccattcctcgtggctagccgctgacgtggttctccatagcatagggacgatgcgttgcataagcgcagagagatcattgtccctaatgctggcagaccccatccacggacagctgtgaccaattgggctcctgacaatgatatgcgcagcaactagcagtacggtcatgccgatgatacgtttgctcgtcgacatgtcggtgatcatgctgcaccagc

SEQ ID NO: 182275 - DNA, 790 bp, Zea mays
  Clone ID: MRT4577_97814C.1
gccggccgggttcgggacgtgcaagagacgagcgtagtaactgtgagcagctagcacatgcatggcgtccagctactacgacgacacggcggccatgtatgacgcgatcacgctgacccagcagctcaagtactacaaggagtaccagtcgaagctggcggcggtggccgggcgcgctagggctcgcgccatccttggcgacgcgctctacgttgtcagcacgggcaccggcgacttcctccagaactactaccacaacgcctccctgtcccgccgctacgacgtcgagcagtacaccgacctcctcgtcggcatcttctccggcttcgccaacgagctgtacaggctgggggcgcggcggatcggcgtcacgtccatgccgccgctgggctgcctgccggcgtccatcaggctgtacggcgacggcaagggagcgtgcgtgccgaggctcaaccgcgacgccgagaccttcaacgccaagctgaacgccaccgtcagggcgctcaagcggcggcacgccgacctcaagctcgccatcctcgacatctacacgcccctccgcaaactcgcacaagaccccgcggcttacggcttcgccgacgctagagggacgtgctgccggacggggacggccaagacgagggtgtacctctgcaacccgacgacggccgggacgtgccggaacgccagcagctacgtggtcttcgacgccgtccacccgtcggaggctgccaacgtcttcatcgcggagtccacggtcgacgcgggcatcgagctggtcacctagcta

SEQ ID NO: 182276 - DNA, 234 bp, Zea mays
  unsure (1)..(234): unsure at all n locations
  Clone ID: MRT4577_97815C.1
cattacggaggacttccattacatgggcgccgacctctggttccccaaccttgaatcactactacgagactccgcctcgggttttctgttcgccgtctacagcggcccggcccccggcgccgacgacctcaccaactttcaccgngtgttatcgcgcgtgctcagcacctactcagacccgccggtcgaggtcgtctggttcttattcgcgctctgcttacacgaccgtcctga

SEQ ID NO: 182277 - DNA, 401 bp, Zea mays
  Clone ID: MRT4577_97816C.1
gccatttgcccggttgcgcccgcccccggaccgcagaattcgagcaccaacgcctgggggccgtggtcacctggcgtggctcttccggcctgtggattatgtgggcggaaggatagggatggagcctggaggaggggagagacgcgtccggtgacgtcccctgtccaccgttttgagtaggagcgctgtcaacgtggcgaggattcaaggaggacagacagtccatggcaggttgatcacaatatcaactgtttgttttaggtaggagccctgacaacttgacatccgacaccgtgacattgaggtgtgctccggaggcttctctcggatagtttaaattttggaacttgattgctggtcgaggtgaaatatttatactccatggcctgattgcagtgctt

SEQ ID NO: 182278 - DNA, 1663 bp, Zea mays
  Clone ID: MRT4577_97817C.1
gttcgccgccgcacggtgcgacggctctgtttcgtttcctcgtactttaggccagtgctactaggttgcccgaggaacaatgtagtgtggaaatttctaatatattccaaattgtgctgggcggggcgggccagggacagcccggtacgtacgtgcaagagacgagcgtagtaactgtgagcagctagcacatgcatggcgtcgtcgcagctggtcgtcgtgtgcctgtttgtagcgtcggcggtgactgtgacgatgaacggtggcgcgcaggcgcagccgattgtgccggcgatcatctcattcggcgactccaccgtcgacgtcggcaacaataactacctgccgggcgcggtgttcaaggccgactacgcgccgtacgggcagggcttcgcgcggcacaaggccaccggccgattctccgacggcaagatcgtcaccgacatcaccgccgaaacgctcggcttcgagagctacgcgccgccgtacctcagcccgcaggcgtcggggaagaacctgctcaccggcgccaacttcgcctccgcggcgtccagctactacgacgacacggcggccatgtatgacgcgatcacgctgacccagcagctcaagtactacaaggagtaccagtcgaagctggcggcggtggccgggcgcgctagggctcgcgccatccttggcgacgcgctctacgttgtcagcacgggcaccggcgacttcctccagaactactaccacaacgcctccctgtcccgccgctacgacgtcgaccagtacaccgacctcctcgtcggcatcttctccggcttcgccaacgagctgtacaggttgggggcgcggcggatcggcgtcacgtccatgccgccgctgggctgcctgccggcgtccatcaggctgtacggcgacggcaagggagcgtgcgtgccgaggctcaaccgcgacgccgagaccttcaacgccaagctgaacgccaccgtcagggcgctcaagcggcggcacgccgacctcaagctcgccatcctcgacatctacacgcccctccgcaaactcgcacaagaccccgcggcttacggcttcgccgacgctagagggacgtgctgccggacggggacggccaagacgagggtgtacctctgcaacccgacgacggccgggacgtgccggaacgccagcagctacgtgttcttcgacgccgtccacccgtctgaggctgccaacgtcttcatcgcggagtccacggtcgacgcgggcatcgagctggtcacctagctagtaggaataaaggagacgacacacatctgcagatctgctcacatgtttccggctccatcgaaacagaactacgtacagtgtctggaatattaatatatagccagtgaaattaaaaattgcaccgtcggccctgcccttttcgtaatgttgtggagcagtttcctgttccatctgtagccgctcaccagtttcctgttccatccaagaaaacaacagtacaccttgaattgcctgtgaaattgcaccatctatctccctaccattattgtaatatcgttgatcatatactatgcgtacgtacgttttcctatatatgcataatataaggtgttcggtttccagggactaaaaaaaaaaaaaaaaaaaaaaaactcgagaaaggcgcggtacc

SEQ ID NO: 182279 - DNA, 1464 bp, Zea mays
  Clone ID: MRT4577_97818C.1
cattgggtacctcgaggccggccgggacacagcccggtacgtacgtgcaagagacgagcgtagtaactgtgagcagctagcacatgcatggcgtcgtcgcagctggtcgtcgtgtgcctgtttgtagcgtcggcggtgactgtgacgatgaacggtggcgcgcaggcgcagccgattgtgccggcgatcatctcattcggcgactccaccgtcgacgtcggcaacaacaactacctgccgggcgcggtgttcaaggccgactacgcgccgtacgggcagggcttcgcgcggcacaaggccaccggccgattctccgacggcaagatcgtcaccgacatcaccggtcgctagctataccaccacgcatgcattatgcatggcggcggctgcaggtgtgtgacgaattaattgaacgagttcgttctgtgcattgtttattgttgcagccgaaacgctcggcttcgagagctacgcgccgccgtacctcagcccgcaggcgtcggggaagaacctgctcaccggcgccaacttcgcctccgcggcgtccagctactacgacgacacggcggccatgtatgacgcgatcacgctgacccagcagctcaagtactacaaggagtaccagtcgaagctggcggcggtggccgggcgcgccagggctcgcgccatcctcggcgacgcgctctacgtcgtcagcacgggcaccggcgacttcctccagaactactaccacaacgcctccctgtcccgccgctacgacgtcgagcagtacaccgacctcctcgtcggcatcttctccggcttcgccaacgagctgtacaggttgggggcgcggcggatcggcgtcacgtccatgccgccgctgggctgcctgccggcgtccatcaggctgtacggcgacggcaagggagcgtgcgtgccgaggctcaaccgcgacgccgagaccttcaacgccaagctgaacgccaccgtcagggcgctcaagcggcggcacgccgacctcaagctcgccatcctcgacatctacacgcccctccgcaaactcgcgcaagaccccgcggcttacggcttcgccgacgctagagggacgtgctgccggacggggacggccaagacgagggtgtacctctgcaacccgacgacggccgggacgtgccggaacgccagcagctacgtgttcttcgacgccgtccacccgtcggaggctgccaacgtcttcatcgcggagtccacggtcgacgcgggcatcgagctggtcacctagttagtaggaataaaggagacgacacacatctgcagatctgctcacatgttttctgctccatcgaaacagaactacgtacagtgtctggaatagccagtgaaattaaaaattgtaccgtcggccctgcccttttcgtaatgttgtggagcagtttcctgttccatctgtagccgctcaccagtttcctgtttccatccaag

SEQ ID NO: 182280 - DNA, 1881 bp, Zea mays
  Clone ID: MRT4577_97819C.1
cttcatcttattagttcttgaaccgggaatctgggttgcactgtacctccccgtcgtggggagcaccaagtctacgcgagcagcgtttgcttccctttccctgctgtgctcggcctcgccgcttcctctgccctggctcaacgattcctccgcttttcctttttcaaaatcgccctttcctcgtgcgcgtgtcgactccttcctgctcgccgccgggtctgggctgggtgacgctgcctcggatgaggccgcgctgaccggagccgtagccggaccacccgcccacccatggcgcgcccgcagcgcgtgtatgaggcttggaaagggaacaataaattcttctttggtgggaggctcatattcggacctgacgccaagtcactgatcctgtctgtttcgctcattgtggccccggtattggtcttctgcggattcgttgctcggcatcttcgccaccacttcccggcttacaatgctggatatgcgattcctgcggtagctgtagtgtttatgatttatgtgctagtcctgctcttgattacatcagcgcaggatcctgggatcgttccccgcgcagcccacccgccggaggatgagttttcttatggcaacgctttgtctgggggcacgcctgggaggctacaattcccccgtgtaaaggaagtactggttaatgggatgcctgtgaaagtgaagtattgtgacacctgcatgatttatcggcctcctcgatgctcacactgttcgatatgcaacaattgtgtagagcgctttgaccatcattgcccctgggttggacaatgcattgggcagcgcaattaccggtactttttcatgtttgtttcttcctcgactcttctctgcatttatgtatttgcaatgtcagccttgtacatcaagtttatcatggatgaggattatccaacagtatggaaggctttcaaacactctcccgcttctttggggcttctgatatattgtttcattgctctctggtttgttggtggactcactggatttcatatgtacctcattagcaccaaccagaccacgtacgagaatttccgatacagatcagacagcaggcctaacatctatagccaaggatgtctgaataactttctacaagtcttctgcagcaagacaaaaccttctaaacacaagttccgggcctacgcgcaagaggaagtgcggcctccaacggttagcttcggcagggaggtcgatgaggaaccggtcggcgggcctcggccgaaagttgaggacgatcttgaaattggtaccgatcttctgaagatctctcagcggcgcaactacgaggacgtcgatgcagaaacgggaggccgtcgcagtcgcagcagcgaggtggaaggcacggccagtgccagacctgctgtggcgtgctcggagtcccagatccctgcggtcgggggtactgacgtgagggtgcggcactcgagctgggaccggcgaagcgggaactgggacatgtcgtcggctgtgcttacgaggagcgcgtcagatgtgattggacgtagcagcgtgtttgccgcggacgctgcacgtccatctctagaagagactcgctagcgaactgtgtctgtgcatccaggaaacatgtgcgagcggttcggatagcgaggccatttgactcgtggtggtggtgacacacacccaggtgttttggctttggctgccttgattgggttttgttaccgacccttgtcagttgtcatgtatggacagttatttttagtcaaagaatctgcccccattgttggcgccatgttcgtgtgcctgtaaattgcaaatgcaggatcctcatccaaaaaaaaaaaaaaaaaaaaaccaaaaaaaaaaaaaaaagcggcccctagggcc

SEQ ID NO: 182281 - DNA, 403 bp, Zea mays
  Clone ID: MRT4577_9781C.1
aattcggcacgagggcgagcacgtggagtagcctctcctcccgcttctccctgatcctctccagctccctgaacctctgctgcagcagggcgatggaggagaacatcatctggccctcgctgctctgtacccccatgatgaacaaaaactcctcgttttcaaaaaaaaaaaaaaaaaaagaaaaaaaaaaaaaaaaaaaaaaaaaaaaaaaaaaaaaaaaaaaaaaaaaaaaaaaaaaaaaaaaaaaaaaaaaaaaaaaaaaaaccctgggggggggccccggcccccaattccccctataggggggggaataacccccccccccggcccgggttttaacaccgcggggaggggaaaaacccgggggtaccccaattaaatggcttggaagaaaatccccttt

SEQ ID NO: 182282 - DNA, 285 bp, Zea mays
  Clone ID: MRT4577_97820C.1
agacccacccgtatcacattgacctactcgaacgagggcgctctgaccgagggcccatggctcgaccttgatggatactactggaagcgctggcccgcacatggtctcataaacgatacccaatttgataaaatgtccaagcgatgctatgacacaggacatttgtcagacacagctaagcatgtatgaaggcttaacggtcatgaggcaagaaaagtaatgatgaaacacgataatagaatacctcatactcatactggagaacttcacctcacttatattgga

SEQ ID NO: 182283 - DNA, 698 bp, Zea mays
  Clone ID: MRT4577_97821C.1
acatagatgccgcactcgccgcatcacgcgatgtcgccgtcggctgccacacagtggatcgtccgccgctgaagatgagagaggtatcacggtgcgtcgcgcctgcacctcggcccactcgtcgccgtcgactgcctacacaggggagaccccgccgccgaagaggagggaggtcttgcggcacgggactcggcgacggcgcccccctaacacaccgaccgggaggtctgccttactgctgccacactcatcgccaggtgccagccttggacaatattgcttacgggagctattatggttgcatgtagttgggtgcttatccaatatattgtaattactgctggggtttcttttgtaatatatgcatggtggtacatacttctctacacctaccctaaggtttgtacatgtttttttagcaatttaatttttgttttacattttcgtttgagatgattgattagaagtcgttcttgtgatgactcatgcaccagtttgcagtcatattaaagttataatacaagtaaccaatcctattgcaggttgttgaataaggtcatgaaagttgctaaacaaaagtgtattatcatgtctttgtgattttgagtgtcctagcaatatagcagcagtacctctgtgaggtttctagggtgttgtagctatcaaaggcgataatcctgttattaacatgacttaat

SEQ ID NO: 182284 - DNA, 248 bp, Zea mays
  Clone ID: MRT4577_97822C.1
gcccgacgggcactgacaaataacctacccgcactgaacagtgaaggcgtagtaatgctataagtatcccagcatcaaatattggaaaaagtatgagaaagagagcggtctcccgcgcttccagacatggctgagcatcccagaatgtttgtattgcaaccacgcacttgattccgtggaatgatggaatccaccgacaaatagagaattactgacattgacaaccttgtgagagtgatatattttgg

SEQ ID NO: 182285 - DNA, 259 bp, Zea mays
  Clone ID: MRT4577_97823C.1
taccctatatattaccctatactttccaatgtccattacctacttattgtctactcatatttttgcctaaatggattggtgtatggggaccattataattaaaataactataatcaacttcctcccttcaaaccactaattaaatcccatgttgtaaaactctacaatgagccacacaatttctattataattaatctcatcacccaactaaactactttataataaccaactatacgatcacctcaaaatatttaatc

SEQ ID NO: 182286 - DNA, 852 bp, Zea mays
  unsure (1)..(852): unsure at all n locations
  Clone ID: MRT4577_97824C.1
cggccgctcaggcggcgggcgggatgatcacaattcccaacctcgacatccacgtggggcagtcctactcctttctggtcaccatggaccagaatgcaagcagtgactactacatcgtggccagcgctcggttcgtgaacgagtcgctctggaccagggttaccggcgttgcaattctgcactactcgaattcaaagggcaaggcgtctggtccgctccctgacccgccgaacgatgagtacgacaaatctttctccatgaaccaggcacggtcaatcaggatgaatgtgaccaccggtgctgctcgcccgaatcctcaaggatcatttcactacggcgaaatcaatgtgacccaagtgtacaagctgaggaacatgccacctgttaccatcaatggcaaaaggcggaccacactgaacggcatctcttactccccgcctgctactccattgaggcttgcggatctctatgacaagaaagaagtctacacactggacttcccaaccatgccgtctgatggaccgccggcgatcggatcttctgtcatcaactcgacgtacaagaacttcatggagattgtgttccagaacaacgacacgaaggttcagacctaccacatcgacggatacgccttctgggtcgtgggaatggactatggtgagtggaagaacgaaagtcgttctacgtacaacaagtgggatggcgtttcccgttgcaccactcaggtgttccccggagcatggaccgccgtcctgttgtcgctcgacagcccggngttctggaacgtgcgcacggagaatctggacacctggtacctcggccaggagacgtacatccggggtggtggatcct

SEQ ID NO: 182287 - DNA, 954 bp, Zea mays
  Clone ID: MRT4577_97825C.1
tacccacgcgtccgcggacgcgtgggcggacgcgtgggccggcaccggccccccgcgacgctggtgccgcacatcgcgggcgaggcgttccagctgacggagtggtacacggtgcccaagggcgccatcgtgttcccgtccgtgtacgagtcgtcgttccaggggttcccggacgcggaggcgttcgacccggagcgcttcttctcggaggcgcggcgggaggacgtggcgtacaggcgcaacttcctggcattcggcgccgggccgcaccagtgcgtggggcagcggtacgcgctgaaccacctcgtcctgttcatggcgctgttcgtgtcggtggtggacttccggcgggagaggacgcccgggtgcgacgacccggtgtacatgcccaccatcgtgcccaaggacggctgctccgtgtacctcaagcagcgatgcgccaagttgccgtcgttctgagaatcctgagctgccttcttgtcctcttgcgctcctgcctctgtctttcggttccgctgccgcttcgtggttcttgcctgctccttcccacattttttttttcatttcgattccttggcgggggccatctccctcccgtggtgcttggtgttgttggtggtgtgatgatttatttgtaggttgtggtgttggcttgctcgtgcctcctccttctcaggccggccgggatggtccattcaattattttcttggcaaacaaaaacaaattgggtcgggttggactggccgctgatcggcgaggccaggcgataatagtaatattattattattattaattccttctagcatagtaccctgaatgaacagctgttgagtacaagtgggttggtgaccgcatgtgtagtgctgtactgtgctgtgtgaccagtgcgtgcgctggaggattcgtcggtaaatttggccagaaatgcaaaaaaaaaccgcctcgtttcatc

SEQ ID NO: 182288 - DNA, 673 bp, Zea mays
  Clone ID: MRT4577_97826C.1
ttcttatatggtatcagagccattagagtagatccaatccacaaacatggctggtagctcttcttctatatctggatttgcctccatgatctcccatccagtttcagagaaactcaccaaaaataaccatgcaacatggaaggctcaggtcgtcgcaacaatacgtggtgcacgtctagaaggctacctcaccggcaagaccaagatgcctgccgctgaacttgtcagcaaagatggtgacaaagttgccaactctgcctacgaagattggctagcttcggaccaacaagtccttagtttccttcttgcctctgtctccaaggatgttttgatccagattgcgactaagcacaccgcgacggaggcatggcatgcaatcgagaccatgttctcgtcacaaacaagagctcgggcagtaaacacgcgcctggctttatccaccgcccacaaagggaacatgtcggtggccgaatatgtcgggaagatgcggtctctcggcgatgaaatggctgcagcaggacgacctctcgaagatgaagaattggtggagtatatcctcaccgggttggacgacgactacgactcactggtgtctgcagttctcgctagagccgagccgatctctgtaagcgagctatactctcaaatgcttgctttcgagactcggatggac

SEQ ID NO: 182289 - DNA, 315 bp, Zea mays
  Clone ID: MRT4577_97827C.1
gggagaacaatcgcatgctaacattagttggtgggtatcaacccacaatatcgggtgtcttaaggaatgggtttttttgggataggcaaaaaaaccctggtgatgttaccttaaaccccccgccttggaccggccctggatacctgggttacttctggaaaaataatccctaaacaaattttaccccggtccaggaccttgggaccggtttttaccggaaaaaagccattttgttaaccccccttcctggaggttacctttacccagcggctggcttttttttttggtttccagcccccggttcacttgataatt

SEQ ID NO: 182290 - DNA, 718 bp, Zea mays
  unsure (1)..(718): unsure at all n locations
  Clone ID: MRT4577_97828C.1
tgggtacctcgaggccggccggggttcaccaggtgacccccgccaacggccagaaatgggtcagcgtcgaagccacccgcaacgtcttcaacttcaccctgggcgaccagatcgtcaaccccagcaagaaggcgggccagctgcgccgctgccacaacttcgtctggcaccagcagctgcccgactggctcacttcgcagaagtggtccaagcaggagctcctcagcatcctggagaaccacatcaagcacgaggcacagcactactacaacgactgctacgcctgggacgtcgtcaacgaggccttcaacgacaacggcacctaccgctctgacatctggctcgacaccctcgggcccagctacatcgagtccgcattcaagttcgcgaagaagtacaccgcgcccggcacgaagctgtactacaacgactacaacatcgagaccgtcaacaacaagtctctcgccgtgcagacgctcgtcaagtccctgcaggcacagaacatcncaaatcgacggcgtgggtctgcaatcccacttcatcaccggcagctcgccgtcatacgaccagatccgcgccgcgcagcaactcttcacgagtctgggcctcgagacggcgctcaccgagctcgacgtgcgcacgcagttgcccgacaccgcggcgctgcaaggccacgcaggcgaccaactacgccgacgnncgtcagggcgtgtgtcga

SEQ ID NO: 182291 - DNA, 259 bp, Zea mays
  Clone ID: MRT4577_97829C.1
aggaagcgaactggagagaagagagagagtgtcaagctcgtcgcgccggctgtagggtccttgacctgttcaccgcgtcgctgccgctcaatccacagatcatggcgaacagctcgctcttatgctggggcggtggccacggcggcgctcgccggcgtcagaggcgcgtggtgcgtgtgccggtcggacctgcggacgcgcgctgcagaagacgctggactacccttccggcgtcagaccgactgcaagcccatcctgc

SEQ ID NO: 182292 - DNA, 366 bp, Zea mays
  Clone ID: MRT4577_9782C.1
tcgcgatctagttcgtcttagatcgcgagcggccacccttgtggtggggttttttttaacagcatcgggcaatatttaatttgaatcctaattattcattacattttttaacctgtggccccatattacttttttctttgcccaagaaaaaaaaaaaaagggtgatgaaagtttttttctaaaaagaaatttaacggcccccaaggtcgcggaaaaagagggaacgcggccactaaaaagtctaaagaattggggaacccctagacttaacccccaggggccgcccgaaaattccgtgaggggcccctgtgggggccccctgttccctcacagaaagttaatcaaacgcaggggaaatcccccccg

SEQ ID NO: 182293 - DNA, 112 bp, Zea mays
  Clone ID: MRT4577_97830C.1
attcggctcgagcccacccaacggttgtactgtaccaacgctagggggcaacaaggtggcgggaagacaaggccagtccccaacaaacccaggggagggggacgcgacaaaa

SEQ ID NO: 182294 - DNA, 994 bp, Zea mays
  Clone ID: MRT4577_97831C.1
cccacgcgtccgccgcgctcgcctacatggaggacgagggccagtgggtcctggccttctggatcgccaccgccgcggcgctgctcggcttcctcctcttcgccgtcgggaccatcaggtacaggcacttccttcccagcggcaacgctgttgtcagcgtctgccaggtggtcgtcgctgccgtcaggaaccggcgcgtcagagctacggttcgagcgcaggatatgtacgaccccgataccgatggagatcgcggcaagaagggggtcaggaagatggtgcacacaccagagtacaggtgtctggacaaggcagcggtgatcaaagatccagcgtctgcgttccgagcaccggcaggtcaaccacagggccattcctcctccaagcccaacccatggaggctctgcacactgacccaagtggaagaactgaagtgcatcctgaggctagtcccgatctggctctgcagcatcctctactccacctcctactcgcagatgtcgtcggtgttcatcgagcaggcgcagaccatggacgactccctgtcgaagctgacgatccctcacgccggcatggacgtcttcgagatactgggcgtcacggccttcgtgttcatctaccgcttctgcatcgtcagggtcatggccaaaatatcgcacgagccgacggagctccagaggatgggcaccgggctcgtgatctcggccgcggccatggtcgcgtccggcgtggtggagcagcagaggctggcgcgcgccacggccggcgtcgacgcgtccagctctctcagcatcctctggcagatcccgcagtacctgctgatcggagcgtccgaggtgttcatgtacgtcaccatgacagagttcttcaacgaccagctcccggaaggcctgaggagcctcgggagcgccatgagcgtggcctccatgtcggccgggagcttcgcgagcagcctcctcgtcactctggtgatggccatcacctgtagaggcgg

SEQ ID NO: 182295 - DNA, 604 bp, Zea mays
  Clone ID: MRT4577_97832C.1
cctcgaggccggccgggccgggattgcttctgatacccttatttcttacggaagacttgcatcgaatgaacaacggtcaccgagtgtcaaagatcaccgactacgctgattttgcctccagcggtgaatataatgacttccaagaagctgcaacacatgtacgaaaacatgcaacgagctgttaacaacgctgatgaccacatctcttatagccctcacgacttcgcaaactttttcagccagaacactgctatgccaagagaaataagatgaatcccctttacatgaccagcgctatccgagtaccacttccagggaaagaaaaatttggcttcggttgatcttctcgggactttgattgaaaacacccatatcgagactggcttcgccaactacctcatgtaaacccatcatcagcaacgtagctacatagacagagatgcactgataaggaagttaaacaaatcctcgaagaatgcttcgaggtcctttactacagacactgcgctgctgtcgacaagatccaattcactgcctatcgatgagagcggcgctacaattgaagaagcttacacaactgagactacgagcgattataaattga

SEQ ID NO: 182296 - DNA, 586 bp, Zea mays
  Clone ID: MRT4577_97833C.1
gccggccggtatctggatacaccttcccgcacagcagtcctatcaagtacttcaaggccacaccatcgctcgacacccattgctgaatgctcgagcacctctgcgttactaccaaaagaagctactattgtatcatgggagtgtgacgtcgttcggccgcagcggacttccggcgccacgcggcaacctctccagaagaccctcacggaggagaagttcgaggaggtcgagccgctcgctcgcggctgcgccgaccaccaccaccaccatggacaacaagggccgtcatccgattccatgcttgcgctacatcattgacaaggacgacatgaagaactgcaccgcgctgctctacaaggtcagtgacacgttcctcgccagctctatctgaacaacgagcgcgggcgagatcgacgcccgttggtgcctgcctgcctgccttatgtatgtctgcctctgtgcacgctcatcgttcttggctaacataagtacgtgcacgcgctcatctcctggacttgttaaaataataagttcatgagcttaataaaacttcatcgcaagattatatatatcaagagaacacgcg

SEQ ID NO: 182297 - DNA, 381 bp, Zea mays
  Clone ID: MRT4577_97834C.1
ttgcggaggaggaaccagtgagccagcagaggccgggccgtcgccgtcgtggtcctcggccgccgcaacaacctagtcgtcgagccggcagcatgcagagcaggaagcacagtagcaacaaggagcacagcagagggaacagtcagcagtaagggcccaggcgcaggcgcagacggagccgctaacgcagcagtcttcggtggggctcatccggttcgagttgttattaactctgttactggaacacttttttttcttaattgtgtaactataatcttctttctgttatttttactctttaatttattatattattatctttttatttttttaatttttatttttcttatatttctatttataatttataattttttattt

SEQ ID NO: 182298 - DNA, 319 bp, Zea mays
  Clone ID: MRT4577_97835C.1
ggacccaaatgggggttttaccggagcatttcaaacatttaagtcccccttttttttgaaaccattatttttggaaattccacaaacagaagttaaaaggggccccactttgcctggggaggattttttatgttggaaaaaaaaagggtacatttcccggttgggagggggatttaattttcttttttccaggttggggacaggaaaaccagagattacttccattgtttaaggggaccaccccttccaaatgccttgatgaaaggctggttactggtgggcgcacttgacttttttgggttccgccgggatttttttt

SEQ ID NO: 182299 - DNA, 248 bp, Zea mays
  Clone ID: MRT4577_97836C.1
cggacgcgtggggcaacagttgctgactttgtaccatcagttggcggataacggcgcaaccctgttacaactacaacaatcagttgccctttgtccaacttgctttgacaaacccaggagcctgctaccaacaacacatcattggtggagcgctctcttagatcgcttattagttgtaattcaataataaagtttttaggatgatgtatgaggccaaccagaaataataagttacattttcagattct

SEQ ID NO: 182300 - DNA, 382 bp, Zea mays
  Clone ID: MRT4577_97837C.1
ggatgggcctcttaccattctttcttcaagtgcctgatgtaatgatgtagtgtattgtatgaatagataatgacatttactgcctagcttaatttttaccactgactatggtagcagcaagccactgatgcagcaaattattgttgcagtgactagctgcattgtagctgaagctagcagaagcgagcacataaaaatttataggcaatttataccttgtgagttattcatatcatcagctcatttttccttatggatttgtgaatatgaatgttgtggatgcagataattatgttatgtacccctagaaataccacaatgttgtaacaggtgaactagagcagagagagaatacattattccagattaacaaccttttctt

SEQ ID NO: 182301 - DNA, 389 bp, Zea mays
  Clone ID: MRT4577_97838C.1
cgctcggttccaggaaaagaagcgctacaagcttcacaaaacaaatgggaggttcacactttaggccggccggtattttatacaaacaaaaagcccctgcccgtgaaaaccagctagtggacaaaacgggcgcaccagacagtcggacccaaaggcctccgcacaaatgatagaaggcctagaccgggaaggggcgatccaccgttaggtcagcggcagggaaggaaaaagacctcgcttagtcggtccgaacggcatgttccgggggaataggaggagcccggccagaaccccaagaccgtctcatgagccaaaggacgctgccaaacgtggtggacgggttccaggggctatcaccaacgggcatccggtcggccccgttttcttgg

SEQ ID NO: 182302 - DNA, 634 bp, Zea mays
  Clone ID: MRT4577_97839C.1
aaaaggttaacagtggtgttgctagaagcctagaaggcttaattgcatggcaaactcaatcacaaatagtacccgatgtttataaagaaagaaagtagctaacatatccgtaggccacagctaacgatcctatggactaacaaagaccattgccatagtcaaactacaggacagaaagaaacttagtttcagatctcctgctgtattagacatttgagaccaccaaatgaaaactgagtttttttaatcctgccagctaattagagaagacataaagaactctgctcagttcatggaaacctaatccaatttgagagtggaatcttaccttttgagggttagtttcgtttgtcttaactaaatctacttgaacagaagcatctatggcaatcgctggttcttgtcctccttggcaatgatagattcatctccttttaattgattattatcgtccacttcgagctcagcttctgaaacagtatcctttctgattttgctgtcatttgaaaagacagtttgctctatcccagtagacgtcacttccccctattctattattttctgagtcctcacatcaccccaatcttcaaagacaaccaatgtgtttgcagtttcacatgtctaaagcttctgt

SEQ ID NO: 182303 - DNA, 338 bp, Zea mays
  Clone ID: MRT4577_9783C.1
acctaaacacaacaaccgtttttgaccttaaaaaacgctggccgccaccatgggatgcacgtgggccggggggggggcagtttcccaaaaaaagaaaggggaacggcacaaacgcccgcacacattggggtgggtcaattcccccaaaaattaacaacgaaaaacgttcgaggggccccgatctggacatacacgggtacagggttttttttttttttccacgtttttcctcccctccctccttttttccttggggttctttacttgacagttgagggcaagggtttgccctcccaatccttgggggacccgagcatggggtccaaaagcttgccctg

SEQ ID NO: 182304 - DNA, 422 bp, Zea mays
  Clone ID: MRT4577_97840C.1
aaaacagctcctgatgccattctgtccattacaacaaactagacatggctttgtgttactctctatgtgtgcgccgacatgtgctcgaatgccaaaggcgctgacgttggcgtgggctaaaacattgccagtactatcacaacgtttggcttggtagaatgggatgagcagatgtatcgtgcatacggagcttggaacataggaagaacctgtgtctgtgtaccgcccgtgacctccaggtagggccattcaacaagtcccccagtcaagcttactgtggcattctacctaactactctcagaatcgtaaatgccttgactgccttgctcttcaaccagctactacaaaactgtcatggatgccagtcgcatgcagtatctaataattgggctacatgttctccacatgcatccttattctg

SEQ ID NO: 182305 - DNA, 1522 bp, Zea mays
  Clone ID: MRT4577_97841C.1
caatggcggacgcgtgggggtggcccgaacaacctttatccgattatccccccgcattatctctctcggtagttcccccgtccccctcgcgtgcgctctgtggcgacgactgctcggccgccgccgccctacgcgcaggcgcccaggtttccaccttcgccggcgacgagcgcccacaaggaaaacaatggagtggtgggctgctgatggtttgtactacttccggacctgaaaggagctttttacaatggcaccgggaagcagcattgtgactgtagtccccgagtcggactgtggagatgacgatgggctttctgaatcacttgggggtatcatgcttgacgtagactctgcaagtaaaccgtggtctacatcggcatcgctagccaatgttgcattgtcgtcgctgtgtggcttgaatgatttgctcgaatgcccagtgtgtaccaactcgatgcgcccacctatactccagtgcccaaatggccacacgatctgctctagttgcaagcacagggtagagaaccattgcccaacctgtcgccaggaactgggaaacatcaggtgcctagctctcgagaaggtggcagagcaactccagcttccgtgcaagtaccagagcacgggatgcaccgagatccacccatacaagagcaaactgaagcacgaggagctctgcaggttcaggccgtacagctgcccgtacgcaggttccgagtgcctgatcgcaggcgacgtcccgttcctggtgtcccatctcatcaacgaccataaggtggacttgcacgagggctgcacgttcaaccaccggtacgtgaagcccaacccgtacgaggtggagaatgccacgtggatgctcactgttttcaagtgtttcgggcagcacttctgcctgcacttcgaggcgttcgtgctggggatggcgccggtgtacatggcgttcctgcggttcatgggcgaggagagcgaggcgcaggggttcgggtacagcctggaggtgggcgggggcgggcggaagctgacgtggcagggcacgccgcggagcgtcagggacagccaccggaaggtgcgggacagcttcgacgggctcatcatccacaggaacatggcgctcttcttctcgggcggcggcaggcaggagctcaagctgcgggtcaccggccgcatctggagggagcaagggcaatgaaaagcacccccgcacacattccgttgactggtggttatggtggtacaccgctgtgttccattccatcccatcatccgggggcagccttctgctcagctcctcgccatgattcaagaccccattccgtgttcgtcctgtgcatttgctgtatgtacagatattttgcatacctagcctggaactagaccgtctgcagacatgattaacacgtggggaaagccccggcaaaacctgccagtctggtatgtgctcatgttaatgccttttgcaatgtccccctgcgaggctgtcaaaaaaaaaaaaatcggcaaaaaaaaaaaaaaaaaagcggcc

SEQ ID NO: 182306 - DNA, 572 bp, Zea mays
  unsure (1)..(572): unsure at all n locations
  Clone ID: MRT4577_97842C.1
ggacccctcgagccggccagcggctggtatctcctcgctngtgagacagcgcgcgtgcgcctcgtacgagctacccgcaacctcgccgcgcgcgcccgccgccacaacctcgccgggggcgcgggtgtcccgcttccacggcgacgagcgcccacaaggaaaacaatggagtggtgggctgctgatggtttgtactacttccggacctgaaaggagctttttacaatggcaccgggaagcagcattgtgactgtagtccccgagtcggactgtggagatgacgatgggctttctgaatcacttgggggtatcatgcttgacgtagactctgcaagtaaaccgtggtctacatcggcatcgctagccaatgttgcattgtcgtcgctgtgtggcttgaatgatttgctcgaatgcccagtgtgtaccaactcgatgcgcccacctatactccagtgcccaaatggccacacgatctgctctagttgccagcacagggtagagaaccattgcccaaccttgtcgccaggaactgggaaacatcacgtgcctagctctcgagaaggtgggagagc

SEQ ID NO: 182307 - DNA, 941 bp, Zea mays
  unsure (1)..(941): unsure at all n locations
  Clone ID: MRT4577_97843C.1
atctcatcaacgaccataaggtggacttgcacgagggctgcacgttcaaccaccggtacgtgaagcccaacccgtacgaggtggagaatgccacgtggatgctcactgtaagtagaatgacgagttctgttcgtgcttaggtttagatacatggggaattttgctggttatttgatctggattatatctgtatggtagatatatgcatttgactaaagtgacctgcatagcgatcttcctaactaataaacttacttctgagacgtcttgtttttttctgaatgtgatcacacacttgtgacttgtgtttgatacatgcaggttttcaagtgtttcgggcagcacttctgcctgcacttcgaggcgttcgtgctggggatggcgccggtgtacatggcgttcctgcggttcatgggcgaggagagcgaggcgcaggggttcgggtacagcctggaggtgggcggnggcgggcgcggccgggcgtggcagggcacgccgcggagcgtcagggacagccaccggaaggtgcgggacagcttcgacgggctcatcatccacaggaacatggcgctcttcttctcgggcggcggcaggcaggagctcaagctgcgggtcaccggccgcatctggagggagcaagggcaatgaaaagcacccccgcacacattccgttgactggtggttatggtggtacaccgctgtgttccattccatcccatcatccgggggcagccttctgctcagctcctcgccatgattcaagaccccattccgtgttcgtcctgtgcatttgctgtatgtacagatattttgcatacctagcctggaactagaccgtctgcagacatgattaacacgtggggaaagccccggcaaaacctgccagtctggtatgtgctcatgttaatgccttttacaaaaaaaaaaaaaaaaaagcggcc

SEQ ID NO: 182308 - DNA, 2399 bp, Zea mays
  Clone ID: MRT4577_97844C.1
cgcgtcgtccttgtttgtactatacagctgctctcaacctttcgttccgtggcccctctcgtttattcgcccctgccacgaccaggaccgcgtcgcccgctcgcgcccctcacgccctgcgctgtgcttgcctcgtcgcggccacgtccacctacctatacctctctgtccgacgacctcatcccctttcccaagatccgagccgcggcgtctccaagtacctcgctcgcaggagcaggttgcaaggagccagccactcctgcgagtttctggcgatggtggccgttgcggcgggaaggcgggccggcggcgttggtggccgccggcgctcgggctgcggcgcggggcaggcacagcagaagctactagcgatcgccgtcgccgcgcgcttcgctgaggccgtggcgccgccgtctgcggaggcctcccgtgccggctccggcggctgttgcgtagagctcctcgagtgcctcctcggggctctgagcgtcaacgcggccccgccgcccgcgcagcacaggcgggccgtgcactcgatccgccgccgccgcccccgtggcggggggtccgccgacgaccgccacgccgacgctccctcgggccgcatcgcgggcaacggcgcatccgcatccgcagccgcgtcgctctacaccatgcagggcaggaagggtgtcaatcaggacgccatggtggtctgggagaattttggttcaaaggatgataccattttttgtggagtttttgatggccatggaccaaacggccatttggttgccaagagggtcagagatcttctccctgtaaagttgagtgcaaatttagggaagggtgaatgcaaagagatttctactagcgatgtcaagagtgggactactaaaggagttgcaaccgaacacagggttgaagatactgatgcttcccctggaaatgaagagaatggcgagtacccagaatttttcacagcactgagggcttcattcttgcaggcgttttatgtcatggacagggatctgaaggcacatagaaatattgattgtgaattcagtggtacaacagcagtcacagtaatcaagcagggacaaaatcttataattggcaacttgggagattctagagctgtcttgggcacaagaggtgaacataatcagctagttgctcttcagctgacagtggacctcaaacctagtatcccgagtgaagcagaacgaattaggcaacaaagtggcagagtattttctcttccagatgaaccagacgttgttcgtgtgtggcttccaactttcaactcgccagggttggccatggcaagatcatttggagacttctgtctgaagaaatatggaataatttctatgcctgatgttttctaccatcgcatcacggataaggatgaattcgttgtgctggcaactgacggggtgtgggatgtgctttccaatgctgaagctgttagcatcatcagcaatgctccttcacaggcctcagcagctcgatttctggttgaaaaggctcacagggcatggaggacacggtaccccacatcaaaaactgatgattgtgctgttgtctgcctctttctgaaaacagtagcagcaagtacatcctccagtgctgtaacaaaagattcggtgaagaacagagaaatgagcaatggtaagcattcattggctgttaaaacaagcaccaaggttcctgcaaatcttgttactgcaaaagatgagtggtcttttgttgatggttcctctgggtgtgtcgcgctgccaactttaccagagcccacttcagttgtgaaggatagctcaaaagattgagcttgcctgccaattgagatggcataatttttgctggaaatttgttcgccttcgtttgcaagcttgtgtgcatcagatttgttgtgacgtgaagaccagtgccagtttcattggcgagttgaggaagttattgcatagtggaatggataagtgtgcatattttgttctttttgtacagtattcaatcagtttagtgggatcagttggtagtaatgataactataataatactgtgcctattattgatggatgggggtgatcagatccatgcataggatgaagtttctcccttcttttgtaatataaatataaataattgtgtcggtttcagcagctctaataaattttcttttaggtgttgctttgttttatgtcataggttttctagttttgctttgtccaattaagtttagtattatatttccattgatgctatgacaaaccattccagttagatattggatgactaagtaagttttcctctgaaaaaaaaaaaaaaaaaagcagcctgcagcccgggggatccactagttctagagcggccgccaccgcggttagctccagtttggctccctttactgagggtta

SEQ ID NO: 182309 - DNA, 1107 bp, Zea mays
  Clone ID: MRT4577_97845C.1
gcggcgcgggagccccccgtcccaacacccaccttcatcaattccttcaacgtccagccacgccctccccccaggacatccacccccagtctcaatgtctcatcacccaggaggagcgacgaggaatcaagcagccagctaaacaaccaaccccatcgtcggtagatagccacgctgctgggctcgatccggccgatcgatcgcatgcggcacctacggatgccccacgcatccgtcttctgagatctcggttgctccatggggagcggcaaggcatcgtccccgccaggcgccgctgccggcgggagcgccccgccgccgggcggcgccgtcgtctgctgcatgtgcggcgaccgcggcgtcctgtccgagctcttccgctgctccgcctgctccgtccgctcccagcacacatactgcacggataggtacccgaaggcggagtcgtacggcacctgcaactggtgcctcagggcggatgggcgcgtggcttctacttctaactcgccgagatccgctggcaaagcggctgcccggccgccatctcacggtggtgacacgatcggcagcggaagatcgcccaaggttgccgctcgtggcgactttgcgtcttccaacctgagcaagcctgtcaagaagcagcatgcgcagcggatcctgctgcggcggtcggcgtcggaccttggcagccgcgttcctaccgaccacaacgcgccgccgtcgcccggcgtcgcgcgtggcaggccgaaggtccggaggtacaagctcctggaagaggtgatcagtagctaataatagtctaactagcgatacccggtgcggtgtcgatgtcgtggaaaacattatcgagtgcgtgtgcgtattagatgtataatacgtacgtgcatgtgtatctagctaatatataggggtagacacggcatcttgcggtgctgccatgcatgcatggaaatactacgtgctgatcgatctcaagcattactcagggtgctcgcgtcgtgttgtatttgtatatgaggtattgtataaagcatcggttcccacggtttctaacatcgtcgtgggagttatgcataaatgagcacactacctcactggtattctttt

SEQ ID NO: 182310 - DNA, 263 bp, Zea mays
  unsure (1)..(263): unsure at all n locations
  Clone ID: MRT4577_97846C.1
ccccttcgccttctaatccgagactcctatctcnnnctcacgtctgggcacataacaaccccgactcccctcccnatcctctctctccttttcctcgtttcactcatcccacaaatcccacctacacggttctcacttcaaagctcagcactattattataaaatacaggagctgcttatcacccgagatactcaacacctactcacttcatatcatgaaacatacgaaagttttgatcatacattcctccaagacaatcttc

SEQ ID NO: 182311 - DNA, 1479 bp, Zea mays
  Clone ID: MRT4577_97847C.1
agagctgctgaaaccgacacaattatttatatttatattacaaaagaagggagaaacttcatcctatgcatggatctgatcacccccatccatcaataataggcacggtattattatagttatcattactaccacgcgtccgcccacgcgtccggatcccactaaactgattgaatactgtacaaaaagaacaaaatatgcacacttatccattccactatgcaataacttcctcaactcgccaatgaaactggcactggtcttcacgtcacaacaaatctgatgcacacaagcttgcaaacgaaggcgaacaaatttccagcaaaaattatgccatctcaattggcaggcaagctcaatcttttgagctatccttcacaactgaagtgggctctggtaaagttggcagcgcgacacacccagaggaaccatcaacaaaagaccactcatcttttgcagtaacaagatttgcaggaaccttggtgcttgttttaacagccaatgaatgcttaccattgctcatttctctgttcttcaccgaatcttttgttacagcactggaggatgtacttgctgctactgttttcagaaagaggcagacaacagcacaatcatcagtttttgatgtggggtaccgtgtcctccatgccctgtgagccttttcaaccagaaatcgagctgctgaggcctgtgaaggagcattgctgatgatgctaacagcttcagcattggaaagcacatcccacaccccgtcagttgccagcacaacgaattcatccttatccgtgatgcgatggtagaaaacatcaggcatagaaattattccatatttcttcagacagaagtctccaaatgatcttgccatggccaaccctggcgagttgaaagttggaagccacacacgaacaacgtctggttcatctggaagagaaaatactctgccactttgttgcctaattcgttctgcttcacctgtaaatgattcatttttctttattttgggtagtattcacgatactaggtttgaggtccactgtcagctgaagagcaactagctgattatgttcacctcttgtgcccaagacagctctagaatctcccaagttgccaattataagattttgtccctgcttgattactgtgactgctgttgtaccactgaattcacaatcaatatttctatgtgccttcagatccctgtccatgacataaaacgcctgcaagaatgaagccctcagtgctgtgaaaaattctgggtactcgccattctcttcatttccaggggaagcatcagtatcttcaaccctgtgttcggttgcaactcctttagtagtcccactcttgacatcgctagtagaaatctctttgcattcacccttccctaaatttgcactcaactttacagggagaagatctctgaccctcttggcaaccaaatggccgtttggtccatggccatcaaaaactccacaaaaaatg

SEQ ID NO: 182312 - DNA, 444 bp, Zea mays
  Clone ID: MRT4577_97848C.1
caggtggttcagatttattctatttcgttggagcagtagcatttgaagtgaacgatactctttcccgtagcgtagccccttgttcaacagataacagaagcatggcacagttgccccttgttcaacagataacagaagcatggcacagttgcccctgttctacaggtaacagaagcatggcagagaggtaaagcaaagagaatcttcttagcaccgcacagacgagccaaccttgatgcaacttgcatccatcaaatttgatagaaggaactttattctcatgacaacaaataagctacaccgcagaacacacatacagaacgcatggatacagtacaacatgcacctcatgaatgaccccccttgcaaaaggctcacactacttatgacggccacagagacagttctcaaagcctacgactctggcaatgcaggggggttgac

SEQ ID NO: 182313 - DNA, 425 bp, Zea mays
  Clone ID: MRT4577_97849C.1
gcggccggtcgcggttaccaaccctgcaacgaggcccgtcaccgtggccacgtggatgcaccagccctgcagcgccaggccgatgtggacccaccagccttgccccgcctgggggtctgggcccaccatggcggggcctgaatccgggccatcctccatgggcagcgacatctttggcccgagctggtcctccgacgggccctcctttgggttcagcatacctcaggccagcaaccccggcctcttcagcgatctactcggctccgcgctcgaatactcccgttgccagtccatctcgccgatcagatcctgcgacgcgccacatgcatgcaggtcagccggtgagaagcccaatgtcaacgctcgcagctgtcccttgtggatgggctgcatggctgtcgctctcccgaacactacgggagcac

SEQ ID NO: 182314 - DNA, 578 bp, Zea mays
  unsure (1)..(578): unsure at all n locations
  Clone ID: MRT4577_9784C.1
ggntggttgaattttagccggnggcagagcgggagcgggcgcagtgtgcgcgggacgcgagcccccgagcgcgcagaggcgccgccgctgagagccccccggcccgccgcgccgacccgcccgcggagccccggccgcgcagccagcatgaagcgagcccacccggactacagctcctcggacagcgagctggacgagaccgtcgaagtggagaaggagagcgcggatgagaatggaaacttgagttcggctctaggttccatgtccccaactacatcttcacagatcttggccaggaaaagacgaagaggcatcattgagaagcgccgacgggaccggattaataacagtttgtctgagctcaggcggctggtacccagtgcttttgagaagcagggatctgctaagctagaaaaagccgaaatcctgcagatgaccgtggatcacctgaaaatgctgcacacggcaggaggaaaaggctatttcgacgcgcacgcccttgctatggactatcggagtttggggttccgggagtgcctggcggaggtggcccgatatctgagcatcattgagggact

SEQ ID NO: 182315 - DNA, 523 bp, Zea mays
  unsure (1)..(523): unsure at all n locations
  Clone ID: MRT4577_97850C.1
cggtccggacctccgggtcgcccccgcgtccgcgccacgcagaccgggcccgcctcgccggaggcggcgaaggaggaggaggaggtggtggaggaggaggacgacgaggagggggggaggaggatggggganagcagccgcggcgggagcgggagcgggagcggcggaggcggaggcggaggaagcgggaggcggcggcggcggcgagcgaggtggngatggngaagcgggagctcctcgcccgctgcatgacgngcccgctctgccgccgcatcctccgcgacgccaccaccgtctccgagtgcctccacaccttttgtagaaagtgtatctataagaagattaatgatgaagagctagagcactgtccagtctgtaaaattgatcttggctgtgctcccctcgagaagcttaaagctgatcacaatatacaagatgtgagggcaaaaatattttccttgaaaagaaagaagggtaatgctgaaaaaggtgaatctcctattgcgccgcctgcttaaaggaa

SEQ ID NO: 182316 - DNA, 2453 bp, Zea mays
  unsure (1)..(2453): unsure at all n locations
  Clone ID: MRT4577_97852C.1
ccggccggggttccaccacctcgcgctcgcggctccttcggcgtcggcggcccgggccataaacatacaccacacgaggagctcgatagccatgtaatgtaaagcgaagcaaagcaagcgaaacaagccgccgccgcctctgctttcctctcgatcacttccggcgcccgccaccaccgcgccgccgccgccgtcgtgatacttttgcccctccttttttttttcttgtggtctggtctggtgttgcgctttccggggcaggcggatggggaggagcggcacgtcgacggtgaggctgctgctgctggggagctccttcctctgcgtgcttctcgtcagtacctcagaacctgcctcggagtcggatgacgtatctgcgcttcttgcgttcaagagagccatctaccaggaccctctgtccaagctctcggactggaactccaaggacgaggatccctgcgcctggtccggtgtgaggtgctcagggctcaacaaccgcgttgttgcgctcgacctgtcaaattcatctctccaaggattcttggcaccagagatcggatccttgagatctttgcaaactctcgtgttggatcgcaacacattcatgggctcaataccaaaaggcatcggcatgctacacaacctgatcgagctgaacctcagctccaaccagctcgcgnggcctattcccagtgagatcggtgacatggcgaagatcacaaaaatagaccttcacgccaatcggctggacggcactatccctcctgagcttggcaagctgggaagcctccttgagctacggctgagcaacaactgccttacaggcattgttcctgcaagtaatgattccgacgtggaatccgccagcagctctgatcaaactggattgtgtcagctatctcaactaaccaatattgatctctcgtataacttcttggttggagatgtccccgcatgcttacagcaaatccaaagatcaagcttggtagggaattgcttccagaacaacacatcaaaccgcccacttcaacaatgtgaaactaatcaggacagaggcaaagacaatgatgctgatgagaatgtgcagaaaggcctgccagagccactttggcttctcattctggaagtcatcgcagcagtttcattgctttgcttcttaacactttgtaccatgactggcctccgaaggtgcagagccagatcctctgggtctgggaccagtgttccatggacaagagctgtaagctggaaggagaacaccgtaatctcaatcgatgatgacctcctggtaaatgtgccaaagataagccggcaggagctggcagaggcttgcgaggacttcagcaacataattggatcgtctcaggagacagttgtgtacaagggaactctgaaggatggccgggaaatcgctgttgtgtcgctgtctgttccggtgcattactggaatgactatgtcgaacttcactttcacaaggaggtgatagaaatgtccagactgagtcacgaaaatgtcgcaaagatggtgggatactgcaaggagtctgatccattttcgagaatgctagtctttcagtacccaccaaatgggacactctacgagcatctgcacgatggagatgggtggcagctatcttggcctagacggatgaaattagcactcgccatctcgagggctctcagatacttgcacactgagctgcaacctccatttgcagttgctgcactgacgtctagttcagtctacctaactgaagacttctccccaaagataatcgatttcgagaggtggagatatcttgcgaccaaaccaggatttggctcactaaatggcgggtcagtcaacagcgttacagattctcggcataagcgcttcatggacgtccaggccaacacttacgcgtttggcgtgatcctgctggagctggtcagtggcagagcctcggtttccaaagatacaggaggcttggtggattgggcacgaaagcacctggagcagcccgaggagttcggcaagctggtggacccgaggctgcagagcgtgaaccaggagagcctgggcatcgtctgcaacgtggcgaacctgtgcatcgacctggagccgtcgcggcggccgtccatgagcatgatcgcggccatcctggaggaaggcatcgaggcgtcggcggccaccttgctcaggaattcgtctctggcctgggccgaagccgagctggccatctcctagaacctagataccctctttgcatgttttgctgcactcgctacactgtatgtttggacagtgacgatggtttaacccgttgttactccgtttggcattgttatttctctcttttttggagagagaaatggctcacagatctgaattcaaaatgactcaagttttgatttgatcagcgcgaggagatgcatttttatcttttccaaaaaaaaaaaaaaaaagggcgggc

SEQ ID NO: 182317 - DNA, 312 bp, Zea mays
  Clone ID: MRT4577_97853C.1
accattacgaaggaatataaaacggtgctgctcctgatgtgggtctgcaacaaagtttttttagacatttgcaaacaaaattgtttttcagacattttcaaacaaaattgagtttgcgaggcttaacttcccgtgctcgggctcgagtttgactgtcccaccagagcctgaaggcaaaacgagtcaccgatgtcctggaccagctgatccagcgtcgggttaaacccaactccaattccccgcggatttacgtcagaaaaaacccaactccaattccgggcggatttacgtcagaaataattgaagtcaacc

SEQ ID NO: 182318 - DNA, 741 bp, Zea mays
  unsure (1)..(741): unsure at all n locations
  Clone ID: MRT4577_97854C.1
tcgaggccggccgggccgggctacccgtggccatcctaccccctccgccataaggaccgtgagggagacaaaagtgtgctcggtagattcagactggccaccatcgtcgcccatcgtattcgggacgttcgaggacaggggaaagtgctttggttctgcgccggggtgtgtggagcctgaacgcgggatagtcgaacctcgacatcgatcggagcatgagcaattgatcgccggtgctgtaccgccgccgtagtccaaccaactcacgtcagcgcccttgcagccgctccaatccgagatgaaccagtggttgaggattcaggtgttcagcaggtagaagttgctgagcaggagctcattgaaggagaagaacaggtggtccaggaggagccgtacaatgaggagtatgagttgatctagttgacgtctccgagttagcttgatggcgccaaggaataatatttagtttgttttattgttatcaattatttctgtaagacttcctgaaagtcgcctagagggggtgaataggcgaaacctgaaatttataaacttaaacagacactaaggttcggggttagcgttagaattaaactcaagtctgaaagatcgtttcccttgctaagagttgctcaaatgacgcggataatgtatgggagcaaacataaattagtactagtaaggaaacgttagagaggggaaaacaaatccaaaaaaaaaaaaaaaaagggccctagggnc

SEQ ID NO: 182319 - DNA, 168 bp, Zea mays
  Clone ID: MRT4577_97855C.1
aagcaaacatagctaaactaaaaatgcacagggcgctaaaacccaagccaaattcgatcaagtaaaaaaaacatttgggtctttagctccacaaacacaaaatacattctaaagcaacaatgagaagccacaccatcgttctataaaacattgttacccacgcgtccg

SEQ ID NO: 182320 - DNA, 289 bp, Zea mays
  Clone ID: MRT4577_97856C.1
ttttctccaagatctccagcaggatcaaggaacatatatatcatcacatgataagtatcaggttgagagcctgtgcaccacttgataagaatcaggagtgctaagtaaccaaaaaggctattgaggaaaatcatctgtggtatgaattgatacctgaagaatgtgcacagttaaagcactgcaatttctctctattttggctgtatcggaagagaagatacaaggaatatacaacaccttatttcaaaaaaaaaaaaaaaaaataacaaaactaataaaaaaaatatgg

SEQ ID NO: 182321 - DNA, 555 bp, Zea mays
  unsure (1)..(555): unsure at all n locations
  Clone ID: MRT4577_97857C.1
tttgttttttttttcggggggggaacggcggggccgccgttgttacgacaaaggcggggtggaaaaacctggccccactcncccttggacgcagacccggagggccatcatagactcagctccgagcaacggttcgtggctagactaggagggacgaacgggcctcccaccacaggggggggggggtgagccgctgccgttgcccaaactcagaacctgagctctagaactcgtggaaagccccaacggcgctcccctggacgtactcattgctgggctcctgcgtagggcgggcctcgctcagagtgaccatggacacgggaccggcgccagtggtgaccctgagagtcatcttcttgatgccgcatccgacaggcccgtgctctggtgctccccgngtcggaccctccctctggacactgcggacagcctcctgcagcctgttcgtatccgcctcatcggcccatggccgtcctcccttagggtcggaggatgtaccactggctctctctttagaagaggcctgggccgcggcggcgcgctcgtcaggtgccg

SEQ ID NO: 182322 - DNA, 843 bp, Zea mays
  Clone ID: MRT4577_97858C.1
acctcgaggccggccgggaggccacagccgcgctgattggaaaaggggtttcgctcttccggagaaggaaggcgtttgcggtttgcccgccgccgtgaatcgtatgtgatcgaatcgcgcggcgggtgatggcggaggaaccggtggtcggttatgatggcttcgaggccgccggtgatgctggcgccggtggcgcggaggacaacctgtcgatgtccctcggcgacttcatggcgttcctcgaaactgagcccacgtcacccgaggaaggctggaaggaggagcagcagatgcagcctgcggtcaatcaaggttgtttagagatgcctgccaacactgattgttctgaagatttattccaaagccatgaagaaatgcttgagaacgcagaattttggtcaaagtcaaactactcccctgtggagcatctggagtgccatatggaagttaacatggagctgaacgaaggagaacaaatgattgatcacacagaagctagccgatatgaattgtttagcaacgatctgcagagccaatcaagaacttccaacttggacaatgaacattttccaagggatgcatcaaaccacgctaatgttgaagcaactggacctccatatgatctctcaaatggtggtatatccacagagcactcagattggagtgaaattaaatgggggagtacagatgagatgcttggtatactggtcaggatgatgaccatttcactccgatgggcaatgtttgtcttaccaatacacagatattcttgatctttcttgcattgagtccacatgggtgagagaaacgaaagcattcgcattgcaacagtagttgccttac

SEQ ID NO: 182323 - DNA, 293 bp, Zea mays
  Clone ID: MRT4577_97859C.1
aacgagaacaaaaacatttaacaaccgggcgtataagatccagacgacccaacctaacgtacggaaaattctatacactacaactggttctataaacactcacacaacacattaaagagacggggggccctctttataagctccaggataaacaccaccattacccaacatgactactttcgtatagagccccctattacactccaatgaaagaacataatacaacgccatgaatagaaaaaccctactgtatcaagattaaatgactagattacaaacccattttctgattt

SEQ ID NO: 182324 - DNA, 302 bp, Zea mays
  unsure (1)..(302): unsure at all n locations
  Clone ID: MRT4577_9785C.1
ctcntttctcgacttctcccgcgtgcactctcctgtcctctcagcgtccgcaaattcccttgggggctagggtttgttaataaccactatccccccccccacctctgctctcaccaaaggcagcaacaatcaatgggtcacccatatcttcgatccctcccagaagaactaatcttccgacccctccctcgcatacccccctcaagctcataaaatactgacaacagacccaataagactttcaatagacaaatctcacgtaggaaccttgaggaactttgtacaccaatcactacctcttt

SEQ ID NO: 182325 - DNA, 331 bp, Zea mays
  Clone ID: MRT4577_97860C.1
aacgagatctctttggcatacgtagagttaaactatcaaggaccaacgtcagcaaacaggaggtctacacatactcggctagtactatgagccagagcagcttacagacctcaaccacctctgtgttcataaattccgatcgcttctgctactgcacctaccttcctaccagctctgtgctagctacccatagcactaactgtcattcaacatgctgttagaaacgatgtagcctacttaaaagcgacagtttcatgaaaccccatgactctgacaaactgtggtgtacacctactacatcgactacaaagattcactccagagatagtgg

SEQ ID NO: 182326 - DNA, 138 bp, Zea mays
  unsure (1)..(138): unsure at all n locations
  Clone ID: MRT4577_97861C.1
ggccgggccgggaggtccagcactttccctgagatcctcgcggncgttcggagacagagctcgcagccgcggacacagccgagcggcggtccgcctgcctccgccgcgcctatggattcctcgtcgcagtcgtctccc

SEQ ID NO: 182327 - DNA, 376 bp, Zea mays
  unsure (1)..(376): unsure at all n locations
  Clone ID: MRT4577_97862C.1
tcgcctgtccacgtttcagtgcttctccgccgtcgaggccgcgtcccagtgcgaagagactccgactcagatggccagccgctgtgtccggtgccacctgtgcccctgccgccgttgcggttttcgcgattatggtcctgtcttcgctggggcacccccggcccgggccttttttgtgccgctgtggatcgatgcgcacngngaantgnnccggagaggnngncacctcctgcagggcgtcctgtgagaaccccctgtgtgctatgaatccgggccagaggccggcccttcccgcgctgccggagtctttctgatgctacggcaactgcccccgtgactgcaatctggaagcccccaacgcctgtcaatccgtccc

SEQ ID NO: 182328 - DNA, 318 bp, Zea mays
  Clone ID: MRT4577_97863C.1
gccaggaaggacaggacgagcgcgagcgccacctcctcgccgccgctgccgccaccacagacgtgtgaaagggtataaaaccctacccctgcgtagtcttcacgccgccaccagccgcctcgccgaaaccgtaaacccgcctccccgttagggttgaccgcgtgccccgaccatggaggaggacgcaccgcctgaagctcctgcgatgacgacggaggaagagcacggtgacatcgagatgcggatgcgcaacatacagccagccgctccggcgctatcccggagtttcttttttagcccgcccgcccactccaggaa

SEQ ID NO: 182329 - DNA, 303 bp, Zea mays
  Clone ID: MRT4577_97864C.1
ggaacaaaactttttttttttcatttcaattgttcattcagggcattgctcacactgacactgccacccatggggatgcgtgacacattattactcaatcatcgccggtaaaagacccaactagctagctagccaggggctataccacagcacatagtttcttcagggggggacaccgccggcagcagcgaaggggcatgggagtcggctgctgcaggccgcacaacgccgtcagttgctgcgctatttgcccccccaacagccccgttacctggccgcccgacccctgggcggacccctggg

SEQ ID NO: 182330 - DNA, 206 bp, Zea mays
  Clone ID: MRT4577_97865C.1
aggaatgagggatgtgatatatgctgattttccaaagctcattccatacattgatcaggatgatggatctggttctagtgttccggccattattaatataatcactgaatttgttgggaaggagccagtgtcactccatgaatgcaagtgagtgtgttgcacgattgatctaagctgtcaaggttgctatgcgtcaggacccactt

SEQ ID NO: 182331 - DNA, 300 bp, Zea mays
  Clone ID: MRT4577_97866C.1
gccgcgcgtgcttccactcgtcctggagcttatagggatgcgtgcttgatccgatccggggagggcacaccagctttgagcgactacgatcgaatggatggccgccaatggcgagaagaagatgataaccctgaaaagctccgatggcgaggagttcgatgaggaagaggccgaggctatggagtcggagaccatccgccacatgatcgaggatgactgcgccgacaacggcatccgtctttctaacgttaactacgagatcctatgcaaggtaatcgaatcctgctgcatgcacgtaca

SEQ ID NO: 182332 - DNA, 363 bp, Zea mays
  Clone ID: MRT4577_97867C.1
catgaacgtcgtgccgacggcggccgagatctgcaccctcggcgtggtgtacgagagggggctcatcggcatataccacgactggtgtgaggcattctcaacttatccaagaacatacgacctcatacatgccaatggcatcttcactctctacaaggacaggtgcagaatggaggacatcctgctggagatggatcggatcctgcgcccagagggaaccgtgatcctccgcgacgacgtcgaggtcctgctcaaggtgcagaggacggtgaaggggatgcgttggaagacgctgctggcaaaccatgaggacggccccaacgtgcctgagaaggtgctcttcgctgtcaagcggtactggac

SEQ ID NO: 182333 - DNA, 360 bp, Zea mays
  unsure (1)..(360): unsure at all n locations
  Clone ID: MRT4577_97868C.1
tatataacccaaaccgcgcgcgattatttttgaaaacggtgggggcactcaagacgngataagcggtacaagtgctcacaaaaaggtcttaaatggtaaaacatccaagcgtcctaccatcataacttccattttattataagctacatacctgaaccccccccatgtacaagtgtgcaaaccacaagggcataaaaagagacccaacccgagcactcccaatgcagactagtgtcaagaccccaatgttatcattggccactaggtacaatcttactcctcgtgccggagagcattttgtttatgcaccgcactctactgcttgcgcttgtgtgcagccttgatcttgccacgcttggg

SEQ ID NO: 182334 - DNA, 159 bp, Zea mays
  Clone ID: MRT4577_97869C.1
aacgggaaaagaaatgctttttggagcattgcatacaagtcttgaatgttcaaccttgttcagaccctttttgatactttattacaaacggggcctatatgtggaaaatctccccccttttacctgccttcacaatacacgctttttgaattaaaaccg

SEQ ID NO: 182335 - DNA, 287 bp, Zea mays
  unsure (1)..(287): unsure at all n locations
  Clone ID: MRT4577_9786C.1
gttaaggtgcggagccgtggatgctgaggcatattctgtaatatctggtaaccttgtaagaacattgtggacaattggaacatccgagaaaactaatcccgatccactctgggataaagcaagaggtactgcttttcactccttgtccatctaacaccctcnattattcaagatgctattcctgatttctggaaactaaactatgagttctttacgaacgaacataatctggcagttctcaaggcctgggaagcaccttcaagatgagatcacagatatgagcacat

SEQ ID NO: 182336 - DNA, 219 bp, Zea mays
  Clone ID: MRT4577_97870C.1
tttacatccaacatgctgtttcggtctagtgcacctttctaaacggtggtgcaccatacaatgtccggtgatgcaccagacagtgttcggtggaccatgctgcctcgtccgaacaatccgctctcgataattcgtctacgacttactgttaaaattcaccggactgtcctgtgtgcaccgtactgtcctttgagccaactgtccatctggccaacattt

SEQ ID NO: 182337 - DNA, 486 bp, Zea mays
  unsure (1)..(486): unsure at all n locations
  Clone ID: MRT4577_97871C.1
agagcacaataatggaatcgaaatagagtatttaaacgacacatcatagctcgcacacaggtgcaggagtcaaagtgcaataacgcccaggaacacttaacatacactaagattctccaaaaaagacttgacactaaaacctctgctagataactcgatggcagacaccagagcactcatttcttcttgatggcggccttggtaaccttggcaccggtggggtccttcttctccacgcccttgatgacaccaacagcaaccgtttgtctcatgtcacgcacagcgaagcggccaagaggagggtaggtggcaaaggtctccacaaccatgggcttggtgngaatcatcttcacgataccagcgtcaccgttcttcaggaacttgngcagcgcctccagctccttaccagatcgnctgtcgatcttggtcacccagctcgcgaacttgacagcaatgtgggaaggtgtggcagtccacactggggcg

SEQ ID NO: 182338 - DNA, 248 bp, Zea mays
  Clone ID: MRT4577_97872C.1
tgctgctttccgacccattcacggagcgctctgcttctttctatgtatcatggctccaaacaaggatacagcccccccccatgcttacaagcccccaaagttcgacttttgccatcatacgaataacaagcggaacaagggaaatgtcaaagagaaatgaacaacccgtatctgatcgaacaggctacctacgacaagctgatatctgaatcgcccaagtacactgcagaacatatcatccatgatat

SEQ ID NO: 182339 - DNA, 297 bp, Zea mays
  Clone ID: MRT4577_97873C.1
catagggcgattgggttcatcaagacggccgggagccacattgccgccaagctcatgtaccccccccgcggcagtacacagactaagcgtgggctttcttacgcgcgcgcccatgtacgacgagggatctggctatcggtgacatagcagctgactagatcgttctcggcgactgaagctgcggcggacgacatggaagacgtcccctgcaccgctgcgcccatatattattattgatgcgcagtgatatgaatatatatgcatggcgacggggtgcgtcagctacataaacgtgct

SEQ ID NO: 182340 - DNA, 661 bp, Zea mays
  unsure (1)..(661): unsure at all n locations
  Clone ID: MRT4577_97874C.1
cgcagcagnnttggcgagtagtggcggacccgcgcgtgggtggcgccttggtgctttgctggcgggcgnnggcggcgaaccctcggnagggcggctcattttttctgttcgggcaggnntggcgtcnngctcatgtggggcgggtgggatgtctctatcttcttcgcggnnccagggcttcggggtctccttccgcgcggcgtgcgatgcaggcggnncgtcagggaggccctcaacnnaacgccgcgccgcgaccaaccgcgcgagccgcgcnngcgccgccctgcgaacttgcgctttcaagaaccgcgcgcgcgncgcggcggtgcagcggcgcttcaacgcgcggcgaacgcgcgcgcagcatttcccctccaagtgggcggcgtcagcgatccccctacacnncatcagcgacctccaccgactgcgtccaggngtgagactgagaccctaaacgangcgacgacggggcgagcggcggcccacctgagagacgagtccatttatctatcccgcgcgtacgtgcgggcgcccgcgggagtcggacccgtgcatgaccatanntctagctanncctacgcnnatgagtcgtcacgacctttgcgtgtgctaccctactgcgtacgtgtaccctactactgaataaaaaaccctctcc

SEQ ID NO: 182341 - DNA, 191 bp, Zea mays
  Clone ID: MRT4577_97875C.1
cctcctctgccaccatcacttcctctgccaccgcgccacggtacgagtacgacgatgaggtcttcggctcttcggcggccccagcatacgacgacgacctgcttggtgccggccccttcctgaaccccgtgacccccccagacgcatgctaaggtggacaagccatcccgcgacgagatcgacaagttgct

SEQ ID NO: 182342 - DNA, 948 bp, Zea mays
  Clone ID: MRT4577_97876C.1
tgggtacccctctgtggccggccggggtcccacttatcaccgtgctcctcacccacctaccgcgccacagcccgcctcaaatccccggctcggaaacaaccaccgatcacaccaccacattgccgtcaccgtcaccgccggcccgccgccaccgcttcccaagctatctcatggcggcctccgcgtcctccctgcttgcagacgccgcatcctcatcctgcggggccatctctccgcgtccccggttgcttcgtggagctccggccgccgcctccgtcccctcgccgtcgcgtcactcctgctgttccctccgcgcttcccccgcgaggcgccatcggagccgctttgtagccagcgccgttcccacgatgcagcctccggcggagtccagggtctccacggtagtcgatgtcgacctcggcgatcgtagctacccgatctacatcggcgcaggcctcctcgacgagccggacctgctgcagaggcatgttcatggtaagagggttctggtggtgaccaacacgaccgtcgcgccgctttacctggagaaggtggcatgggcactcacccacaacaatccgaatgtgtcagtggagagcgtgatcctgcccgatggcgaaaagtacaaagatatggacacgctgatgaaggtgtttgacaaggcagtcgagtcccggtttgaccgccggtgcacatttgtagcgttgggtggtggtgtcatcggggacatgtgtggatttgcagctgcagcattcctccggggcgtcaatttcatacagataccaactactctgatggcccaggtggattcatctgttggcgggaaaactgggattaaccacccactagggaagaacttgattggagcattctaccagccacaatgtgttctaattgacacagatacactgaacacattgcctgacagggagctagcctcaggcattg

SEQ ID NO: 182343 - DNA, 284 bp, Zea mays
  unsure (1)..(284): unsure at all n locations
  Clone ID: MRT4577_97877C.1
tttgaggggcacccacaacctgtgcnttttcgaatttttacgaggttnggaacccaacancccccttcntgctcgccccgtccgccagacccattaccaccctacaattatagatcgcctcctctatttcacgggaggggagtgctccacttgcctctgtctactgggtcaatttggggggttcaaatctgtttttccgtccattgctttactcctgtgtttgagtttcttccccgtttatcaataattatagtcagttgagcccaaaattttttatttgatct

SEQ ID NO: 182344 - DNA, 236 bp, Zea mays
  unsure (1)..(236): unsure at all n locations
  Clone ID: MRT4577_97878C.1
cgtgtgctggnattcgctcgtagcagtggtaacaacgcagagtactttttttttttttttttttttttttttttttgggctggagccgcagaggcgaaccgttaactgttcaatcatgatcgttcaccagatactaagccttactacaaagttagaactaaacgtgtgtccctcaagtaacaccctactactgggggggccgcgtactttttgttttntccccggcnnaagggcga

SEQ ID NO: 182345 - DNA, 820 bp, Zea mays
  Clone ID: MRT4577_97879C.1
gtacgcctgcaggtatcggtccggaattcccgggtcgacccacgcgtccgtgcttttagaaggtctgagttaacattctacttatttaaaaagtatatatgtaaatgtatatgtatgtctcttcattgtaggccgagtcagcagatgcttcgtattgctttggattagcaatttttttttaaagtcaggtagttcaagcctttaattccagtactcagaaggaagaagccaagccagctcacgagtatcaaggtttaatatgctagaaatgtactacaaaaaacaaaacaaaacaaaaaaacactgggtgtggtggcacaggcctttaattccagcactcaggaggcagaggcaggcagatttctgagttcgaggccagcctggtctacagagtgagttccaggacagccagggctacacagagaaaccctgtctcgaaaaaccaaaacaaaaaaacaaaaacaaaaacaaaaaaaaaaataaacaaaaaagatcagggtctcactatatgctcctgtcttgcctagaactcaagtttatatattaggctgtcctcgaactcacagaaacctgcattctaggattaaggggatgtgtcacactctacctggacacttaccgtttttggttttgtattttatagtacaaaggttggattcaagccccatgtagagggagcactgaccagatcgctgactcggacagtgcagctcagtgctttgagaactctgcactgttagaccagtccctcccacacactggccaccaccctgtccactgagctgtgcccttgccagctagtctgactggggaagcctgg

SEQ ID NO: 182346 - DNA, 132 bp, Zea mays
  unsure (1)..(132): unsure at all n locations
  Clone ID: MRT4577_97880C.1
cccgtctctgtgtcctaccacgtaccccaagagcgtttcctaaagtatttgagagggcccancaacatctactacaacaccctggacgccactctccattaccgctactcccagctgagccacgcctccttt

SEQ ID NO: 182347 - DNA, 981 bp, Zea mays
  Clone ID: MRT4577_97881C.1
ctcgatgatcaggcaaagcaactaacttctaaagccttgcgtctcgagaagggagaaagaagataagtgagaggatgaagcttcttcaagatcttgttcctggatgcagtaagatcactggcaaggcagtcatgctcgatgagattatcaactatgtgcagtcattgcaacgacaagtcgagttcttgtcaatgaaactcgcaactgttaaccccgagcttggctttgacattgagcagatcatatccaaacaaatgctgctttcacaagacagacatcttgctttctatggagtcgatccaggatcaagcggccttactggcccatttaaccaaggaatcatgcagccagcattgatgtgcaccatttctaatcccgccgatgttttgcacggagctattcacgacgtgtcaacaatgaaccagataccttctatgtgggaaggacttcagaatatgcctcagatgaacttcaaccctggcgtggcagccgatagcggcaccaacaactctggctccatgaagatcgagcagtgagcttctgtatagctccggaattgttctgtgaatcatgaatcgtcgaaaagcgctcacggggtggagtcttttttgtatagctggaggcctaaccattcatgccggtttccttctgttgcttccatactgtgcgacacattgtttatggtacggcaaatgaggatcatgtacagctggagctggaaaactgatgccactgtaaatttctgctgtgttttggcctgtggaaattgggatggaaacctattaccatccatgaaatccaatggcagaagcttgttggaactagggaccaggtgctgaatgctgatgggccaacatactagaatggaatagtaggtacaaaaatgcagagtttgaagcctctttgtcggaaattccatggaacatgcaatgtaaggtttcatcatgcaatggaaggaaactcattattgttaatcttccc

SEQ ID NO: 182348 - DNA, 378 bp, Zea mays
  Clone ID: MRT4577_97882C.1
accaaatttaagtcaaggagtgctacagtccatccctggatctagcggacggctgtgtttggcgctaaaactgtttcgcgtagagatgactttaacgtcagttgctgcaccttaagagctaccctatacgtgcactgtacaaggggagagggaggctcgccgcaagcgctgcggacagcctcagctattcattgaatagatctctcctcatggattccctccattttcatatcatcaaaccagccctaccagtccaaggtttttctaaggaaatttttatttaagggctagttttggaacctcattttaccaaaggatttatatttttccatggaaaataaagtaatttccctatgggaaaaatatatttccaaacta

SEQ ID NO: 182349 - DNA, 5094 bp, Zea mays
  Clone ID: MRT4577_97883C.1
gtccaagagaagcatggaaagagggaaaagaagaaaaactacaggaaggccaaaggcgaggcgcacatcgggaaggaatgggactccgactgctcctcatctgactccgaagatgaaggactagctgccttggccttcaacaaatcttcgctcttccccaacaaacgccatacgtgccttatggataaggagaataagggattagatagaaccaaggtagacaaaataaatgaattaattgatgctcttaatgagaaggatagattgctagaaaaatgtaaagactttgatgttgatgcttgtaatgaacatgcctccattattgctaaattaaataatgaggttgcaagtcttaatgctcaacttaagacttgcatgaataattatgagaaacttaaatttgctagggatgcctacattgttggtagacacccctcaattaaggatggacttggttttcgaaaggaaaccaagaacttaacaagaccggtggtgcaccggactgtccggtcattcactgttattgatcctcatcttataaaccttattcgtgaaaaccccaggtacacaaagatgatgcccgaggaaatcctcagaaaattcgtaagtgggcgcatgatggtgaaagaagcacgatatgtggacgatgccttgaatggtccacttcccgtctacgagccacaacccgttgctctcaaagcaactagcagcagagagccactacctagcaaggtccaagagaagcatggaaagagggaaaagaagaaaaactacaggaaggccaaaggcgaggcgcacatcgggaaggaatgggactccgactgctcctcatctgactccgaagatgaaggactagctgccttggccttcaacaaatcttcgctcttccccaacaaacgccatacgtgccttatggataaggagaataagggattagatagaaccaaggtagacaaaataaatgaattaattgatgctcttaatgagaaggatagattgctagaaaaatgtaaagactttgatgttgatgcttgtaatgaacatgcctccattattgctaaattaaataatgaggttgcaagtcttaatgctcaacttaagacttgcatgaataattatgagaaacttaaatttgctagggatgcctacattgttggtagacacccctcaattaaggatggacttggttttcgaaaggaaaccaagaacttaacaagaccggtggtgcaccggactgtccgggcgggaggctccaacttgtggagattcctcacaaacaagaaaagactgctaaagaaaaggaccgtgatggatcctaagggcaaggggatggtgatcaacaacacggagaaggagtccctcctcaacgagcctaaggaggacaagcccactgactcaggctcgagtcacaagaagagggacgggaagaagaagaggcgcatcaagaagattatctactatgacaacgacgcctcctcttcttcactaagggatgacgacgacgactcctcgtccaaaaagaaaacggttaatcaaaactactcctttgattattcccgcattctgtacaattcaaatgctcatttactatcaattccacttggaaaacccccacactttgatggagaggattattctttttggagtcataaaatgtgtagtcatttattctctctccatcctagtatctgggagattgtagaaaatggaatgcactttgaaagtacttataaccctgtgtttatcaatgaacaaattaataagaatgcccaagccaccattgtcttgctagcttctctatgtagggatgaatacaacaaggataccctcaagatatcacatgagggaaatgatgccaccatgattacaaaaatgaaactggtggaaggcgagctggggagattcgcgatgataaggggagaagagccaacacaaacgtacaataggctcaagacccttgtcaacaaaatccgaagctacagaagtacaaggtggacggagcatgacgtcgtccgactcatgctcaggtcattcactgttattgatcctcatcttataaaccttattcgtgaaaaccccaggtacacaaagatgatgcccgaggaaatcctcagaaaattcccacaacccattgctctcaaagcaactagcagcagagagccactacctagcaaggtagcacaagtggaggctgtcgggctcaatgaggatgagatggcgctcatcatcaagcgcttcaagaccgcactaaaaggacgcaaggagtacccccaacaagaacgagtcaaggggaacgctcctgcttcaaatgaggtccaagagaagcatggaaagagggaaaagaagaaaaactacaggaaggccaaaggcgaggcgcacatcgggaaggaatgggactccgactgctcctcatctgactccgaagatgaaggactagctgcctcgaccttcaacaaatcttcgctcttccccaacaaacgccatacgtgccttatggataaggagaataagggattagatagaaccaaggtagacaaaataaatgaattaattgatgctcttaatgagaaggatagattgctagaaaaatgtaaagactttgatgttgatgcttgtaatgaacatgcctccattattgctaaattaaataatgaggttgcaagtcttaatgctcaacttaagacttgcatgaataattatgagaaacttaaatttgctagggatgcctacattgttggtagacacccctcaattaaggatggacttggttttcgaaaggaaaccaagaacttaacaagacaatggacttccggtctcaacaaggagaaatggaaggcccctatggctagtagctcatattcttcacatgatcaaaagaaccatgcttatctttatgctcatgtcaagaaagtttatgcatatggggactcaagctggattatcgataacggatgcacaaaccacatgacgggggagaagaaaatgttcacctcctacgtcaagaacaaggattcccaagacaccatcatttttagaggtgggaataaaggcaaggttcaaggattgggcaagatagccatcacaaccgagcactcaatatcaaatgtgtttttagtagagtcgcttgggtataatttattgtctctaaaggtgaagaagataagaagcgacaatgggtctgagttcaagaatcttcagaccgaagaatatcttgaggaggaaggcatcaaaaacgagttctccgctccctacacaccacaacaaaatggtgtggtagagaggaagaacaggacactaatcgacacggcaagaacgatgcttggagagtacaagacgcctgagcagttttggtcggaagctgtgaacacagcttgccatgccataaaccggctctatctgcaccgtcttctcaagaaaacctcctacgaactcctaactggtaacaaacccaatgtgtcttatttccgtgtatttggaagcaaatgctacattctggtgaagaaatgtagacattcaaaatttgctcccaaagctgtagaaggaatagttgaagtctctagcgacgttgtatttgatgagactaatggctctccaagagagcaagctgatcttgatgatgtagatgaagatgaggtgatgtgtgaccacaggaactacaggaacaagatcaaccctcttcctctacgatggtgcatcctccaattcaagatgatgaatagggtagaagaagccttgcaggatccggactggatgttggccatgcaggaagagctcaacaacttcaaaagaaatgaagtctggagcctggtgccacgtccaaagcaaaatgttgtgggaaccaaatgggtgttctgcaacaagcaaggcgaacacggagtggtgacaagaaacaaggctagacttgtggcaaaaggttatgcccaaatcacaggtttggactttgaggagacttttgctcctgtggctaggttagaatcaattcggattttattagcctatgccgctcaccattcctttaagttgttccaaatggacatgaagagcgctttcctaaatggaccaatcaaggaggaggttgggaaagctgatcccactcttttcacaaagacttgtgatggtgatatttttatgtgccaaatatatgtcgatgacataatatttggttctactaatcaaaagtcttgtgaggagtttagcagggtaatgatgcaaaagttcgagatgtcgatgatgtgcgagttgaactacttccttggatttcaagtgaagcaattcaaggaaggcaccttcatctcccaaacaaagtacactcaagatcttctcaagaggtttgggatgaaggatgctaagcccgcgaagacactgatgggaactgacggtcatctagacctcaacaaaggaggtaagtccgttgatcaaaaggaataccggtcaatgataggttcattactttatctttgtgctagtggaccggacattatgcttagtgtatgcatgtgtgctagatttcaatccgaccccaaggagtgtcaccttgtggatgttaagcgaattcttagatatttagtttctacaccttgcttcgggatctggtatccaaatgggtctacctttgacttaatcggatactcagattcagaccatgccggatgcaaggttgataggaagagcacatcagggacgtgccagtttctagtgaggtctgtggtgtcctggagctccaagaaacaaacatctgttgccctatccaccgttgaggccgagtacgttgccgcagggcagtgttgcgcgcaactgctttggatgaggcaaaccttcggggactttggctacaatctaagcaaagtcccactcctatgtgacaatgagagtgcagtccgcttggcggataatcctgttgaacacagccgcactaagcacatagacatccggcatcacttcctgagagaccaccagcaaagaggagatatcgatatataccatattagcaccgagaaccagctagtcgatatcttcaccaagcctttagatgagaaaaggttttgtaggttgcgaagtgaactaaatgtcttagattcgtgtaacttggattga

SEQ ID NO: 182350 - DNA, 294 bp, Zea mays
  Clone ID: MRT4577_97884C.1
aattcccgggccgacgagctcttcgtctgcggccgcccgccccctttctttttgggtttttttcctgcgggcccagggtcttaccctggcgaagatgaaaaccagcgccttggcacgaaagaggccatgcaccgaatcagcgcagccgatgactttattaacccaccgccccaccggctcggtacatacaccccgggtaggtctattccccgactagccccccaccggagcccgtggcctacctgggcttggagcatgcacaccagaaccaacggtggcatggacccccggcct

SEQ ID NO: 182351 - DNA, 2828 bp, Zea mays
  Clone ID: MRT4577_97885C.1
atggatcctaagggcaaggggatggtgatcaacaacacggagaaggagtccctcctcaacgagcctaaggaggacaagcccactgactcaggctcgagtcacaagaagagggacgggaagaagaagaggcgcatcaagaagattatctactatgacaacgacgcctcctcttcttcactaagggatgacgacgacgactcctcgtccaaaaagaaaacggttaatcaaaactactcctttgattattcccgcattctgtacaattcaaatgctcatttactatcaattccacttggaaaacccccacactttgatggagaggattattctttttggagtcataaaatgtgtagtcatttattctctctccatcctagtatctgggagattgtagaaaatggaatgcactttgaaagtacttataaccctgtgtttatcaatgaacaaattaataagaatgcccaagccaccattgtcttgctagcttctctatgtagggatgaatacaacaaggataccctcaagatatcacatgagggaaatgatgccaccatgattacaaaaatgaaactggtggaaggcgagctggggagattcgcgatgataaggggagaagagccaacacagacgtacaataggctcaagacccttgtcaacaaaatccgaagctacataagtacaaggtggacggagcatgacgtcgtccgactcatgctcaggtcattcactgttattgatcctcatcttataaaccttattcgtgaaaaccccaggtacacaaagatgatgcccgaggaaatcctcagaaaattcgtaagtgggcgcatgatggtgaaagaagcacgatatgtggacgatgccttgaatggtccacttcccgtctacgagccacaacccgttgctctcaaagcaactagcagcagagagccactacctagcaaggtccaagagaagcatggaaagagggaaaagaagaaaaactacaggaaggccaaaggcgaggcgcacatcgggaaggaatgggactccgactgctcctcatctgactccgaagatgaaggactagctgccttggccttcaacaaatcttcgctcttccccaacaaacgccatacgtgccttatggataaggagaataagggattagatagaaccaaggtagacaaaataaatgaattaattgatgctcttaatgagaaggatagattgctagaaaaatgtaaagactttgatgttgatgcttgtaatgaacatgcctccattattgctaaattaaataatgaggttgcaagtcttaatgctcaacttaagacttgcatgaataattatgagaaacttaaatttgctagggatgcctacattgttggtagacacccctcaattaaggatggacttggttttcgaaaggaaaccaagaacttaacaagaccggtggtgcaccggactgtccgggcgggaggctccaacttgtggagattcctcacaaacaagaaaagactgctaaagaaaaggaccgtgatggatcctaagggcaaggggatggtgatcaacaacacggagaaggagtccctcctcaacgagcctaaggaggacaagcccactgactcaggctcgagtcacaagaagagggacgggaagaagaagaggcgcatcaagaagattatctactatgacaacgacgcctcctcttcttcactaagggatgacgacgacgactcctcgtccaaaaagaaaacggttaatcaaaactactcctttgattattcccgcattctgtacaattcaaatgctcatttactatcaattccacttggaaaacccccacactttgatggagaggattattctttttggagtcataaaatgtgtagtcatttattctctctccatcctagtatctgggagattgtagaaaatggaatgcactttgaaagtacttataaccctgtgtttatcaatgaacaaattaataagaatgcccaagccaccattgtcttgctagcttctctatgtagggatgaatacaacaaggataccctcaagatatcacatgagggaaatgatgccaccatgattacaaaaatgaaactggtggaaggcgagctggggagattcgcgatgataaggggagaagagccaacacagacgtacaataggctcaagacccttgtcaacaaaatccgaagctacagaagtacaaggtggacggagcatgacgtcgtccgactcatgctcaggtcattcactgttattgatcctcatcttataaaccttattcgtgaaaaccccaggtacacaaagatgatgcccgaggaaatcctcagaaaattcgtaagtgggcgcatgatggtgaaagaagcacgatatgtggacgatgccttgaatggtccacttcccgtctacgagccacaacccgttgctctcaaagcaactagcagcagagagccactacctagcaaggtagcacaagtggaggctgtcgggctcaatgaggatgagatggcgctcatcatcaagcgcttcaagaccgcactaaaaggacgcaaggagtaccccaacaagaacgagtcaaggggaacgctcctgcttcaaatgaggaaggccaaaggcgaggcgcacatcgggaaggaatgggactccgactgctcctcatctgactccgaagatgaaggactagctgccttggccttcaacaaatcttcgctcttccccaacaaacgccatacgtgccttatggataaggagaataagggattagatagaaccaaggtagacaaaataaatgaattaattgatgctcttaatgagaaggatagattgctagaaaa

SEQ ID NO: 182352 - DNA, 411 bp, Zea mays
  Clone ID: MRT4577_97886C.1
acccacgcgtcaaaaaaagacgagtgtcaagtgaacctgaaacttgcggtgtcactggctggtagcctgagtgtgagtgagtgatcgagctaactgatctccgatcctcgctagccaggataccgccataccacaagtcttcttcacaagtttatgagtgatagcaacatcatatcgatggcctctgccattgtgctcaagtcctcgttccatcccaccaactccgcatggggcgccaagacacatgtcgttgcgctcaagccactcactctcctaattcgattgcacgcttccccgtaactatggcttcgacctactgggcctctcagactcggatggcaccgggggcttcatctagcccaagtggatggcctacggagatgtgatcaacggccgccatgccatgctagg

SEQ ID NO: 182353 - DNA, 833 bp, Zea mays
  Clone ID: MRT4577_97887C.1
ttttgggggcccaataaaaaaaattttactttgcaaacccggggaagaaaaatttgaacccttaaaagggcccccccctttttttatgattattattttatgatttatattttttcttcttttttttttttttttttttttttttttttttttttttttttttttttttttttttttttttttttttttgcggcagtaaagtatataaaaattaaaatagaatagtaatggattctagtttccacaatcccgtccaatactattggtatatataattttagcgattacatgttttcaactaaaaacggtgctaactaaattcctaacaaaaggggagggggggcaccgtacggttttcattttggatcatacaagccgtcgaccaaatcggacgcgtgggaaacaaaaggaaaatttgcctttgggcaaccctgcaaaatccttgttgttgaaaaggaatttggtgcatgctatcgaccctttcatggccgacaaacgaaaccccaaagggcactagaagttgttaaaaactagggacaagtctggcggggcaacccccggagttttccctaccccatgctttttgcaacttggccacaaacaactccaaaaactggggggtggcgcaacatttggccagctttctcatgctgaacctttttttgacaaccttgaggcataaaatgggatgcttcaacgtcttgaaagtatcaataacaaataaaaaaacttcttcatgtggacggggtctcacaacaagcaaaggtcaaaatacaaaacgcatgataagaatcatctactatccctctacaaagctgaaactgggcaaaaac

SEQ ID NO: 182354 - DNA, 496 bp, Zea mays
  Clone ID: MRT4577_97888C.1
ccctaatcaaagactatatcaaggtattattaaattctgaaactcagggccccatggggggacaaaatttgttaaacctggttgaggggggtaccatcgcccctatcgaagtcttttccctgaagcttgggtaattaacttcccccctgttgggaggacatgttttggaattaagggatcaaggtaaaaaggatccggtaacgatagttagcgttgaaccaactactccaaaagcggtttcgtagcgcgagcatcgccacatgcgatagtcacggtcattttcctgctacgaggacaatctactcctcagcctcaaaaggggcctcctcatcgtactcgtcctcggaatcaaaaataaaagccttctggtactgctgatactcggaaactaagtcgttcatgttggactcagcctcagtaaattccatttaatccataccctcgccagtataccaatgcaaaaaagccttgcgcctgaacatggcagtaaactgat

SEQ ID NO: 182355 - DNA, 276 bp, Zea mays
  Clone ID: MRT4577_97889C.1
taccctcggagtcggccgggattccttcactggcagtcttgcatactcagaccacgtgcgcgccggccgacgccgccttagggaccacgcctcatcacagccgcttcagtgtaccacaccgcacgcagaacccaccgcgcgctacgaccaccaccgtcaccatggccgccgcgcgctacgacgtggagaagggcgggaggaataacggggatgggaagccttcgccgccgggggggggggacctgtacccgcagcgcgacggggagagggagtggg

SEQ ID NO: 182356 - DNA, 171 bp, Zea mays
  Clone ID: MRT4577_9788C.1
aaaaacacaccaacaaaaacaaactccaccttccacttccccaacttctactcctccacatcctcctctgaccttgccaccatcacatcaccgcctcaacaatccaatgtccccgatgaggcgctgaatgtttcgaaccaactgcctcgcataacatcaatagaacgggac

SEQ ID NO: 182357 - DNA, 457 bp, Zea mays
  Clone ID: MRT4577_97890C.1
gcggtgtgcactggctgctgctgatggtgatgggggccaccgtcaccacaccgtcgtgaccaaacttttgtcaccaagtgcttagcttggctgcaattccttgctccaataatttatttattcattttctattatcagaagcgatctgattaggcttccgccgctgtccgattaggcatggttaggttaggtacgtacgatctcgatcttgcgcacggtagcgtcgacccaccctccgctctcaaccgattcttattgccctttcaacagcacacgagctcaactaaagcagtgttgcatttgcttatgctcggtttcaatgtcgatattgtagttgatgtaattgaattgggttgaatatcaaatcagacatggtattgaaacgagatgtaattccaattctattgtttggatgtcactgaatttgagtttcgaattgtcatgtctaattccatgc

SEQ ID NO: 182358 - DNA, 231 bp, Zea mays
  Clone ID: MRT4577_97891C.1
cgcacgcgtgggcggacttcgtgtgctcacccgcgggcacatatcctagcactagcttaggcgggacagctttaaccgcagctaatctttatctggcaagcatatatatgggggccggaccggcattggcgggcgggtctgagccggatcccacattaactaacctggaagccaagagctgtgcacacagcctgcggcaaaactcagcatgagccgtgcctaaggtccaca

SEQ ID NO: 182359 - DNA, 407 bp, Zea mays
  Clone ID: MRT4577_97892C.1
ggccgacgtgcgcgaatgcgacaccgtcaacgtcccgttctatcgattctcttgtagcctaccagcatcgaatctctagcgtgtcaacacaaagtggccacatggatcactgcttcgtagtgttgccgagcgtccatatcgaccttgctttcagattctttgatgtgggccctgctaccttcttgacacaaccgcacctggggccggtcctacctcacggctgcgtcctgcgccggtcctctctttcggctgccgctcttgcttgcctctagacggcccagctttgccctatcctgggggggttctccctccaccgctcgttgtttgtcccctcttttctggggtaccctgtcttgcccctctttatcgccttgggcgcttgcccctttcttccgctggcttttttg

SEQ ID NO: 182360 - DNA, 202 bp, Zea mays
  Clone ID: MRT4577_97893C.1
gcttgacgccaatgccgcgtcgtagctctttttcctacgcccccacttttttttttttttctcccataaaaagagggggaagggaggagacttaacatcgatgtaaaattcccatgtagcagaatatgcgggggctgctattttaatctgatcgatatgggaatcttgagcaagtgccggaacctgtgctgcatactgagct

SEQ ID NO: 182361 - DNA, 380 bp, Zea mays
  unsure (1)..(380): unsure at all n locations
  Clone ID: MRT4577_97894C.1
aattcggcacgagggttcgcatcgccatctcgctcgcagggaggagaggggagtctctaaccctaaccctacccgcccctgtcgccatagccatggctgccggcggagagctctccccctcccccgtgccccccgcatcccccatcaagcattctcgctcacccgacgatgcccagcccgacgcatccccgaagcgtcgcaagcgccaccatcaccggggggggggcaccaccgtcggcaccgtcacgccgattccccggtacccgtggcagccgacgaagaggtagaggagggggagatactcgaagatgccaccgccgtctgtgccatggaggtcggtgctgngtccgccgtccgataggctgtgcttgccccggtgc

SEQ ID NO: 182362 - DNA, 149 bp, Zea mays
  Clone ID: MRT4577_97895C.1
tctttcctgtacttcaacacccttctctcttaggaaagactatttttctttattcgggtgcgactctcccttacaacatcccatttttcttccttctttcactcaatttatctttctataactactttatatacatcactattctcata

SEQ ID NO: 182363 - DNA, 137 bp, Zea mays
  unsure (1)..(137): unsure at all n locations
  Clone ID: MRT4577_97896C.1
atacgtacgtaatgccgctctacgtgctgctcaagatccgcctccactcgctacntctgctgcgaccgcatcaggcgactcatctacaagttcaaaggcgtgaaggacgtggtgctggagggcaatgccaaggacga

SEQ ID NO: 182364 - DNA, 202 bp, Zea mays
  Clone ID: MRT4577_97897C.1
gtcgtcagttcctctcagtcacagagcctgacgtcaagtgtgccttcccaggcgcatctcaacctaacccagacgaaaacctattcaggcgaggcgcctggggaaccttccgcctagacgctgtgatggaccacacgactgaggctcagattactgacctgatgactatcacgcacaacgtgcttaacgagcttatccgaca

SEQ ID NO: 182365 - DNA, 528 bp, Zea mays
  Clone ID: MRT4577_97898C.1
ctgcaggccgactctagaaaagagtttaaatctcaattcaaaattttgattaaattcacacaagcaaaaataatgctccaccatgcaatgcacgaaaaaatatttatttatgaaaatacccttttaaatgtataatccatataaaagttctccaatttaaataaatattatgagatgtttttatttaaaattagatttttgggtgttacacacgagttggaagaaggattttcttaaataccttgttgtgatatcctaatttgaatccactctgcttgagaacgccgctcacaaacaaggtagacaattagtcaaacatacaccaatacattacaatagctcacactttatttctaattaattagtacattctacgcgatagagtcagtcattcttacttctagtggtagtggctacctacagagataccttccaatggagatagatatacctatagagataccttccaatggagttagatatagacaggtgtctgattgtttcttgtcaaactagagaagattgaga

SEQ ID NO: 182366 - DNA, 510 bp, Zea mays
  Clone ID: MRT4577_97899C.1
gacgttataaatatgtaatattattatagcatctccacttattaaattcacacctttcttgtagttcctgtactttgaaattacctatatcatcaggagaactcactcagcaccttcatgcaatttttcactctatgatattctaatgacgatcctctgcagcttcgcaatgtatttcaagagtgttcgtattcagtcgggagtgtacaatgaccaataatctcttccaaacaagggaagaggaaccttttattcaactgcatgcaaaattcaaatgacttagttgtatgtcacattgtctagcgtaacaatccaattaggagtatcataataacgtttagaaattacttttgttacaaggctaatgtgaatccaaactatattgcttaaagacaggagtaatatgatgcaatgaatcattgaaaccaatttgtatattgcccttgcttaacactacaagacataattagtacgaaagaatagaattgaaggagaaatataactaaaaac

SEQ ID NO: 182367 - DNA, 365 bp, Zea mays
  Clone ID: MRT4577_9789C.1
ttttttttttttttttttttttttttttttttttttacattttgtttccagagcgagccataggggtgacacatataggctcccgccaaagggatgaaagacttggtagcaagacaagcttcccaaaaacgccccgcaaaaccgaaccaaagaaaagaaacggttttaagcttggggtaacgcccagggcttacgcccgggcctttcattggtgcatgtttttaaaccaaatgcttcaacggtgtggaactttgttgtacaggtttttaaacccggagccaagggcccttggaaaggggccaaaaaagggggggaatacagcacaggggaaaaacactgttggatgaaaaattcggggaatgacg

SEQ ID NO: 182368 - DNA, 313 bp, Zea mays
  Clone ID: MRT4577_978C.1
gccatcatggacgccgacctaaacaagaatgtgccatgggacctgccgatcaaggagaaaaagggcgacaaagagtgctacttgttctaccagaacgaccccaagttcccgacggagctgagggcgaaccgcgccaactaggacgggtactggaaggagacgggcgaggacaacgaggtgtacaacgccgcggaacgggtggcggtactgatcaccatgaagatgaacctcggcttgtacacgggcggggataccacaagtgacaagatcaactgaggcatgctcgaatacaggctgtaaggcagcggcaggc

SEQ ID NO: 182369 - DNA, 709 bp, Zea mays
  unsure (1)..(709): unsure at all n locations
  Clone ID: MRT4577_97900C.1
nagttgtttcaaaaagcggagnagaaaaaaaaaaagtttccccaaaaaaaaaaaaaaaaaaaaaattaagaacgggggcgtcacgctctaccgcagctcgcagcaggaacaaacgatactgatctagggctcgcggccatggggaggttgaaggttagggaagggggcgggccggggctgcggacggaaaacggtttcctcggcaggaaggggtgggagttcaacgccgaccccggcacgccggaggagcgcgccgagggggaaaggcttccccaggagttcacccgccaccgcttccaaaggaaggagtcccaggacctcctactgcgcatgcagattgaaagcctcttcgcaaaacccctcaacaaggagcagatggaggcaattatggagctggcaaatcaaggcaaggggaagaaaggaagcaggtccaggggcagcaaggtgtcgccactcaaagcccccatcatcgaggctgttccaaaaatttgagctgagcgccctgttcagctaccaggggttctagaactttttttatgtatcccaagttaactctcccttgctcgggccagggggcagagcaagatgtcctgaaggttcttttgcttcactgttggccgtcgcatggaagttggtggccctggaggtggttttcaaatcattggatcattggacctctgtatcttactattttcagtttgaaactttt

SEQ ID NO: 182370 - DNA, 561 bp, Zea mays
  Clone ID: MRT4577_97901C.1
atgagtgccctaccatggttgtgttatggcaaggagggatacacgagaatccattatgaggctgggacaccaaaggaaagaattatgggatatgacctagtttgcctcatgttaaattaaaacattacatatgctccctcagcaagaatgatggaagaaaagagcattcaaaaaattcttatccgcctccactctcaaatggagttggagaaagaagattaagcaaggcaaaaatctcagcagccctaggatgtgaatgatcccctgcatggaaggagtgcatctctccattaatatcaatggagctccaccctgttgccttgctaatgcccctctctctcatggacaccctgacaccagcaacatggctccacatcccggcagatgcatacaggtttgcaagctgcacataatgccctgcgttggaatgctccagctcaaaaatatgctgcgcagcgcactcagccaacgccatgtctgagcgcccatgcatcctgcaaccatgaagcaacgcaccccacacactcatttctggcttgatgggcatgtccattataaacc

SEQ ID NO: 182371 - DNA, 425 bp, Zea mays
  unsure (1)..(425): unsure at all n locations
  Clone ID: MRT4577_97902C.1
ggaagacagagacagataaaattcatgtggggatggggcactataaaaaaaccaattattttggagttgcactacttgaaaaagtagaagaactttgatcggatacatgaaaaggaaaaacgcacgcaaacgggtgggtggaaaaaaaatcctggacgaccggtaaaaaaaagggggggtcgtatccgttggtggagggggggaggatgtaataggggacaatgtggccgagcaagcccaaggggaggacgtngacgaggttgaagcccacggggtcgttggaattgagaagggccggaaactccttggggcgctcggggccggggtaaaagggggtttggccgttctgggcgggcacctgttttgcaacgttctcccggtggaagtgaaagaaaaaaaaacggcccaagaagagggaaacgccc

SEQ ID NO: 182372 - DNA, 697 bp, Zea mays
  Clone ID: MRT4577_97903C.1
gggggttttaaaagcccacagacaggtgctacgatagtgattattattgccaatatgttcgagtaggacgagtacggatatcgactcgacagcactctcagcgcacgtgtatacgcggtcataactcgctaacaaatcgactacaaagtcgtgtagccaggtagtacagatatactgtgctattgtcgatgacttcccataagccagcctaacaacagccgtacaatgccggccattacgtcctactatgcttcatctcccccagctgactcgttgctggtggtggctgtgtctgcgtcattggcaacagccacttctatagtgccttggcctgcgttatctcgcctattcttggcattgtcgctaatcccgctgtcaactgtgctactttattccaccgccgcgacaactaattgggaccaaagccactcgatcacggcttctacttgcgtggcaccagtttaatagtcgtacacaatataaccgccggggtcgacgtaatcttttacaacaaacccagctgattagtactcgtactactaataaaccgacatggtcatacccgcgtagataccagcaatctcaatggtttatgaaccgtgtgtataattgcttgctgcccataccttttgctttgtcccgttgcgacttggagcaccagacttttgaggctactggctgaactagaactgcggga

SEQ ID NO: 182373 - DNA, 280 bp, Zea mays
  Clone ID: MRT4577_97904C.1
aaagaacacacaacaactcgggttattaaatttttctttgggccctttgtgcccatacctattatccccttttgttagaactgtgtaacacaggggtctaaacttggccaaatgtccccactgccttgcacaggaaacatacattacttcacgatgggcacccgaaccaagaacagtcttgcttacgactggcccctaaaaaaaatatgcgggcggggcgggccatttttactggtggggaaatggaaaccccccctttccttatttagccttacccggt

SEQ ID NO: 182374 - DNA, 2028 bp, Zea mays
  Clone ID: MRT4577_97905C.1
ccggccggggcaggaggtcgacccgcctccgtgaccgtgtctccgtccggcccccgccaccaccgcactcccatccagatgggagtgcgcaagaggagctttcggcattccggtctcgctcgaccagccggatccccgtgagagtccccacccacaccccgagggcggcgtcgggtcgtcggggacagctgatttcacacgacgagccggcgagccggccggcatttcgtcgtcggatggcgccggcctcctcctcgtccgccggcgtcgcgtgcctcgtcctgctcctgctcctgctcctcgccggcgcctccgcggcgcacggctcgttccaggctaggcgtgctctgtcagatgaccatgggagcggtatagtggcgcgatggcggaggttgctcgccgacgctgcgactccagcgaacaactctcttgtgctggctgcggcgaggactcaccggagcgaccccttcgccaaccttaccgcgtacagcggcggctggaacattagcgacgagcactactgggcttccgtgacgtacaccgcggtgcccctcttcctcatggccgtgctgtggttcgtcggcttcggcatcgtgatgctcgtcatctcctgctgctgctgctgcttctgccggggcaagaacgacgcctactcgccggggtgctacctcagctccctggtgctcctcatcatcttcaccatggccacaatcgccgggtgcctgatcttgcacggcggcagcgacctgttccacgggagcaccatcaggaccgtcgagtacgtcttcgggcagggcaacctgacggtggaccacctgaggaacttcgccgacagcttggcggcggcgaaggacatcacgatcaaccagatcttcctcccggccgatgtccagcagaagatcgacgtcgtcgaggagaagctcaactcctccgcgggcgtcttctccactcgcctgcaggagaactccaggaagatcaagggagtgctgaaccacatggagcacgaactgtttgctgttgcagctgttatggctggcctatcaatactcggattcttgttctccgtactggggttgcggtttcttgtctccctactggtgatcgctgcttggatccttctcaccaataccatcatcagttctggtcttttcctcctcttgcacaacgtggtggcggacacgtgcgtcgcgatgggcgattgggtggcgcacccgcaggcgcacacggcgctggacgacatcctcccgtgcgtggacgtggccacggcgaacgagtcgctgtaccggagccaggaggtgacgtcgcagctggtggcgctggtgaacaacgtcgtcgtcaacatctctaaccggaacttcccgccggggctccgcccgctctacttcaaccagtcggggccgctcatgcccgtgctctgcaacccgttcaacccggacatgagcccccgccggtgcgcgcccggcgaggtcgacttcggcagcgcggcgcgggagtggaagcggttcgagtgccagaccacggggccgccggggtcggagctgtgcgccacgccggggcgcgtgacgcccgcggcgtacggccagatgacggcggcgacgagcgtcagcaaggggctctacgagttcagcccgttcctggtgcagctgcaggactgctccttcgtgcgagagacattcacgtccatcaccaactataactgccccggcctcgagcagtacagccgggacgtctacgtcggcctggtcgtcatctctgccggcgtcatgctgtccgtcgtcttctggatggttcacacacggcaccgacggcggcgcgccatgcgcaagcagctgtgactgagatcttgatggcgcgccaggccacgccacgattgagctttagctgttacaaccgtggtccacgcatccgtttcaaatttgtacaatactcactcggttctaaaattaatcgttgtcgtttaatttctaattctgaaggagtcaaatattttcagtttaattaaatatatacatattaatatcagaaaaa

SEQ ID NO: 182375 - DNA, 1780 bp, Zea mays
  Clone ID: MRT4577_97906C.1
ccggccgggatctccgtgccgcgtgattatattgttgcctcaagctgggtccgcccgtcttcttcttcctcctcagctaatttccattattccgttccaatttccaaccgcacccaggagcaagtctgggttcgcgccacagttggagtttcgacgggtctcggtcgggggtggtgccttcgtcgcggccgttcgacctacaccatggaatcgccgcagcagcaagccccaccgccgagccagggagctagctctggaagctgcgacgctcctctgcagctagcagctcgatatggtgccaccgtaccacgtacatcctcgccacctgcctcagtcactcggccggaagtcaacaatagaatggagctaaagagcagcaacagtgagacactatgtgacagcttgacgctaaatacggtatccgtgatgctaaccgtcagcttcttcagagaagacggggacggtggtactgacgtgtttcttggcttctcatgcgtgctcggtttcatcattcgcaagtatctgtgggtgctgcgctccgagagcgcccggttcacgggtctggatatctacacgaacacggtcgttctagtggtcaccgcatatgcaatgctgctcgcgaacagtttgcagtacatcatccttgctcccttcccgatcagtgtggctgccttcatcgcttacctgtacaaggaaagactggagcaccatggcagtagtggagctgatcagcaggataataaggacggatgcaaacctggggacggcaatggcaagaaagccggggagctcgaaatggtggtagcgccgtactctatgctgctgatcagtgcaatagtgatgccgtacgaagatagccctgtcctcctgtctcacttcctgctcttctcatgttgcgcgctcgggacgctggcgctgctctactccagactggcggaagcaagtccggccttgagaccagcgttggagtgcatccagatggcctacatggtgacgctgttcataacggtgcacacggtggccgcagaatggctgggagacgtcatggcgctggtcaccatgccggagttgatcgcagggcttgtctggttctgtaatcttctccacggcgacactgcttgtaatactgcagcagtagcccacattctcagatcagatgaaggttccagcagtagttcggatgcaactcatcatcaagtcccaacaaattcggaaacaagacaagggttcgtcttcgatgggtccatgttcactcccctcggagctgttttggcagggttagtaacatccactttcgcacatgacgaagaactcctggccagctggaacaccaaggcgaccgtcgcctgcagcattgcagggtgtttgccatatctcagcatatggatggtgtcgaggtggcccgggcgcatacctagctcagacaaggcgactcggctgctcaagtttgctgcaaatgtgtgcttgactggagcttttctgatgctgtttgccttgcttgatgaaaaggcactggcctatcgtctctttggtttggatgagattattgatcctagtcaactcaaatatcttccggctgttcacttcagtacagcggtagccctgtatttctttcggaagcatcttgctggtgcgttggcaaatttaggggaggagctagggaatctcctatccctccttattgctgcttctccaacagagaagcaagggagaaagagaaggaggaagaagaagacagcaagtacagatgtgagaagacgtcgataatgaagagcagcta

SEQ ID NO: 182376 - DNA, 121 bp, Zea mays
  Clone ID: MRT4577_97907C.1
cttgtgctcatgtttgcttagggcctcctgacaattcaaatgatcgggcttgtccaagcttgaccatgtaacatacattgtactctgcgtgcttgcgtagtgcatttgcgtcgcgaatgca

SEQ ID NO: 182377 - DNA, 159 bp, Zea mays
  Clone ID: MRT4577_97908C.1
tttacgcttcttctcactcgacctctttcgttttaacaccttcaaattttcctctcgcgtagatgattatcaggatgggtgaactctatccgttcagcctcgacaatcagcactacatattatatcctactgcacatactgtctccagcaacattgatg

SEQ ID NO: 182378 - DNA, 2808 bp, Zea mays
  Clone ID: MRT4577_97909C.1
ctcctcttgtcaccgtctctcctctaaatgctctctggttcggcctgctcgcggcagttggcgtactcctctcctcgccgaattggagtgttctcgggagctggcgtcttcctactgcggctgcttccggtttcctgttttctctgattttggatccatggacttgacgcccagtttcaattcgctagactccaacggcattcccaactcccccgatgtagatccggcattgggcgaaacaggtggcagtgagggacttcagaagattgatggggaatcacaactggactgggattcgattatagtatcagatgtattggatgatgaaggcagagtacaagtacctaccgaaaatgagatatattttaatcttggactcaataaaggggatgaggctgccaataataggttttctggcagtggtacaaattgtcatgcacagggaagtttggatacggacaacgaagatcaccatgctgatcagccttgtcaagactacattccagatgaaaagagggtggtgtataataggatgaatccttctatgcagccaggttgtttgtttcctaacatgaaagaatttaggattgctatgcgacagtatgcaataaaacatgagttcgagcttggaattgaagttacttcgacaacaagatacgttggatactgtaagggtggtgattgcccgtggaggatctatgcacgtgaagagaagaaaggattgcctactattgtggtagctgtactagatgatgttcacacttgcacatctagtggaaggaggaggactactacgccaacttgtggttgggtcgcattccacgctaaacccttgctcatgaagaaaccacaaatgggtgctaaagagttacaacaaacactacagacaactcataatgtcactattgggtatgatacagtttggaaagggaaagagaaggctttgagagagctgtatggatcttgggaggaaagcttccagctcttgtactcttggaaggaggctgtaattgcagtcatgcccgatagtgtgattgagattgatgttattttggaagatgggaagtactattttagtcgattcttttgtgcctttggtccatgcatatctgggttccgagatgggtgcagaccttatcttagtgtggactcgacagcattgaacggtagatggaacggacatcttgcatctgctactggtgtagatggccacaattggatgtacccagtatgttttggttttttccaagctgagacagttgacaattggatttggttcatgaaacagctcaaaaaggttgtgggtgacatgacactacttgctatatgttcagatgcacaaaaagggctgatgcatgctgtcaatgaggtatttccgtatgctgagagaagagaatgcttcagacacttaatgggtaactatgtgaaacaccatgctgggtcagagcacatgtatccagcagcaagggcctataggagagatgtatttgaacaccatgttagcaaggtcagaaatgttcacaagattgctgagtacttagaccaacaccacaaattcctttggtacaggagtggtttcaacaaagatatcaaatgtgattacatcacaaataacatggctgaggtttataataactgggttaaagaccacaaagatcttcctgtgtgtgatttggctgagaaaattagggagatgacaatggaactgtttcatcgtaggcgaaggattggtcataagcttcatggtattattttgccatctgtcttagcgatactaaaggctcggactagagggttgggccacttgtccattgtaaaatgtgacaactacatggcagaggtacgagacagcactaattgtatgactaaacatgtcgtgaatgcagaactgaaacagtgttcttgtgaggaatggcaacacactgggaaaccgtgtcaacatggtctagccctaataatagcccaagattccagagatgtaggtatggaaaattttgttgacgattattactctactgaaagattcaagatagcatattctagaagggtggaaccaattggtgatcgttcgttttggccatcagttgatttcgccagtggagtgtttgcaccaatagctagaagaggtcttggaagacaacgaaaaaatagaattaaaagctgtctcgagggtgggagtgctagaaataaaagtaccaacgaaaatgagaaaacgaaaaagcgactcaaaaggcaatacacttgtcctaattgtggtgaattgggacaccgccaatctagctacaagtgccctttgaatgggacaaaaaaaaggaaaaggaaaccacggataaacaccacaaaaaattggatccctaaagagcttcggacttcttcacagaatgtaccagtacagccagacgtagcagaggaagtcactgaacaagagctagaagatccacagccagagacagaacaattgggtcttgcactcttccagccgttgggtgcacaaatcactgaacaagaggccgatgaaccagccgagcaagctccacctgcttctccaccaccgacaaggaaatggctagtgaagaaaatcacccccaagaaaagactgaggattagtgctcagcagaagcagtattaactgctaagaacaaccactgtgctcagaacaaccactgtatttgttgtaagactgttatgtaggactgctacgaacaaacactatgaaacctccacctgtattggttgtaagactgctaagaacaagcccagtgtatttgttgtaagactgctcagttttagttgccagttcgttgcttc

SEQ ID NO: 182379 - DNA, 290 bp, Zea mays
  unsure (1)..(290): unsure at all n locations
  Clone ID: MRT4577_9790C.1
ggcccacacaaggacggcggcggcaagaagcagacgcagcagcggccaaacncagcagcgggggngcagcacgncgacgccgagagggccaagcnccacggggagggganggcangcgccnacgacgacgngcaggncagggggnccangcncgaccaggcaagganccgggancncagngccagcncgngaccaagcnncgngcancaagcnncgccnagagcagncgaaaaggacaagnacanagcaaaananccncncnccnccncaccaannaaacgnncccaaac

SEQ ID NO: 182380 - DNA, 215 bp, Zea mays
  Clone ID: MRT4577_97910C.1
gacaagccgccagaggggggttaagcctttcttacctaggccccaggcactgggggggcccctggaacttggcatccctactgggaaccacccatcatggcgggggttgcttagcccgctaagtgggcaacggggtggatctaccctacactaagctggcgtttcttcgcgccctgttggggctccttactgcgtatggcgtgttcacgcttgac

SEQ ID NO: 182381 - DNA, 792 bp, Zea mays
  Clone ID: MRT4577_97911C.1
cgttgggtgttgcggtacggtctctccttcgttcttggcgctgctccctttcctctttccgcctgtcctcttctctgctcggttgacaggcatatgagcattgccttgaggatgattctcagctgcgtcacgtgcgttggtcccgcttctccctcaccctcgttccctatgccaccttgaaagcacatatgacaggcatatgagcattgccttgaggatgattctcagtttcgtgaagagctttggtcccacaatttcttcagccttgttggctataccacctgttggggtagaccttgaagcagagcagaggatggagtggtgcaatctatgtttccaagaactgaagaatgtgagcgtcagcctcaagtttctgacaaggcggcaaggcgaggttgggagattagctcaggagctcagcctttttcttcaggatctctttcaattgtcaagcgtgtaaacagtgaccataccacgacgtgcaaaatattcacgcactcaatttcctttggtcataacagatatagcgacatatagtaggatttacctctagaaagaaagaaatatacagaaactatagggtgaagcttacagggtattttctccgagctagtttgggagcatcatttttttcatagaattcctatttttctaaggtctcgtttgtttcctttcattttaaggaattagaatcttactaatataatatgctattttttttagaaaaaaacatttcactacttttcaaagttatcatataagcttatcttaaattcaaaaaaaaaaaaaaaa

SEQ ID NO: 182382 - DNA, 299 bp, Zea mays
  Clone ID: MRT4577_97912C.1
catgtagggccgacattaccagcgccgaccccgcgcttaggtgcagcaaccgccgacaccaagtggctaggcacggttaaggatcaggcatgcagatcgacatgcaaggcaagctagacttagggggtttgtttcctttatttgtagatcgacatgcaaggcaagctagaatcaagggggtttgtttcctttattagcatgctatgtgcctatatattgaatgtaataggcactctttggaattaagaaagaactattcatctctaaaaaaaaaaaaaaaaaaaaaaaaaaaaaaaaaa

SEQ ID NO: 182383 - DNA, 525 bp, Zea mays
  Clone ID: MRT4577_97914C.1
gttaatttgtggtgtgtttctgcattctttgccctcagtatctctgttaccattaaagctgaacaaattaatgccaccaatccatgtcgtcagagttatgttgtccattcttgctaaaagacaaggaaacaataattatataatcaatcggatactgttgttttacatttgtacacctgcagctacggcacctcttccggtgcaattcatttttatgaaccatatctatatctgagactaaaatctggtttggttgcttaacttacgtttggcaatggtacaagttttagcttttaaataaacatatccgtagcagcacgcactgggctcaattcactacaaacagttctatattttgtccattgaatggtactcaaagcttgaaactttgaggaaactaatgctagggaagggaaccccaggacctaggactctaatttcttgtgaaaaaagtcccacaatctacatttcgcaatcctaattccgtttaacctacaagaagcccccgtgcccccgtcctacttt

SEQ ID NO: 182384 - DNA, 367 bp, Zea mays
  Clone ID: MRT4577_97915C.1
cccacgcgtccgcctcggaagactatagacaaatattttagtccatattttaatctcgtcatttgacaatttaggaactaaacgagactaaaataaaaagaataatatttagtccctcaaaaccaaactggccttaggaggtcctaggggtagtgcacagtcattagattcagattgagagtagaatcatataaagccagcaacccacaaccatgcttattttattctactatgttctggaggcaagggaatagaccacgcgcttgcactggttttattccatgggtttgtttgtgtctggcctgtgagtgacctgagaatgacagcatttggttggtttgtttgtcctagattcaaatcagctgtt

SEQ ID NO: 182385 - DNA, 442 bp, Zea mays
  Clone ID: MRT4577_97916C.1
tggttggaacctttgggctgatttatgtgcttgtttatgtgcttgtttatgtgcttgtatttgcacagggtccgtgcccgatgcaacgggctgcgcgttacatggaatactgccctcggacaaataggttgaagaaaggcttcgggatactaattcaggacggcctccagagttagcggcctgcggcgatcattttcctcttacgagactaccggtcagggaatgatcatttcctcctaaggatgagtagaaggagaagtctgttggccttcacaatacgccggggccaaatcatcatattctatggcctcttaaaaatactgacactctattaaatcatctattcgcgtctaatatcgatgatgttcatgttagctaagaagccaatgggttcgatgggaagtttaccggcttcttcacgggaaacttacggactcatacg

SEQ ID NO: 182386 - DNA, 257 bp, Zea mays
  Clone ID: MRT4577_97917C.1
ccaaatctacattgtctacccgctcaaccaataacgagggtaggtggcactaaaatccttatatatctcccaaaatccaaaccaaggcaacacaatgtgcttactactacattgggaagaaattcaatttctgaaagccccaaaccttttttaaacttttaacccacgctttttcttctttcacaagccattactaacttccttccctatgatatcacatattccttcctgtcaattttcaaaactccattaccctt

SEQ ID NO: 182387 - DNA, 274 bp, Zea mays
  unsure (1)..(274): unsure at all n locations
  Clone ID: MRT4577_97918C.1
gacccacgcggccggaagaaaccgacgaggannccccgagnaacggcgagcgaaccgggagcagcccancnagagaagggggcggccncaccgcccgacaagaanacaggagaggcgaccacagcgacagaccgggcccaagagcacgggaaagggacgccagggagggggagagccccagccggcccggacccngacgaaccacgaggcgccagcaaccaaccggggcgaccgggaacgcaccccaaaaacagcgagnaacacccggcaaggc

SEQ ID NO: 182388 - DNA, 698 bp, Zea mays
  unsure (1)..(698): unsure at all n locations
  Clone ID: MRT4577_9791C.1
ctggccggcagcatcatgtgttacacatttgacacttggctaactatatgctcacatcttttgcatggacatggtgcttatctccaccagcgattcctgttctgtctatgtttctcacagaacttctgacagaagatttgccacgtctctttgtgcggcccaaaaagattgtccttgattttcaaaaggggagagctatgggacctgtttcaggaagtgttgcaagtgatataattcaaaatgttgcaactgacctgatccaagaggggaataaggactttgttggagagctatcagtgacactagttgatgctagaaagcttagctttgtcttgtttggcaagacagatccttatgttgtcatgattattgatgatcaagtaataaagagcaagaagaacagtcaaacaactgtgattggactaccgggagaaccaatttggaatcaagtaaagcttcaactctctgaacacgtgtgttttctgaagacatatttcatgcacgatatcatgcttatagatacaacatcaaacaggatttccatatgcttgtcgcanatcctcgcaaacagaagttgaccattcaagtgaaggattcaattggtctaactgacatcactattggcaccggagaggtggagctagggtcacttaaagatacagtacctacggacanaatcgtgactctatatggaggat

SEQ ID NO: 182389 - DNA, 296 bp, Zea mays
  Clone ID: MRT4577_97920C.1
gggttgtgtttttgttagtggttttatgtttttttttttttttatgttgttgatacaaatatttgttgtgtttgtatctggttttggttttctttttttttttcgtgtatataaatggaacgaaaacgttgtggaataaccaaaccaacgaactagagccgtcttagaaatggcaattcaacaccctaatggccaatgctcccccccacggggcggggatataattgaaaaaaggtggaggaccttataaaacccaccagggaccgaaaccagcgcagaaaaaatggacaccaatt

SEQ ID NO: 182390 - DNA, 1479 bp, Zea mays
  unsure (1)..(1479): unsure at all n locations
  Clone ID: MRT4577_97921C.1
tgggacctcgagccggcgggcgggctgttctgccaccgctgacgcctccctctccgcgactgatgtcattgcctccgtctcctccgccccatccgcgccccttccatcctctccacgacgggcgcggacgcgctccctctcctctgccccacctcgcgactccatccccttccaatctgagcatcttcggcggccgcgaaatcctcctccagggaatcgtggcctcctcgcatcctcctccacctcgcccgccgcggccgattcccaccgccaccacgccgcgcacgcccccgtcccccgatcccatgcccgtctcttctccgtccccatcccccacgtttatcgcgctcctcgcccctcctaacgtcgtcctttcggtctagagcgacaaccgatgcacggctccgggctcaggccacgccacacccacgcccatgctgcgagggctccatggaaggccatccccgcgatcttctgtccatggagagcacggcgccggccttccgaaatctccgcccccacccccgcgaccgcgcgatccactcccccacgcccgatctgctctccaacatacgccatccgcgtgggcgaggcaccaaccctcaaccttctcggtgatgtcccaggaagagtacagccaggtgacggatggaaagttctatgtgatccgcttgctcttcaccctcgccgcggccatcagcgcggccttgctcctcgtcgcctcactccgccgccgtgcgccgcctcccgggcttcccgccaaactcgtcccctcctcccacatggcaggacacaaccggagtttcgtgctgtggctgcacgacctcggcgactcaggcccggccaacgagtccatccgcaacctcttctccgccccggagttccggctcgccaagtggtcgttcccctccgctccccgcgcccccgtatcatgcaacaatggttttgtcatgctgtcgtggttcgatatccacgagcttcccatgagcgctgtgagatcactccatagcatcagcaatcaaataaaccaaggcactggaattttgatgtagctgcaattttgaacgagtagggctctccgcaagatgagactggggttctcaaggctgtggaaaaggtgcacgccatgatagacagggaagtagccgatggcatccaccctgagaacatatttgtttgtggattcagtcaaggaggtgctctgacattagctagcattttgctttatctgaagaagttaggtggaggagcagtgttcagtgggtgggtgcctttcagttcatcagtcactgagaggatttcacctgaaagcgaggaaggtaatcaatattttcatccatttgtatcttctttatagnttatattaatctgcaatcataagggctaataattatagatatctatagggtagggtaaatttgctgaaatgacagactagatctttggtacattaccgtcaccttntgtctgaactaactc

SEQ ID NO: 182391 - DNA, 737 bp, Zea mays
  Clone ID: MRT4577_97922C.1
ccggccgggtcggcccttccatgagtagcctgatccgcttgctcttcaccctcgccgcggccatcggcgcggcctcgctcctcgtcgcctcactccgccgccgcgcgccgcctcccgggcttcccgccaagctcgtcccctcctcccacatggcaggacgcaaccggagtttcgtgctgtggctgcacggcctcggcgactcaggcccggccaacgagcccatccgcaacctcttctccgccccggagttccggctcgccaagtggtcgttcccctccgctccccgcgcccccgtatcatgcaacaatggttttgtcatgccgtcgtggttcgatatccacgagcttcccatgagcgctggctctccgcaagatgagactggggttctcaaggctgtggaaaaggtgcacgccatgatagacagggaagtagccgatggcatccaccctgagaacatatttgtttgtggattcagtcaaggaggtgctctgacattagctagtgttttgctttatccgaagaagttaggtggaggagcagtgttcagtgggtgggtgcctttcagttcatcagtcactgagaggatttcacctgaagcgaggaagctggccaggctggtccaccgtttttgcaaagcgcgggtgttaactgtgaattcaaggcatatccagatctgggccattcgctttcccaagaagagctactttatctggagtcggggatcaaaagtcgtctaa

SEQ ID NO: 182392 - DNA, 2293 bp, Zea mays
  Clone ID: MRT4577_97923C.1
gttctgcaaccgctgacgcctccctcttctctccgcgactgacgccttcctctccgcgactgatgccattgcctccgtctcctccgccccatccgcgccccttccatcctctccgcgacgggcgcggacgcgctccctctcctctgccccacctcgcgactccatccgcgccgccatcaacggacgcctccgccccatgcccccatccgagccccttccaatccgagcatcttcggcggccgcgaaatcctcctccagggaatcgtcgcctcctcccatcctcctccacctcgcccgccgcggccgattcccaccgccaccacgccacgcacgcccccgtcccccgatcccatgcccgtctcttctccgtccccatcccccgcgtctatcacgctcctcgcccctcctaacgtcgtcctttccgtctagcgcgacaaccgatgcacggctccgggcttaggccacgccacacccacgcccatgctgcgagggctccatggaaggccgtccccgcgatctgctgtccatggagagcacggcgccggccttccgaaatctccgcccccacccccgcgaccgcgcgatccactcccccacgcccgatctgctctccaacatacgccatccgcgtgggcgaggcaccaaccctcaaccttctcggtgatgtcccaggaagagtacagccaggtacgccggtctgattttatgtattcaccgcgccacgcccgccgctcggtcctcgccgcgacagacgcctaccctcacctacacgatgctcactcctccacacatcgcaaagccggaggtccgcgccccctccgtgctgcgaccccccttgtgtgcccatgatgctggaagggaagtcctaccttgtgccgcgctccctgctgagctccaagacagagacgcagtgggcgtacctcgcccacgaggtccacggcggcaagcgcctggcgccggaagactgcgaggtcgaagacctggacgaagctgacggcggcagcaagtgcagcaagccgccgtctccacagccgcacacaccggacatctccgaggctcgtggctccagccgccatgcctccggttgcggagagcagcagggcactgggagcaaccccatgaattcaatcggtgacggatggaaagttctatgtgatccgcttgctcttcaccctcgccgcggccatcggcgcggcctcgctcctcgtcgcctcactccgccgccgcgcgccgcctcccgggcttcccgccaagctcgtcccctcctcccacatggcaggacgcaaccggagtttcgtgctgtggctgcacggcctcggcgactcaggcccggccaacgagcccatccgcaacctcttctccgccccggagttccggctcgccaagtggtcgttcccctccgctccccgcgcccccgtatcatgcaacaatggttttgtcatgccgtcgtggttcgatatccacgagcttcccatgagcgctggctctccgcaagatgagactggggttctcaaggctgtggaaaaggtgcacgccatgatagacagggaagtagccgatggcatccaccctgagaacatatttgtttgtggattcagtcaaggaggtgctctgacattagctagcgttttgctttatccgaagaagttaggtggaggagcagtgttcagtgggtgggtgcctttcagttcatcagtcactgagaggatttcacctgaagcgaggaagaccccgtttctttggtcacatggaatggctgacaaagtagtattgtttgaagctggccaggctggtccaccgtttttgcaaagcgctggtgttaactgtgaattcaaggcatatccagatctgggccattcgctttcccaagaagagctactttatcttgagtcgtggatcaagagtcgtctaaatgcctctcaagagaaggacggttaactgattccatcatgcttaagtggcatttatttagtatttttattatacgatacacagatcaactactggtcctggaatttgttattggaatttccgattggttatcgttgtcgggtgaataagggcacatagaaccgggatcttttgctggccatggatgttctgaatgcacttgtaacggccctggtatctgacactctcctacaatacaagggctgcagctctagcttgaattgcctggtcaaaaaaaataaaaaaaaactcgagactagttcctcgtgcgtctttgccatggattagcatgttcgtttgaaagatcgagatggaaaggaacaccagttttcccggctgcccc

SEQ ID NO: 182393 - DNA, 362 bp, Zea mays
  Clone ID: MRT4577_97924C.1
gccccacgcgtccgggaaaatggtcaccacagtcacggatagggggaatagagtgggtatagcagtttacagaaagccaacagacaacagctgctacgaagcaagatctgaaacaaaccctccactctgtggagagtacgacgatcctgatgctgcctggaacatatcgttgggggcttgtatgcataagttgcctgtagatgctaccggtcgtggttcacagtggcctgagttatggccattgggactggagagaccaccttattgggtgagagggttcgggggccggcgccatcgccgccggcgccttcgtactcttctagaagcacgaggggaagaaggaggccgtgcatgcgcacagg

SEQ ID NO: 182394 - DNA, 495 bp, Zea mays
  Clone ID: MRT4577_97925C.1
tttttttttttttttttttttttttttttttttttttttttgtttttttttttttttttttttttttttttttttttttttgggaaaaaaaacaacccgggtcccaaaaggggcttgacttaaggggaaccgttccaatcaaaacaccgaatttaacctttcccaacaacaagttttttaagggggggttcaaactttaaaccggccggggggggggttttaaagggggagggggcctttaaagggcccttaggaactcctcacccccggaaaaagggaaccgccccccttcctttttgtttgcaacggggaccgggggggctctggccaaaaaaagaaacctttttgggggcccccccccccctttgtccgggaaaacgaactcgggggcaccccccttggggttcccggaccccggggtacaccccggaaatccgggccggtacctcggggggaccccactttccctaaaggggggtcgtttaaagcgtgggg

SEQ ID NO: 182395 - DNA, 341 bp, Zea mays
  Clone ID: MRT4577_97926C.1
gcacgcctgcagggagccgggactgagtatattgctgggtcgacgggctttcttttcggtggccgcccttgcttttttggtttgacctaatggcgcctttggtggtggattgcaaaggccgcggtggtgacagaactactgtttaagcaccggacgacgcgacgggagagggccagctggaggcgccattcgataacccggacctgcaggagctaaacggatcatatgggtgtggggcgaccgccgatcaagacgccgtggcggttcggttgcaccaggaattcgactcccgtgacggagccgtctaagtgctggcgattcacggccactaatgtgactac

SEQ ID NO: 182396 - DNA, 2009 bp, Zea mays
  Clone ID: MRT4577_97927C.1
agcaacttcaagaagctcaacgtggcagaacattcagatcgcgcatttcaagaagagcctcgtcctcgcctaactactgctactgctaggatccatgccattgccatgtcgtcttcacatccatatccatgcttacacgcgggggggggggcgttatttcttcattgggtacctcgagcccggccgggagcctcactctcgcgccggctcaaggtacattgcgtgtcctagccaagacacgcagctcatctcagcctcacacgcacagcaagagcgaggcgtgattcgccatgggcggcctcactatggaccaggctttcgtgcaggcccccgagcaccgccccaagcccatcgtcaccgaggccaccggcatccctctcatcgacctctcgcctctgtccgccagcggcggcgccgtggacgcgctggccgccgaggtgggcgcggcgagccgggactggggcttcttcgtggtcgtgggccacggcgtgcccgcagagaccgtggcgcgcgcgacggaggcgcagcgcgcgttcttcgcgctgccggcagagcggaaggccgccgtgcggaggaacgaggcggagccgctcgggtactacgagtcggagcacaccaagaacgtgagggactggaaggaggtgtacgacctcgtgccgcgcgagccgccgccgccggcagccgtggccgacggcgagctcgtgttcgagaacaagtggccccaggatctgccgggcttcagagaggcgctggaggagtacgcgaaagcgatggaagagctggcgttcaagctgctggagctgatcgcccggagcctgaagctgaggcccgaccggctgcacggcttcttcaaggaccagacgaccttcatccggctgaaccactaccctccttgcccgagccccgacctggccctcggcgtgggacggcacaaggacgccggcgccctgaccatcctgtaccaggacgacgtcggcgggctcgacgtccggcggcgctccgacggcgagtgggtccgcgtcaggcccgtgcccgactctttcatcatcaacgtcggcgacctcatccaggtgtggagcaacgacaggtacgagagcgcggagcaccgggtgtcagtgaactcggcgagagagaggttctccatgccctacttcttcaacccggcgacctacaccatggtggagccggtggaggagctggtgagcgaggacgatccgcccaggtacgacgcctacaactggggcgacttcttcagcaccaggaagaacagcagaacagcaacttcaagaagctcaacgtggagaacattcagatcgcgcatttcaagaagagcctcgtcctcgcctaactacgtactgctagtactggcctactgctaggatccataccattgccatgtcgtcttcagattcagagcacgccatgtcgtcgctagcttcgtggtagaacaaataatgatgtgcgtgctgtgtgtaagcatggatatggatgtgaatatgtaatatgatgagcactcctactttggtagttgtttgggaataacaaacttgtgttggtctggttaaaaaaaacaaaaaaaaaaaaaaaaaaaaaaaaaaaatgtacctgcccgggcggccgccccgcggagccggtggaggagctggtgagcgaggacgatctgcccaggtacgacgcctacaactggggcgacttcttcagcaccaggaagaacagcaacttcaagaagctcaacgtggagaacattcagatcgcgcatttcaagaagagcctcgtcctcgcctaactacgtactgctagtactggcctactgctaggatccataccattgccatgtcgtcttcagattcagagcacgccatgtcgtcgctagcttcgtggtagaacaaataatgatgtgcgtgctgtgtgtaagcatggatgtgaatatgtgatatgatgagcactcctactttggtagtatgtctgggaataacaagttcacaattatcaaaagttgacaatttccc

SEQ ID NO: 182397 - DNA, 488 bp, Zea mays
  Clone ID: MRT4577_97928C.1
ggacaaaatcccccttttataaggggcccgtcccaaaatttttgggttaaactaaacttttgccttttttcgggaaaggggcctttttcaccatgctatttaaggggatacacggggtccttctgttttccccccaaatttttttttttttcccaaacaaacaaaattttgttttgccaggttacaagttggggggggatgggtcccatccccccggcttataaaaaatgttccccgggacctggttgatgctccggtagatattaatgcccccttcttcaaggttacgtcccaaatctctgggcttggtccccccccagggagtttggattaaacaggggtgggagcatttttcccagatgccttcgaggtgcaatttcttaaataccctttgggaggggtcccgatccccaaaaattacgggcccgccaatcctattgggttttttggcaggccttgggttttttttagggctaattttaacccca

SEQ ID NO: 182398 - DNA, 123 bp, Zea mays
  Clone ID: MRT4577_97929C.1
aatcaaggttccttcaaaagcaagaagaggttctggttatggacccttttggttggtaacaatggaaccggggaaattttttagattaaattctagagtgctctatcaaaaatctttgagggt

SEQ ID NO: 182399 - DNA, 977 bp, Zea mays
  Clone ID: MRT4577_9792C.1
ccggccggaacgggaccaacacaaatacccgcaaacttccaaagactttgcatctcgcaaaccgtcgcaagacatattcatccctcgtataaccaaaccagtactcaacccatatacagcgaggcgctattctagccagcggtcgctgaacacatccccaacccttttacaaaacccatttcccaaggtcacccccagtacctccgagtttatgtccatcgaaaatctcaagacctacgaccccttcgccgaagccgacgaggacaccggagaaaccaagcagacgcagaattatatccatatacgcattcagcagcgtaatggacgtaagactttgaccactgttcagggtctccccaagaaatttgaccagaagaagattcttaaggtcatcaagaagaagtttgcctgcaatggcactatcgtcaacgactccgagatgggagaggtgatccagctccagggtgatcagcgcaaagatgttcaggaatttctcatcgacaagaaggaaggcctcgagctagatgccaagaccattaaggtccacggtttctaaagctctgcatgccccgtcgtcctgtcagtcgccgttcccgggcgtcatgacgtagagggacagggacgcatggcctctccggcttgtgccttttccggacgtgtactcttgctctcgcaacagacacaccgaggctcggctccgattactctaggacgacgggcatccactcagggcgagttttactcctggtggcttttttggaagagtatttattcttatgctgcgcgttctgcagcgggtggacgatagcttttcggcatccatcttgctcacgtgcacgaaggacgaggctacgggcaaagcatttgttactccaacatggcttgtcagtcgctcgttagtcagatatgtctacatgggcaagccccgcagtagtctcaggcaaatacaaagtcgattccgaaaaaaaaaaaaaaaa

SEQ ID NO: 182400 - DNA, 225 bp, Zea mays
  Clone ID: MRT4577_97930C.1
cccgaacgcccggactgggcttacggccggatcgccgccgccattcaccctcccgctctctttccccctgtctttgcgacgactgggctaccgacgccgacgccctcgcaggtgcgcaggtcttcttcgagtccttcgccggcgacgagcaccctctaaaggttgatatcgaggcgtagtgatggtcgttgtcgttgggtccttccatttggtgctaatctgtct

SEQ ID NO: 182401 - DNA, 417 bp, Zea mays
  unsure (1)..(417): unsure at all n locations
  Clone ID: MRT4577_97931C.1
aggggccnnnnnnnnnnnnnnnntccaagacctgaccacacagaattcctatgaaacaatgacaagggtgataactatttgagcgcctactacacatctgatcagtttaactacccttataagcagtttctccattgcaaacatgcctgacatcacaaacatatacagctactggaagcacgtagtcttggaagccactgagtacacctccgcacatcgcgaggttacgtggactgtgcttgtcacgctgtgcagcaccgccctcttgatagaatcaaggatcttgtttggatgctgcacagactgggtcatcataaacctacttgcctgtaggtgacgtgctatctcgaccatttcataagacagatcttgtggggagctccctatgcttctgaatgtaagcctgagctcgtgcat

SEQ ID NO: 182402 - DNA, 704 bp, Zea mays
  unsure (1)..(704): unsure at all n locations
  Clone ID: MRT4577_97932C.1
cattgggaccctcgaggccggccggggtactataccgaccggctggcgacccagagatgtggctcccgttcccgtacccgccgccggcgtcggtgtacgtgacggtgatgtccgtcgtgtcgctcttgtccgcggcgaacgccggcctctccgagctccgcggcaaccacgtgtcctactccaagttctggcacgtggccgcggcggcgggcggcgacggcagcaacaagcagcgcgcgcggggcggtggcggcgccgtcttgacaggccgggacgggatgctggtgacctacgccccggcgttcgccgccgccgcggcgtccttcgccgtgccgggcgccgtggaaggcgcgcgcgcgcggctgctcagcgccgcgctcaccgcccacttcctcaagcggcttctcgaggtgctgttcgtccatcggtacagcgggagcatgccgctgggcacggcggtcggcggcgccgccaactacttggtcgccacggccaccatggtgtacgcgcagcgcctcagccgcagcgtccaggacccgcccgtggacctgcgcggnccccggcgtggtggtcttcgccgtcggcctcgccggcaacttctaccaccactgcctcctctcgagggtgagggcagacggcggcggcagcaaggggtacaagatccccagggggggggtggtcgggctcgtcgcctgcccgaacta

SEQ ID NO: 182403 - DNA, 680 bp, Zea mays
  Clone ID: MRT4577_97933C.1
gattgtaaattgtggaacaggccataattggtgtctggcgcggacgcgcggtggcgccgtcgccgcctcaatgcagttcggaacgccgcttcctccggccgctcggcgcgcacccaccttccacgcagaccccgccgccgacgcgaggcagctcctcggcgcgctcctgccgccacgccctgcgctctaccacgttttgcaggcccacgcccgcctcgccgttctcggcctcgctaccgcgcgcgccctcccgcaactcctcgccgcccttccgcgcctgacgctcgccgccgccgacgtttcccactcctacccgctcctcctgttccgttgctccaactgtacctcggccttcgcgtcgaaccacctcctccgcgtgctcccgcacccgctcccgctccgcctcttcccgcgcctcccacgccgcaacccccactccttcactttcctcctcgcttccctctccaatcacctagacactgagcctgccgctgcaggctccatcgcctcccgcttcatgggcacccacgtgcacgcgctggccgtgaaggctggcgccgcgggcgacctgtacgtgcgtaacgcgcagatccacttttacggcgtctgcggagacatggcggcgatgcggaaggtgctcgacgagctgccgctcgtgcgagacgtggagacgtggaatg

SEQ ID NO: 182404 - DNA, 263 bp, Zea mays
  Clone ID: MRT4577_97934C.1
ccgtgtctttcgtttcgtctactctactgtagcacgccattaatggccatcacgaagccggcaccgcttcgcttccttgcccagcttataaaagccacgccgcggccacgaacccctccctttccccagctgctcgtccatgctctctcgccctgcttctcgcacagctcccatgccagcgcgctgctgctgctcttcgttgtgttgcgcaacacctcaccggagctccgcccttcaccatctcgccatctcaccagtgcctc

SEQ ID NO: 182405 - DNA, 669 bp, Zea mays
  unsure (1)..(669): unsure at all n locations
  Clone ID: MRT4577_97935C.1
cggacgcgtggcgtcggcacgaggctggctgctccctgggcgcgccggctctagctcggccgccttctgactcttccatggccgcagccgctcagctgcccctcttctctctcccttagctcacggggacctccccttcctgcgggacgccggcctcctccacagcttggatctcgcccatgggggggccctctgctcggcacctcctcgagctcgccttagctcgatgcccagtttctttctccagcgcgtgctgcccgatttcccccttgtgtcgcgcgtcctggcatccgcgtgcttcctgcgcgcgcgctccttccccctgcttggatctcgtccgtgccgtgaagctccctggagcctcctcgccgcgtgcccaggcgtcgaggtcccctgcgcgctgggcgcccctccctctgtccgcttgcgtgcagccgcgcgcgctgctccctgtactcgcctggcgctcgcccggaactcccaacgcgcgcggcttctctcccatggcgcgccctgggccttgcttctctctcactctgctcatccccagccgcggccgtccgacctctgcttttccctggccacgctgatgtctgcaccgcggggtcctcgcggggagtctgtgcanctggggctgcgtaagactcctatcctctcccatgggggggg

SEQ ID NO: 182406 - DNA, 219 bp, Zea mays
  Clone ID: MRT4577_97936C.1
cgttcgtttgcgtccggattgctcggcgactccgacctcgtctcctgtgagatcagctgcggcggtacgcttatatgactactggacggcgtcttgctgacaggaagagtgactagttccagatgaacatcacacagagcggttctgcgcctgagaccacagtgacaaagagcaatgactaccctgtttgacctgtagcactgggagaattcacatttg

SEQ ID NO: 182407 - DNA, 270 bp, Zea mays
  Clone ID: MRT4577_97937C.1
cccaacctggttcacgctcaaagcatcctggccatctatacgtgccgggtagaactcatggggttcgtcgagggctaccgcgtctgcggctgcccgctcggggaaaggctctacaaggtgtaccccggcggcgccttcgacccgctgggcctagccgacgacccggacaccgccttcgagctcaaggtgaaggagctcaagaacggccgccttgccatgttctccaagttcggcttcttcgtgcaagccattgtcaccggcaagggcccc

SEQ ID NO: 182408 - DNA, 299 bp, Zea mays
  Clone ID: MRT4577_97938C.1
taataatttagaggggcatactgggcgcaatgttttgaataatatattaggggtggggcacccttcagacatacttttaggagcaagagcactccaccacaggggaatgcacactgcctctgcatgttgcatagaatgcaaccaaaaggaccagcaggctattgcactaacttacgcgaatagtgcgtacactcttcatgaggggaccatcaatccagaagcctcaagggctgccgttcaaaaggaccgcccattcgatgaagatgaaaacgggggcgatcccccgtaagatgagctgg

SEQ ID NO: 182409 - DNA, 243 bp, Zea mays
  Clone ID: MRT4577_97939C.1
gccggggggggagaaatgcgcgctcgacgttcagatactaaatcctatatactcacttacaaccaaatactgtacataatcacgatttttagaaacgaccgattgaaaaacaaaagctgaggcttttggacaaccgaaaccaagccggatcaatgataattgtactcaagctttgtatggttactggcaagaaatatagtgtctgttggatttccaaccgggcgctgtaaagtggtgcaagtc

SEQ ID NO: 182410 - DNA, 314 bp, Zea mays
  Clone ID: MRT4577_9793C.1
ggtaactgcccccctttgctccatctgggctgggggtcgccttattcgaagtatgcgttgtcatgctccaatctgtgtgcgtgtggcataatagtccattccatcatttcggcaccgttgctgagtagcaggcccattcacttggttacatttgcccgttgcgcaagggcctgttttctggtcatcttggcatcatcggtcgatccattctgaaatcagtctcctgtaatcttaactggtgctgttgccccaccatcaatttatagtctagctgatatgtatcgcattgtacttgtattatgtatcctttatct

SEQ ID NO: 182411 - DNA, 175 bp, Zea mays
  unsure (1)..(175): unsure at all n locations
  Clone ID: MRT4577_97940C.1
atacactcacgagaaatgagaggagaaacctatgggcgccatctcaaaacnntctagagatccttgtgaaccctgagaagaagaaattgtgtgagaagaatctgannacagacatcannaatatcacaaagtgatcaaagggcgatacttcaaaccaatttcaagatnngaatct

SEQ ID NO: 182412 - DNA, 350 bp, Zea mays
  Clone ID: MRT4577_97941C.1
gctggcttggcttctgctcccccttctgctcgggttccggttcgtgaggttctccgggatgctgttccgtggttgagcggatcgatatgccgatctagaatgttgagtaccattgcttctaccgctgcctcgcctgggccatggactaccactccctccacaactccttcaacacctactgcgaggtcctcgagtacgagatcatcctcgatacgaagacgcataggtacacccgcttgtgcttcgtctccttcttcacggacgaggccatgcagaacgccatccagggcatcatcggcgacgagctcgacggcgcgctcatcaccctcaacaaggcccagtcccacggc

SEQ ID NO: 182413 - DNA, 612 bp, Zea mays
  Clone ID: MRT4577_97942C.1
gcacgagagacaattacctatcctctgcaatccaactatatgtagagatcgtcatcaaaagaaacctcaggctttgtattcaacaggacctttacaaacgactaacttagatcggctgtatgggatattcaagaccgtacagagagtagagaataaggcaaggatctttgagcagaatgccactgatagtgagtgcaaggtcgatcctaaagtgctctccaagctatatgatccgtgagtgatgccacagaccaaggatgtcgaagttgagtacctcctgcgctgccttgactaatcaccgattagctatagctgtaaattttatgtatgcatggtttcagttgcgctcgaaccaattgtcttgaccttgaatggacattttgatgtttatttcatttcatctgatgtgtcatgtttcatgacgtagactttcgtttcttgtgattgatttatagtgaacctgtaagatgtaaaataacctttatgacagaaccagctgcaagaatagagtattttgaggaaccctttgtttgtgtatctaaaagatattaatttgttgaagtaaatgtaatcgagtttcctagcaatcttattcttgctggtatcaaaaaa

SEQ ID NO: 182414 - DNA, 145 bp, Zea mays
  unsure (1)..(145): unsure at all n locations
  Clone ID: MRT4577_97943C.1
cctcgcgcggggcaatagaactattagagtccttaccccctccgacgacanctgcnatcggtcgccgccgttagtccgcacgtgggctancccgatctcccccgatggcgtcgncgttcnngccgctcgccgccccgtgggggtg

SEQ ID NO: 182415 - DNA, 544 bp, Zea mays
  Clone ID: MRT4577_97944C.1
tcgtaaagataaagatgaagctgaagtatggtgcgctgggctgaaaacactgatttcacgttgtcaccaaagaaaatggagaactgaatctagaagtgatttgctttcctctggtgcaactagtccgaggacttacacacgacggagttctcctttgagttcacctttcagcagcaatgacagcatccacaaggatggcagtgacaattatcgactccgtactccatatggaagcccaccaaagaatggattggagaaggcattttctgatgtcatgctgtatgcagttcctccccgtgggttctttccatcagattctaatgctggatctgtccattctatgtcttctggacactcggataacacaaatgggcaccctagaggcgttccaatggatgctttccgagccagttattcaagtgcagttagttcatctagtcatggttctggtcatgacgatggtgatgctctaggcgatgttttcatatggggagaaggaaccggggaaggaattcttgtggtggtggttcaagagttggaagct

SEQ ID NO: 182416 - DNA, 299 bp, Zea mays
  Clone ID: MRT4577_97945C.1
agggcggcggcgcaggaatggccctgtggacctctgtgatgggacatgctggtggaatctcacaggcagttctggtggcaaagaatggatgagaagctaaggactcatgaggaagctggataactgaacaaagccatgtacaagaatgggaagccagaaaatgggatggtgcagtttgaatcaggtggacagttctaaaagtacaagtgatttcgtatagacgtaccacatgtgggtccctttaactgaaggcatggcaagctccacacaaggtccttcatttctgaatttcaagggct

SEQ ID NO: 182417 - DNA, 215 bp, Zea mays
  Clone ID: MRT4577_97946C.1
cccacgcgtccgggtcggttgaagggtgaagggtggagtttggttgaagggtcgagctatgctgacgttcgtcgattgaagggtggaggttgtttttttccagcaactggattgtatatggatggattggggcctgagttcgattctgcattctgcttgagcaataataagtctgagctattcctgtcaaaaaatataatagtttctaattaaat

SEQ ID NO: 182418 - DNA, 231 bp, Zea mays
  Clone ID: MRT4577_97948C.1
aaaaaaaagccaacgacggcaccgatcttaaagcccagaagagctcaagtacaaaaacgggtggcaaacaaaaatgagaagagataaaaaacaacttaatataaatatacagtgtactccttgaacggcattcaagtttacaaatccttctttacgtgcgcttccgtctgcattcagggcatctactggtacttaagtggcatgatcttcacacttttctactggacaaac

SEQ ID NO: 182419 - DNA, 242 bp, Zea mays
  Clone ID: MRT4577_97949C.1
tgtcctgaaaaaaaaaaaaaaaaaaaaaaaaaaaaaaaaaaaaaaaaaaaaaaaaaaggggggacgaataaaaaggatccaagagtggcgggccggttttatggaacccaattttctgttctgtgggcgttgccataaatatagttcttttatccggtggttttaaaattcaattgactggcaaaaccttttacattgccggggtttaggcaaatccctggcgcatacccattttaatcagc

SEQ ID NO: 182420 - DNA, 448 bp, Zea mays
  Clone ID: MRT4577_9794C.1
tcgttagacacccggctcctcccaagggggtatagtctggcccgtaggcgactaccgcaagctcatcaacggggacctcggcgccgacaacctggacataggctactactagttgtatttgttcacgtgcttgcactgtgtatatatattggtggtgccgaggcaaaaccgcatcccatgctagctagcgacttacaagattcattttttgtactgatctgtcttggcattgaaggtaaccaaccatggaagattcagttaattaatgtgcacctctggggactttagcagatggacgcttggatagaacgtgcggaaacattaatgggttttgccgtaggagctgcatgctttgttaaggctatatggtcatgtaagaaatggaatctgtgctagactttaacaaacttgatgaaaccatggtataactcaactggacctctatcta

SEQ ID NO: 182421 - DNA, 1422 bp, Zea mays
  Clone ID: MRT4577_97950C.1
atgacaaatgctatatgggcctatgaagtagcccctatccgcaccactctggctgcagcgatggacgcaaccaaggctgttgtggctattgttggtcgtgtagtagtagacctactagccagtcggaggaggtgggcgctggtcaccctattgctgctatcatctaccaccatcaccatggccctttttgttgttgcagttagaagtattattgctgcctcatgggttgattacatagggtacataggactaacaacctacgtggggtacataggactaatacccacattggtagacaatgtgatattattcctatttactctaacggtgtggagtgcgctcggaggaaaccttgccttcattagcgaggcgaagttacttgagcgtgtggtgttgaaatcgggcaacaacgtggtgtccgtgatgttgtctgcgtgcgggagaagcgtgcttcatctcgaggacgatacggatgtgagagcggatggtgatcgtggcgtagggggcaacgatcgggccgacggggacaaagcccatggccctgctagtggagaagagatcgtgagcgggggtggccgcgcagccgtggagtcggcagtgctaggaaagattaagaaaaatgcggtgcctgatggttcaattccaataagccagtctgcacatcctccaactctgggccccttcacctataagccccttttagcagacactgtccaagcagaggatataaaggagctatgcaagcttttagtggtggtatcaggagaagctgcaaaaacatatgctggtcagaaaacgaaggaagagagggttggcgagaaggaagatgaaatcggagggcagaaggaagatgacagggcaggttccctagcattgacaaaccatgatagagaaggaaataatcaagatcaagatcaaaaagcaccaattgatgaccattcaagcagaggaactcatatgggcaaagctattatagaagaatccagacctaactgcgctgatgatcataagaccaatagacctatgtctcctggaacactagcactgatgtgtgatgaagaagcatttgagaaaatgtgtgacgaacaagatacaatgtttacgacttctcaaaatgctgctcctcagcagacagtaattgtcaaccataaccaatctgcactgtatgcagaacaagaaaacgttgtgctgacagaattccgggattgcctccgcaagtttgtgagatacggaagaatgaaagaggaaaggtactccatggcaatcaaatctgaaacatctggtcatcctggacaggtaaatggtgtttctcaagtaccatattcaaaagtagatgtgcctgctgtaaaaacatatccacagagttccagcagtcatcttgttgctggaaaacctgttactggccttttggacaaaaactga

SEQ ID NO: 182422 - DNA, 417 bp, Zea mays
  Clone ID: MRT4577_97951C.1
gcaattctattatatttggcctattttttcgaggaatcgaaacatagtcttctttgcgaacaagggcgagctaaaaagaaaaatccacaataacgggctgggcaacctcttcttctttttgctggccaaactccccaggaaaaacaaaaagccccgaagtctggagcgcccgccaggaaaaagagggcaacttgataaagcgggcgagcccggcggacgggggggcccctggggcaccaccacaaagaacaaggaccccaagacggacatggccagggaggagatacgaaggtcctggtgcaccagctggaccacctggaaaacgtaaaccccgggcgtataaagacttttgtgggacagattcttacagggaaagtggccgagcaaaaaaaccaacacgggctcaaccgccctggg

SEQ ID NO: 182423 - DNA, 2094 bp, Zea mays
  Clone ID: MRT4577_97952C.1
atggcgggcaaggagcagggcggtggaggcccgccgcagaggcctcccatgcccgcagcgtccatgcagccgccaatcaagaagctggtaaggcagctggacttcaactcggcggcgttggcggggaaccccgcgatggcggcagcggcggccgccgtgtctagggctcttcagccgagggcgttgcccgcggggttccagcatccgcagcacgtgagggctgccgtgccgatggtggtgccgcagcagctgcaccagcgggcgctgccggtgatgcgcccgcatccggtggtgggtcatgtgccgcggcacgcggtgccgctggcggtccctgtaccgcagctccgtccgatgccgccacagccagtccagcgtcccccggtcgccgttcccttgaaaccagactcaccaaaaccgtgggcaagactttacgaagggaaagatagcactcccacgaagaaaaagtgctgcaactgcaggaactccagatgtttgaagttatactgtgaatgcttcgcttctggtactcactgtgatggttgcaactgcaccaactgttttaataatcctgagaatgaggttgccagacgtgaagctattgaagctacattggagcgtaatccagatgcttttaggcctaagatcgggagcagtccacatacgaataggaataatgaggtgtctagtgatctccctttagtagggaagcataataaagggtgccattgcaagaagtcaggatgcctcaagaagtactgtgagtgcttccaagctaatatactatgctctgaaaactgcaagtgtatggattgcaagaattttgaaggaagtgaagagagaagaaatcttttccaaggggatcataaaaatgcaattaacattcagcaggcgacaaatgcagctgtaaatggtgctattggaaccacaggattcccttctccctccacgtcaaggaagaggaaacatattgatccttcacttgaccattcaaacaaggaacatgcagcgcacaggaattgtcacatacctcagtccatttatcagaaaaatgcagtgcctgatggttcaattccaataagccagtctgcacatcctccaactctgggcccctttaaagttacctacaggccccttttagcagacattgtccaagcagaggacgtaaaggagctatgcaagcttttagtggtggtatcaggagaagccgccaaaacatatgctgaccggaaagcgaaggaagagagggttggcaagaaggaagatgaaagggcagaacaaaaggaagatgacagggcaggttccctagcattgacaaaccatgacagagaaggaaataatcaagatccagataaaaaagcatcaatcgatgaccattcaagcagaggaactcatacgggcaaagctaatcaagaagaatccagacctaactgcgctgatgatcagaagtccaatagacctatgtctcctggaacactagcactgatgtgtgacgaacaagcgttcgagaaaatgtgtgacgaacaagatacagtgtttacggcttctcaaaatgctgttcctcagcagacagttactgtcaaccaaaaccaatctgcactgtacgcagaacaagaaagaattgtgctgacagaattccgtgattgcctccgcaaacttgtgacatacggaagaatgaaagaggaaaggtacgccatggaaatcaaatctgaaacatctggccatcctggacaggtaaatggtgtttctcaagtaccatattcaaaagtagaggtgcctgttgtaaaaacagacccacagagttccagcagccatcctgttgctggaaaacctgttactggccttttggacaaaaactgaagcctgggcgttccaggtttgtattcggggtgttgcaatgatcaagggaatcatgttttcaccctcctaatttgttgatcagatacatgtatcagtcttgatagataatctagattttagggaattccaatttattctcattggtcagagtaagtgtgatgctggaatgtggatagttagtttagtcataaatgccaaccttgtcgtattttctacattgtagtttctcccttttct

SEQ ID NO: 182424 - DNA, 339 bp, Zea mays
  Clone ID: MRT4577_97953C.1
cccccccaaaatcccctccccaattttttaccaaactttttcccaggttttttttaaacaacccttgtaagggttcaccttgccccccttttttttccacttttaaaacaaaccagcccccaatttgttaaaaaaactgggtaaacccttggtgccaaagggccccccccttggccgtttccaaggcaaaaaacctccccctcttttttttaaacctttgtaaaggtggcccccattcccaaaattgccccccagatggtttttttctttccaaaagttgccccttgttctaagttaaaaaacattttccttaagtctaacgttggtttttttaaaatt

SEQ ID NO: 182425 - DNA, 573 bp, Zea mays
  Clone ID: MRT4577_97954C.1
attgcatgggaaaaccagttcattggcaatcactagcaacctgattaatttaagtaccacgtttttatatcgaatcacatacatgaacatctcgatcgagcagttaatcaagattcaagggcatgagaaccattccccatcccacccttgagtgttgtcgccgatgtcgtccatgcacggcaaggtgacttcgtcgccgtcgtcgttgcttctgcgaccgccctcgtggtcgtagcagcagctgtagtcgccgtcgccgtcgtcgacatgcaccctcctccccagaacatccggcgagggcttgcctcccgtgaccgaccccgcttgctcgccgacaccggcatcgtcgccacacagccaccaccactccatcggcaaaccggccgccgccgccgccacgtcctccgcgtttgggcggggcgcgtgctggccctggccgttctccacgctctcgaagatcttgctccagcatgcggccatgtccgcggccgccgcctcgctccactccacgccctgcatctcgccgccgaccgatgcctgctggccatctccccgtccaggccgggaccaacg

SEQ ID NO: 182426 - DNA, 275 bp, Zea mays
  Clone ID: MRT4577_97955C.1
gccatggactcgaccgccaccggggcaggaggaaaggcgaagaaggaagcgaccatggcgcaaggctcgacgggaccaccggacaagcctctgttcacggccgagaaagccgaggtgcagatccccgccggacgacatcgagctgtactagtaagaaggcaaaaaggagtaccgaggtggagccggtgggaaagtctacctaggcactggcgtcgcacacatcgcagctgaggtgctggagctcgatggtactgaattcaaggacaacgatatga

SEQ ID NO: 182427 - DNA, 574 bp, Zea mays
  Clone ID: MRT4577_97956C.1
aattcggcacgaggccaccgctctgcaatggcggctccgcttcccccacttctccttctcctctccatctcccccgcaatcttcctctcgtagtgctgctctcattcttccaccaaccgaaggttctgcggccgcgagagtgctggggggcgaacaatggaggcggcgtggaggaaggccaagagggcgctgggctccagcctctgcgtgcaccaccccgccgtcgccggcgaccgcgaggacggcgccagcgagcgccgcgcctcggatgcgctctccctcgacactaccgcggcggcgcacgcatcgacgcccaacgcgccggcgccgccggaggccggcgcgctgcggaggtccaagtccggaggcaagtccaccaatagaatgtgtgcaatatgttttgattccatgaagccaggtcgtggacaagctctattcactgctgaatgttctcatatgtttcacttccactgcatctcctctagtgtgaaacacggcaaccatgtatgcccagtttgccgggcaaaatggaaagagatccccttcaatcgctcattatcttctatagttccat

SEQ ID NO: 182428 - DNA, 694 bp, Zea mays
  unsure (1)..(694): unsure at all n locations
  Clone ID: MRT4577_97957C.1
acttctcgccccgtcgtctgcgcccatggtcttctcgaccccgattcgccgctttccgcgacgcagtgcggcggacacggcgtcggcgtcggcgtcggcgtcggcatcggcatcggcatcggctgctgaaacctcttacacctcctgctgcaggtagtgggtcaaaggccactgaaacaaatggtgcaacctgcggacaaggtgaatgtgccccaaatatgggacaagaacttggtttggaggaactccctgaggacatcatacatcgtatacattctatcatgccaatacaagatgctgctcgtgctgcctgtgtgtcacgtagatttctgcattactggagaagctattccagcctcatactcagtgaccgtacacttggtttggatgacacagattttgaggaaaggaaaacccatctcattgataaagttgacagaattcttaaaaaccattatggcaatggggtgaaggtgaagacacttaaacttgagcttggactttgcagcgatatcaaagcctcctacctcgacaggtggctccgaatcactaaatctgggatccaagaattcagcttggtgttgcctttagttatgaataaaatctacnaactttccgtgttcggttttatctaatgaggcagctgcaagttcaattcagtctcttagcctctttggttgcgcttttcacccca

SEQ ID NO: 182429 - DNA, 525 bp, Zea mays
  Clone ID: MRT4577_97958C.1
caggagaacatcaacttgtcatgtagaacacgagcgcggtctgtaacttttcttccaacacctggagagtgagaaacacgagaactccgtacaggagatttcagtatatcttcccagtttcttttctccttccaggcatccatggacttccaaggtgctgtaatttgcttttccttttcaagatgagctgtagtctttttaacaacatcggttgacttgagcctgtcaaatttgttttctagcaactccctgtccttcttaaaggtgtgtttctctatttcagagattggttctaatgaccctcttctactccttgcagaatatgaaggcatactttgtggatacgacttaccagacttgaatgcatccctacttagcttctcgccagcaatctttttcacgctggtatcaggaagtttcacctgactctcaacttttaaacttatattcctaacagttgccgatgctgtagtcagctttgatgaactacccaaaactttttcagaagagctggatgtaaatctt

SEQ ID NO: 182430 - DNA, 419 bp, Zea mays
  Clone ID: MRT4577_97959C.1
cacactaacgaacgaactcttgctccgatcacgagctagctgaggtcgacgatggcggctgtgctgaacagcaggaagacgccgcaggcggcggtgaccgtgctggtggccacggcgctgctggattcgtccgcttcggcggcgatcacctgcgggcaggtggggtcgtccctggcgccgcgcatcccgcacgctacggggagggtcagcgcgctccccatcgtcgtgttgcgcagtcgtcaacagcctcaacagcgcggagcggaccagcgcggaccgccagtaggccggccgctgcgtcaagagcctcgccaacagcgtgaacagcgccaacatggtcaccagtctctccccatccccgtgcagagccgccgcatccccctcattccccatcagcatgtccaccgactgcagcaaga

SEQ ID NO: 182431 - DNA, 675 bp, Zea mays
  Clone ID: MRT4577_9795C.1
ccggccgggatcgatcgtacgttacgttgtcttcctcttactttaccggaagagcgtgagaatcgactcgtctggaggaacatgcaaaacatacctctacgactgcctcgtgcggtgcacgcacgatggctgcggacctcggctgccatatgctcctccgactcctccggttgggtgcagagctctcgattaccacttctactcacgaaggagacgatccccatcctagaatactgactccagttgggcacactgcgctggaatgttttcttcgtcgcgatgagcccgtacgatcgacatcccatggaagaccatgactggcatcccggggaataacgcatctggacgactatgtgtgaacaagacacgcgcaagtcgatgcccgcccgggcatcctacgatagaagccatgacccctcggttcagtgaagaccatgccaggtcgcagagtgctcgctgtacgtacctcgctatagccaggcctgagaatgatctctgtcatgctcgatcactgcgcttgtccatggtgcgagcatctgtgagcacccaaaccgacatcagcataatttatttggtagcctcctctaggtacgcgcgattcttacaaccctacgctgccctgcatagcgcgcggctctgataatcatctactgtcctccgacagccatttctccc

SEQ ID NO: 182432 - DNA, 591 bp, Zea mays
  unsure (1)..(591): unsure at all n locations
  Clone ID: MRT4577_97960C.1
gttggctagccattagtaaaacaaaaaacatagtttcgaacttattttgcatcaggctncaacagccaacaagctccccttggcaactacagcaagcacacaagagaaaggctctgacatgaaaaatcctccagaacacactggcgccggngtactaactgctcacaggcctagccggtgttctgcatgccgncgccgacgcccttcatggtcaggatgagggtgccctccaggcctggagcgtactcgctctgctggttcagctgcaccagctccgccggctgactctcgncggtgaactccttggacaggggcggctgcgggctcacctggaagctcgggtcgcgtatccgcttcagggcgtaggcctggcacacgttcagagcggcgatgtaggactcacgcagccgcagacgctgcttcaggtaaggatcaccttcaaggacgtccttgtgaccagcaacctgaaggagtagctcttttgtctcctcataattcttcctcagttgctcgccgaaggattgcaaatcatcagccactagcaatttgtcgtacacagctgcgattcccggctctcccttcgcgaaaacc

SEQ ID NO: 182433 - DNA, 610 bp, Zea mays
  Clone ID: MRT4577_97961C.1
ccccctctggagtttttttttttcttttttttttttttttttttttttttttttttttttttttttctggaaaaaaataaaatttttttttggggagcattttatgcaacatcccttcctgctttataattattacaaaagcgacaaacccctccaatcacacgtaaaggggggcccgaggggaaaaaaaaatttttattaaaaggaagggggaaaatgacaaatttaaaaaatatggggaccctttgtcccgtccactcataatatttccaacaacccgccccggccggggggttaactcgttgcccggaccggaggtagttttcgggaccccggaaaaaataaccctggggccaaacatttctttgccgacctgggggggaaatgtgtcgaaccggagaaaaacctcaacaaggaggaccctgccaaccagcaccacaaattttttcccggggcactgtttgttgccaaccctggggttttcggtctcacggccgttgaaccagtacacgtactgaagaagtttgctgccctcctcgccgaggaagcggtcggccacaaagcccccgggggggtccccaaacacgcgggggtccttgggggcgcacgg

SEQ ID NO: 182434 - DNA, 580 bp, Zea mays
  unsure (1)..(580): unsure at all n locations
  Clone ID: MRT4577_97962C.1
ttaactctttgtataactccgggtattaattgtcgagctcttcgtcgacatctttggggaggaccagagaaaacacgggtgcatttgtgtatacagtggcgtagccgaccattagccaattgataaaaaggcctttcgggtcgaaatgactggcaatactgtacatggtctgacatgcactgatgatcagaccacggtgcatgatgaattgccctaatttggctgaccgcttgtaagagttacgcccgtgccaaactagtagcttggtaatgtggtggaactgcgtgatgctgaaatctgcggccagagaggcttgtctaccctcctttgcgacaatgccaatgcccacatcagcagcctgaatcatcgagacgtcgttgccaccgtcgccaatacagcaaactcttttcttagtatgctgtcgaatcagttctgcaacttcggctgtctgcgtgggagaacaccngcaagcaactacggcaggaagtgtgacttgcaccgtgatgaatgcaggaccgaattgactgagcatgagagatagcgattctccatcaattaatagacaggcatcagtcttatg

SEQ ID NO: 182435 - DNA, 3454 bp, Zea mays
  Clone ID: MRT4577_97963C.1
caacccgggctcccgtccccccgtacaaatagaataggcacgcacactccgaacttcccaccccatctccgccgcgcgcaccgcccaatctccgcctccacctgcgccccgctcaggcgagcagaggcttccaccactctccatttcccacgcccgctgcgggctcgcgggcgagaggggattgtctgtgccgccgggcgggaatttgattcgttcgattcgctgcgccgcgatgccggagcggcaccagtcgatcgacgcgcagctgcggctgctggcccccgggaaggtctccgaggatgacaagctcgtcgagtacgacgccctcctcgtcgaccgcttccttgacatcctccaggacctgcacggcccccacctacgcgaattcgtgcaggagtgctacgagctctcggcggagtacgagaacgatcgggatgaggctcggcttggcgagctcgggagcaagctcaccagcctgccgccgggggactccatcgtcgtcgctagttccttctcgcacatgctcaacctcgctaaccttgccgaggaagtgcagatcgcgcaccgccgccggatcaagctaaagcgtggggacttcgccgacgaggcctccgcgccgacagagtcggacatcgaggagacgctcaagcgcctcgtctcgcagctcggcaagtcgcgggaggaggtcttcgacgcgctcaagagccagaccgtcgacctcgtcttcaccgcccaccctacacagtccgtgaggaggtctcttctccagaagcacggcaggatccgtaactgcctgcggcagctctatgccaaggacatcactgctgacgacaagcaggagcttgatgaggcacttcagagggagattcaagctgcttttagaactgatgaaatccgcagaacccctcctactcctcaagatgaaatgcgtgctggaatgagttacttccatgaaactatctggaaaggtgtaccaaaattcttgcgccgtattgacactgctctgaaaaatattgggatcaatgaacgtctcccttacaatgctcctcttattcagttctcttcctggatgggtggtgatcgtgatggaaatccaagagtaacaccagaggttacacgggatgtatgcttgttggcgagaatgatggctgctaacttgtatttctctcagatcgaagatctaatgtttgagctctcgatgtggcgttgcagtgatgagcttcggattcgtgcacatgaactacatcgctcttcaaaaaaagctgcaaaacactatatagaattctggaagcaagttcctccaaatgaaccatatcgtgtcatacttggtgatgtcagggataaattgtactacacacgtgaacgttctcgtcatctattgacatctggaatttctgagattccagaggaggcaacttttactaacgttgaacagtttctggaacctcttgagctatgttatagatcattatgtgcttgtggtgacaaacctatagctgacggaagtcttcttgatttcttgcgtcaagtatcaacttttggtcttgcacttgtgaagcttgacatcaggcaggaatctgatcgacacacagatgtccttgattcgataacgacacatcttggaattggctcctatgctgaatggtctgaggagaaacgccaggattggttgttgtctgaactgaggggcaaacgtccattgtttggttctgatcttcctcagactgaagagactgctgatgttttaggcacatttcatgtccttgcagagcttccagcagattgctttggtgcatatatcatctcgatggcaactgccccatctgatgtgcttgcggtggagcttttgcagcgagagtgccatgtaaaacaaccactgagagttgttccactcttcgagaaacttgcagatcttgaagcagctccagcagctgtagcgcgactcttttcaattgactggtacatgaataggattaatggtaagcaggaggtcatgatcggatattcagattctggcaaagatgcagggcgtctctctgcagcatggcaaatgtataaagcacaagaagaactcatcaaggtggcaaagcattatggagtgaagctgacaatgtttcatggaagaggtggaacagttggcagaggtggtggtccaactcatctggccatattatctcagccaccagacacgatacatggatcgcttcgtgtaacagttcaaggcgaagttattgaacactcctttggagaggagcacttgtgctttagaactttgcaacgctacactgcagctactcttgagcatggcatgcatcctccaatttcccccaagccagaatggcgtgctctgatggatgaaatggctgttgtagcaactaaagaatatcgatcaattgtctttcaagagccacgcttcgttgaatacttcagatcggctacgcctgagactgaatatggcaggatgaatattggcagccgtccatcaaagaggaagcctagtgggggaatagaatcgctccgcgcaatcccatggatctttgcttggacacaaacaaggttccatctgcctgtttggcttggatttggcgcggcgatcaagcacatcatgcagaaggacatcaggaacatacatatactgaaagagatgtacaatgagtggccattcttcagggtcacccttgatctgctcgagatggttttcgccaagggtgacccgggaatcgcggctgtgtatgacaaattgcttgtggctgatgatttgcaatccttcggcgagcaactgaggaagaactatgaggagacaaaggaactactcctccaggttgccggtcacaaggacgtacttgaaggtgatccttacctgaagcagcggctgcggctgcgcgagtcctacatcaccaccctgaacgtgtgccaggcctacacgctgaagcggatacgtgacccgagcttccaggtgagcccgcagccgccactgtccaaggagttcaccgacgagagtcagccggcggagctggtgcagctgaacgagcagagcgagtacgccccgggcctggaggacacgctgatcctgaccatgaagggcatcgctgccggcatgcagaacaccggctaggccaatatacatactcggtttgcgaataacccgtctcccatgagatggtgggcgatatgtgtagcctgtaagcagacagttcgtcggcgtgttgcggaggaatttttatgtcagagcctttctctcgtgtgcttgatgtagatgccatggggagtttttactggctgttgaagcctgatgcaaaataaactatggaactaaggcattgtttgtttctctccattctccatgattatataatccagcttatagattatataagcacctaataaaaaaaaaaaaaaaaaaaaacaaaaaaaaaaagaggaaattattgtacaaaaaacccataaaaagggg

SEQ ID NO: 182436 - DNA, 3563 bp, Zea mays
  unsure (1)..(3563): unsure at all n locations
  Clone ID: MRT4577_97964C.1
ggaccccacccatctccgccgcgcacaccgcccaatcagccaatctcctcctcctcctccgctctcagacgagcagcggttgccatcactctccacttcccacgcccgctgcgggctcgcaggcggcagagaattgtctgtgccgccgggtgggaatttgattcggtcggattcgctgcgccgcgatgccggagcggcaccagtccatcgacgcgcagctgcggctgctggcccccgggaaggtctccgaggacgacaagctcgtcgagtacgacgccctcctcgtcgaccgcttcctcgacatcctccaggacctgcacggcccccacctgcgcgaattcgtgcaggagtgctacgagctctcggcggagtacgagaacgaccgggatgaggctcggcttggcgagctcgggagcaagctcaccagcctgccgccgggggactccattgtcgtcgccagttccttctcgcacatgctcaacctcgctaacctcgccgaggaagtgcagatcgcgcaccgtcgccggatcaagctaaagcggggagacttcgccgacgaggcctccgcgccgacggagtcggacatcgaggagacgctcaagcgcctcgtctcgcagctcggcaagtcgcgggaggaggtcttcgacgcgctcaagaaccagaccgtcgacctcgttttcaccgcccaccctacacagtccgtgaggaggtctcttctccagaagcatggaaggatccgtaactgcctgaggcagctttatgccaaggacatcactgctgacgacaagcaggagcttgatgaggcacttcagagggagattcaagctgctttcagaactgatgaaatccgcagaacccctcccactcctcaagatgaaatgcgtgctggaatgagttacttccatgaaactatatggaagggtgtaccaaaattcttgcgccgtattgacaccgctctgaaaaatattgggatcaatgaacgtctcccttacaatgctcctctcattcagttctcttcctggatgggtggtgatcgtgatggaaatccaagagtaacaccagaggttacacgggatgtatgcttgttggcgagaatgatggctgctaacttgtacttctctcagattgaagatttaatgtttgagctgtctatgtggcgctgcagtgatgaacttcggatccgtgcagatgaactacatcgctcttcaagaaaagctgcaaagcactatatagaattctggaagcaagttccgccaaatgaaccatatcgtgtcatacttggtgatgtcagggataaattgtactacacacgtgaacgttctcgtcacctattgacatctggaatttctgagattctagaggaggcaacttttactaatgttgaacagtttctggaacctcttgagctctgttatagatcattatgtgcttgtggtgacaaacctatagctgatggaagtcttcttgatttcttgcgtcaagtatcaacttttgggcttgcccttgtgaagctcgacatcaggcaggaatctgatcgacacactgatgtccttgattcgataacgacacatcttggaattggctcctatgctgaatggtctgaggagaaacgccaggattggctgttgtctgaactgaggggcaaacgtccattgtttggttcagatcttcctcagactgaagagactgctgatgttttaggcacatttcatgtccttgcagagcttcctgcagattgctttggcgcgtatatcatctctatggcaactgccccatccgatgtgcttgcggtcgagcttttgcagcgtgagtgccatgtaaaacatccactgagagttgttccactttttgagaaacttgcagatcttgaagcagctccagcagctgtagcacggctcttttcaattgactggtacatggataggattaatggcaagcaggaggtcatgattggatattcagactctggcaaagatgccgggcgtctctctgcagcatggcaaatgtataaagcacaagaagagctcatcaaagtggcaaagcattatggagtcaagttgacaatgtttcatgggaggggtggaacagttggcagaggaggtggtccaactcatctggccatattatctcagccaccagacacgatacatggatcacttcgtgtaacagttcaaggcgaagttattgagcactcctttggagaggagctcttgtgcttcagaactttgcaacgctacactgcagctactcttgagcatggcatgcatcctccgatttcccctaagccagaatggcgtgctctgatggatgaaatggctgttgtagcaactaaagaatatcgatcaattgtcttccaagaaccacgcttcgttgaatacttcagatcggctacgcctgagactgaatatggtaggatgaatattggcagccgtccatcaaagaggaagcctagtgggggaatagaatcactccgtgcaattccatggatctttgcttggacacaaacaaggttccatctgcctgtctggcttggatttggtgcagcgataaagcacatcatgcagaaggacatcaggaacatccatatactgagagaaatgtacaatgagtggccattcttcagggtcacccttgatttgcttgagatggttttcgcgaagggagacccgggaatcgcagctgtgtacgacaaattgctagtggctgatgatttgcaatccttcggcgagcaactgaggaagaactatgaggagacaaaagagctactccttcaggttgctggtcacaaggacgtccttgaaggtgatccttatctgaagcagcgtctgcggctgcgtgagtcctacatcaccactctgaacgtgtgccaggcctacaccctgaagcggatacgcgacccgagcttccaggtgagcccgcagccgcccctgtccaaggagttcaccgacgagagtcagccggcggagctggtgcagctgaaccagcagagcgagtacgctccaggcctggaggacaccctcatcctgaccatgaagggcatcgccgccggcatgcagaacaccggctaggccaagatcttcggtgtgcaaataacctgtctcccatgagacggtggacgatatgtgtaggcctgtgagcagttagtacaccggcgccagtgtgttctggaggatttttcatgtcagagcctttctcttgtgtgcttgctgtagatgccaaggggagcttattggctgttgaagcctgatgcaaaataaagtacgaaactatgttttttgtttaactaataactagcaaacatgcttccgttgcattgaaactagcagcttcgtgcgtagtcatctgtggataataaaaggaaaaaaaacagaggaaaaaaaaggccgatcgaacgtaaaaggaaatactgttctatgggtttcctccttatttcctcgtggtttttttcctaacgccccgattggactattgaaattgaattccattttaataacggggcgtttggatcttttccttttagaagaaaaaaaaaaaaaaaaaaaaaaaagaaaaaaaaanctcga

SEQ ID NO: 182437 - DNA, 552 bp, Zea mays
  Clone ID: MRT4577_97965C.1
ccggccgggctagcctcgcggtgaagccgccgccgctgcggtgaggctagtccccgcaggagactgcgatggggggtcgcgccaagaccacaagaccggggcgctcgttaggggtggcccggggaagttgccgagaccgcgctctgacgagacagactacgggggcaggataaggctgattaaccacgacaaaacctagtacacatacactccgaatacagattggctgtgcgagtgaccaccgaggtcatcacaggacacatcatctgtgctcgtatagcacagtgacatggcgcttgcttatgctttctccgttgaggtgtcacgtatatggacttgaagctgtgatgaccaactatgcagatgcctactgcactgtcctgctgttgcctggacgggagctcaagacccggggggaagatatagtatatgatggcaatgtggacgacgctggcgaagacttctctcgatgggccagctgatgagaggaggtcttctcgcgctctctgggatggcggccttattaggacctacagctgggaaccgatggtt

SEQ ID NO: 182438 - DNA, 1860 bp, Zea mays
  Clone ID: MRT4577_97966C.1
cattgggaccctcgaggccggccggggttttctaacgcaagcagcagtgacgccgcgctacccgaccaaaatccgccgccggtgcccagaactcgacgggaaaaccggggctttggtcgccggacgccggctgcctcgagatgctcgtgtgggcggccaccgcgtcaccacccagcactccatccgccgtgccatttgctcctccccaccgcgccgccgctccccgccctccaccgcctctctgccgctcgctcccggggctgctgtgcgcgggcctcatccctccgccgcgcgccgccgcttctgacggcgacgtcttctgggaggagccagacgacggctccgggagcgactacgaggacgacggcccggagcaaaggagggccttgcgtttcccatcttcctcgccgtcctccaggctcgaggcgtcggcgcagcaagaacaggacctccggagagagatcgagcttctcctaacgcctgaagaaaaggctactttggaccagcatgagacccctgacgtcactagaatatcatcacccaagtggcacccacttcatagctacgcgttggcactgcagatacccctcatggacaagcttctggacagcggtgttgacatcaacttagttgatagagatggcttcacctctcttcacaaggctgtcatagggaaaaaagaggctgtcattagccatctcctaagaaaaggggcaaatccccatgttagagatagggatggagccacaccattacattatgctgttcaagctggtgccctgcaaaccgtgaagttactgattaagtacaaggttgatgtcaatgttgccgataatgatggatggacaccactccatttagccatacagagtaggaatagagatatagctaaggtcttgcttgtcaatggtgcggataagacaagaagaaccaaggatgggaggactgcgctggatctaagtctatgctttggaagggatttcaagtcatatgatcttgcaaagcttgtcaagcttattccagcaaacagaggtgcgtgatttcgctctgccatgaatctgagggaaagaaagtccaaaagttagccaatgcagcagcctcatacgacccatgcatagcttatgaagaagggtccaggagccgcgtgccgccgtgccagtcatcattcattttttttttcttgaccgccaactcaaacgatctgacagattgctctacaattgtgccgttagatttcagtgtccatggtctgtagcctgttcgccgtgactcgaaaaatgatgatgtacatgcaacagtcctccagctgttgtgttcagttgttttgttcaatataggccagggccaccaaaacaagatctgaattgtgacagttagaacccttcaaaagaggactgcgctggatcgaagtctaggctttggaagggatttcaagtcatatgatcttgcaaagcttgtcaagcttattccagcaaatagaggagcgtgatttcgctctgccatgaatctgagggaaagaaagtccaaaatatacgacccatgcatagcttatgaagaagggtccaggagccgcgtgccgccgtgccgatcatcattcctccgttttcttcgccgccaactcgtatttcttgaccgtcagctcaaacaatctgacagattgctctacaattgcgccgttagatttcattgtccatggtctgtagcctgttcgacgtgactcgaaaaatgaacctatggatgtacatgcaacagtcttccagctgttgtgtgcatttgttttgttcaatatgggcctgggccaccaaaacaagatctgaattgtaactgttattatctgaattgtaactgttattaaccttc

SEQ ID NO: 182439 - DNA, 309 bp, Zea mays
  Clone ID: MRT4577_97967C.1
ccggccgggacttttatgcttcgttgctccagaaatgcttgacgactatgaatggagggtctctctgcactgcgcggaactaccacacaacacgtagtgggcgggcgatgcagcatatgcactcgcggcctcctcctgccgtacgcgagcaccacgcatatcgccgaatccgcggacgacgctcaggtttcgaggacagcgccgcctctgaggtatataaggagctacaagtgcgggttctgcgacgtggtccgttccaacaacagcatgcttcacgccagtgtcgctgcgcgcaccaaaaggatgaac

SEQ ID NO: 182440 - DNA, 1397 bp, Zea mays
  Clone ID: MRT4577_97968C.1
ccacgcgtccggctacgcgttggcactgcagatacccctcatggacaagcttctgaacagcggtgttgacgtcaacttagttgatagagtaagttacgtgcttatgattttcattcttcttttgtatcagaataaccccatctgcgaaggtatagttaactacataagtgttgctgatagagatggcttcacctctcttcacaaggctgtcatagggaaaaaagaggctgtcattagccatctcctaagaaaaggggcaaatccccatgttagagatagggatggagccacaccattacattatgctgttcaagctggtgccctgcaaaccgtgaagttactgattaagtacaaggttgatgtcaatgttgccgataatgatggatggacaccactccatttagccatacagagtaggaatagagatatagctaaggtcttgcttgtcaatggtgcggataagacaagaagaaccaaggatgggaggactgcgctggatctaagtctatgctttggaagggatttcaagtcatatgatcttgcaaagcttgtcaagcttattccagcaaacagaggtgcgtgatttcgctctgccatgaatctgagggaaagaaagtccaaaagttagccaatgcagcagcctcatacgacccatgcatagcttatgaagaagggtccaggagccgcgtgccgccgtgccggtcatcattcatttttttttcttgaccgccaactcaaacgatctgacagattgctctacaattgcgccgttagatttcagtgtccatggtctgtagcctgttcgacgtgactcgaaaaatgaacctatggatgtacatgcaacagtcttccggctgttgtgttcatttgttttgttcaaaaaaaaaaaaaaaaaaaaaaaaaaaaaaaaaaaaaagctcgggacctcgtgctctaagtctatgctttggaagggatttcaagtcatatgatcttgcaaagcttgtcaagcttattccagcaaatagaggagcatgatttcgctctgccatgaatctgagggaaagaaagtccaaaagttagccaatgcagcagccttatacgacccatgcatagcttatgaagaagggtccaggagccgcgtgccgccgtgccggtcatcattcattttttttcttggccgccaactcgaacgatctgacagattgctctacaattgcgccgttagatttcagtgtcatggtctgtagcctgttcgacgtgactccaaccaccccacctatggatgtacatgcaacagtcctaaagctgttgtgttcatttgttttgttcaatatgggccagggccaccaaaacaagatctgaattgtaactgttattaaccttcagcatatgtgtacacattatttttgatgtaa

SEQ ID NO: 182441 - DNA, 197 bp, Zea mays
  Clone ID: MRT4577_97969C.1
aaaggggaacacataatagggcctaggggcgggaaacatacaagggtgcccttgtgccttgctttgttttggggaatggggtaacagaaagaaacccaacaatggttgtaaaggggggttacccgaagatcatggtgaaggggtcgaaaaaaacaatcagccgtaatcaaaataagatggggaaaaataggacaaaa

SEQ ID NO: 182442 - DNA, 598 bp, Zea mays
  unsure (1)..(598): unsure at all n locations
  Clone ID: MRT4577_9796C.1
cggaancccggccgaccacgcgtccgctcaacgacgccgcctctctcgagcacacgcctgcgtccatctcacgtacgacgacacgtctctttttcctagcgccgcgaggcgagtggcaccttcactgatacagcgacacgactctgctactcagcgttgcaaggcgatagttcgctcccgttggccgcgtctcccacacgcactacgcgtcccgagatgaagggacgcttcgacggccggatgctggcgtgcaagcaaggcaacgacgactgtagaggcccgcatgcgagcgaggctccgaccgcccgatgcgtgggagacaaggtcgcgactgtttttccgactgctcacacgcgtgggagatgaacactgcgacgaaggcccatggcggcactggagcgaggcgagggtggctactggctatcgtgcggagcagctgcagtcgttgctgccccgggcgacgacgtcctgttctcgtccatgtccatctcccgcgtggctccacaccatggcgaggtgaaccacgcgctgcatgccgcagcattcctatacggtggggaccaaaacgtgcatcgacgatgtgaacatgtaccatccc

SEQ ID NO: 182443 - DNA, 842 bp, Zea mays
  Clone ID: MRT4577_97970C.1
gcccaagttgccccagagcttgtagtttactcggagctacttagtacaaagaggctatacatgcacggtgtaacgaccgtaaagccagggtggcttttgaagtatgccagttccctctgcaccttctctgcgcctctggaagatccgaaaccgtactatgacccactgaacgaccaagtctactgctacgttagcccggtcttctctcgtcataactggcagcttccgttgcacagtttacctatcaaagacggtgcgagccggctgcaggtgtttgcatgcgcgttgcttaaaggggacgtcctgccatgtctacgggacgccaaggatttcctcgcgctgtcaccatccgctgtgttggggcctgccaggcaacgtagagtgggagatcttcttagcaggatgaagatcggtccgaagttagtcgacagccgggcagcactgagaggcgtgtggaatttggatcctggttttctctatcctgagctcaagttgtggtaccaggatagattccatgaccagtttgacttggtgtgggagcagatgcaccaacaggttctccttgaggggcgcaagcttttcccaaagaggtccaagaaagttaaaggctaggccaaaaattttggtgcagttggttcgctggcagaagcttttgtgtgtgtgtggttttaaggaatagatacgagagatgcagtgagacatcatgcacaagcagttttgtctagacattttgccttgatctggatttgttccattgcatctccgtgttgaactgttgatgtactccgttcctctgcaagcaaccttcacccaaccatctgtgtcagaaatttttttgttcc

SEQ ID NO: 182444 - DNA, 290 bp, Zea mays
  Clone ID: MRT4577_97971C.1
caggcgttttttttttttttttttttttttttttttttttttttttggaacatgagtgatcaacaacaaaggggtgatgattcacaaataaacaagtccttgcaggggtacatgacccaattaccaacagcgcccactgaaaaaccagcaacattttacttccacaaggggaacattaacacaagaaatgcctacaaagggcgagcgtgcaaacctaagaggaggggaacttggggacgggcttggtgccctcaaaaaccgggtgcttggcgagctcgccggggaacacc

SEQ ID NO: 182445 - DNA, 425 bp, Zea mays
  Clone ID: MRT4577_97972C.1
gaccaatagctttatctacgccagagcgcagaagaacccgaacgacaccatgagggtgacactcgttgccctcgctctgctggctctcgctgcgagcgccacctacacgcatacaagcagccgatcgagctgccagccaccgtcaccagctcatgtacacgacgtcgctgcatctgccagctccgattcacctgccacctacagtgcatctcccaccgccagtccacctgccgccgaccgtccacctgccaacgacggtccatgtgccgccgcccgttcatctaccgccgacaccatgccactaccctactcaaccaccacagactcaggccttcattcccagccacactcatgcccgtgccaacaaccggattcagacccgtgccagctgcacggaacctgccgcgttggcaacaccccgatcc

SEQ ID NO: 182446 - DNA, 645 bp, Zea mays
  Clone ID: MRT4577_97973C.1
ccggccgggttcgctactgtgtcaggtcctttggaaccaacaatgcctagcattatcgacgattttcctcccaataatggaccccatgtcacagatgaggaagccgactacttggacccgaccatccctttcccatgattggtcgaataatgtgcctgcccttttttgtgtccttacatgtttggactgttccgatgttgcaacttgcatttctttgctactacaactctatccaccttggatgtcgtgatatctttgatgcaatgcctgggctcatgtcagctgaccttggtagcttgcctgtctactgaccttggctgtaagcacggtgcttaaatgaatctgcatcgtctaccacatgcttccaagttccaactggttgagctgaccgcctatctcgtatcgctctgctcagtatcggtaggacttggcatgtaaatctttgattatgtctatgcgtgtaagtctttgattttgatattacctgtcttgtattgcaacctgcatgatcgccaccattttaagcaatttgtcatctgtgtattcacaatatgcaaaccattattattgttgtaatgtaatattgaatgtttaatactatattttaccctaaaaaaaaaaaaaaaaggggcgggccctcgagct

SEQ ID NO: 182447 - DNA, 399 bp, Zea mays
  Clone ID: MRT4577_97974C.1
gacccacccgtccgccggaccaacagtgtgaagcatctgttgctacccaacatcacccacctacctttggcaaccctttatccctactgtcagcaacaacaattccttccattcaaccaactgcctacactgcacactgctgcttatttgcagcaacaactattaccattcatccagctagctactgcctactctcagcaacagctacttataccatttgactactctgccgaactgaaccccgctgcttatttgcagcagcaaatactactaccatttatccagctgcctgcaacaaaccgtgcttacttcttgacacatcaacagttgcatgcctttctaccagtagtttgcagctaaccccgcaaccctcttacatctactacaattgttgccctt

SEQ ID NO: 182448 - DNA, 591 bp, Zea mays
  Clone ID: MRT4577_97975C.1
ctgacacttacgctcaccacttacctcattgactccacaaggaaaacttgacaccatgagaggaactaaggcggtgcgccttgcgtctcctggcgctcgctgcctgacgccaggtacactacaagacctacagtgatgctgccacgacaccaccgtggcatgtaccggctgccttctatatgccgtctaccgtctatatgccgccgcatagagcagtcccatccataggaataccccactcaaccaccgcagttctatccacccccaccagttaagatcctgcgcaataggatgggcctgaaatccgaccctgggacagatcgtctagtacctgaggcacaagcataacaccctgggcacaccctactgtttggcacagtaccagtcgcatcaccagcattgctagcaccagatcaggcaggtggagcacgtgatacgctcccaatccatatactgactgggcctgctgtgcttcctgaaggagtagccgttatgcaagctcgcaatgctgatgaaggccacagtgacgcacctactgacgacgatgctcagtctgcatctgcatcagccatatccatgtccttgcaactc

SEQ ID NO: 182449 - DNA, 460 bp, Zea mays
  Clone ID: MRT4577_97976C.1
aatgagttcttctgtgagtcgatgatgactacttcagacgactcacctttgtggctagcagcccagtccctattaagattatggctggacccatttttaaatttggaacccctcccaaggggattttgtcccccgggggaaaaaaaaaagggcccccggaaaaaaacccccccaaaaaaagcgtttttgggggggtttctccctccccaaatttttttttcacaaaaaaaaaggggggccccccccccccggaagaaaaaaaaaaaaaaaatttttttttttggggggggccccccccctttttttttttttggtggggggcaaacccccccccccggggggggggggggggaaaaaaattattttttttttttttttttccccccccccccagaataattttttccccccccccccccgcgggggggggggtttttttttttttcttcccccccccccc

SEQ ID NO: 182450 - DNA, 1735 bp, Zea mays
  Clone ID: MRT4577_97977C.1
gccgcccctcctcccatcgttacgttagtcgtccgcccgcgctagtgccatccacactcttctcttctccccggccggaccggagtcaggcagccgaagcaagaaaagcaagcggccttggaagttggaatccatggcgtccacctcgtgcttcctccaccagtccaccgcccgcgtggccgcgtcgtcgccgcgcctcgccgccccgccgcgcagcgcgcaactgttcgtctgcaaggcccagaagcagcaggccgccgcggcggagagcgacgtgtcgcgccgcgccgcgctcgcgctcctcgccggcgtcgcggccgtcggcgccaaggcgagccccgccgccgccgcctacggggaagcagccaacgtgttcggcaagacccagaagaacacggacttcatctcctacgtcggcgacggcttcaagctgctgatcccgtccaagtggaaccccagcaaggagcgggagttccccgggcaggtgctccgctacgaggacaacttcgacggcggcatcgctaacgcgcccaccatcccgcgcaccgtggcacccacgcacactcttctcccccacgagtccggaccccggaggagccaagccatggcgtccacctcctgctgcctcctccaccagtcaaccgcccgcctcggcgcgtagccgcgcctggccgccgccccgccgcgcagcgcccaggttctcgtctgccagcctcgctagcggcgcccgcgctagcgcgagtggtggcacccacgcatactcttctcccccccagtccggaccccggaggagccaagccatggcgtccacctcctgctgcctcctccaccagtcaaccgcccgcctcggcgcgtcgccgcgcctggccgccgccccgccgcgcagcgcccagctgctcgtctgcaaggcccggaagcaggaagccgccgcggaccagagcgacgtctcgcgccgcgccgcgctcgcgctcctcgccggcgtcacggccgccgccggcgccaaggtgggtcccgccgccgcggcatacggagaagcagccaacgtgttcggcaagcccaaggcgagcacggagtacatcgcgtacagcggcgacggcttcaagctgctgatcccgtccaagtggaaccccagcaaggagcgggagttccccgggcaggtgctccgctacgaggacaacttcgacgccaacagcaacgtgtccgtcatcatccagcccacgtccaagaagaccatcgccgactacggctctcccgaggagttcctctcccaggtcgactacctgctcggcaggcaggcctacggcggcaagaccgactccgagggcgggttcgagaccggcgccgtggccaccgccaacgtcctggagagctccacccccgtgatagacggcaagcagtactacgccgtgtccgtgctcaccaggacggcggacggcgacgagggcggcaagcaccagctcatcgcggccaccgtctccgacggcaagctctacatatgcaaggcgcaggccggcgacaagaggtggttcaagggcgccaggaagggagtcgagaaggccgcctcctccttcagcgtcgcatgatgatgtaatgggatgcacgcactacgtagagagcttggctaggccaggcctggctgagcacgcttgtgtgttccttcgactgtacatgagaacaaagactaaggagagctccattcccgtacaaaaaaaaaaaaaaaaaaaaaaggccccta

SEQ ID NO: 182451 - DNA, 318 bp, Zea mays
  Clone ID: MRT4577_97978C.1
cccacgcgtccgcggacgcgtgggttttttttttttttttaaagaaaagctcagatttgcttcggcacaaattacatggacgtaactgaattattcacataatgtggaatcttcaccatcgtcgtggtggtaagaaaagaaaaaaagaaaggggaaagaggcaagaattatcccatctagcgagagagcaccaccgggtcagcagccgaagaagaacaagcggtgtcgaatgtcgatccttcctctgattcctggccgttctcgggagctagaggcggagtaatgtgtcgtaacgggcacccatctgatgggtctcaa

SEQ ID NO: 182452 - DNA, 1930 bp, Zea mays
  Clone ID: MRT4577_97979C.1
cggggcgccgcgcaccacaagtaggcgcgccccggcgcgcgaccccaccgccgccccgcctcccatcgttacgttagtcgtccgcccgcgctagtgtcatccacactcttgtcttctccccggccggaccggagtcaggcagccgaagcaagaaaagcaagcggctttggaagttggaatccatggcgtccacctcgtgcttcctccaccagtccaccgcccgcgtggccgcgccgtcgccgcgcctcgccgccccgccgcgcagcgcgcaactgttcgtctgcaaggcccagaagcagcaggccgccgcggcggagagcgacgtgtcgcgccgcgccgcgctcgcgctcctcgccggcgtcgcggccgtcggcgccaaggcgagccccgccgccgccgcctacggggaagcagccaacgtgttcggcaagaccaagaagaacacggacttcatctcctacgtcggcgacggcttcaagctgctgatcccgtccaagtggaaccccagcaaggagcgggagttccccgggcaggtgctccgctacgaggacaacttcgacgccaacagcaacgtgtccgtcatcatccagcccacctccaagaagaccatcaccgagtacggctcccccgaggagttcctctcgcaggtcgactacttgctcggcaagcaggcctacgggcacgcgtccgacaaaaagaacgggcacccacgcatactcttctcccccccagtccggaccccggaggagccaagccatggcgtccacctcctgctgcctcctccaccagtccaccgcccgcctcggcgcgtcgccgcgcctggccgccgccccgccgcgcagcgcccagctgctcgtctgcaaggcccggaagcaggaagccgccgcggaccagagcgacgtctcgcgccgcgccgcgctcgcgctcctcgccggcgtcacggccgccgccggcgccaaggtgggtcccgccgccgcggcatacggagaagcagccaacgtgttcggcaagcccaaggcgagcacggagtacatcgcgtacagcggcgacggcttcaagctgctgatcccgtccaagtggaaccccagcaaggagcgggagttccccgggcaggtgctccgctacgaggacaacttcgacgccaacagcaacgtgtccgtcatcatccagcccacgtccaagaagaccatcgccgactacggctctcccgaggagttcctctcccaggtcgactacctgctcggcaggcaggcctacggcggcaagaccgactccgagggcgggttcgagaccggcgccgtggccaccgccaacgtcctggagagctccacccccgtgatcgacggcaagcagtactacgccgtgtccgtgctcaccaggacggcggacggcgacgagggcggcaagcaccagctcatcgcggccaccgtctccgacggcaagctctacatctgcaaggcgcaggccggcgacaagaggtggttcaagggcgccaggaagggagtcgagaaggccgcctcctccttcagcgtcgcatgatgatgtaattttatttcttcgatgggatgggatgcacgcactacgtagagagcttggctaggccaggcctggctgagcacgcttgtgtgttccttcgactgtacatgagaacaaagactaaggagagctccattcccgtacaaggatcgatttcttcagtcgcgcatactgctcgacaaaggctacttctacgagttccgctacctggtcgacaacctgctctccacgcaaacctacaccggtaagaccgactactcaggcggattcgagaccgcagccgtcgactacctgaacgatctgcatagctccaatctcgtgatcgatggcgctcaatgctacgccgggtccgagctgaccatgacagttgactgctacgagagctgtaagcacc

SEQ ID NO: 182453 - DNA, 660 bp, Zea mays
  Clone ID: MRT4577_9797C.1
accgcaccccaccccacccacccagtccatcccccgtcgctctcacgctcttcgtgctcgccgcctcccttcgcgtgctgcctcatggcttccatcgccggatctgcggtgtccttcgccaagcccgtcaaggcaatcaacacgaactcgctctctttctctggtgcaaggaggggcaatgcatttcttcgtctgcagccagtgccgatgagatttgctgtttgctgctcagcaaagcaggatacagtggagaaggtttgtgaaattgttaagaagcagcttgctgttcctgaaggcactgaagtttgcggtaccaccaagttctctgaccttggagctgattcactggacacggtcgagattgtgatgggcctcgaggaggagttccagatcagcgtggaggagacgagtgcgcaggcaattgcgacagttgaagatgctgccacgctcatcgacaagcttgtctctgcgaagtcatcttgaagggaggtcgtaaatcgtaatgattggagctcgtaagctagtagtcctaccttgggttgatccttgttgttctaccatagtcgttattatatggtgggttggtgattttctcaggactatcgtctcctgctgtgtgtaataagataattggttaagtatgtaagctgttgaacatcg

SEQ ID NO: 182454 - DNA, 433 bp, Zea mays
  Clone ID: MRT4577_97980C.1
ggaccgatcaccgcacgccggtgtgcgcgtgcgtctggcgcacggccggcgtcctcctcccaacgcgccggaaataggcaggcggtgcatgcatgagcaggaagaggagagaaggaggcggcggcggaagaggcgctgggccggtggaccatcacggcggcggcaaggggtcggaggccggcgctgccgccaccgatgccgtgtccatggacggcggcctccgcgaggtgtctgtccccgtcgtcttctcggtttggtgcctcctcttcctcctgcgatcccagttcctccacagccaggccgacgacgacccttcgtcagagttctacgaggagcacggcatgcgcgacagctactgcaaggtgaggccgttggaggcctacgtgctcccctaccataacgactcgtgtcagtcctcctactcgcactcaca

SEQ ID NO: 182455 - DNA, 393 bp, Zea mays
  Clone ID: MRT4577_97981C.1
attgtgtatattttcacttttagagttttctttattttttttcaagtttactcaaccacaatgtcaaaccatcacccttgtagagaggagagagatctatgccattcaaaatatctatatacaagagtaaaaatgggccatacaacctacagttgcatagctgcaatcactagtagctaagcaggaccgagttaattacatgcatgatcacacggatactggtgccatctgatgcggacgtgcggagcgggcgttggtgggccaattgcttgcatacttgctcaaagattggtagtaaagctcagcaaaagaatgggcttgctgggttgattgccttggcaacatatgaaatccattgaaccttccatgatggcttcatagaaaatgacaatt

SEQ ID NO: 182456 - DNA, 312 bp, Zea mays
  Clone ID: MRT4577_97982C.1
tccggctctagctcgccgcgcgcgctctgcttctagcgcgtgccttggagctcttgcgcgcccctgtttcgcataaccatctctaccgctaggtatctccatggacgcgccaaactattgccccatcgcgtatttctctggtggtcgcgtgtgtgcgcctcgtggttgcgttcagccttggttccggtacctgcggtgcttgcttccttagtgcttgtcttcttccccctgcgcgacgaggagaggccgtgggggaaatgctgcgatttgaccgtatgcgccatgacgtacgtgaccatttggtcgtgcttt

SEQ ID NO: 182457 - DNA, 470 bp, Zea mays
  unsure (1)..(470): unsure at all n locations
  Clone ID: MRT4577_97983C.1
aaaaaaaaaaaaaaaaaaaaaaaaaaaaaaatcgagcatcgcagaagaataggcgtgtgggggactgcgcctaccntccgcgagatcaaacctttgccccctttctcccatattcccttccggtcggcgcggccgcttcctatcccggtacagacagacacccatggagggaaggtgcgattttcgaatccacatncnnggccaggcccggttatcacaggtcggaaaaccgcgtcgctgggaagcgtggggggtgcgcgttgagcatggcattnnncaggcttgacgggtcagaatcgccccggtgcacaagaaccatttgnnggggaggtagatgaatgctttcaacaacctnntcttcagtgagactggggtgctgggaaagccacgtcgccccgtgcctggtttnnttgttgaccctnntgacacccactgtcagtgggagtgagggtgaggnnactgagcaccta

SEQ ID NO: 182458 - DNA, 259 bp, Zea mays
  Clone ID: MRT4577_97984C.1
tcgctgaacgaccaaggcaacttcctgactgacgaccaaatccttccgttgttgctgggtatctgcagaggccttgaggccattcatgccaaaggttatgcacacatggtcctgaagcccaccaatattttgcttggtgacgaggggcagccggttttaatggacttgggttctatgcatcaagcatgattcccagtggagggatctcgccatgccctagctctacaggactgggcagcccagcggtgcaccatctcct

SEQ ID NO: 182459 - DNA, 452 bp, Zea mays
  unsure (1)..(452): unsure at all n locations
  Clone ID: MRT4577_97985C.1
gtcgtaaataataaaggatctgcatttagaatcagaagagttaggtattttggactacaataattgtgattacaatgcaagctacctttactaaatttttccgatggtcgctggcggctacgtgcttggcgcgcgaaccacaagaccggtcgagcacgaacctcacccacgtacccaaccatggtgcagcaaccatggcgcgacaccagcaagccaccaccatgacctacagacctactagctagctcctatgcccaagggtactcctacagatctgatctggccgtggcggtcgtcccgccgaagacacgccatcgncgncgncaagttcctgctccggcgacatccccccggcagacggcctcacgtacgactgtaccaccagaaccgacgctgtcgtctggaagtccttcgacgagagcaggtccccgataggccccagcttcgggcac

SEQ ID NO: 182460 - DNA, 280 bp, Zea mays
  Clone ID: MRT4577_97986C.1
acgggctccaccacgtcatcctctatgcaaagttcaaccatcttcatgcaccaatctactctcatctgtgtgatgagaccgtacgaatacacgataaatggctctatattttgatgcgcaaagaagaccgacacatgcgatacataaaatggtgcacatacaatgagatggagggggggaagaccatattgatgtaggtccccaaagactatcaagatatcattgatgttgttatggcttcatcgtacatatataaccacccgcgttcctcacacgggaa

SEQ ID NO: 182461 - DNA, 201 bp, Zea mays
  Clone ID: MRT4577_97987C.1
atgccaactccataacattacttggggttctcaacaataaccaaaggcagcttgatgacatacacactccatactcttactgttggttgctataggaccgggaccacactcaatacagcacctcaattgagacggcgctgccacacataacagggtgcaggaaccccacagaattccttttcaccaccatcgccacatagc

SEQ ID NO: 182462 - DNA, 152 bp, Zea mays
  Clone ID: MRT4577_97988C.1
atactctctccctcgccgccggccacctcggcctgctcccacgcgtaacgtcggattattcccacgcgccaactcggactcgtaccaggcgtcatctccgtgacaaatcactgaactagggagatcatcgctcatatcgtctgatggaggag

SEQ ID NO: 182463 - DNA, 210 bp, Zea mays
  Clone ID: MRT4577_97989C.1
catacgctgtcaactgtctggttcttcgcgtcgtgtcttcttgtgcgccatatgggccggtctatactgttcgaggtaaccatcgacatgcccacccagacaaacatgctcatggctcaccattgggagctttaggatcatatttgcgaaaccgctgctacttgtcgtcctcatgaatctatattctgaagccaccgccgatgccctcat

SEQ ID NO: 182464 - DNA, 565 bp, Zea mays
  Clone ID: MRT4577_9798C.1
gtcgcctccagttcccctctttctcatcctccttttcgaaaaactactcgaagagcttgtgaactccatatctagctacgctcctcgtcgtcctcaacgacaccgcctctctcgagcacgcgcctgcgtccatctcgcgtacgacgacgcgtctctttttcctagtgccgcgaggcgagtggcaccttcactgatgcagcgacgcggctctgctactcagcgttgcaaggcgatagttcgctcccgttggccgcgtctcccacacgcactgcgcgtcctgagatgaagggacgcttcgacggccgggtgctggcgtgcaagcaaggcaacgacgtctccgatgcccgcgcacatggaaggcaacgacgactgtagaggcccgcgtgcgagcgaggctccgaccgcccgatgcgtgggagagaaggccgcgactgtttttcctactgctcgcacgcgtgggagacgaacactgcgatggaggcccatggtggcactggagcgaggcgagggtggctactggctatcgtgcggagcagataaaatcagtacaatttgtatctacggg

SEQ ID NO: 182465 - DNA, 195 bp, Zea mays
  Clone ID: MRT4577_97990C.1
cgccagcatcttcccgacctcgagctacttcgtctcccagtatgatatcaggatactgatctgtaaggaccccaaggagggcaactgttggatgcagttcggcaaggactacttgctggcttactggccgtcgttcctcttgtagtacctggcggacagcgcgtcgactgtggagtggggcggttaggttatcta

SEQ ID NO: 182466 - DNA, 283 bp, Zea mays
  Clone ID: MRT4577_97991C.1
cagcacaggaattcggctcgaggcacagtcccccccgattgatcacccccacagcaccgagacacccgagtggcgtttgaaccaagcaggggggacagcccccacgcacgcgaccacccaacacacccaacggacggcacaccaaacacccacaccaccgcggcaccagccacgactggacacggaagcaccacgacaacggggccgagcagcacaagcaccaacccgcaaccgaagcacacgcagacagcgaacgcccgcaaccggagagaaacccagcgag

SEQ ID NO: 182467 - DNA, 365 bp, Zea mays
  Clone ID: MRT4577_97992C.1
tgaaatatacacatactctacaaatcatgttgcactcacggggataggtatacaggaattagtatgatcatctcattaatgcactatcctgaagccataggtaatgagttcggaactcctagcagaatcacaattccacattttcaagaaatcaggacgcaaaactgttcacatatgaatcgaaattctttgatgccttattatgcctatcctgaagcctacggaaatgcgatcggaatctctcggcgaattccaattccacattttcaacaactacggaggcatacatggtcatacatgaattgtagctatatgttttcatataattcctatccttaatcctaatgaatttagatcgtaatccc

SEQ ID NO: 182468 - DNA, 696 bp, Zea mays
  Clone ID: MRT4577_97993C.1
ggagaaccgtgcctcttccgctccccgttcccgcaataaaggcctaccctacctgatttgctcgtgccctcgctcggcatcacacagattcccgcgtcccgccgtcggcgactcggcgtcctgctgattgcgtcgcgaggagtgctcgtagccgccctcctctctcagattcagtcgtcgcccatggcgaggaatccaggccgcaccgtcttcatcggtgagagctctcttcacgctcacgattcgtttccctcgtttatgagtgagttcgtaggatcctacgaggttttaggattattttagttcgagccagcggtgtgttccaatcaagttgttcgtttgttttggttagagtctgagagattgggtgattttgttagatctgaatctgattgcgtcagcaattcagtgtatattgtgtgtttgactgttctgcgctcgcacccagcaagccaatacacggtttttttttggcttaatagaagcttgtcctttgggtaataggtggtttgtgatttaatatttggtgcgcagctgattatgcattttctgatgctggtgtcattgactcagcggttactgttgattatgcatttctgatgccaaatgcctcgactataggtatcccagattcgtgctgttttgaggcgttaagcatttatacctgaaatttatctgcttccaaaaaataaaaac

SEQ ID NO: 182469 - DNA, 357 bp, Zea mays
  Clone ID: MRT4577_97994C.1
tggcgaaaatgcctccccactacccctgatgaggtcgcgaacatacaagcggcaataagatgagccactggggccggagctaatatgcgcgctgctccaggcgaggccgtccgacgccacggcgcagtccgtcccggagtcgccggcgacggcggtgtcgtagggcgccgccaagcccaagtgcgtggccggcgccaggaacgaccacgcgtgccgcgtcggagccgtgcacgacccggacagccaggaggaggagggctataaagtcaccatagacgcgcccgcctgcgagcccgacgacgtgtgtcacgacaactgaagcgactacaacgaccgccacgagcccaacaacgacca

SEQ ID NO: 182470 - DNA, 357 bp, Zea mays
  unsure (1)..(357): unsure at all n locations
  Clone ID: MRT4577_97995C.1
attttttttttttttaatacgaactttgggactatattttttcttctggctagagggtttttggagggggggaggggggaaggaatgtggaaaaggtgctgttgatgncgtgaaaatatttgtgtatgtaggaattatacatggtgggttagaattggggaaagtnatgcggttgctttaataatggagggtntgggtagaagtttagtgattgttctgaaacggatagaatgagtggatagagtagaattttttttggagacggatgtattttgtggagttgtctgtngtatatggttgtttgctaaaaatgatgtgagcgagtagtaaaaaatatatggtattaaagtttngtgt

SEQ ID NO: 182471 - DNA, 2287 bp, Zea mays
  Clone ID: MRT4577_97996C.1
ccggaccgccttcccgggtcgcccagcgtccgccccctccaaaccatcgataaaacacacagtagtaaccaggaggtcagtttgcgtggattgccatcgccccttcctccacctctgcgctccaccacctaataattgattccactgccaatacctgcgatgagtgccgccatgccgccggcgatggaccccgcggcggcgggggagatggcgcgggaggccgccgcgtggtgctcgctgcacggcctcgtcgtcggggaccgcgccgaccagctggcttatggagtttggatgagagggatgagatgggaacagacctgttcctagaggcgtttggatcgcggggtcacgcggagagtctccgtcttatcgacaaggttgaccaatctgtggctgtaccggatttattgcttagagatcagcaacggtccctggtgttggtttggtccatgctccattctccttgctcccagcacattttccagagtccttttggaggcaggcgtgcgagctcgctcccgtttttaacgagcttgtggaccgtgttagcatggacgggaatttcttgcagaatgctttgtccaaaacaaggcaggttgatgatttcacatctaggctcttggaaattcacaggaaaatgatggaaataaataaggaagagaatattcgcttggggttgcaccgatcagattatatgctggattcagaaacaagttctcttcttcaaatagagctcaacaccatttcagcatcatttcctgggcttggttccttagttagtgatcttcacaggtccttaattaaacaatatgggacttctttaagtctagaacacaagagggttcctgcaaatgcggctagcactcaattttctgaagcattggcccaagcatggtctgagtttaatattgacagtgctgtaattatgatgattgttcagccagaagagagaaatatgtatgatcaatactggctttccaaacatttgcaagactcacatggcataacaactataaggaaaaccttatcgcaggtggaagcggaaggccaggttctcccagatggaactcttcttgtaggtggccagaaagttgctgtagtgtattttagagctggctatgcaccaaatgattacccttcagaagcagaatggagtgcaagacttatgatggaacaatcatctgctgtgaagtgcccttcaatatcatatcatttagtgggaaccaaaaagatacaacaagaactagcaaagcctaatgtgcttgaaaggttccttaaaagtgaggaaattgacaaggttcgcaaatgttttgctggcttatggagtttggatgacgaatatattataaaaactgcagtggaaaaacctgagttgtttgtattgaagcctcaacgtgaaggcggagggaacaacatctacggtcttgatttgagggaaacgcttgtcagactacagaaggaaggaggggatgcgcttgcagcctacatactgatgcaaagaatcttcccaaaagcttctcctgcttatctcgttcgtggtggtgtttgccacgagggtcttgcaatttctgagcttggaatatatggagcttatctgcgtaacaaagataaagtggtgatcaatgagcaatgtggttacttgatgcgaacgaaggtttcttcatcagacgaaggtggcgtagctgcgaggtttgctcatctggattgctgatacatgacagccacctgaaagctcatcctgcttatctcgttcgtggtggtgtttgccacgagggtcttgcaatttctgagcttggaatatatggagcttatctgcgtaacaaagataaagtggtgatcaatgagcaatgtggttacttgatgcgaacgaaggtttcttcatcagacgaaggtggcgtagctgcagggtttgctgttttggatagcctatacttgactggcaagtgagataacaaaaggagcggcggctacatacaccgtcaatggatcatcatgtcctccatttagatcgacacagaataagctgctgcagactagagccattatgtgaccccatgtcccgttgtttgatgaattccttctatctgcccctgccaagggagagaagagaatagacatattattgtgtgtagattaaatgtgcatgaaatccatggaaagggtgaaggatgaaccccgtgcccatagccgtgatgtaggccggcggtgccgtttcttgttcttgatcaccttgacagcaacggggaattctgtgtttcttttgaggacaaaaaaaaaaaaaaaaaaa

SEQ ID NO: 182472 - DNA, 864 bp, Zea mays
  unsure (1)..(864): unsure at all n locations
  Clone ID: MRT4577_97998C.1
cccagcgtccgaggaaatgacaggttcgcaaagttttgctggcttatggagtttggatgacgaatatattataaaaactgcnagtggaaaaacctgagttgtttgtattgaagcctcaacgtgaaggcggagggaacaacatctacggtcttgatttgagggaaacgcttgtcagactacagaaggaaggaggggatgcgcttgcagcctacatactgatgcaaagaatcttcccaaaagcttctcctgcttatctcgttcgtggtggtgtttgccacgagggtcttgcaatttctgagcttggaatatatggagcttatctgcgtaacaaagataaagtggtgatcaatgagcaatgtggttacttgatgcgaacgaaggtttcttcatcagacgaaggtggcgtagctgcagggtttgctgttttggatagcttatacctgactggcaagtgagataacaaaaggagcggcggctacagctttcggttgggggcatacaccgtcaatggatcatcatgtcctccatttagatcgacacagaataagctgctgcagactagagccattatgtgacaccatgtcacgttgtttgatgaattccttctatctgcccctgccaagggagagaagagaatagacatattattgtgtgtagattaaatgtgcatgaaatccatggaaatggtgaaggatgaaccacgtgcccatagccgtgatgtaggccggcggtgccgtttcttgttcttgatcaccttgacagcaacggggaattctgtgtttcttttgaggacacgtgatgtgcatcatcagtatgaatgtaaccaaagaataagggcctatttagtttatgactaactatgtc

SEQ ID NO: 182473 - DNA, 206 bp, Zea mays
  Clone ID: MRT4577_97999C.1
ttaatatcaccagaaactgtgccagaagaccggggcacacttgagctggccagaggggtcgccacctgatgctacttgcaatgggtaacaaccaccaagcacacatcagaggggacaatgcaagagtgaggacaatgaatctggatgtaacactagattttactgattgcaaatgcaacagctgcaagatgctctctgggtacact

SEQ ID NO: 182474 - DNA, 291 bp, Zea mays
  Clone ID: MRT4577_9799C.1
gctactcgtgcgggcgaaatggttgcaaattataggacaggtttgggccgtaccgatggtatgccatgtaatacttacaatgctgagattggccttgggcatgctgaagggcaatttaccaagcggaacctaaccagtgtgaaaccctatgctaccatgctgcgacatcatggcccggtgacttgctgttgcattcgacaaggggcggaaatcacacggtaccagcaggtgttgacaggaagatcaagatattagacctgcggacctaggaggatgtgcggtattacccaa

SEQ ID NO: 182475 - DNA, 402 bp, Zea mays
  Clone ID: MRT4577_979C.1
cggtttcccgctcgacccacgctccgacgcagagctgccatgaagcctcacattggcatgctatatatgttgcctaggtatgctcattgaactttctgcaagtgctgctactgcgaccattttcctccaacgctcgcaagctcctataactctcattaatgccccgtacctctcaccaacactagtcttaaatctgtgaaaacccacttcttgaaccatacatgatccatcacgcacacgcagacagcattttacttttaccacccttattcatacaacaatcatctgccctattacaacaaccacttctatatcatttattggaacaatacatcaaggctcaacatctacaacgactcctgcttgcaaaacgtgctgacgactctcatcaacagctatcac

SEQ ID NO: 182476 - DNA, 926 bp, Zea mays
  Clone ID: MRT4577_97C.1
caaaacagcaaaaccaaagcgctcagccgctcgcgaggagcgaaaggcgagcgcgcagccgggcgcccgtggcggaggcgaaacccccgccgccgcatcgccctgagaccctccggttcggcccgggccgagctcgagcccgcgcaatctcgccgccggcgggcttgatctgatccaaggccaccgcgcgccggcgcgggcggcgaggaatggggagcgtggacggccgcggggtcgaggggatccacgaagctaatcggcgcgcgcagttgattggatggatgaatgccttactcccggaattcagtttgcctccggattcatcgagtgaagagctgcgagagctgctcagtgacggcgtggtcctgtgccgtcttgtgaacacactcatcccgggggttcttgagggatcctgggagggttatgcaccgtcagatcagaggttaggcaacgtgaagaaattcctctcggtggtctctgatatggggctgccaggcttcagtttgaaagatcttgatgagggattaatttctgtggaattcttgaggggcatgtggatcgatgatattaccagatgttaccagaactgagaaaactgaattgagggttccattatcagttgtcacacacccaaaagttggtatgcacgccagaactctggagtgtcatacttttgaagctcagctattattgcatggatgctgtttttgatgcagtatttcttagtagggtgcctagcgttgtcagtcatgtttccagtcagctatgtacagacaagtataagttcgcaatgtacatctatatgtgattcctttctcttttttgtgataaatatgttcttggtatcattgcaatgtgcaacatataattgactgcaaaaaataatgtaaaaatctggttccacagtaaatgaacttgaatttgtt

SEQ ID NO: 182477 - DNA, 302 bp, Zea mays
  Clone ID: MRT4577_98000C.1
tgaagcgtaaaggatcgcaatcaggaaataagacaaacttcaagaagcccaaaccaactcaatctgaacaattgaaagagaagaagcttattgttgttttagatcgtgcttttctggaaactgtatacacgaaggaaaaatatgaactactgaattgtgacgaccaccaaaggattataaaaaaaaattacagagacatatcggatgttaggcctgacattctacaccagtgtctcctaatgttaatggacagtccgctgaataaagctggctacctttaagtgtacgtgaggagtctttag

SEQ ID NO: 182478 - DNA, 1333 bp, Zea mays
  Clone ID: MRT4577_98001C.1
ggcgttgtgaggttcgggtgggagtacaaccaaacaccaacccaagtacccaacccacccatcaacaaatcactccgccccatctctttcctttcccgcactgacaatctgccacaccgcggccatgtcaacatggtgctagcagtagtgtatgcaatggcagactggtagtggcaccaccacttcgacgctcccatcccccgtatccggacggcgacggggaccgggggcagtgcgtactgcctgctgctgctgttgcgcgcgcggacctaacgcgccctttccggtgtagtaaagcaaagcctcgccggtcggcagctgccctgctatcctaatccgcttgctctgccagcaagtcagcaagaggcagcagcgccggcccctggccggcctcggctcagctggcgaaggccgtgaccgtgagaagccatgagtagggaacagcagatgccacggcggaggttcatcgccatccccttctcctccggctgccgctcccactccagcgtcgacgtcgtcgacactgggcgccacgccggcaacggcaagaagccccacccgcaaggggctgaagcaggggcggcggcggcgaggggcaagggggagtctctggtggcgcggctcctgcgggggttcaagaacctgtcgcagatcttcgcggtgtacgacgacgaggacgaggaggaggaggagcgggagatggtgatcggcctccctacggacgtgaagcacgtggcccacatcggctgggacggcgccacgagcaccagcagcaacctccgttcctggaaccgccccgcgccgcctccaccggcctcgtcgttctccgcgccccagcagcgtccgcaggagcagtacccgctgcccctgccggcgctgtccatgcggcagctcgagctcgccatgggcgcccaggcccaggccgccggcggcgcaacgactgcggcccaccggcgtcacagctagcgccagacagagcgagaggcggtggtggtacacgcctacgggccttggtgatgggctgggctcgtccgtcagccaggcgtgagcgtgacaggccgtcgtccgtttctgccgccccatggtcggctcccatcccatgtggagggaagagaagggtggggggagctggtcgtcggagttggtgcgtgcttcgtttgcttgtgctttggcgccatatcgctgcggagcgctgtacgtagccatttttcgccggggggggtcctcaccctcctcgttggcttgctacgtgttccttgccgccattacgaaaccttaattgctcgctttacacgatactccatccatgggatctggtcgtcgctaccaaacc

SEQ ID NO: 182479 - DNA, 393 bp, Zea mays
  Clone ID: MRT4577_98002C.1
ggcggccttcccacgttacccggcaccgccgtcggctgctgctgctcccgcaaagcccgaatgcctgcaccgccggccgcaccgccggtgccaccggccgctccctggcgtcggcacgctcccacggcggcctcctctactcccagaaccgtcctgctcctcctaccgatcctcctgctgctcctcttcgtgctctccaaagcgacggatctaaccttctccaccaccaccacctcctcctcctcctcccgccatgttccagtcaacctccgctcctttgactgctacgcctcgccgcaggcttccccgatggtcgccaaccttgtggagggcgtgccctaccccttcttctactcgctcgccgacatgggtaccctccccgaccacccccac

SEQ ID NO: 182480 - DNA, 589 bp, Zea mays
  Clone ID: MRT4577_98003C.1
ctccctacggacgtgaagcacgtggcccacatcggctgggacggcgccacgagcaccagcagcaacctccgttcctggaaccgccccgcgccgcctccaccggcctcgtcgttccccgcgccccagcagcatccgcaggagcagtacccgctgcccctgccggcgctgtccatgcggcaggtcgagctggccatgggcgcccaggccgccggcggcgcaacgactgcggccccacgcgtccgcagctagcgccagacagagcgagaggcggtggtggtacacgcctacgggccttggtgatgggctgggctgggctcgtccgtcagcctggcgtgacaggccgtcggcgtcgtccgtttctgccgccccatgctcggctcggctcccatcccatgtggagggaagagaagggtggggggagctggtcgtcggagttggtgcgtgcttcgtttgcttgtgctttggcgccatatcgctgcggagcgctgtacgtagccatttttcgccggggagggatcctcatcctcctcgttggcttgctacgtgttccttgccgccattacgaaaccttaattgctcgctttacacg

SEQ ID NO: 182481 - DNA, 409 bp, Zea mays
  Clone ID: MRT4577_98004C.1
atcgaaaattggggagggtttgaagaaccaagttttgaaccatgggcccggcgggaaaggtcacctgcccggaaaaaaaaagggggatgggattggagcttttttgagccctggtgctaggaatggtcccattgcaggggccgggaataatcccggggacccccccatcccccagcagcagggaatccgggtgcccacgaggggggagccccaaacaaacccccgagctggagctagcctaacaatcggaaccctgaaagggggggaagaaacggtatccagccccgccttcgggaagaagggcccagacaaaggctctcccccggggtctccacaaatgcccaccctcaaggtagggctagctttgggggccccctctggaggaaactttaccagggcgcccactccc

SEQ ID NO: 182482 - DNA, 2004 bp, Zea mays
  unsure (1)..(2004): unsure at all n locations
  Clone ID: MRT4577_98005C.1
aattcggcacgaggtggttttgccttcgcttttgcttatgcgtacgcgcggccgatcacggggcccaccttccaaccggacttgagtcacttgactccgccgcgggattccccgccagatctcattctcgccccaaccctaaccgccgacggtggccatgatggccaccgagcccttgtccccggggaatctcgtcgaggacgtcgaaacactacccctggactcctcctccactctcgcggctacgacggacccgctgctccgcccacctcccccctcgtccaccttctctcccaccgccggtgagaaccatggcgcgtttctggacgaggaggatgaggacgtggtggatgacttcacgcctccgctggctccccatgccgctacggccgcgacgaagtcccgcgaggcgtcaccgtggttcgctgagatcactgtctccgagcctaggaagcacgcggagcccgcgaccggagccgtgggcgtcattcccggctcggccagctacgtctcctacctcatcgccactcaggtgcccgacggaggcgagttccgcgtgcgtcggcgattccgtgacgtcgtggcgctcgccgaccgcctcgcggagacccaccgcggcctctttgtaccggcgcggcccgacaagagcatcgtcgagggccaggtcatgcagcggcacgacttcgtgaaccagcggtgcgtcaccctccagcgctacctccgccgcctcgccgcgcaccccgtcgtcggccgcaaccccattctccacgccttcctcaccgagcccagcggcatccccacttccgacggtgagtctcccaggtggagccctgcgatgagtgctgctacgtccatggctgcttccgctccagtgacgcctaccaagagtgggagagacttttttggggtgttcaagggcctgaagcagacagtgacgaatgggtgggtggcggtaaggccgcctctggtggaggaggagattgacacaaagtaccttgtgcacaaggccaagcttgaggacttggagaaacatctggtgacagcatctcagcaggcagaggcatttgttaaagcttttgacgatctaagatcaacgacaggtctcttgggaatgtcattcatcaaactggctatgtttgaaaaggagcaggctgcgtgtagttctcagaaaagacgagctgctgacatcagtaattttgccagtgctgttattagagttagcagatcacagacaaaactaaacactgaaattgtaaaacatctgggcattatccatgagtacatggagacaatggcttctgttcataatgcttttactgatcgttccaatgctttgcttcgtgtgcaaaatttgtcagcagatctatatttcttgcatacccgggcaggaaaacttgaatctgtatcagcgagaggaatggatcaggagagatcaaggtatcaaaagatagaagaattgaaagaaacagtaagagccacggaagatgcaaaaacacgtgcacttaaagaattggaacttatcaaggaaaataacatgaatgaaattaaaagatttaacaaggaaaggcgccaagatttggtggagatgctaaaaggctttgtattggatcaggccacatactcggatcattttgctaccatatggacaaaggtagcagaagaaacaaaaggatatgcaaacagcagcagttgaagtaggatgtacatattcaggtgaatttgagctgttactgtgcagcgtgaatagctacactcattgagaatcatgcgactggcttatacacaaacaggaccacactcttcattcccgaaggatacatttctatggatttttctggggattggtatctcaagttgtgtacctgaatttttttcagaaaatatagcaataccattttccacggcttcgtttccgctgccttggcttcatacagggtttacattttcgttttgtactttcaanaaacttttttgttgaccgaaaaaaaaaaaaaaaaagcggcc

SEQ ID NO: 182483 - DNA, 368 bp, Zea mays
  Clone ID: MRT4577_98006C.1
attcggctcgaggcacgaccgcccgtttgtttgcttagggagagcagtgcacgctacgccaagggccgtacctgcgctgagcgcttacgcgacgtgtctatggaaggacacgcacgactcttcctatacgtaggacacctaccaggaggccattgtggtcagaccctgaaccatacaccagacttaggactacgcgcactttctatagaacagcggaaaggggtctggtcagacccagcaggacacagtgacagcggggatcggagcaccagacacagaaacggggactacaggaggccaggagcggtcactaaagctagggatgaactcaccgaggatgataacactatgctcgacaggaacatata

SEQ ID NO: 182484 - DNA, 563 bp, Zea mays
  unsure (1)..(563): unsure at all n locations
  Clone ID: MRT4577_98007C.1
ccggccgggaggcgtcttcctcacaacggaatccgagcatggcggggcgagccgaagatcacggcgccatgcgcgcaaatctagctccggcctcaaccaccgcccttgtcggttaataaaaccatgcaccagtcgcatgtttccccttttcctagagtgcaccgcggatctgcatcctcgtcggcgttccgtcccttgggtacgtgtcggagggtcgtctgagagtgggaagtgtggtgtcgacctcggacagggcagaccttcgctatatcatcggcaattcctcgccggtgcgggcgctccaccgtagatcgtgccacaccgtgggccgcctcaactatctctccatctccgacgaacaagtcaccgaggacccaggtgttcagcaggtggaaattgatgagcaggagctcattgaaggcgaaggctggattcacggaacccgccaggacaggccaagggcgctaaccggatggaggcctgttcgacccccttcactcacacgaaacaagacagaggaccagtcgaagtctacnagacctcccaccctcaccaccaagaga

SEQ ID NO: 182485 - DNA, 351 bp, Zea mays
  Clone ID: MRT4577_98008C.1
gttgggatatttgtggtttttttgggggggcaaccaaattatttttgaaaggaagacgaggggattgccacaacaccttgcccaaaaggccacaaagttttatttgattttagggcaaactccaaaaactgggcatttacaaaccctggatttacatttgacctatacaggggagaccgacgggtcgtatggcgatactttgggttttatcaatggaccacattttgaattattttaaaagaactttagatttttcaagaatccctccacttctcagggggacgcccccgtttgggccagaagatggacacccgggaccagagggggaacatgaagctatagtttgggggt

SEQ ID NO: 182486 - DNA, 435 bp, Zea mays
  Clone ID: MRT4577_98009C.1
ggacctcagcggcggatctcggggaatttcttacaactaccccttccccgaatcccattattctgctccgcgaactgactccgcgagcgacttcctgccggatcaccacgacggggcgcgccgatgatgatggcgaggcagcgagagtgcagccgcggcagcagggcggttggctcgatggatttgaagacatcatgtacggcatcctccttcgcctggttttctctgatgactaatagattgggctatgattttccatgagagagttttttagctgtagggtcatgatattggacccgttctcttgatttggaaaaagagtgccaagctgatcccgaacatgcgtttcagaggtcagaatgttatcttcttttagctgcaggcattttcttgggttggaaacttttaggaaaaaaacccccccttggggcttgg

SEQ ID NO: 182487 - DNA, 311 bp, Zea mays
  unsure (1)..(311): unsure at all n locations
  Clone ID: MRT4577_9800C.1
cagttgaagctactagcgtgtanctagggaagagaagcgcgcgagtagctagcanacntacgtaggcaaaagcctacttggtttgaaaggccccgaaccattattcccttacccaattgcgccgaagccgaaggaacaattgggcccaacattaacttggcttaaaaaagattgtaccaatacttcgcggtgattgcaaaattcttggttcacttgcacaccacatttattctggtcgtcatctacaggatatgcccggtggccctgttacttctagagcaattcgcttcgtccgtcgtgctgtcgtacaa

SEQ ID NO: 182488 - DNA, 1652 bp, Zea mays
  Clone ID: MRT4577_98010C.1
ttgggtacctcgaggccggccaatgtttttaagctccaattaaaattttcggtgcctggggaaaaaaaaaaaaaaaaaaaaaaaaaaaaaaaaaaaaaaaaaaaaaaaaaaaaaaaaaaaaaaaaaaaaaaaaaaaaaaaaaaaagtctctgacggtctgacccgtcgcctccctctccccttgacgtgcgggtgcggctcctcctcgccgacggcgccagcgccgcctccctcgccctctcggcatagaccggcgacggtagctgcatcttcgagtccgcagtggtgcagtgaaaactagaagggaagaacagcctcctaatggataggaacaacgaactggaagaggtggtcccaaatgactcggaccctcttattgggagggagaacagggagtcagagtcatcggtagagctgtcaccgccacagccagcaactgtgaacctgctggagattgaggatgaagagaccgacggctcttctgctgcgtgttgccgcatttgccttgaggctgagtctgagataggtgatgagctaatatcaccttgcatgtgcaagggaactcagcagtttgttcaccgttcttgtcttgaccactggcgatctgttaaggaaggatttgcattttcacactgcacaacttgcaaagctcagtttcatcttcgagtggaaacctgggaggataactcatggcgtaaaatgaagttcaggatctttgttgcaagggatgttctactcgtgtttcttgctgtacagcttactattgctatcatcggtgcgattgcatactttttagacagggatggaagtttccggaacagttttagcgatggttgggaccgcttcttgtcaaagcacccaatacccttctactattgcataggtgttgtgattttctttgtgctgcttggattcttcgggctgatagtacactgctcatccttcaacgacaaccaggatccatgcctagctgggtgccggaactgctgctatggttggggcatcctagactgcctgcctgcttccctggaggcatgctttgccctggttttggttttcgtcgttgtgtttgccatccttggcatcgcctatggcttcctcgctgcaaccatggcggtccagaggatttggcagaggcactatcacatcctgaccaaaagggagttgacaaaggaatacgtggtggaagaccttcacggcaactacacagcgccgaagcttgatccggagcatgaggaacggctgaagatgctgaagcttctttagagagagaaagaggtgcacgccttcctgtatccgtggcaagtgcatcaacatggggcaaccctctctgcgtgccagattagggaatggccatcccataacactgtacaaaatgatgaaatcctgcttggacttgtatgaaatctctatccgacgaaacaaacagaagttctcagttttaccttctcggtaaccttcctcgacaacttgtctccgaaagtgtacgtgttcgtctttaatctttcccttttttttttaatagcctttagcgtccgaagcgaagatctcttacaatgtgcggtttgtgtaagtactgtggtaatatgcattctcataccattctagtgcttttcgcagttaataaaaaaaaaaaaaaaaggactgagctc

SEQ ID NO: 182489 - DNA, 215 bp, Zea mays
  Clone ID: MRT4577_98011C.1
ggccgaaaaaaatacttaatgttgctagcccaaactcaatgcttgatcatacggggctgctgggacaacaagatgaaagagtgcgatacgactagtgctacatttacatgaaaccattttttaatcgaccactgaaaaataagtcgctagtactagagaccgtgggcgaggatcgaaactatgacctgactactactgtccaaaactagggaacg

SEQ ID NO: 182490 - DNA, 450 bp, Zea mays
  Clone ID: MRT4577_98012C.1
cttgggttcaaggccggcctccaccaaaaatgggaaaacctggactgacctaagtttacgggagtttcaaaggcctgcgcatcatagacagtggatcaatatcacctataatcaattagtaacacaaacattcccaacctcatgtaatttccaggggattcccttcctacctgatcttctgtctctggttttattgctcctataacttcgcagatggctctctcctgtctgattatcctctccttgtaccccaacaggagagcaaaactctgactggggaggacagcggtaggatgagtaactttccttaacaagtgatctgcagagcccaggggacagagaaccacactaggttaaatccatggttgccgaggaccagccccggctgatccagggtattcgaaggggagacggcgtcggcgactatttatttatttatcaaagatataa

SEQ ID NO: 182491 - DNA, 377 bp, Zea mays
  Clone ID: MRT4577_98013C.1
ataggaacgaaaacttattcatttctgagaagtcaaacacaggccgaacctattgggaccacttcgcaagatcacttatctctcaaacaacccttatagtggaagcgctcgacacctaaccaaaccaaacctggaacactaaccaatttaatccacctcctggatcttgggaccaggaccgatcccaccagacggggcattctgatccatgcgcatgcgaggggcggccatgcgcgcgcccttggcctgtgacatccttgctatgatgggtgtgcagatcccctccagctgcttcatcttgggtgcgaactcctacacctaatccagctggttggtgtccacccagctgacggcgccctgaacaggttcttcgatct

SEQ ID NO: 182492 - DNA, 337 bp, Zea mays
  Clone ID: MRT4577_98014C.1
atgttggatacggacggtagtgccactactaccggaccggaaatacatatccggacaccgttgctttacctgaggggttaaagcaaaaaccccccacctttcatcgcttcgagttaggtgaccctgccctttctaacgggcgacacgtcctgaaaactccaaaattaacaaattgcgtctatgtgttcacgggccttcttttcctaaggggacacgccctaacatgattccagatgttataaacccggcctggcaacggacacccctggcctccctccccctgtgattagtcggagcccggactcgatcctgggccttctcccggggcccaggctgg

SEQ ID NO: 182493 - DNA, 427 bp, Zea mays
  Clone ID: MRT4577_98015C.1
gttgctggtctatactatgtcaatctatgaaaatatggctgcaaattaaaaagacttgggaatggggggagacgtccccttgactttagtcttaagaaggggcctaccaaacccgggaagaaggcaggaacctcatgtgagcaggcttctttggctgccgtggaaccatctgtgctgtttcatccagggaggtgggcacacagccatgcagcacagggatcgaaccctggtggggagcgccacacctcgggtgctgaaccactgcgctattagcgcctctacaaacacgactgtaattgcttatatgattaaaaatgtggagattacataagaattttactaacatggtctatcccatacatgaacctggatcttttggagtctttcctgattgatgtacccatatatatatatatatatatatata

SEQ ID NO: 182494 - DNA, 501 bp, Zea mays
  Clone ID: MRT4577_98016C.1
cgctcatagagtatgagccggagcccgccatgctatcctatgagccggcacgggcggccctgacgtacaagccggctacgacgcccacagccgcggctatgttcaagctctcccgcgccgagctcgtgcgcctccgttcacaagtacccgcgcgcgagggcgcgccgggtttcaacacgtacgctgggctggcggcgcacgtgcggcggagcgctgccctggcgcgcggcctgccggtcgaccagccaaccaagctggactgcgccacggacggcctgcaggggttgcaaccgccggttgcggagggctactgacgcaacgggatcttcacggcaacgccgctggccaacgccggcacggtgacggccgttgtgtcagaacgcgcgtccgccatccaggccgctctggaccggatggactacggatactgcgcgagagcgctggactacctgaaactgccaccggagatatcggcgctgctacggggggcgcacacgttac

SEQ ID NO: 182495 - DNA, 1670 bp, Zea mays
  unsure (1)..(1670): unsure at all n locations
  Clone ID: MRT4577_98017C.1
gctgctggatttcggcccgaggttatcagagggttatcgtgtaatggctgcactgcaacatgatcaacaggagttcaagttataggcagaggcttcacctgactcttgcaccacatgctctccccttcaggtaggtgtttctagggcctgccagctttcatcaatctgttggccctttttcctggaggaaacctgttcctatcgggtcaaatcatcaggctgaattacctgagtgcaggccatttggtggaagaactgaagaagacgaaagtgtcaagtggatcagaaacagtgttgtgccaatgcctggtactgatgcatcgtctttggtgttggagcctgttcactgcaaagcaggttgtgattgtcttgacgaaggttcaatcaattgtgtgaaaaagcatgtgatggaagcaagagaaaatttgaaggattctgttggtgcagacgccttcagggagttgggtttctatgacatgggggaagaggttgcctcaaggtggtcagaagaggaggaacgtttgttccagcaagtggtctcgtcaaaccgtgcttctctgcgcaggaacttttgggatgaacttcctcttgccttcccttccaagtccagcaaagagctagtgagctactacttcaatgtcttcatgttgaggaagagggctgagcagaacaggttcgacccagcgaacattgacagtgacgacgatgagtggcaggcaggtggtgattttgagtttccaataacaggaagaactgatgaatacatgccaatcgagtcccttactgatcaagatgatgttgcttgcaatccatttcccttggagggggatttatatggagattctgatgatgaggacgagcttgacaattccagtggaggagacaggcataatggtgtgcagagggctggtatgttgtcagagggtcatcccgaaatgtcatttatagatcatgatcaacagacgttgaagctagatgcagatgcacaagatgactcttgcacatcatttgaggctcatcaggttggttgcgatggtggggcacatactgatattggcaatcactacaggagtgacgacggcctttgtggtggtgcagaacatgggttctttggtgaccattgtgacacaaaagagtggggcttcggtttcagtactggttgggagaggcatgattttttgtcaacgaacaatgtcatagaagaggtgttcgggaagggctccagtgaagatggaagtgacactgctactggccaggaccttatctgagccagaggcggaggcttcttttcagctgcgaaacctttagcagctcccccttgttctctgaatctgtacagcagtagtagttgcctattttgatttgatgcctcacttgttcgtataggaatctctcatccctgtccttgaacatcatctgcttgcgatattggtcgcatggctaatgtaaatccgacgatgatatcatctgtcgatgatctgttgttaggctgtagcatgtacgtatcatctttgtagtgacggtgtgtcttgacctgtgtctctgagcatttttcccatgtgccaacgagggtcatgtaataaaaggctgctgttgttccttgcccaaaaaactcaccagctcgtcatgtactcccaaacgtcattttttatatgaannnnnnnntcgtt

SEQ ID NO: 182496 - DNA, 763 bp, Zea mays
  unsure (1)..(763): unsure at all n locations
  Clone ID: MRT4577_98018C.1
tggtacgcctgcaggtaccggtccggaattcccgggtcgacccacgcgtccgcgagaaaatggcgtccacggattacagtacctatagtcaagctgcagcccagcagggctacagtgcttacaccgcccagccaactcaaggatatgcacagaccacccaggcatatgggcaacaaagctatggaacctatggacagcctactgatgtcagctatactcaggctcagaccactgccacctacgggcagactgcatatgcaacttcttacggacagcctcccactggttatagcactccaactgccccgcaggcgtacagccagcctgtgcagggctatggcactgggacttatgacagcaccactgctacagtcaccacaacgcaggcctcttacgcagctcagactgcatatggcacccagcctgcctaccccacctatggccagcagccaacagccaccgcacctaccagaccacaggatggtaacaagcctgctgagactagtcaacctcaatctagcacagggggttataaccaacccagcctaggatatggacagagtaactacagctatccccaggtacctgggagctacccaatgcagccagtcaccgcacctccatcttatcctcctaccagctactcctcttcacagccgactagntacgatcagagcagttactctcagcagaacacctatgggcagccgagcagctatggacagcagagtagctatggtcaacaaagcagctatgggcagca

SEQ ID NO: 182497 - DNA, 352 bp, Zea mays
  Clone ID: MRT4577_98019C.1
acggccaaaccctagccgccgtcagcttcggcgacggcatggtcgccgtcaaccgacccctcgtatacgtgaaagccctacaaggcgacatggtaaccgacgcccccagcatctccttaccgcccgttttaggggcgccgttccgccccgacgtgatcaggttcacccacaagctgatgtcctgcaacaagcgccaaccctacacagtgtcccgacgggcccgccaccatacatcagccgagtcctggggtaccagccgcgccgtgtctcatattccacgcgtacgcatgtgcggcacccaccgtgccggccagggagcgttctggaacatagtgccgggcgggcgcatgtt

SEQ ID NO: 182498 - DNA, 408 bp, Zea mays
  Clone ID: MRT4577_9801C.1
gaaaaaaaaactatgaggttttacagggtcaagtcccaccaattaagccaaggaggtttgacaaaacttttggacaaaccagggttcacaaaaaaaagggtgtttgcacatggggccccaacatacaaaaggggggggggcataatttgataaatgaaccgccccatgcaaatttgccccacgttttttgaaaaaggaaggggacatattttgaaactaggcaacattgaggaacttggaaagcctaaaatcacttcttggaaacaattggggggccaaactaatggtactccttcttaaatttccacatttgttgaaaagggctcatggaggttaggatggacccttttattcaaacattttttttttttttagggggggcaacgaccttgatttttatgctgtttg

SEQ ID NO: 182499 - DNA, 274 bp, Zea mays
  Clone ID: MRT4577_98020C.1
agaacaagatgcccaagtacgactgtgttaataaatagtactccctccttgcttttttacaaggtgtatttgtttggacaaggctttggccactgattactccattaatagttcattatatgatacagaatcataatcataagctcaaaatcataatcataagtaagcattcttttaacgtggatctaataatattgatttggtgccatagaaattatgtattactatctccatcacagaaaacatgtataggtttatcctaagtcaaactatt

SEQ ID NO: 182500 - DNA, 169 bp, Zea mays
  Clone ID: MRT4577_98021C.1
agataatcacctttagtattgtgatgtattcactccatctgtattccacagaagaattatatattaagtagatttgaattgtgtatagtttcacatctccctgttcctctgtaaaattgtgctttatgaggaggatggattgtttttaatgtagaagagactagaaaac

SEQ ID NO: 182501 - DNA, 203 bp, Zea mays
  Clone ID: MRT4577_98022C.1
atgacggcataaagattaagctacagggagcaaatagcgatccacatgccgataccaaatctaaggacgctatatatatgatgaaaacttaatcaatgggctgttgcgataagacataacgaacagcacttggctgcgctagagctctgggccgagcaaccggggacggctcacctattggagcagcggattcgatgacctta

SEQ ID NO: 182502 - DNA, 224 bp, Zea mays
  Clone ID: MRT4577_98023C.1
tcgccgcttgctcctttttcgtcgccttcgatcrgcggctgcctccttcctccacttgccgtcccytcaccgagccgccgccgccactatcaacgggcacccggcctcttctccgacactcgcgcaagaagcgccaactgatctactcagtacacggactacacytacgcaccagacacgcgcgaccamtctccaccgccaccabcctcywrgactggcgcctt

SEQ ID NO: 182503 - DNA, 277 bp, Zea mays
  Clone ID: MRT4577_98024C.1
gggggcgaaaaaaaaaattgggaatgttgtcccatttgccccccttaaaaaggtcaaaatttttttttcccccccgggaattttcacaggggttattatgcaaacggcccccaaaattgaacgaaacaaaataaatttggggggccccaggattttggtttttgattaacccaggggcggggctaaaaaaaaattttttttttttttttttttggcccaaattttaattcacgttggagtttgaccctttacaccgggcccctgtgggtttaaaggg

SEQ ID NO: 182504 - DNA, 301 bp, Zea mays
  Clone ID: MRT4577_98025C.1
taataaaataaaaaatttaatttaactaaaatatactttttcactttttaataattaatcaaagggcgactggcttattttttttttagctcaaacatttatattcttatgggggcggcccttttaaaggttccaacttttcttccccgtgcttgcaacattatatcttttttatagggccccttaaatacaataacctgcccgtctttttaaacctttgtaactggaaaaaccctggggttaccaaattaaatcgctttgaaaaaaattccctttttgccagttggtttaataacaaaaa

SEQ ID NO: 182505 - DNA, 612 bp, Zea mays
  Clone ID: MRT4577_98026C.1
gtgcaggcgctcgatggcggtcgtacctaccagacttatcgtttatcgtgcgcgccttctagatttctgctctctctgtgcctccgtgtctgtctacttctgatccatactaaacaggaatcggcatggcagactcggaggagcaccagttcctatggaagggcgacgttgagaagtacaggatctacccgcatgaaggtgttaccgatcgaaataatggattcctcgtaatccagaagcgggcctgcaaacgctgtggcaggcttactaccgtacaagaatggtaagcgtggactggccaaatgtcaatttgtcgccgtatgcatattccctgggaaaaagcttgtaaatattgttgcttcatcacaccactgtgacatttcgcatgagaaccgtaatgaccatcacctgattgctatttctgaggatggaattctgaaccgtcttagttcatatggcaacactaaagatggtcttaaactcccaactgatgatactctatgcggcccatatttttgaacaggttcgcaagatcgaaagatattcttgtgaatgtccagaatgcaatgggagaggggtaaatctggctcctgaatggagctggaccccact

SEQ ID NO: 182506 - DNA, 211 bp, Zea mays
  Clone ID: MRT4577_98027C.1
acgccgcttttgcatcaggcttctgcctgagctcggttagggcctcaccgaagtgcttccacccctcagggaggcatcagtgattcggccacagcctcagcctccgtcgctctgtgacctgcgggtattggatgattcgtagctaagactctacgacatccctgaagccgggaaatggtgtgtgttctcattgtacccaagatctttggcc

SEQ ID NO: 182507 - DNA, 390 bp, Zea mays
  Clone ID: MRT4577_98028C.1
tttttgttcacccagggaccggaggccttcactaggttcatctttagaaacggactactgcacacagaaacaatgggcccaaagggccactgattctgccagttgtaccgtctccaactcatgatgggcagtcggccatacacacaaagctgtctgcatcatggcgcactcacgcgccccatctccgtatgtctcccaggttttctgccatcgcatgcaggctttaatacctgtaacctgtgctttcccatccctgcaggtctttgggctgcatgcccgcgaatatcaacccgccacctgcaaacgtatcagctttccttataccgagtactattaaagcttgccagaatcaccttcatctgtggcccctgccggaccctgttatgcggt

SEQ ID NO: 182508 - DNA, 136 bp, Zea mays
  Clone ID: MRT4577_98029C.1
cacgtcttgaccttgaacgcaagtggaatctttgcaagaagagattgcctttttgaagaaactccacgaagaggaaatccaggagctgcaggctcagattcaggaacagcatgtccagatcgatgtggatgtttcc

SEQ ID NO: 182509 - DNA, 263 bp, Zea mays
  unsure (1)..(263): unsure at all n locations
  Clone ID: MRT4577_9802C.1
aatacagtactactaaaagaggttgagaggcaagagactgagctggtccaaccnatacatgtttaattgcacgcaaacaacgtatggagcgcggggtatcacctgttgagacagtggcggtaattgcgacttgccagttgtggcacatggtctatgatcaaattggtggtgttggacaacaatacatgacgcttgttgaaacagaggcttctgtctttaccctatttgtacatttacggatacatggcttttttgttagattt

SEQ ID NO: 182510 - DNA, 342 bp, Zea mays
  Clone ID: MRT4577_98030C.1
ggaaaccggttagattattaatacgaggttttgaagtacaataggaaataagggttaaagatttgaaaagaacagaaccccaaaaacaagcattttgggactaattttgagtttgggattaagttaacgaaactgggtgttacattaacagtagaacccaaattggcgttttgttcaaacagaccagggattaattttattatgcttgtttgtaaggaacaagatgccttaaatggaatggagggaaaaaccaaaacatattgtaccatttttttttactaaaatacttatgtaagggagtatttattgggattttttttttttaaattgaggatgtttggg

SEQ ID NO: 182511 - DNA, 875 bp, Zea mays
  Clone ID: MRT4577_98031C.1
actaccaccctaccggagaggggatcgatcacacaaacacacccatggcgggctgcgcggcggcgcgcatgttcgcgtacaacgccagcctctgcgcctgcgatccggggtactactactacctcagcagcaacggcaccgcgagctgcgtcccgatgccgggcggcgggtggggagactggcaggtgggctccgtgggcgcgccgaggaaccagagcctctacttcctggagccggtgctctcggtctacgccatccgccgcctcacccagtcccaggccgtgctcctcgaggcgaccctcgcgtcgctcctctgctggatcgccttctgcgccgcagccaggttcggcggccgggacccccgcggggagaagaggctgttccgggcccggtactgggtcagccgcctcgactgcctcttcgacaacagccactgggcgggggatcagcaagtactaaggaaaaggaaaaccgaattgggtggcacattctcagtcgctagcttgatcatcttcactggattattaactgtcctcttgtatcaagccatcaaaaggcgcagccttgagatgcatcgagtcaagccagcaaatgctccggacctgctgtctttcgtgaatgatctcgagttccacatcacaaccatctccagcatgtcctgcactcaagcggttgctcctttgacggtagcaatggggacaccagggttcatggacttcagggtggttcccctgtcaacactgttcacctacagttgcacaaacacgagccacgggccatccattacgctcaggtgcaatggatgccgggtcccctccagagatcctacgtgtcctggcaatttgttgacctgctggggcagccagcaactgctg

SEQ ID NO: 182512 - DNA, 217 bp, Zea mays
  unsure (1)..(217): unsure at all n locations
  Clone ID: MRT4577_98032C.1
aattcccggnntgnttgcatcactagttgttggccgcccttttttttttttttttgaaacaagtattttatctgggatactttacaatgaacaaaatttgcttccctaccacgttcaagccatataaggtcttgtccgatcatttcaaatacctgtggattggatggctttggtaaaaatatgaaggattttgacttattctgattagaaattcact

SEQ ID NO: 182513 - DNA, 315 bp, Zea mays
  Clone ID: MRT4577_98033C.1
gtacggtggtgaccggcctgagtatcttggtgctgtttgccagctgacgaacccatggctgtccggtgtgttccgctgcgactacggctgcaacacagatttccaccttttttttttgggtgacattcttgcgtaactcgcgtttgtagagtgcgtccctgggccgggtccaggtgttttacccttttttttgcgtctcctgggaacctggagagagacagaaacaccttccttttgccggcgttgttttattcttgttggtatttctgttcatgcgagaaaaaaaaaacaagagggacagttgacctggggccc

SEQ ID NO: 182514 - DNA, 1771 bp, Zea mays
  unsure (1)..(1771): unsure at all n locations
  Clone ID: MRT4577_98034C.1
gggtacctcgaggccggccgggtgcgcccaaggcggaaagaagacggcgaccatggcgaagcagcagaatcctatccccatcccgatgccgctgtctgtgtcgctgaccctcgtagccggatatcggtcgcactactctcactcctcactccgcagtatcaactggcctcggccgcacaaatcccgcagtccgcaatccccgacggcccacggcagagccaccagcagcagcagcaccagaaatcgagcaaacaagctgctccatggcctcaccaacccgaacaccatcgcctccgccggcggtcgagcccatcgcgccttctctctcttcagaacatccgcctgtcaacccctcctgtgacggatccttctcgccggagaacccagcgccacctccacctcctccccctgctactccgcatcctcatactcccggcgatagctctccttcctcaattccgcatccctcggcgccacagcttcttccatctccgcctcctcatactcccgacgatagctctccttcctcaactccgcatccctcggcgccacagcccccaccatctccgcctccgccgagcgctgatgcttctcctcccctttcgcgacagggcgaaacgtcaccgccgcgcccatcgccccctccctcacccgctccagtatccccgcctactccagcgccggcgtcctcggaagccaagtcggagcaggaggaggcggaatcggctagcgaatcggggagcatgacgctagccatcgttctagccaaaactgaagatgcaacgccgccgaaggcctcctcggccgaggcgtccccaaccagatcgccgcagaaggaatcggccgtcaccatcgcgaagctcctctccgccgaagacctcgcggcgatggaggctaaggccacgccggacaaggttacacctccgagcgacgctgggtccctcgccgctgccgccgccgttactaccgttgggggagtcagtggcggcgtggggtccaagaggtggctcctaggcggcgtcccggagaaggtgcggcgcgctgagctgaggagggccgagctagggtttagggtttcggccgccgtgttctgcctggtcgcgctctccgtcatggcggccgataccacgacgggctggtccggcgactccttccgccgctacaacgagtacaggtacgtacttgctgcgagcgtcgtgacttttacctactgtggattccagttggtagccgaggtgcattacgttgtcacagggagacacatgattcgagccccattccgcagctacttcaatcttgccatggatcagatgttagcttacctcctgttgtcagcatcttcagcagcgctttctcgtaatggtgtttggatgtcgcggtttggaggggatcagtttaccaaactgatcaatgtctcggcttccatggcattcctagctttcattgctctgggtcttaactcggtgatctctgcttactgcttcttcagcttggtttcatagagctaccgttgtgcattgcatgatgtgaataatactacctgtatgcttcttggagcactgaaccttgatttatgtgaaatttctacatgatttctgtgaaatccctaaactggtgtttgggcctcttctttttagaggaattggaagtcactcgataaattaaattatttagtttggtacaaataagtgctgtttctaaaaaaaaaaaaaactnantaaaanggaaaaaaacaaaaaaaaaaagaactctcgcgttgttaccacctgct

SEQ ID NO: 182515 - DNA, 1013 bp, Zea mays
  Clone ID: MRT4577_98035C.1
atcatattaacctagaacaaactgtcatcagcatataatgtttgcacacagccactcaaacatgcatctgcactgcatcgtatatatccaacaaaacggcagctagcgatgatggcatcctccctcctctttgttgtcgtcctcctcgcagcgctgtcatcgccgccgccgtcagccgtcctggcggcggacgacgacggcaccacgcacctgcacttcttcatgcacgacgtggcgaccgggagcaacccgacggcggtgcaggtgatcaagggcgcggggtcgtcggtcgtcccggggctggcgttcggcgacaccacggtgatcgacgacgcgctgacggagacgtcgtcgcccacgtccgccgccgtgggccgcgcgcagggcttctacatgatgtcgtcgcagtcgggcatcgtgctcatggtgtgcgccaacctgctgctcaccgcgggggaccacaacggcagcacgctcgcggtggtgggccgggacgacgtcgcggcggacgtgcgggagctctccgtcgtcggcggcacgggccggttcaggatggccaccggctacgtgctgtggaagacgtccagcatgaacgggcctgacgctaccgtcgagctcgacgtgcacgtgaggacggccacaaccgctgccacgggtagcggcaccactggtgccttctcgggcgccgctgccaagcgggtcggagcagggtgggtcattgcgtgcgccgtcgccgtcgttggggcggtggttggatcgtgatcggctggcgtgcagtgcagtggtgcacacagtttggtgacatgtccatgactccatgtacttgcattgcttctgctagtggtcattctgaatcatcatggtggatgtagtgttgctttacttttcgcttgtttttcagttggttattatttgaactttttctgtcatgtcgagattctgggtcgaactttttttccttttgaaatgtaagtttttgttaaactaaatatgagtacatcaaattgataatt

SEQ ID NO: 182516 - DNA, 450 bp, Zea mays
  Clone ID: MRT4577_98036C.1
cccatccactacatcaccagatcaccgcgaggccgtgagcgcagcctctcctcccctacccctcgcagggtaccaccggatgcgcaacccgcgcctcccttgccggtgccctacctgcaccagcccggccgtaggcgcaggcgtaccccgtgaccccgtcgatcgcccctcggccctgccggtggagttagcgctggagatctatccggactgggatttcttctccgtaaggatgctatccaactttcatttgtcggtcctgtggcaggcaggagtgcccttttgttgaaactggaaagatcgttccttttgtgccgggggatgtcgaatcttttcactggtggcctggattctccaggttcttacaaatgttctttctacggtgggttggggcggacttgttcgctgcggcgatcggggtagataggccgtggcctccagttgcaacat

SEQ ID NO: 182517 - DNA, 276 bp, Zea mays
  Clone ID: MRT4577_98037C.1
ataggctagattgagcttccttctgtgtattctttgcgtgaacgggcgacgccgcaacttgctggggtttcattcgcttttgggggggtgaacggacccaggccatatgaaaactggcttccattcactcaaaggggggacgaggtcctaacctgcctatacaaaaggaccggggtctggttgaaccccccccgaggatgttgtgtgcgaccacaagcgctggaaaggttttcaaccccaccaaaaccagctctcagaagggagacgcacaaaacc

SEQ ID NO: 182518 - DNA, 704 bp, Zea mays
  Clone ID: MRT4577_98038C.1
ccggccggggtaccgagatcttatccaaaaacagccccgctcccccttccccccgcgtgccgtgcccacgtcttcgtcggggccgtcgccggcgacgaggtacgtacgcccccatccccctactgtcccttctctgcttcgcgaagtgctcttgttcccggaccctgcgcgcccagggaacgggaaaggggaggaagaatatgggcgagttcgacgactattgggcgcgcgcgtacaggggcgactctgcggtcccgcactccgacccgcagcggcttgtctccacgtggaccggcgcctttgccctcggcgcggccgcttgcgtccaccaccacgcctccgcgctcgcctcccacctcaagtccctaccggcgacttggcaagacatgacattggcgcttgatcaaaagcgatggaagaaagctattgagaaaaagcaacagcgagcttaagcccattattatttcctgccccttggtccccagttggatgagcatgtgtctggtcatcaattgtggcgcatgaagtttcagagttttctatctctatacacataatgtattgactgaggttctacttttggtttccctgtgtagcgttagagcactgtgaaaacgaatgaattatgttaaactgcccccattttttatgtttgctacatcccagatcctcacatgacattcagaatgattcatctgttcttg

SEQ ID NO: 182519 - DNA, 738 bp, Zea mays
  unsure (1)..(738): unsure at all n locations
  Clone ID: MRT4577_98039C.1
cgggataaagcatcttgtaatctgaatttgctaaggtttctttgaccataatttcattcttaaggaatgaatatttgcagtgttatccttagcatccgagaagcataagaaatattttctccctgttgtgagtgaactgtatatttgcttataaaatctctcttcgtgttatgtacgtatgtacgaaaacccttttattaatattctgctgttttatctgcccgatacatgttgattgtcnatgataccatttatctcagttggcaagacatgacattggcgcttgatcaaaagcgatggaagaaagctattgagaaaaagcaacagcgagcttaaggtgagcatgtgtcatgttctaacttttttttataaaagggtcaggttctaacttgcttatgcttacaggtcaactaaattgacttttttatcagatgatggcagttgacatcgaccgtgtcatgttctaactttttttataaaagggtcaggttctaacttgcttatgcttcctcctgtttgctacagctcattattatttcctgccccttgggccccagttggatgagcatgtgtctggtcatcaattgtggcgcatgaagtttcagagttttctatccctatacacataatgtatcgactgaggttctacttttggtttccctgtgtagcgttagaacactgtgaaaacgaatgaattatgttaaactgcccccaatttttatggaaaaaaaagaaaaa

SEQ ID NO: 182520 - DNA, 454 bp, Zea mays
  Clone ID: MRT4577_9803C.1
aaaagggtgactccactgctccacccaaaaaaatggcggcggcgccggaggagctgctctgcgcggcggcgaagtccggtgaagatgtcgaagtcgctaaactccttgcttcaggagctgacgcgacccacttcgatgccgacggcttgacgccgctgatgcacgcgtccgcggggggcacgccgccgttgcgcgcctcctcctcgactgcggtgcgccctggaacgcgctctccccctcgggcctctcggcaggggacctagcctccgaccccgacacctacgacctcctcctcgaccacgccctccgctccgagctcgtcctgggcaccgtcgcgcggcggcaagcggcccccgcgaacggtcccccggccgagagctacctcgaatccagggtctcgttcagcgaggagagggtgatggacgcggagagaaggcggtgatgatggcgtggg

SEQ ID NO: 182521 - DNA, 798 bp, Zea mays
  unsure (1)..(798): unsure at all n locations
  Clone ID: MRT4577_98040C.1
cctgtgcggcgctcgaggcggccgggctgcatgccacgtcttcgtcggggccgccgccggcgacgaggtacgtacgcccccatccccctactgtcccttttctgcttcgcgaagtgctcttgttcccggaccctgcgcgcccagggaacgggaaaggggaggaagaatatgggcgagttcgacgactattgggcgcgcgcgtacaggggcgactctgcggtcccgcactccgacccgcagcggcttgtctccacgtggaccggcgcctttgccctcggcgcggccgcttgcgtccaccaccacgcctccgcgctcgcctcccacctcaagtccctaccggcgacttggcaagacatgacattggcgcttgatcaaaagcgatggaagaaagctatntgagaaaaagcaacagcgagcttaaggtcaactaaattgacttttttatcagatgatgacagttgacatcgaccgtgtcatgttctaactttttttataaaagggtcaggttctaacttgcttatgcttcctcctgtttgctacagcccattattatttcctgccccttggtccccagttggatgagcatgtgtctggtcatcaattgtggcgcatgaagtttcagagttttctatctctatacacataatgtattgactgaggttctacttttggtttccctgtgtagcgttagagcactgtgaaaacgaatgaattatgttaaactgcccccattttttatgtttgctacatcccagatcctcacatgacattcaaaaaaaaaaaaaaaaaaggccccta

SEQ ID NO: 182522 - DNA, 372 bp, Zea mays
  Clone ID: MRT4577_98041C.1
aaaaaatcgactggtctctctgactacataagcagggaagagctcatttgagtacacgctataaggggtgggtgggtccggaaggtcatatctaggttatgcactggagtttgcagcggatcccttggctcgctacgcttcgatcataggctggatgtacaatgcatctgccttgtacgaacaccggaccattggcccagacacatcttttcggaaccccattttgacaccaacggcccgatacttatgagaagcttatagcgtcacatactcagaaacaggtatgtgacgtttagatggtctcatagtactgaccaaatgttatgacgttgagatgagcagacctcatttttttacatggtctaataacct

SEQ ID NO: 182523 - DNA, 625 bp, Zea mays
  Clone ID: MRT4577_98042C.1
aattcggcacgaggttccattccagtcttccaccttgcttctcgcaggcagctgaagcaatcggagcaagcagagagaggccggctcctcccacccccaggcagccatggacgcccccgaggcgaggagtagcgcgtcctcctccccggagttcgagttctggccgctctaccccaaccccgccgcctcgccctcctgcgccgacgagctcttcgccggcggggtgctcctcccgcttcccatcctcccaccgaagccggagtccaggaacaaaggcagcggcatcagccaatgcgtgcccgtcgcagagccggagccggagtcgcagctaggggaagcgtcccttcttgcgaccgccgcggcgcctacggcctcgatgacttcccaggcgccgtccaccggtagcggaggaggagggtcgaagcgctggaccgacatcttttccaagaagccggcgccgggaggcgaggagaaggaccgggagaaggacaaggagaagcgcaaggatggggcctgtagccggaaacagggcagcgggcacaccggcggcgcgggctcggagctgacatcaacatctggcccttctcgcggagccgctcgggcggcgcgggtccggctcatccag

SEQ ID NO: 182524 - DNA, 2775 bp, Zea mays
  Clone ID: MRT4577_98043C.1
atggccagggtgcgctctactactagagttgagcgcaaggggggcgaagccgaaggtgcagagactgttcctatctctgaagcaatgaagcgatctggattgatgacatcagaagacacccctgctgctgaagcagaacaagcagatattgaggaggctggtactgacgatgattacaatatcgcagtgccgagcaagcctagtcatctggacttcgggaagtcgactatttcgaaggctgatttcccaaaaatggtgaagtcgggctacttcagcgaagatgaaaagaagatgattcgctttggtggagaagagattaccccgaagccacaaaaagatgaaatagtgatttttaagagtttcctcaaagctggtttgagatttcctttgaatagtatgattgtcgatgtgctgaagaaatttgggatctattttcaccaactaacccctaacgctattgttaggcttagtgtttatatttgggctctccgaagccaagcagtggagccatttgccgaaggtttctgccgagtacacgagctgcactaccaaactaaggccagaaaggatgggctacatgaaaattttggttgttacaactttgcatatcggaaaactacaaaatttcctgtgatcagatatcgaagcaagtggccggcaggctggaaatcggaatggttctatgtcaaagttgatgacgacaaggagaaacttgttcagagctcgcttgaactaatcttcggagaaacccgaccccagtgccgcatgacaccagacggtccaacccaaacagcgttggctgaattcagaattattgcggagcacattggcactagggatttggtacaagaatttctggctttcaaagtatttcccaccatgaaggaatgggctatgccgaagcttaaaggagagaagaaagagggggagcttatccaactgccctatcattataaattcaagaaatatttcaaggcaccctgtcaagaatggcttgaaacaatcgaaataatgagctttgaataccctgattatgggcgactgggcagagatgctggaggcccgaagagaaaaagaattgccagcaccgttgacgaagagagcaccaaagtggcaaaaaagaaaaaggagatttctaaaaagctgagccctgaaaagttgagccctgagccgaaagtggttgctgcaagaaaaaggaaaactgcatccccagaaccgaaaacgttggttcaagaagaagacactcctgctacaccttctgctgccgaagtagaagagatactgaaggtaatgactgaacccttgtctgtcaagctaagtccactggcgccggaactgacgaagttttttcagaaggacaaagcagcttcggcagaagaaagtcctgcaccaccgaaaaaacgaagaattattcaaatagcagatgtgattcatcagacgccgccaccggcgacagtgccaaaaattgcttttgccgagaccgccgaagccgaaggcgccgcagccgaagcttccagagtggaaactaccgaagctgaaatcggcgacgccgaagctgctggggccgaaggtgggaccacagaaggttcgaatctggaatccacccttgaagttattgacaatattctcctgaaaatggctgagcaagaagctgttgtggctgcggtaaccacgacaactggaaaggaaaaggagcagattgatgacactttagaaggggaaaattttaactttcaagatttgtttggtcaagagctaacaggcgccgaaaaagaagagttgaaaaaatatgccatatcttgcgggtataagccaggggctacgctatttggtggggtcaacgaagggaagttaagatgccttcgtaaccgcaccgaggctaaagttgttagaaccctctccaaaagcgttggcttaccgaaactagaagctgacctttgcggatatcaacgacaccatatcgccggaagcctgctctatgctaattttaagagtatactattgagtaaggttctaaagatgcaacaagatctcgaagaagagaaaaccaaaactatcatcaaagatttggaagaaaaagttgaagattacgaagctgttctgaaaaagaaggacttcaccatccaggaccttgaaatcatgactaaagaacacgaaggtgcattagaaaagaaagactttgttattcagtctatggaagcctccttggctgagatccaagccgagaataacagtttaaaggatgaattgctcaaacaactagaaaaatctgagcaggagaagaaacaccttgaagcaagtcttaaaacagagatggaaaagaattcaaatttgcaaaaatccttgaaggagcttcaagagaaatgcctaagcttcggcagccgatgcgtgcagcggctgaaggatgtgtttcattctattggagccagctctgaaaaaattacaccttcagccgaaaacttgcccagcacattagaatatattgaaggcgaggttgatgctcttgatgaagttattggtggccatgctgacttctgcgccctggtagcttctcggggcacaactacgacttttctgaaggctggctgcacacatggaaagattgttaataggcccaacttcagcttatcatcatcagatctgatagatattccaagcctagcccgaagtatcgggaatagattcatgacccagatttgggtaaatggcgggcggaaaatggcgggtgacgaagctcggagtcatcttaagctagatgacgaagctgaagtataa

SEQ ID NO: 182525 - DNA, 2766 bp, Zea mays
  Clone ID: MRT4577_98044C.1
atggccagagtacgctctactgctagagttgagcgtgagggagacgaagccgaaggtgtggagactgttcctatctcggaagcaatgcagcgatctggacttcggaagaagttcccgctgccgaagcagaacaaggcgctgccgaagcagaacaaggagatattgaggaggctgattctgacgatggtgaagtcgggctacttcagcgaagatgagaagaagctgattcgcttcagtggagaggaaactaccccgaagccagaaaaggatgaaatagtgattttcaagagttttcttaaagctagcttgagatttcctttgaataggatgattgctgatgtgctacaaaagtttgggatctattttcaccaactgactcctaacgccattgttaggcttagtgtttatatctgggctctccgaagccaggcggttgaggcatttcccgaaggtttctgccgggtacacgagctacattaccaaaccaaggccagagaggatgggttacacgaaaattttggttgttataattttgcctatcggaaaaccacaaaattccctgtgatcagctaccgaagcaagtggccggcaggctggaaatcagaatggttctacgtcaaagttgacgatgacaaggaaaagctggagtggactatgccgaagcttacaggggagaagaaaaagggggagcttgtccggctaccctaccattataagttcaagaaatattttaaggcaccctgccaagaatggctcgatacaatcgaaataatgagtactgaaattcttggaaattactctaaaaaagaggaccaattgatgacagcagccttcggcacccggccgaaacgaaggctaaacagagtacttgatgttataggcttcgaatatcctgactatgggcgattgggcggagatgctggcggcccgaagagaaaaagaattgccagcgctgttgacgaagagagcactaaagtggccaaaaagaaaaaggagatttctgaaaaactgagtcctgaaaagttgagccctgagccgaaggtggctgctgcaagaaagagaaaaactgcatctccagaaccaaaaacgttggttcgagaagaagatactcctgcaacgccttctgctgccgatgtagaagagattatgaaggtaatgactgaacccttgcctgtcaagctaagtccgctggcgccggaactgacgaagttttttcagaaggacgaagcagcttcggcagaagaaggtcctgcactgccgaaaaaacgaagaattattcagatagcagatgtgattcatcagacgccgccaccggcgacaatgtcaaaagttgcttttgtcgagaccgccgaagccaaaggcgccgcagttgaagccaccagagtggaagcccccgaagctgaaaccggcgcagccgaagctaccggggccgaaaccggggtcacaaaagatccgaacctggaagacacacttgaagttattgataatatactcctgaaaatggctgaggaagaaactgttgtggctgcagcgagcacagctactgaaaaggggaaaaagcaagttgaagacattttggaagaaagagattttaactttcaagatttacttgggcaagaattgatagatgctgaaaaagaagagcttaaaaatatgccatatcctgtggatataagccaggggctacactgtttgagcatattgttaagtaaggttctaaaaatgcaacaagatcttgaagacgagaagaacaaagccatcatccaagatttggctgaaaaagttgaaaattacgaagctgatctgaaaaagaaggacttcaccatccaagaccttgaaatcatggttaaagagcacgaaggtgcattagaaaagaaagactttgttatccagtctgtacaaggctccttggctgaagtccaagcagagaacgacagtttaaagaatgaattgctgaaacaatcagaaaaatttgagcaagaaaagaaacaccttgaagcaagccttaaaactgagatggataaaaattcaaatttgcaaaaatccttgaaggaacttcaagtgaaatgcctaagcttcggcagccgatgcgtgcagcggctgaaggatgtgtttcattctatcagagccagctctgaaaaatttacaccttcagctgaaaatctgcccagcatattagaatatattgaaggcaaggttgatgctcttgatgaagttattggtgggcatgccgacttctgcgccctggtagcttctcggggcacagctacggcttttctgaaggctggctgtacgcatggaaatattgtgaatagaccaaacttcagcttatcagcatcagatctgatagatatcccaagcctggcccgaagcattggaaatagattcatgacccagatctgggtaagtggcgggcgaaaaatggcgggtgacgaagctcgaagtcatcttaagccggatgacgaagctgaagaatgaagataatatggacaaaaggcgggcgagaaaaggctggagtcgaagcttgaagtcatcttgaaccagatgacgaagccgagaccgatgcttaaagagtatgatgccgaagctgaggcctcatgaagatcagtaggagtagactgtagacaaactcaagaaacttttgaaataacttttgtaaatatgactaaactgttcttaatgaattctgttcataccttgtaatatgctcttacccttccactaatgtataaaaacacgctttgatgtggacgaaaaaaaaatatt

SEQ ID NO: 182526 - DNA, 2268 bp, Zea mays
  Clone ID: MRT4577_98045C.1
atggtgaaatcgggctacttcagcgaagatgagaaaaaactgattcgcttcggtggagaggaaactaccccgaagccagagaaggatgagatagtgattttcaagagttttcttaaagctggcttgagatttcctttgaataggatgattgctgatgtgcttcaaaagtttgggatttatttccaccaactgactcctaacgccattgttaggcttagcgtttatatttgggctctccgaagccaatcagtggagccatttgccgaaggtttctgccgagtacacgagctacactaccaaacaaaggccagaaaggatgggctacatgaaaattttggttgttacaactttgcatatcgaaaaaccacaaaatttcctgtcatcagctatcgaagcaagtggccggcaggctggaaatcggaatggttctacgtcaaggttgatgacgacaaggagaagcttgtgcagagtccgcttgaactaatcttcggagaaacccgacctcaatgcaatatgacaccagaaggtccaacccaaaaagcgttggctgaattcagaattattgcagagcacattggcactagggatttagtgcaggaatttcttgccttcagagtatttccaactataaaggagtggactatgccgaagcttacaggggagaagaaagaaggggagcttgtccggctaccctaccattataagttcaagaaatattttaaggctccttgccaagaatggctcgatacaatcgaaataatgagtactgaaattcttggaaattactctaaaaaggaggaccaattgatgacagcagccttcggcacctggccgaaacgaaggctaaacagagtacttgatgctataggcttcgaatatcctgactatgggcgattgggcggagatgctggcggcccgaaaagaaaaagaattgccagtgctgttgttgaagagagcaccaaagtggccaaaaagaaaaaggagatttctgaaaaattgagccctgaaaagctgagccctgtgccgaaggtggctgctgcaagaaagagaaaaactgcatctccagaaccaaaaatgttggttcgagaagaagatactcctacaacgccttcttctgccgatgtaaaagagattatgaaggtaatgactgaacccttgcctgtcaagctaagtccgctggcgctggaactgacgaagttttttcagaaggacaaagcagcttcggcagaagaaggccctgcactgcggaaaaaacgaagaattattcagatagcagatgtgattcatcagacgccgccaccggcgatagtgtcaaaagttgcttttgtcgagaccgccgaagcaaaagacgccgcagccgaagccaccagagtggaaacccctgaaactgaaaccggcgcagccgaagctaccggggccgaaaccggggccacagaagatctgaacctggaagacacacttgaagttattgataatatactcctgaaaatggctgaggaagaagctgctatggctacaacgagcacagttattgaaaaggggaaaacaaatttacttgggcaagaattgacagatgctgaaaaagaagagcttaaaaaatatgccatatcctgcggatataagccaggggctacactgtttggtggggttaacgaaggaaagctgagatgtcttcgaaaccgcagcgaagctaaaattgttagaaccctctccaaaaacattggcctgccgaagctagaagcggacctctgccgctaccaacgacaccatatcgccggaagcttactttatgctaattttaagagcatattgttaagtaaggttctaaaaatgcaacaagatctcgaagacgagaagaacaaagccatcatccaaggtttggctgaaaaagttgaaaattacgaagccgatctgaaaaaggacttcaccatccaagaccttgaaatcatggttaaagagcacgaagaaaaatttgagcaagaaaagaaacaccttgaagcaagccttaaaactgaaatggacaagaattcaaatttgcaaaaatccttgaaggaacttcaagggaaatgcctaagcttcggcagccgatgcgtgcagcggctgaaggatgtgtttcattctgtcggagccagctctgcaaaatttacaccttcagctgaaaatctgcccagcacattagaatatattgaaggcgaggttgatgcccttgacgaagttattggtaggcatgccgacttctgcgccctggatgatgaagctgaagaatga

SEQ ID NO: 182527 - DNA, 1822 bp, Zea mays
  Clone ID: MRT4577_98046C.1
atgacaccagaagaagctggcggcccgaagagaaaaagaattgccagtgccgttgtcgaagagagcaccagagtgaccaaaaagaaaaaggagatttctgaaaagctgagtcctgaaaagttgagccctgagccgaaggtggccgctgcaagaaaaaggaaaactgtatctccagaaccaaaaacgttggttcgagaagaagacactcctgcaacgccttctgctgccgaagtagaagagattatgaaggtaatgactgaacccttgcctatcaagctaagtccactggcgccggaactgacgaagttttttcagaagggcaaagcagcttcggcagaagaaagtcctgcactgccgaaaaaacgaagaattattcaaatagcagatgtgattcatcagacgccgccaccggcgacagtgtcaaaaattgcttttgccgagaccgctgaagccgaaggcgccgcagccgaagcttctagagtggaaaccaccgaagctaaaaccggcgacgccgaagctactgaggccgaagttgggaccacggaaggttcgaatctggaaaccacccttgaagttattgacaatattctcctgaaaatggctgaggaagaagctgctgtggctgcggtaaccacggcaactggaaagggaaaggagcagatcgatgacactttagaagaagaaagttttaactttcaagatttgcttgggcaagagctaacaggcgccgaaaaagaagagttgaaaaaatatgccatatcttgcgggtataagccaggggctacgctatttggtggggtcaacgaagggaagctaagatgccttcggaaccgcaccaaggccaaagttgttagaaccctctccaaaaacgttggcctgccgaaactagaagcggacctctgcaggtatcaacaacaccatatcgccggaagcctgctctatgctaattttaagagtatactattgagtaaggttctaaaaatgcaacaagatctcgaagaagagaagaacaaaactatcatcaaagatttggaagaaaaagttgaaaattacgaagctgttctgaaaaagaaggacttcatcatccaggaccttgaaatcatgactaaagaacatgaaggtgcattagaaaagaaagactttgttattcagtttatggaaggctccttggctgaggtccaagccgagaataacagtttaaagaatgaattgctcaaacaactagaaaaatctgaacaggaaaagaaacaccttgaagcaagtctcaaaactaagatggaaaagaattcaaatttgcaaaaatccttgaaggagcttcaagagaaatgcctatgcttcggcagccgatgcgtgcagcggctgaaggatgtgtttcattctattggagccagctctgaaaaatttacaccttcagctgaaaacttgcccagcacattagaatatattgaaggcgaggttgaagctcttgacgaagttattggtggccatgctgacttcgcgccctggtagtgtaggaccacaccccggtggagtcggttgttgccaccaccttcatcggtgtccactacggccctaggggtgtcgaggcgtcctgcttcatctttaatcacctatgtgtacatactgtctgtatgtgcctctcttgctactcggtagcttgagagttgaattgtttgggatactggttattttttatagctgcatccatgcgctgttgcgattgtttacactctaaagtaaccgcgacaaataggcttctttgttaaattgtaccactattttgtgaataagataaatcaacaactgcaacaaaaaaaagagt

SEQ ID NO: 182528 - DNA, 793 bp, Zea mays
  Clone ID: MRT4577_98047C.1
acattggcactagggatttggtgcaagaatttctggctttaaagtctctccaactatgaaggaatgggctatgccgaagcttaaaggagataagaaagagggggagcttgtccgactaccctatcattataaattcaataaatattttaaggcaccctaccaagaatggctcgatacaaacgtaataatgagtactgaaattcttggaaattactctaaaaaggaggaccaattgatgacagcagccttcggcacccggtcgaaacgaaggctaaacagagtacttgatgctataggctttgaatatcctgactatgggcgattgggcggagatgctggcgtcccgaagagaaaaagaattgtcagtgccgttgacgaagagagcaccaaagtgaccaaaaagaaaaaggagactttttaaaagctgagtcctgaaaagttgagccctgagccgaaggtggccgctgcaagaaaaagaaaaaatgcatctccagaaccaaaaacgttggtttgagaagaagacactcctgcaacgccttctgctgccgaagtagaagagattatgaaggtaatgactgaacccttgcctgtcaagctaagtccgctggcgccggaactgacgaagttttttgagaaggacaaaacaacttcggcagaagaaagtcctgcactgccgaaaaaacgaagaattattcaaatagcagatgtaattcaccagacgctaccaccggcgacagtgtcaaaaattgcttttgccgagaccgctgaagccgaaggagccgcagccgaagct

SEQ ID NO: 182529 - DNA, 330 bp, Zea mays
  Clone ID: MRT4577_98048C.1
ccggcagtaccgttccgtaattcccatgtggaggcacgcttgctctaatccagccaactgcttccttccctccatcttcaggtgcatctccaaggagcccgactcgcgggaatcggatccggcgacaaggcgagagggaagagatagagctcacgttcaccaagctggtcagtcggctggtgcacaagaaggagatgcggatcctgatgggggacgtggtcgctgcggaaagaccaccatgctctacaagcggtatctcgcggagatcgtcaccaccatacccaccattggattcaatggtgaaactggggagtactataacatcaactt

SEQ ID NO: 182530 - DNA, 135 bp, Zea mays
  Clone ID: MRT4577_98049C.1
ccagaagccatttgatacagtacttcatgacatggtaagaacagtttactcaacaggtgtagatatataagtgcacggactgtaacagctgcctcctcgcaccatctcaagtatggctagataacgtatgtgatc

SEQ ID NO: 182531 - DNA, 418 bp, Zea mays
  unsure (1)..(418): unsure at all n locations
  Clone ID: MRT4577_9804C.1
aacctttgggctgatttatgtgcttggcgaaggagtcgatggagtggactaaagcctcggacgaggagactggtgttctcgttgaggattcggattcttcaaatattccgaaagtcctcctgcttagtggtagtaatgagacgacggcgaggaatcttattaagcctgatgctgagaggtggngtaatgggagtatgaggactgagactcgtcgcgttatanattttgaggcgtcgccgcttatggcaagtgtgtcggaggcgtcgggttcggagactgagtagcgtgcggcgagtcgtcctagtgatcccggtacgtangttctccgtctataagaggaggaggaggatggcaacaacaagaggtaagcctcaagtattgatgagacaaaataggttccgccctggagcgtcggtca

SEQ ID NO: 182532 - DNA, 354 bp, Zea mays
  Clone ID: MRT4577_98050C.1
aagggctcgccatttcttcataaaatggtagagcactagataaatgtttaaaaataactataaatgggtctttaaatcttatagggtaaaatttagagtctgtcacctttacttacatcacctactttgagcactttttttcatcgacaatattcttcctcttttctgtaatttctcatcacgattgttgaccttgaacggatccgccttatctccttcaacaaaggttcttgagctttccaaaattcatgattgggttttttttccataacatgggagccgcatggccttccatttttaacacctaccatttggcggcttcaagctcttagcttgggggctcacaacgttcat

SEQ ID NO: 182533 - DNA, 860 bp, Zea mays
  Clone ID: MRT4577_98051C.1
gcacctctttaccgtgtggtacgttttctctccccttccgagcccccgcgtcctgaccttcgcttccaagttccaacgcggcggatctaccttcaactgccgcggtgccgccttagcgtcaccgccggcgactcgatccgcccccctcctcccgccactcggggacgcgcttcgcccgccaccgccaccgccaccgccaccgccaccgccgttccccttcttcctcgcccccgggagatcctggccataggatctccttccttcctccgaggatcaaagttcaggttggtgccaacatgtcgtcgaagaagatagagctagaccacaaggacatggttcatgattctgccattgactactatgggaagcgccttgccacagcctcctctgactccactgtgaagatcaccaacattgggggtgcatctgccccgtcccagctcgttgcgaccctcactggccactatggtcctgtgtggcgtgtcggatgggcccatcccaagtatggttcaattctcgcatcctgtggctatgatggccgtgtgatagtctggaaggaggctgccactgggcaatggtctcagctccatgtgtttgacaaccacaaggcctccgttaactccattgcttgggctccatatgaacttggcctttgccttgcctgtgggtcttctgacggcaccatctctgtcatctccatgcggcttgatacaggaggatgtgatgctgcaaccattgagcgggcacaccctgttggcgtgacagcagtctcctgggctccagcagcagcacttgggtccatggttggctcagatcagctcgtccacaagatcgtgtctggtggctttgactgtgtcgtc

SEQ ID NO: 182534 - DNA, 2113 bp, Zea mays
  Clone ID: MRT4577_98052C.1
atgacaccagaaggttcaacccaaacggcgttggctgaattcagaattattgcagagcacattggcactagggatttggtgcaggaatttctggctttcaaagtatttccaactataaaggaatgggctatgccgaagcttaaaggagagaagaaagagggggagcttgtccgactaccctatcattataaattcaagaaatatttcaagacaccctgccaagaatggctcgaaacaatcgaaataatgagtactgaaattcttggaaattactctaaaaaagaggaccaattgatgacagcagccttcggcacccggccgaaacgaaggctaaacaaagtacttgatgctataggctttgaatatcctgattatgggcgactgggcggagatgctggaggcccgaagagaaaaagaattgccagcgccgttgacgaagagggcaccaaagtgaccaaaaagaaaaaggagatttctgaaaagctaagccctgaaaagttgagccctgagccgaaggtggttgctgcaagaaaaaggaaaactgcatccccagaaccaaaaacgttggttcaagaagaaaacactcctgcgacaccttctgctgctgaagtagaagagattctgaaggtaatgactgaacccttgcctgtcaaactaagtccgctggcgccggaactgacgaagttttttcagaaggacaaagaagcttcggcagcagaaagtcctgcactgccgaaaaaacgaagaattattcaaatagcagatgtgattcatcagacgccgccaccggtgacagtgtcaaaaattgctattgccgagaccgcagaagccgaaggcaccgcagccgaagcttccagagtggaaaccgccgaagctgaaaccggcgaagccgaagctgctggggccgaagccgggaccacggaaggttcgaatctggaaaccactcttgaagttattgacaatattctactgaaaatggctgaagaagctgctgtggctgcggtaaacacggcaattgaaaagggaaaagagcagatcgatgacattttagaagaagaaaattttaactttcaagatttgcttggacaagagctaacaggcgctgaaaaagaagagctgaaaaaatatgtcatatcttgcgggtataaaccaggggctacgctatttggtggggtcaacgaagggaagctaagatgccttcggaaccgcaccgaggccaaagttgttagaaccctctccaagagcgttggcctgccgaaactagaagcggacctctgcaggtaccagcggcaccatatcgccggaagcctgctctatgctaattttaagagtatactattaagtaaggttctaaaagtgcaacaagatctcgaagaggagaagaacaaaactatcatcaaagatttggaagaaaaagttgaaaattacgaagctgttctaaaaaaagaaggacttcaccatccaggaccttgaaatcatggctaaagaacacgaaggtgcattagaaaagaaagactttgttattcagtctatggaaggctccttggctgaggtccaagccgagaataacagtttaaagaatgaattgctcaaacaatcagaaaaatttgagcaggaaaagaaacaccttgaagcaagccttaaaactgagatggagaagaattcaaatttgcaaaaatccttgaaggagcttcaagagaaatgcctaggcttcggcagtcgatgcgtgcagcggctaaaggatgtgtttcattctatcggagccagctctgaaaaatttacaccttcagctgaaaacctgcctagcacattagaatatattgaaggcgaggttgatgctcttgacgaagttattggtggccatgctgacttttgcgccctggtagcttctcggggcacagctaccgcttttctgaaggctggctgcacgcatggaaaaattgtgaatagaccaaacttcagcttatcatcatcagatctgatagatattccaagcctagcccgaagcatcggaaatagatttatgacccagatttgggtaaatggcgggcggaaaatggcgggtgacgaagctcgaagtcatcttaagccggatgacgaagctgaagtatga

SEQ ID NO: 182535 - DNA, 265 bp, Zea mays
  unsure (1)..(265): unsure at all n locations
  Clone ID: MRT4577_98053C.1
tcttaaaccccntgggtaaaaaccanagaacaggcanacccaagggcgggattttttaaacaaaagcgcccgataatttcacatanacaactcccattacaaggatttttttgagaaccccagaacagtgatttgagagggcatgccacttcaagattacatatatccatgcattggccccccttcactacgcttctctcgaactgggtctctggaggatggaacggatggtcagaccacaaggagaaaacgaggccttcctccg

SEQ ID NO: 182536 - DNA, 337 bp, Zea mays
  Clone ID: MRT4577_98054C.1
cccacgcgaatgttgagatatagcaacagatgatcgccatggagttaactcaggtgcgtgaagcggggaacagcatacaggacatgggacaagagggtaatattggatctaaaaggggagattgagaacacagatctagaggcaacatgatatacaacgcacattgtgcgacgacatgcagacgacataacaataagagattctgctacgagaaatacaaatacacaaaggagacctgtagaaaaaccaatgtatcatgaaatgataaggggtgatactaatatcaagagaggaataataaagactgaattcaacatgatagatacagttaaggggg

SEQ ID NO: 182537 - DNA, 272 bp, Zea mays
  Clone ID: MRT4577_98055C.1
gcccgggccagcgcgggcagcagcagcctgcagccatgagcgcgaggtgtagcgagcgcgcgtcctagagtgggtcggagtctgagccgccccccgagttgccagcagcagccgcagagcggatccagatcgcccggagccccgcgtgcgtactctgctcgcttccaagagaagacgctaccccaatcccagtgggcgcccgcgaaccaggaccggcagatctaggcgtcatcgaatcggccggccgatctggtctcccccctcctccccgg

SEQ ID NO: 182538 - DNA, 219 bp, Zea mays
  Clone ID: MRT4577_98056C.1
ggccgaccaaacacgcagaccgatgacttgttaacagccgactattggatcagagtaacacaaccaccccaccaacctagggcgtgctgtcacacaaaaaatgataacaaggaggatggcaacaatacagtgcacacaaaaaatttgaaccaactactaattgaccgaggcatggcgacgatccaatccaacaccttcacatccaaagcaacagaccca

SEQ ID NO: 182539 - DNA, 189 bp, Zea mays
  Clone ID: MRT4577_98057C.1
tgataagagttgcgcaagctactaatacgacggttggcgttagtctaaaccgccatgacacccaacatgaaacacatcgcacaattgaggaaggacccaagaagatacattaagaggtaacaatttagattgagagggaaaaagattcttctataaatgaaacgaagttgatagtggaacaagacaaaa

SEQ ID NO: 182540 - DNA, 1261 bp, Zea mays
  Clone ID: MRT4577_98058C.1
cattgggtacctcgaggccggccggggcccctgaggtatccgcctccggcctatcccctccactcccgaccccgcccggcccgggtacgccggtccaccacgccgcctccgctttcttccctgcctccacttcaactgcagccatccgccattcccgaagcttccagaagctcgcctgcaatggcgaggcttctcgtgctccgcacggcgccgtaccgtcactctgcccacctttgcgctgccaccctcctcgtgctccctccctcccagcaccgccacttcgcctccttcacctcccctgcgccctttgccgcgcgccgcatcctcccctcgccactccgccttcctatccgcgcagtggagtcctcgcccgggcccaccaaagaggatcaggagccgtctcctgccgccagtgaggcccaggagcagctagcgcccgcggtgcctgcgttcgaggtcgaagagcttgggtgggggacccagctcgccgtcaagctccgcatgctcgtagcgccgccgtggcagcgcgtccgcaagggaagcgtcctcaacatgaagcttcgcggcgagatatctgatcagctgaagacacgcttctcatcagggctgtcgctaccacaaatctgtgagaattttgttaaggcagcatatgacccacgaatctcagggatttatctgcacatagagccactgagatgtgggtgggcgaaggtggatgagatcagaaggcacattgtggatttcaagaagtctggtaaatttgttgttggttatatgcctgtttgtggggagaaagaatactatcttgcttgcgcgtgtggtgagctatatgcacctccaagtgcttatgttgccctgtttggcctaactgttcagcaaacatttctcagaggtgtccttgagaaagttggaattgaaccggaaattcaacgaattggtaaatacaaaagtgccggagatcaacttgcacgcaagagcatgtcaaatgaagttagggagatgctggcagcactgcttgacaatatttatggaaactggctggaaacaatatcttctacacatgggaagaaaaaagaagaaattgagggatttattaattcaggggtgtaccaggttgccagactcaaggaagaaggttgggtaacagatttactgtatgatgatgaggtaatgacattactaaaggagagagtagggcagaaagacaagaaaagtctgcgtatggttgactacagttaatactcgcgtgttatgtaaaaga

SEQ ID NO: 182541 - DNA, 395 bp, Zea mays
  Clone ID: MRT4577_98059C.1
ggccgcttttttttttttttttttctttgtttttttttttttttttttttttttttttttttggggttttttttttttttttttttttttcacaggaataaacatttgttacccccacacttggaaatagagggggaagacttttacaaaggacactttaaattttaaaacaaaagttttacatggggggggagagggggttttttacaaggcctgatagtacccgaaggggctaacttaactacaataattggaagggggaagcctttttataaaaaatatataaaaaccttttaagcttgaagtcttccccctgaagtaactaacccaaaaataagggaataaaacttccccttattgcagggaaaaagaactccatcccttttttaaacccc

SEQ ID NO: 182542 - DNA, 162 bp, Zea mays
  Clone ID: MRT4577_9805C.1
ggtttggaattacgggccggcccacgcgtccggcgccaggcactgccaagccaagctcgtatatctcggggaaacacggcaactaacccgaggggcgaggttattaatatggacggcgccaacactgccaaggagcgacaccagaagaacgacgtccgcaac

SEQ ID NO: 182543 - DNA, 303 bp, Zea mays
  Clone ID: MRT4577_98060C.1
gtggagtggttcaaacactcgacaagagaacctattttcggtagggatgtaagcaagttttattcatgctttcaccacacccacaaaccaaacccagttcattacgactgtgcgcgcactaaacaattgaggtacacttacgtacaaaggctaatatttgtacgtactcaccacgcgcgttattaacaccagtggatctattttttcgatcatccatgagctcgtggcagccttgtgcgctgcaaagaacagcctgttgatcacccaaaccgtggacgacgacgacaacaggttgaccacgct

SEQ ID NO: 182544 - DNA, 443 bp, Zea mays
  Clone ID: MRT4577_98061C.1
atagacatcacggagcgaagaaatggcgttaacatactttcctggcccaaggttcgacttgaccaaaacacaagatcccataaggacctcttccaggcaaacagcccattaacgacgcaatgaacactaaaaaaacgttcgtcactgccatggcagtttctttacacggaggtaaagttgcagatcactgccaaactacaccctcagctggttggggagccccaacccattgtgaggaagctggttcacgtggtgggggcacatgctaagagattggttactcacccttaaaacttggaacaagattttaaagaacaagaacaccctctaagtccccttgaagaacgaagccccccacaccttgatgactattgaactgaaccccatgtttctgttggaccctccgacctgataagtgaccggtttggaagcgcatcgggtga

SEQ ID NO: 182545 - DNA, 333 bp, Zea mays
  unsure (1)..(333): unsure at all n locations
  Clone ID: MRT4577_98062C.1
gagtctatattttttctctttgnggagacacgtgagtcaatctgttgattatttataggaacctcctggcgtactaacggcacctttgtcgagtacatttaatgtgtgatctaaaaaagggcatctccaacgactgggtgatgtagggatgcgctcataatacacaactgttgatgggaaacttgatgtggctagtgtgggaaggctaataacaaaggcttatccaatgacaatggattaagctaactgtcggcgttatagtagggcacactatagtttgacccaccctaatggatcaatcgaagcccctggagaaggtattcacctatggtt

SEQ ID NO: 182546 - DNA, 296 bp, Zea mays
  Clone ID: MRT4577_98063C.1
cttcatactgttttaccccatcccttgtgcatatttccagggagaaggaaagcatatacacttatttttttatttttccaaaagagaaaaaaatgacaaaaggtgaaacttacatacaaatattacctcatttgttgtgtgactgagtaaagaatttttggatcaagcggaaagagtttaagtgtctaacaaacttacagctactgtagtacctaaaaagtcagtgttgtacatagcataaaaactctgcagagaagtattcccaataaggaaatagcattgaaatgttaaataca

SEQ ID NO: 182547 - DNA, 102 bp, Zea mays
  Clone ID: MRT4577_98064C.1
cgcgacggtttgtttcgtttcgaagctctgtctgggcaaccctgcttggcaagcagtgatggtaaaccatctgggctgaaagaactatttcaacaaaatgcg

SEQ ID NO: 182548 - DNA, 374 bp, Zea mays
  Clone ID: MRT4577_98065C.1
gagccacgcgtccgagacactaacggaaaggtcgtggctgttgatacttgtgctagcgagaggggaaaacggaaaaccctagcaccctctgcccggtagccgtcgggcataggagtatagagatggagagtggacgatgttgaactatggtctacgtgcggtggactgccttaccaggccaacgaggagatgcttcgagacgctttcggatactacggaaccatcgtatatgtcaaggtgattaatgatcatgctattaaaggcaagtgtcaaagctcagttactcacactcactccataactgctgagcatgcaattgcgggcattgactgctagaaatgatgcaatcgcattgcacgagtaaaagaattgcg

SEQ ID NO: 182549 - DNA, 756 bp, Zea mays
  Clone ID: MRT4577_98066C.1
atgtcgctgatgcgggtagagcaacagtcgcgggtgggttggagatcctgtccatgtcatcaatgcgggtggagcggcgttgaggcgcgtggatatgctaccgcagttgggtcggaggcagaggtgggggcaaggcggggcatggtcgggtctctgcacccgtgggtaggctccagaagtagctacgagtattcatcaatagaaacgaacgaaaggtgggctcttctcgtagacacggaagggtggtccagcggagagccgtcaccgccacctgagagccaccgtcgtttgaagccatttggtttacagcaaagcaggcgacaagcagcccaggactcctaccaacaagctaagtgtaagcctgggcattcgtacttgaaccgggcctgccagcttaggagcccgagcaatgaggtcggccccgacggagctgcgagcgagccatggaggctgtgcacggtgcagcaggtggaggacacgaaggccgtcatccgcgtgctctcgatatggtcgacggggatcatgcgtcatcgtcgaccagcaggagccaactctaatacaatgacggctactgataaaatagaggttggttctgaactccgaggtagagacgaagtggagtcagacttggctttctcttattgtgaatgtcctatcttctcctccatgatatcctggtttttttccaagtccttattggtcctccccaaggttcttgatcatcaaaacatccatgacaccaatcgtaagctataa

SEQ ID NO: 182550 - DNA, 3162 bp, Zea mays
  Clone ID: MRT4577_98067C.1
aattcggcacgaggatctaaacctcggaggggagatctcgccggctatagggcagctcaagagcctacagttcgtggatctcaagctgaacaagctcacaggccaaatcccagatgagattggggattgcgtctccttaaaatatttggatttgtcgggcaacttgctgtatggagacatccccttctccatctctaagctcaagcaacttgaggacctgattttgaagaacaaccaactcaccggacccatcccctccacactgtcacagattccaaatctcaagaccttggatctggcgcagaacaaacttaccggcgacatccccaggctcatctactggaatgaagtactacaatacctaggcttgaggggtaactcactgactggaactttgtcacctgacatgtgccaactgactggcctgtggtactttgacataagggggaacaatctcacaggaacaattccagagggcatagggaactgcactagctttgagattctggatatttcatacaaccaaatctctggagaaataccatacaacataggttaccttcaagtagccacactgtcacttcaccgaaatagactgattggcaaaattcctgaagtgattggcctcatgcaggctcttgctgtcctagaccttagtgagaatgaactggtggggcctattcctcctatacttggcaacctgtcctacacaggcaaactctatttacatggcaacaaactcactggacatataccaccagaactggggaacatgagtaaacttagctacctgcagctgaatgacaatgaattagtgggcacaatcccagctgagcttggcaaactcacagagttatttgaattgaatcttgccaacaacaatcttgagggccatatccctgcaaacatcagctcttgcagtgcactgaacaaattcaatgtgtatggcaatagactgaatggctctatccctgctggtttccagaagctggagagtttgacatacctaaacctttcttcaaacagtttcaaaggccagattccctctgagcttggtcacatagtcaacttggacacactagatctttcctacaatgaattctccgggccagttcctcctactattggtgatctcgagcatcttcttgaattgaatttgagtaaaaaccatctcactggatctgtgcctgctgaatttggaaacttgagaagtgtccaagtgattgacatgtccagcaacaacctgtctggctacctccctgaagaacttggacagctgcaaaaccttgatagcctgattcttaacaacaacagtttggctggggagatccctgctcagctggctaactgcttcagtttagtcaccctaaacctgtcatacaacaacttctctgggcacgtcccgtcatcgaaaaacttctcaaagttcccaatggagagcttcatgggtaatctgatgctccatgtgtactgccaagactccagctgtggacattctcatggaaccaaagttagcatctctcggacggcggttgcctgcatgatcttaggcttcgtcatattgctctgcatcgtgctgctggcgatatacaagaccaaccagccacagctacctgagaaagcatccgacaagccagtgcaagggccaccaaagctggtggttcttcagatggacatggccgtgcacacgtacgaggacatcatgaggctgaccgagaacctgagcgagaagtacatcatcggatacggcgcgtcgagcaccgtgtacaggtgtgacctcaagagcggcaaggccatcgccgtcaagcggctctacagccagtacaaccacagcctccgggagttcgagacggagctggagacgatcggcagcatccggcacaggaacctcgtcagcctccacggcttctcgctctcccctcacgggaacctgctgttctacgactacatggagaacggctccctgtgggatcttctccatggcccgtcgaagaaggtgaagctggactgggacacgaggctgaggatcgcagtgggcgccgcgcaggggctggcgtacctccaccacgactgcaacccgcgcatcgtgcaccgggacgtcaagtcctccaacatcctgctggacggcagcttcgaggcgcacctgtccgacttcggcatcgccaagtgcgtgccggccgccaagtcccacgcctccacctacgtgctgggcaccatcgggtacatcgacccggagtacgcccgcacgtccaggctcaacgagaagtccgacgtctacagcttcggcgtcgtcctgctggagctgctcacggggaggaaggccgtggacaacgagtccaacctgcaccagctgatactctcgaaggccgacgacgacacggtgatggaggccgtggacccggaggtgtcggtgacgtgcacggacatgaacctggtgcggaaggccttccagctcgcgctgctgtgcaccaagcgccaccccgcggaccggccgaccatgcacgaggtcgcgagggtgctgctctccctcctgccgcccgccgccaagcctcccgcgtccaaggcggcggcggcttcggcggcggccggcgactacacgcgcttcctcgcgacggcggccgacctgaggcgcggcggcgtggccgacgacgacaccggcgacaacagctcctccgacgagcagtggttcgtgcggttcggcgaggttatatccaagcacacgctgtcatgatcgtccgtccgtccgtctccctaactcccccccagaaagttttctcccaagtagagatcgaagtgaaagcataggagcacagcgcaggaaatagacgtagggttatgttgtgaggtccgccgtagaatggagacgatgtccgttggttcaggagtggtccaaatggaaggagaggcgttggttactctgccgctgctgctgggacgacgcatttgcagtggttggtttggttgtccttgggtgtaatcacacggcggcacgacaggtgccccccccccccccccccgtccccgtgaacggacgtaagttttcttggatcctagcaggaaccgcattgaatcggaccatgcatcctgcctgcattggaccagggtcgttgtaaatgagatgcatcaccgtattattattttttggctgccattttacaagta

SEQ ID NO: 182551 - DNA, 466 bp, Zea mays
  Clone ID: MRT4577_98068C.1
gttaatgaagccaaacgtcctaatttcgttttccgcgttaacgactgatccaacagggattgcgcttcatttgaaatcaaaatattatcggcacgagcactcaaacatccaattgtctcacccaagttacacacgatgaggacgaatattttaaaaaagcgtctaattgacatctcgagtgccctactattcacaatcaatcatcgctatgtacatattaaccatggtgaatttattgcccacccactgcccaaacgaataatacatgccccggatgatatccaacatgaattgggttctgatgggcaattttttgactcagatcttaaggtcctttagcagctcgtcaaactcccacccgcttatctcctaacatgcagactatttggcttctttcccgacctctcatcccagggttgcaagcttcccatctaaattgaaatgctggtaaagctccatggcagat

SEQ ID NO: 182552 - DNA, 360 bp, Zea mays
  Clone ID: MRT4577_98069C.1
tcgctagcggaccaccaggcccacccgccccgggggggttcttttaaatgcctacaccgtcaaacccgcagcctgagtctagccgggcgcgaatgaagggcaactggcacgaagagcaccgggcggccaaaggcagctgtcgattgcaagcccaagcacccagagtgccaccgtaccccaaagccagcagaacaggaggtctggcagtgtggagagaactggccctaagccaggcggactaaggggccttaactgcaacctggggaaaaaggaactagactgcgctctaaacgagatcacccttggcgacgatgaagacctaacacccaaaatgagagataaggatcccttggcagaaac

SEQ ID NO: 182553 - DNA, 707 bp, Zea mays
  Clone ID: MRT4577_9806C.1
gtcgcttggtgagatcgggacacaccccattcgcatctctgcttctttctgcttgggtgccctctgccctgaccacagggcccaaccatatcttcttcctcacacagagacactgagcgagcgagcttgagatcgatctcaggaggcggccggcggcggcagcagcagcagagcttgttggcgccgccatggcgataggtggcttcgtggaagcccctgccggcgccgactacggtggccgcgtgacgtccttcgtggtgctctcctgcatcgtagccggtagcggcggcatcctcttcggctacgacctcggcatctcaggtggggttacctccatggagtcgttccttagaaagttcttcccggacgtgtaccaccagatgaaaggagacaaggacgtgagcaactactgccgcttcgacagcgagcttctcaccgtcttcacctcctccctctacatcgccggcctcgtcgccacgctcttcgcctcctccgtcaccaggaggatactccttggagtaggcctcggattcacaaaccagtccatccgtgccttcttcctcaaaaaaagagggccgccaccgcaagaaccgtggcgccatccacaacggcttcgagctctgcatcagcatcggcatcctcatcgccaacctcatcgactacggcgtggagaagatagcagggggatggggcctggaggatctctc

SEQ ID NO: 182554 - DNA, 407 bp, Zea mays
  Clone ID: MRT4577_98070C.1
cgtcattctcttcctcttccggtgctcgtgctcgtgctcgtgcttttcggccttcccctccgccaccttgggcggaacggaacccaaggcgccggcgacccagccaccggtaggggaacgcgccggatgggggggcttttacaccacctatggtaggttggccggaggcacaattccaccaagggtaaaccggctattaaaacgcggggcaatggagggccttccattgccggagggataaaagaaaatccgggatctgaaaaaggttgatttttccaagcaggaagcaaaactgtgggttaaaaacttgtccaaaggggagcatgaggggtcaagggggtcaattggaacaggaccataccttttccactacataataaaaggccgggttggctttttgactttgg

SEQ ID NO: 182555 - DNA, 227 bp, Zea mays
  Clone ID: MRT4577_98071C.1
aattcggcacgaggcccactgtcgagagctgactgtgttgttccacctaccttaactcacgatgcgtgctttggtggtgtcggttgtcttaataagacagagagggcgcgcattgcgggctgaccagaagggatagagcatccagcacgactcggccttgctcacaggcacaggaatgactggatgcatgcatcgacgctgaactctgcgccatgtgggaataaccc

SEQ ID NO: 182556 - DNA, 415 bp, Zea mays
  Clone ID: MRT4577_98072C.1
gggagggcaatggaaaggaagggcccgccaaccaggggggggccattcaaccaaaaaaaaggggaaaagggaaaggaaaggggaaagaaaacccttggaaaaaagggggggggaaaaaattaacccaaaagggcaaaaagggaaaaaagggggggggaaaccaaaaaaaaaaagctccggggggggcattactggagggtaaaacagtcaacccgggaagggatttagccagatgtaaccaacccaacgggccttgttttaagggaaacttccaatgccgccctggaaacaattttgaaaaaaaaaaatttgggaagaggcctttgtttctggaaacccttttgaaatgggcttgaaaaagggttgaccccaattaaacgcttttaaggggcttttttctgggagcactgggcag

SEQ ID NO: 182557 - DNA, 146 bp, Zea mays
  Clone ID: MRT4577_98073C.1
gtgcgagcctcactattacgaaggccgaccttttgtttattacctgttttcaacaaactggaagacagaaagcggacattataacgtagcaaaaaaactaagattctatcgtatatagggttagaatgaggtaaagatgatgacat

SEQ ID NO: 182558 - DNA, 829 bp, Zea mays
  unsure (1)..(829): unsure at all n locations
  Clone ID: MRT4577_98074C.1
agcagtggtaacaacgcagaggactnnnntttttttttttttttttttttttttttttttttggtttttttttttttttttttttttttttttttttttaaaaaagggggggggggaaaaaaaggtttagtaaaatgggtttggggggggacacatgtttttttttggggggaacttggggtaccccaataaaaagggtttaatttacctttcctaatttttggtttcgggggggggactttggtaaaaaatttttttaagggaaaaattttttggataagggaaaatagtttaatggcattttggggaacaccttaggggggggagggttttggaggaaggaataaaagggcagttgggggaaaaccataaccagggggtttgggtaagggtttcccatgaaaaaaaatgggggggggtagggggggatttttgcaaaaacaagggggggttgggaccatttttaaggggcttttcctttctttgggtaggggggatcaaccagcccccatgggggggggatgaagcatggggaccttagaattaatagctagacggggggggggggatggccagttgcatcctaaatagaaggcatttgggtaaagggtgggggggggggggatttggtcctccgcccctttctggaccggggggttaaaagggaaaggcggaagctttggaattggagggatggggggggagggggtttgaaaacgggaagggggggggtgtttggggagcccaattttaggagggcgaagggatcaaggggggaaggggggcggagaaggggggaagcaaagggggccggtcctgggggcggggg

SEQ ID NO: 182559 - DNA, 484 bp, Zea mays
  Clone ID: MRT4577_98075C.1
actagacctgcataacggatggaggaaccgagagcgctccgtacatgtcggcggtagagctgcggttgtgagctggacgagctgcggcggctggagagccttgccaagcacaccacgcgttcagatactccttgtcaacgaaatacgcaacgttgaagcgaacatggcgaaagcaaccgaaccatagcctgagtcactggaggtggcttctgcgccagcggccgcacccgctgcgagtactgctttaagctacgtgactattgggtcgatcacctggtaacaggaccacgagaagattaggacatatgcctcccttggggagttgacagaaaagtgggactactttgagacacatcagcggatataaaggtttatgatgctgaagggcagaattaccggtgtgctgttcccaagctgaacaatgaaattggtcctgagaaaagtgaggttgtggtggaaccaaccagggcttggtggtactctt

SEQ ID NO: 182560 - DNA, 264 bp, Zea mays
  unsure (1)..(264): unsure at all n locations
  Clone ID: MRT4577_98076C.1
gaaaaaaaaaaacttttccccaggctttccactagaaaaaaacagcttaaccaaaggatagcacaacccccgggggatttttggcccttaaaagggccccaaaaggccggggggccctgggccacaaactggaagaaaaaaaaatcgccctccaacccgaaaaaaaacggggaaaaaccctttgatcttccccccagttgggaaaccgccgaaacttgcccccaccccccaagggggnggggccgggccccctatttgggggtt

SEQ ID NO: 182561 - DNA, 368 bp, Zea mays
  Clone ID: MRT4577_98077C.1
gagagaacacaacaaaatttatttgtcgggtgaacccccttccggaaagcctgcaacataaacccacaaacggaacccagggcgcgccaacgcatcatgcgacctaccgatcatggctaaccacagaacgccgggaaaaagcaccacccccgggtagataagcgcaaaaaaagaagggggcacagccccaatcatcaatctgaacatagaaggtcaaatgcggatcgatgttataaagcaagcgccttccaaacgacataatgactaaaaaaatacccaacactatctgaacaggctaggcgctgcatatcaaactaatgtacccatagcgacccaaagaatcagggttccaggttaaggacctgcgg

SEQ ID NO: 182562 - DNA, 463 bp, Zea mays
  unsure (1)..(463): unsure at all n locations
  Clone ID: MRT4577_98078C.1
cgggncgggaatcccggggcggaccaaggcttccgtcaacgcgtccgaatatggggtccaattacctaactgggatgaacagaaaggtgtccagaaggggaagggttgaacaggaaaccaacaatgcttcaacagagttggacaggattgaaaaggacataattccaatggggggtttccccaattatggattggggaggggtgattacttgataataaagggttgttggggggaaccaaaaaaaaggggggtgaccttccgccagtccttcttgaagaaaatttccgggttggggctggaggaaatcaagttaaagttatttgacaaatggtccaaattggggaacggcggtttcaaaattaccgttaagaagcaaaggttttttgggaagttaaaggcttaaggggctgcggtgaaccaaattcccttttttaaaaataattaaactgtgaatcttttgtt

SEQ ID NO: 182563 - DNA, 1260 bp, Zea mays
  Clone ID: MRT4577_98079C.1
gatagacctctgcggcttctctgctagtcgcctttccatttttacccccttctctctcctctccggccgttgccgttgctccgcgccgctctcctgtcagtagccgctgccgccgacgctgcaagtgtgggtctgtcgccgcggccatgttcgcctggatcctccgcggctgccgcgacgagtgctccgcctccgaccagctcaagcagcatgtgctggctctgcaggctcacgatgtcttcaaggcgaaagaggtggtcctgcaaaagaagatctctcaagaggtggaacgggccaaggagttcacaaagtcgggaaacaagcaggcagcaatgcagtgcctgaagaggaagaggtactacgagagtcaaatgaaccaagttggaagcgttcagctgcgcattaacaccaaggagagaatgatcgctgatcacacgggcaacaaataacacaaaagtaaatgatgacagtttgtatatctgagcagctacgttaacctctaaaaacagcaagccggcaagccgactctggccatgtttggtttcaaaaactctattttagtccctcctttttattccattttagtacctaaattactaaatatagaaactaaaactctattttagtttccctatttaacaatttatgaactaaaatagaataaagtggatggactaaagtttagtctctataaaccaaacaccccctaagagagtgtttggttactagggactaatttttagtccttctattttattccactttagtctataaattgcaaaatatggaaactataactctattttagtttccatatttgacaatttagtgactaaagtggaataaatgggaggaactaaaaattagtctctaaaaccaaacaccccctaagctcctcagtacccaaaataatttaacaaataagccatctatgcagttcttacatacatgtgaaccaatcctatgtgtttagaaaactgaagctaaggaagatcacagctcaaaaaaagatacaactagccatcagaatcttcatcatcactgggctgttcgtaaatttcaaactctccatcacttgcatcagcgttgataggagcatcacataatttcttttggccgtcttcctgcaatggcaagctgcgcagtacttcttcgaggtatccattcgagaagccttcatcaaatgcataggaatcacctaaggtgaactcatgaatatcatctgccataggtggagaatcataaccctccaattcctct

SEQ ID NO: 182564 - DNA, 559 bp, Zea mays
  unsure (1)..(559): unsure at all n locations
  Clone ID: MRT4577_9807C.1
gnaaaatcgtgntgcggnanacagctaccgccgccctcgtcctcgtccccctcctcgctgcggcggtacagacctccgccctgcctttcatcgtcctgcacgggattggggaccagtgcgccaaccatggcgttgccaagttcactaaacttctcgccgattggtccggctccgacggctactgcctagagattggcagaggaacatgggactcttgggtcatgcctcttcaacaacaggctgatataatctgcaacaaggtcaaggaaatgaaacaactgagaggtggctacaacatagttggtctgtctcaggggaacttgattggtcgagcagtggttgagtactgtgatgatggaccgccgtctggatttttttgcattattgttgatgctctgatcaaattggagatctactcagactatgtgcaggaacatcttgcacctagtggctacctcaaaatcccaactgatatggcagattatctgaagagttgtaggtttcttccaaaacttaacaatgaaattccagataaaagaaatgccacctacaaggaaag

SEQ ID NO: 182565 - DNA, 272 bp, Zea mays
  Clone ID: MRT4577_98080C.1
gcctactatggacggactacttttgtttgtctaactgggcattgaccatgataatgactgctgtaaacttgcatgtgagtgcacaaagctactaattgctgccttacactgcactactatcagaggctatatagcatgccggggatatgactaaatgattggatatattactcacaggagctcgggaccattgctgacaactgtgctgcgtttcagacgtactatattgtgcactatgctacgctggctcaggtgacagagcaccacttgca

SEQ ID NO: 182566 - DNA, 235 bp, Zea mays
  Clone ID: MRT4577_98081C.1
gagcggccgccctattatttattatggttccaaagccttatatatttaaaacaggatttacagcaccttaacagaaactgcaggcagtatacaggtataacactgttcaaaatagaaacatatgctttatttatcttcagaagaaggatgcaaatattacggtgtttcaaccaccagctctgcaaaatcaggtctcctgagaagaaaaacaactacacagggttgttaaggtaaa

SEQ ID NO: 182567 - DNA, 925 bp, Zea mays
  unsure (1)..(925): unsure at all n locations
  Clone ID: MRT4577_98082C.1
gcgtccgcttacgaaggctcgacgggccaccgncggcttcnagcgacgacgcgagctcggcgtcggcggcttcggncagatctacaaagggacgctgcgggacgggaacgtggtggcggtgaagcggctgtacgagaacagctacaagggcgtggagcagttccagaacgaggtggagatcctgtcgcggctgcgccaccccaacctggtcacgctctacggctgcacctcgccgcgcagcagccacgacctgctcctcgtctacgagtacgtccccaacggcacgctcgccgaccacctccacggcgcgcgcgcctcctcggcgacggggtccgccgcgccgccgctctcgtggcccgtccgcctcggcatcgccgtggagacggccagcgcgctggactacctccacgccgtggagccgcaccaggtggtgcaccgcgacgtcaagaccaacaacatcctcctggacgaggcgttccacgtgaaggtggccgacttcgggttgtcccggctgttcccggcgcacgccacgcatgtgtccacggcgccgcagggcacgcccgggtacgtcgaccccatgtaccaccagtgctaccagctcaccgacaagagcgacgtgtacagctttcggcgtcgtgctcgtggagctcatttcctccaaacccgcggtggacatgagccgcgccggcggcgacgtcaacctggccagcatggccgtgcacatgatccagtgttacgagatcgaccgcctggtagacccgcggatcgggtaccggacggacggcggggacgaagcgggcggtggacctcgtcgccgagatggcgttcaggtgcctgcagccggagcaggacgtgaggccgcccatcagtgaggtgttgggcgcgctgagagaggcgcanaagatgggagcaggatggctgcgcc

SEQ ID NO: 182568 - DNA, 445 bp, Zea mays
  Clone ID: MRT4577_98083C.1
acaagcaggcacaggatctgccgctgaacacgcccgccactctccaacgctgcagcagtctgaagccgttcccgactcacgcttgctctggctgtttgtacgtgtaccacgaaaggatggaactgagcagagaccctgctgctgcggtgcccttatgaatgtcgcgtaacgacatatgatgtgcctgagttgtactttcgcgcacgggctcactggcgctgatcgagtgaacttaccattactacaggacgcatacctcttgaggatcctgctacgcggaactcatccctatctatcaagatcgtcttgggcgcgactaaaaaaaataagccgccttcctggagctcccactattggtctcttattggcggatactacgcccgctcaggagcttcatggtcataggtgttgcctgcctgaacaagtgatgcgttaacgcattcac

SEQ ID NO: 182569 - DNA, 237 bp, Zea mays
  Clone ID: MRT4577_98084C.1
tcgaaaaaatcgagccgaaaaagatcaaaagaaaaaaaaagaagaaaaaaaccctaaccactccgatcgaattattcgagggccgcagcagcccggcgaggctatgtcttaagcaaccggcggcttccgggatcgctttccctggtgatacaactcgggccggtcatttcgtcttttcgtggggatatgagggccggttcgaccgatccggccacggggccggcgaagtcgatgctt

SEQ ID NO: 182570 - DNA, 594 bp, Zea mays
  unsure (1)..(594): unsure at all n locations
  Clone ID: MRT4577_98085C.1
ggggtaccctccgagcttgnccgggaggaacccgttgaagaccttttttcagatgccggcctagtcggcatagtctaccaggtcacccgctatctctacgtctcctgcaccgaactcaagatctccagcttcagaattaagaatggcgccaacgcctagttgtggagctgagtcggactgtcatctggtacgtgctcgttgctactgacaacgtagactggcgacggattggtcgcagtgacattgaccaggagtagaccggacacacagtacacctctctctggtgggaggtcgatcagaaaggacagcagatttccatgggctagacgggctgaccatgatctgaccgcctcaagtgaggacatagagggtttggacagctagatgcacacccaggactttagatggagcttctgccggtactcaccacagaagcacgcactgatctacgagactaggatctccaatttgtgccatccctcatccagcgctactttgcgatagcatgctacttacacctgagatacgagctgaccatgctgaacacttacacaaatgatggagaatgctgtaccatacatatggctatgggc

SEQ ID NO: 182571 - DNA, 469 bp, Zea mays
  Clone ID: MRT4577_98086C.1
cggaacattgtaggggtttttaatgcagacgcgcggccttcgcgtacagcttgtctgcaactaagttcaactccttgtaaacctgcagtgtcgtttcgaatgttttgtcttcagtgtcttcgtcgaagattataaggtcgcctgaaccttggtcaagaatacccttgagtttgccgtccaaaatcaattctgataatttggtctcaaccacggcccgcggtagattaatcagcgcggcgacgtggtcaatttgaacgcgggagaacggctcgatcagacgcagcagattttgctccaataggttctcgtagagctggttgagatgagcgtaaacgatgggatcgtccacaagctgttctttgtatgtctctaacactttcttgtacgcgtgtatcgagcgatccttatgggcatcagcaacggacttcaatgcctttacgtccttgctcgcgtactgaacgccagcacg

SEQ ID NO: 182572 - DNA, 299 bp, Zea mays
  Clone ID: MRT4577_98087C.1
aatctattaaaactcttttatgactattttttttttcggaaatgaataaaatatagctggggggtttattaccactagaaaaacctataattaaaatacaacataaacaataaaactccatactttgtcaaactcttctcgtctgctagtagctcatcacactttgttgggattagcaaaattactctatcataaccagctgtatacccgaattaatcaacaacattttataatgactgtctcttcttataaagagaacatcacactggtagatgctatttggatctaattttacactt

SEQ ID NO: 182573 - DNA, 366 bp, Zea mays
  Clone ID: MRT4577_98088C.1
tttccggatcctactgtcaccacacacagatagagacaagtggtttccaaagccaagtgtgtactagcagtctagcaaccagctagctcgggcggcagcggcagctagctccggcgcacacaaccacacacctgtttaattctgtactgcatgcgtgtgtaatttgatggttcacaataatgagtccctctccggaccttggtagctgcttgcttgtggtgagtgagagtgtgagactgagggagaagaggtggtgggcgtggggctacgtcgagagaggcgtgttcctgtactcgcttcgttttctctgcatgcgtgtataattgtgttcaataataagtgagagcggtgtgatgtgtggctccc

SEQ ID NO: 182574 - DNA, 515 bp, Zea mays
  Clone ID: MRT4577_98089C.1
gccggccgggctgcgatcctactgtcaccacacacagagagagacaagtggtttccaaagccaagtgtgtactagcagtctagcaaccagctagctcgggcggctacgtattccacgagcaccacgagaagaagaaggaccacaaggacgccgaggaggctagcggcgagaagaagcaccaccacctcttcggctgaccgtagtaccggccggcgcgcgaccgagctagctagctccggcgcacacaaccacacacctgtttaattctgtactgcatgcgtgtgtaatttgatggttcacaataatgagtccctctccggaccttggtagctgcttgcttgtggtgagtgagagtgtgagactgagggagaagaggtggtgggcgtggggctacgtcgagagaggcgtgttcctgtactcgcttcgttttctctgcatgcgtgtataattgtgttcaataataagtgagagaggtgagatgtgtggctcaaaaaaaaaaaaaaaaaaggccccta

SEQ ID NO: 182575 - DNA, 3195 bp, Zea mays
  Clone ID: MRT4577_9808C.1
tcattgggtacctcgaggccggccgggataagcctgctgctgtatgtaacccagatccaccccattcgcatctctgcttctttctgcttgggtgccctctgccctgaccacagggcccaaccatatcttcttcctcacacagagacactgagcgagtgagcgagcgagcttgagatcgatctcaggaggcggccggcggcggcagcagcagcagagcttgttggcttcttcttggcttgttggcgccgccatggcgataggtggcttcgtggaagcccctgccggcgccgactacggtggccgcgtgacgtccttcgtggtgctctcctgcatcgtagccggtagcggcggcatcctcttcggctacgacctcggcatctcaggtggggttacctccatggagtcgttccttagaaagttcttcccggacgtgtaccaccagatgaaaggagacaaggacgtgagcaactactgccgcttcgacagcgagcttctcaccgtcttcacctcctccctctacatcgccggcctcgtcgccacgctcttcgcctcctccgtcaccaggaggttcggccgccgcacctccatacttatcggaggcaccgtcttcgtcatcggctccgtcttcggcggggcagccgtcaacgtatacatgctcctactcaacaggatactccttggagtaggcctcggattcacaaaccagtccatcccgctgtacctctcagagatggcgccaccgcagtaccgtggcgccatcaacaacggcttcgagctctgcatcagcatcggcatcctcatcgccaacctcatcaactacggcgtggagaagatagcaggtggatggggctggaggatctctctgtccctggccgccgtgccggccgcgttcctcaccgtcggcgccatctacctgcccgagacgcccagcttcatcatccaacgccgcggcggcagcaacaacgattcggctcgagggctgctcctccagaggctgcgtggcaccaccagggtccagaaagagctcgacgatctcgtgtccgcgaccaggacgaccaccacagggcgtcccttccgcaccatactgaggcgcaagtacaggccgcagctggtcatagctctcctcgtacccttcttcaaccaggtcaccggcatcaacgtcatcaacttctacgcgccggtcatgttccggaccatcgggctcaaggagagcgcgtccctcatgtcggccgtggtcacgcgcgtctgcgccacggccgccaacgtggtggccatggtggtcgtggacaggttcggccgccggaagctcttcctggtgggcggcgtgcagatgatcctgtcgcaggccatggtgggagcggtgctggccgccaagttccaggagcacggagggatggagaaggagtacgcgtacctggtgctcgtcatcatgtgcgtcttcgtcgcgggcttcgcctggtcctggggccctctcacctacctggtgcccaccgagatctgcccgctggagatcaggtcggcggggcagagcgtcgtcatcgccgtcatcttcttcgtcaccttcctcatcggccagaccttcctggcgatgctgtgccacctcaagttcggcaccttcttcctcttcggcggctgggtgtgcgtcatgacgctcttcgtgtatttcttcctgccggagaccaagcagctgcccatggagcagatggaacaggtctggaggacccactggttttggaaaaggattgtagacgaagatgcagcaggggagcaaccgagagaggaagcagcaggaaccatagctctgtcgtccacgtccaccacaacatagtcatcatcaacaatactcatggcatgggcctgccctgtatagatagataattaactagctgcaccgcacagattgtctccgactataagctagctagctagttggatgcatgcatgcatgcattctgttatttctgtgaccatgaatcaaagggccttccaacagaacagaatatgagatgagatgaatcttatttgtgactgagtgccaagccaaccaagcagaggcagcgtaacaatccaagccactgtcggaagcccatgcatcaaatcaaaacagcgtcatcaccctctgccagtgccagcccaagcacagcgtgccaaatggcaactagcaaatcagaaaccgtcaccgatgcctttttgtttgtcaggtaaggcacaatgtacttcttcatgtcacctttggagataccaagatgacctcccggcacagacacaaacttcacccgccctgcttcatccagtgtcttcaaaccaatccagtcttcctcatacagtttcgtcttctgaggtggtagaactggatcaaaggctccatcagggtagtaaccaaaccatgccgtttctcgtggtatcaggactgcatcatcctgaaacataatcagaaccaaattctctaagctactgaatctttccttgtaggtggcatttcttttatctggaatttcattgttaagttttggaagaaacctacaactcttcagataatctgccatatcagttgggattttgaggtagccactaggtgcaagatgttcctgcacatagtctgagtagatctccaatttgatcagagcatcaacaataatgcaaaaaaatccagaaccacaaagaggcactgaagcggtaccagcatgaggacctcctagagagatgaaattcttgaccggcggtccatcatcacagtactcaaccactgctcgaccaatcaagttcccctgagacagaccaactatgttgtagccacctctcagttgtttcatttccttgaccttgttgcagattatatcagcctgttgttgaagaggcatgacccaagagtcccatgttcctctgccaatctctaggcagtagccgtcggagccggaccaatcggcgagaagtttagtgaacttggcaacgccatggttggcgcactggtccccaatcccgtgcaggacgatgaaaggcagggcggaggtctgtaccgccgcagcgaggagggggacgaggacgagggcggcggtagctgttctccgcatcacgaattttcacaggggggggcgggggcgacgtcggattcctattctagttagcagcttgcaaggcagcacgctggcgagaacttccccttttcccacgcgtccgccgacgggtgggtcaccc

SEQ ID NO: 182576 - DNA, 785 bp, Zea mays
  Clone ID: MRT4577_98090C.1
ggccgggaagctattgctagccagccatcctactgtcacacacacacacacacacagacaagtggtttccaaagccaagtgtgtgtactagcaaccagctagctcgggcggcagcaggcagccatcatgtcggaggagaagcaccaccacttcttcaaccaccacaagaaggacgaggagcagcccgccggcgagtacgggtactccgagaccgaggtggtcaccgccaccggcgagggcgagtacgagaggtacaagaaggaggaggccagcggcgagaagaagcaccaccacctcttcggctgaccgtagtaccggccggcgcgcgaccgagctagctagctccggcgcacacaaccacacacctgtttaattctgtactgcatgcgtgtgtaatttgatggttcacaataatgagtccctctccggaccttggtagctgcttgcttgtggtgagtgagagtgtgagactgagggagaagaggtggtgggcgtggggctacgtcgagagaggcgtgttcctgtaatcctgtactcgcttcgttttctctgcatgcgtctataattgtgttcaataataagtgagagcggtgtgatgtgtggctccccttgtcaggctcatgtttatccgtattgaatcctggcaccatgcatgactgaggatctggatgtctatgaagcaccgtgtatctatcatcacttttgcaaaaaaaaatattcttatatttcttgtaaaaaaaaaaaaaaaaaaaaaaaaaaagtactctgcgttgttaccactgctt

SEQ ID NO: 182577 - DNA, 646 bp, Zea mays
  Clone ID: MRT4577_98091C.1
agccatcctactgtcacacacacacacacacacagacaagtggtttccaaagccaagtgtgtgtactagcaaccagctagctcgggcggcagcaggcagccatcatgtcggaggagaagcaccaccacttcttcaaccaccacaagaaggacgaggagcagcccgccggcgagtacgggtactccgagaccgaggtggtcaccgccaccggcgagggcgagtacgagaggtacaagaaggaggagaaggagcacaagcacaagcagcacctcggcgaggccggctacgtattccacgagcaccacgagaagaagaaggaccgtagtaccggccggcgcgcgaccgagctagctagctccggcgcacacaaccacacacctgtttaattctgtactgcatgcgtctataatttgatggttcacaataatgagtccctctccggaccttggtagctgcttgcttgtggtgagtgagagtgtgagactgagggagaagaggtggtgggcgtggggctacgtcgagagaggcgtgttcctgtaatcctgtactcgcttcgttttctctgcatgcgtctataattgtgttcaataataagtgagagcggtgtgatgtgtggctccccttgtcaggctcatgtttatccgcg

SEQ ID NO: 182578 - DNA, 336 bp, Zea mays
  Clone ID: MRT4577_98092C.1
tttgggctgatttatgtgcttgcccggcctagaggataaaatactaacaaaccactacacggtaatacgcgcaccaaaccgaggttagaaatcgtaaagtctagactactccacccgtaacgcctaatttacatacacaccaatacgcaagtaacccataaggtacttagaatcatcataaagaagtacccaagtagtggcttaataaatcgtttaagtacctaagagctactataattgtgagtaaattccttacaccactagtcaacagcactactaaacgtattagcgtcctaagagttattccagcaataacatacgagatactaagctcat

SEQ ID NO: 182579 - DNA, 600 bp, Zea mays
  Clone ID: MRT4577_98093C.1
tccgggagccatcctactgtcacacacacacagagagagacaagtggtttccaaagccaagtgtgtactagcagtctagcaaccagctagctcgggcggcagcaggcagccatcatgccggaggagaagcaccaccacttcttcaaccaccacaagaaggacgaggagcagcccgccggcgagtacgggtactccgagaccgaggtggtcaccgccaccggcgagggcgagtacgagaggtacaagaaggaggagaaggaggctagcggcgagaagaagcaccaccacctcttcggctgaccgtagtaccggccggcgcgcgaccgagctagctagctccggcgcacacaaccacacacctgtttaattctgtactgcatgcgtgtgtaatttgatggttcacaataatgagtccctctccggaccttggtagctgcttgcttgtggtgagtgagagtgtgagactgagggagaagaggtggtgggcgtggggctacgtcgagagaggcgtgttcctgtactcgcttcgttttctctgcacgcgtgtataattgtgttcaataataagtgagagcggtgtgatgtgtggctccccttgtc

SEQ ID NO: 182580 - DNA, 382 bp, Zea mays
  unsure (1)..(382): unsure at all n locations
  Clone ID: MRT4577_98094C.1
aacagaacctctatcaagtactgtttattccatggccatagccctcntcgggcacgctgctcttctattctgaagcgtcnncactaccacaactaccactctgaccatccacaacctctgcccccacccggtgtgaccgctgatcaccccgagctccggcttcccctccatctccaccaacaccgcgctgctgggccccaacgcgctactctccctctacttcccgcccaccttctaagccgtacgctacgactacctcacggactatctcgccaacaagagcgagctgcttatcatctccaacccggcgcacaacacggtgcctgtgctcatccacaacggtacacccgtctaccagtcaacggtcatcgtccattacatc

SEQ ID NO: 182581 - DNA, 382 bp, Zea mays
  Clone ID: MRT4577_98096C.1
tcgcgcactcgtgctacgtgcttatgtctatctacaccgccgtcaccgttaagcgcggtgcgataacatggcgtccgtgaccgtccgcgctgcttgcgcgggcctgcacccgtcggcgtgtatgaagtggtcctcgccatctgcggcggccttcacttgtccactctagccgcctcggtcgcactgctaccgcgttggcgacgaggcgcatcctaacacgctaggcacaaggcgagtggctgacgggccttccatcagccgcctacctcagactgcagactgccgagagacaatggcttagacccgttgtgcctggcggaggacccgtagaacctgacgtggtacgtgcatgcggagctggtgaacggtcggtcggcgatgc

SEQ ID NO: 182582 - DNA, 733 bp, Zea mays
  unsure (1)..(733): unsure at all n locations
  Clone ID: MRT4577_98098C.1
ttccaaagccaagtgtgtgtactagcacccagctagctcgggcggcagcaggcagccatcatgtcggaggagaagcaccaccacttcttcaaccaccacaagaaggacgaggagcagcccgccggcgagtacgggtactccgagaccgaggtggtcaccgccaccggcgagggcgagtacgagaggtacaagaaggaggagaaggagcacaagcacaagcagcacctcggcgaggccggcggctacgtattccacgagcaccacgagaagaagaaggaccacaaggacgccgaggaggccagcggcgagaagaagcaccaccacctcttcggctgaccgtagtaccggccggcgcgcgaccgagctagctagctccggcgcacacaaccacacacctgtttaattctgtactgcatgcgtgtgtaatttgatggttcacaataatgagtccctctccggaccttggtagctgcttgcttgtggtgagtgagagtgtgagactgagggagaagaggtggtgggcgtggggctacgtcgagagaggcgtgttcctgtaatcctgtactcgcttcgttttctctgcatgcgtctataattgtgttcaataataagtgagagcgntgtgatgtgtggctcccctttgtaggctcatgtgtatccgtattgaatcctggcaccatgcatgactgaagatctggatgtctatgaaccccgtgtatctatattacttttg

SEQ ID NO: 182583 - DNA, 270 bp, Zea mays
  unsure (1)..(270): unsure at all n locations
  Clone ID: MRT4577_98099C.1
ccttactaccagacaaccttagccaaaccatttacccaaataaagtataggcgatagaaattgaaacctggccccactacacctctctttcttcttttgttgttggggtctgtgactgcggatataactgacggcaacgtgaacatctcanccgggagcattcgctcattaagccctaccanggggtcggttccagctctatgcccctctgggacttccagggcagcactatgctcacgagccagtacgtacgtctgacccctgacgagc

SEQ ID NO: 182584 - DNA, 737 bp, Zea mays
  Clone ID: MRT4577_9809C.1
aattcggcacgaggcttcctcccccgcgctcgcccctacggcgaccgagctccaaagcagcgccaccgccagatccgcccgcctccggccgtccccggctcctgccggctgcaccaagtcagatccaaccccgcccccccctccagcaccaccagctcgccctcctgtgtcccagctcccaccgccaccgccctcacatctaccgccggcccgcccttctgatccaactgcatgccgtgcgccggcggccccctaccaaaccaagcgggtgaggtttgcattcactgcaagcaccacgccgccccgcattcactacccctccgccgtatcccgcagccataatgccacccccgccccgatagctggtttgaagtccccctggaagctacgaccgcattgaagatgaggatcttgaaggatggacgacgattcggtgcaggcgtggacgcgtcacccgcgtaggcctaggccgcgccccagcggcgcctcgcctgctctcagctcaagcccctagccgtcttatggtgctattcagaggaattcattggctcagatatgagcgcagctacagaaaagtgaagaagcagcggaccttttaagaaaagcttgtcgtcatctggagtcggtggccatacagtttttttgcttatcagggttagaggtttcaaacaggattgagttgtaataaatcagttttaagtgagtttgagtcggtgaagagtaggggagctattaag

SEQ ID NO: 182585 - DNA, 633 bp, Zea mays
  Clone ID: MRT4577_980C.1
aaaaaacacccttctgggttcaaagggggggaaattaccagggaaaatttaaccactttttcgaaattaccaacacatataaccctttaaaacttaataataaccagaaaaggccctccgtaacctaaataccatcacaccccattttaacccaccaaaaccttttatttcccaaaaaaaattggcaaaaaaccaagtgaaaagaaacccttataacccataaaaatttggaattcaacctttaaaagttggaacctaaccctcaaaaaaaaatacctcaccctaacccccctgaacccaatttatttttcgctaacatcctccctggaaaggtttgctaaaacccccaacaaaccggttaaggttataacccctttggaaaaaaccctttggaaaacctcaacaacctttccaaaaaagtccataaccacccttgtaaatcttgccaatggcatcctccccccccccaggaaaccttgaaaaaaaaaaaaaccccccacttgaccaaaaaccagggccaaaaaaatcttaagggttatttgacaaaccaaatgccaacaaaaaagctaacagcccagaaatacctacccctccaaatgtccaaaaacccaattctcaaatttcctctaaaaa

SEQ ID NO: 182586 - DNA, 268 bp, Zea mays
  Clone ID: MRT4577_98101C.1
aaaaaaaaaaaaaaaaaaaaaaaaaaaaaaaaaaaaaaaaaaaaaaaaaaaaaaaaaaaaaaaaaaaaaaaaaaaaaaaaaaaaaaaaaaaaaaaaaaaaaaaaaaaaaaaaaggggggcccccctaagggtttccagctttacgcccggggcattgcgagttaaaaccctttctagagggcccccaaattccatttcccgggcgggcttttaaaaccttcgtgctggggaaaccccggggtttccccattttaatcgcttttgaaac

SEQ ID NO: 182587 - DNA, 313 bp, Zea mays
  Clone ID: MRT4577_98102C.1
attcggctcgaggtatggttgtggacgccgtttgttgtccgctctgtccatgggaggctggtggtctttatcacacacagtcccacgtgtcgctactgaactatacgctgcgtagggcaatcgccttactgcaaagtcaggcacgcatgcaccccacacacaactaggtagcctatcgttttgagtgaaaatccaacgaggatgagagatggaacggatgatttcgtcgctggggtactgagcggaggagcacaacctcttaagccactgagccgtttgggcgaccgctgggtgctcgcctattggcgtacag

SEQ ID NO: 182588 - DNA, 463 bp, Zea mays
  Clone ID: MRT4577_98103C.1
ggcggagagaaaccttgaggactttgtttaaaaaaaaaaaaaaaaaaaggggggtcggcgtcagaggggagcgtgacggtgagggcgtgttagctgcgacggagctggcgagatgcgttgagctggtcatgggtcaaggtacaaaagcaacggcgataagggagagagtaaaggctttgagagagatggcgcagcaggcggcacgagcaggtgggccggcggagagaaaccttgaggactttgttaaaaaaaaaaaaaaaaaaaaaggggggtcggcgtcagaggggagcgtgacggtgagggcgtgttagctgcgacggagctggcgagatgcgttgagctggtcatgggtcaaggtacaaaagcaacggcgataagggagagagtaaaggctttgagagagatggcgcagcaggcggcacgagcaggtgggccggcggagagaaaccttgaggactttgtc

SEQ ID NO: 182589 - DNA, 227 bp, Zea mays
  Clone ID: MRT4577_98104C.1
cccgcggacgtaagctcggaattcggctcgagcaatatccaaacccccgttcttttacccctacgacggacggcgcacaaggggggaatatacacaaccgtggggccccacacaacacacaaaaaaatttccccccacgtagacaaccgccacccacgtacactccccaaaatccgaaagccgcccttgtcgacccaggaagcccaggacccccccgatgccccaac

SEQ ID NO: 182590 - DNA, 215 bp, Zea mays
  Clone ID: MRT4577_98105C.1
ggtgaatgaagacaacatattatgtgaggcgctctcgctctatataacacatattctcttttttttttgtgtgtggggattcgccttttttctctctgagagaacaaggggaattttcaccatcccgcgcagtgtcccataaaatatgttttcacaagattgtgctactcgctataccaacataagagtttcagtgtctcagacacatcacatag

SEQ ID NO: 182591 - DNA, 109 bp, Zea mays
  Clone ID: MRT4577_98106C.1
gggaataattaaaaccattttgacaaaacttaagccacagtttacaaagatcagcattcttgttttcattgacaatattttcaggggttcacaatttggaataaaactt

SEQ ID NO: 182592 - DNA, 236 bp, Zea mays
  Clone ID: MRT4577_98107C.1
cgtcttctcctccctcctgccgtgcctctaatatagagcagcatcgcaagaggctggtacatctgactctttagctcgtctcggctgtgggggagattgccgctcacctcgcatgtcatgaaccagcgccaccctgacgagctgtgcgatcaggtgtcgtactcggtgctgtacgcctgcctgagtcagaaccccgacagctaggtgccctgcgagacctgtatcaatacgaacat

SEQ ID NO: 182593 - DNA, 340 bp, Zea mays
  Clone ID: MRT4577_98108C.1
tttttttttttttttttttttttttttttttttttttgtggaatattaaattttttgtttttttttttttatttttgggggatggtaacatcccaaataaacacttgggggggtttcaaccaccggggggaatgtctcaaacaggggccgaaacaaaaaaaaaaagggggggcgcacaaaaaggggggggcaggaaaaaaaagcagcggggtagggaaaaaaaacggtgggccgaatatgggcttccggctattaatggggaaactccaatttcccccggaagggaaaaaaactgggggatccccaaaaaaaagggggcgggaaattgggtgggcacccc

SEQ ID NO: 182594 - DNA, 530 bp, Zea mays
  Clone ID: MRT4577_98109C.1
gggaaaaaaaaagggcgaaacgaggccaccagctcaccgccgagcggaagcggcgccgagcaaccaacccctctcctcgtccgccgccgtctccccggaccatggccttccccaccgtgctgaaggatctgatgtatgctgactctcatgaatgggtgaaagttgagggtgattcaacaaccgtggggattactgactacgcccaggagacttgtggctgcttttgcaggcaggaatggactctggtttcaggaggctaatgatgagaacaatgcaaccagggaattgcatcatctcatcgatgctcttccttcttggcaatctccctgagcaggtccttgtgtagcgccacgtcacgcatgacgtggctagtttagaaacaaaagtaaaaattctaaatctcagagtatcagttggtacaagttgacgctatgatgttagttgaaatgattacaggagggtccaaaatttacgcatcaattgagctatcccagcagagcattactttgtaccatgtggggaccataccc

SEQ ID NO: 182595 - DNA, 370 bp, Zea mays
  Clone ID: MRT4577_9810C.1
gccttactgaggaacaagccgcccggacactttatggcctctgatcttctcaaaatcctatgggtatgcaacgaaggtcgccaaaccgtgctagtgctaagggagcttagcaagcggctgtacaatccgttgcatgatctgaaaaggaaggtagagcttgatctgaggaatgggcgcaccagggccttggaggcgacgaacttgtggatgctaaaagtggccgtggcactctatcaaatcctgtccaggggttcttaacgcgtgttgatgctgactatgaagggtaagatcacgttttgctgtgcgataaattacgagtatatggttgtcatgtaccagctggagactacggtgcaactgtggaaaacct

SEQ ID NO: 182596 - DNA, 157 bp, Zea mays
  Clone ID: MRT4577_98110C.1
gcgtattatttgagcccttcgctgggtacgagcgcctactaggatcgaggatgggagacgtccgttgggtacttccatctggcgataatttgtgtgagaagtagcgaattaatggaccaagttaccgcgcccaaacttaatcctagcaatcgcaggt

SEQ ID NO: 182597 - DNA, 729 bp, Zea mays
  Clone ID: MRT4577_98111C.1
atccatcgtcactcagtccacaaacagaaataggaagacgagagaacagaagagccaaagacactaaaacgaaatggcatcctcctcttcctttctcctccttgctgcacttcttgcattagtctcatggcaggccactgcttctgatcctagcccactccaggacttttgtgtcgccgacatgaattcaccagtccgtgtcaacgggtttgtttgcaagaacccgatggaggtcaacgcggacgacttcttcaaggcggccaacctcgacaagcctaggatgcccaacaaggttggatccaacgtcactttgatcaacgtcatgcagattgcaggactcaacaccctcggcatctcaattgcacgcatcgactatgctcccttgggtcaaaacccaccacatacgcaccctcgcgccactgagatcctcacggtgctcgagggaacattgtacgttggctttgtgacatccaaccagcccgcccccaacaaaaacaagttcctctccaaggtgctcaacaaaggtgatgtgtttgttttccccgtggggctcatccacttccaattcaaccccaacccccaccagcccgctgttgcaattgccgcgctaagcagccagaacccaggggctatcacaattgccaatgcagtgtttgggtcagacccaccaatatcagatgatgttcttgccaaggcatttcaggtggaaaagaatacaatagactatct

SEQ ID NO: 182598 - DNA, 476 bp, Zea mays
  unsure (1)..(476): unsure at all n locations
  Clone ID: MRT4577_98112C.1
cacagagacaccaggggttgaactcacctaatcaactaccaatctaccttagaaagctagacaccgaacccnggggtcgggctaactgtctctttgccattgctgctctcctcttcataaccatggtcatagcacccatggccgaagcaaacactgaccatgcccctgaggctgactcaccacacgatggacctacacagccgactgctgcacctggcccccaacgcgtcgaaggcctcacaggcaatgaagatgacaaacatgactacaccaactgaggccacacatgtcagcccgaataaatctggaacaagacatggaataaaaatgagaacaatgtctataaaaccatgaattcatactaatgtgtggtcatacatggatacatacttgctctccctctttattaaactaggggattgacaatgctgtatcatgctgttagttaactgtatcgactcatggtatcaaggtct

SEQ ID NO: 182599 - DNA, 224 bp, Zea mays
  unsure (1)..(224): unsure at all n locations
  Clone ID: MRT4577_98113C.1
cactattgggtatgcnnncgcccctccgcctgcaggttccggatcccaatttcgggctagacccacgcttcaatttcctttaagagcaaaacttgagccagtcacattacagaatggtctttgattcacagcttcaacgtgcccatggtggacatcccgcaggccaggggcaacgatcacaaaccggcgctcgaatgcctcataaatcataattgagacagtcc

SEQ ID NO: 182600 - DNA, 818 bp, Zea mays
  unsure (1)..(818): unsure at all n locations
  Clone ID: MRT4577_98114C.1
attgggtacctcgaggccggccgggacgaagctgcgaaatataaagatttcgcagtttcaggccggccgggagtaggtggaccattctgtcgtgctcacccaatgccaatggagtcggttgcggtcgtggcggtgccgttcccggcgcagggccacctgaacgcgctgctgcacctgtcgctgcagctggcggcgcgcggggtacccgtacactacgcggcgcccatggagcacgtccgccaggcccggtcgcgcgttcaaggctggggcgacgacaccctctgccgcgtacacttccacgagctctccgtctccgcgtacgcctccccgccgccagaccctgccgccgaatcggccttcccctcgcacctcgtgcccatgtgggaggccttcaccaccgacgcgcccgccccgctcgcggcgctcctcggcgggatctccgcctcctgccgccgcttcgtcgtcctgtacgacatcgccaacgggttcgccgccgaagaggccgcgcggctgcccaacggcgaggggttcgggctggtgtgcaccgcggtgtcgtgcatcgtcgggcggacggacgccggcagccggctcgtgcgtgagcgcgggctcgacttcttccccgtcaactcctttgtgacggaggagtttctggctaccgtcggcaagcgggcgagatgggcgcagtccataccgtgcagcgtcggcatcctcgccaacacctgccgcgcgctcgagggtgagttcatcgatattttcgcgcagcagcttgccgccgncggcaagaacctctttggcgtcgggcccttgaacccactact

SEQ ID NO: 182601 - DNA, 344 bp, Zea mays
  unsure (1)..(344): unsure at all n locations
  Clone ID: MRT4577_98115C.1
gttgngcgccgtgcggtgctggtggtggtgggggctggttttctggtccggtggtgctgcttagtttggaacctttggtgttctggtccagtattgttcgggcctactcggggtgacctggggccgttgtgggcctggttgttttcacttntgatgacggtggggcgtggggtggccaagggttaattagtttttgtggtgagggtggtgacctgccctgaggacgtggggggtgtgcacgcggttgtcggttttcttgctggagtgaggtggggttgaccttccatgccgtcgtggtggcgcgcggggtggggaaagtgttgtgttttggggtgttctgggat

SEQ ID NO: 182602 - DNA, 374 bp, Zea mays
  Clone ID: MRT4577_98116C.1
ctgggtcacttttacaggtaaggaaagtgttcgtcctcataggggccggcgaaggcgaagtccgtcctgttcgtgagcatcaacaaggtccatgtctttactaagcgcaagctgtctttgcgcccgttatcaccgcaaggggtaagcaacgaatagggtgtgcatggtcaaggacctagatacagaggacgctggttctgctctatatgagaagcgtatcactgagcttatgaaggttgtcagggacaagctcgctttgcagcttggcgagagaaagcttgaaactgacaagatggcatctgataagagagaggagatgatgggcgttcttaggaagatgacatcggctgctacgcacactgacatgcagaaat

SEQ ID NO: 182603 - DNA, 566 bp, Zea mays
  Clone ID: MRT4577_98117C.1
gcagattgactgatccaatctcattcactgtatcaagtacaaaccacaggtgcaaagattaggatacacaagatgcacatcgcaaacacgtttatagttccatttacaaggggtacaggaaaatcgttagtggctaaatactacagacaaataaaacctgcgcagcaaccagcgttttgctcttgaagcgatacgtgaactggaatacaaaccctgtatctgcagttgatttcaggaaacaatgatttggtgctcgaaacaaaatgcgggcagtgctcctccgatgagtccagttctgctatcatgcactaaataaaacagggaactggacaccgttcccttgcaaatcaacaaatgaataactggttagcgtaacaagatgcctattgtatccatcttgcgtctcaaggtcacaaaaatgtttctcttttttcagatggagtatgaaaaatccatccgacgattattttgccatgctgacgaagtaactaaatcccttttgctatactattactatccaccacttttaaaatcagatgctctactacaagcttcgttaataattg

SEQ ID NO: 182604 - DNA, 436 bp, Zea mays
  Clone ID: MRT4577_98118C.1
gcacccccgccgcctgatgatgccccgatcctctctgcaccgtggaaaaaccgaccccgtctgccgatgccgtgcctcttaatgcatgcatggaggccggtaacactcctccatcgagctacgttctgagaccggatgaatgatgatgacccttttcactgaaagggtcagatcaaagatgatgcaatgcgtgctactggaaaggcccctgttcagaaacagcaccctgtggagcatccgtgcttctcctgatcttaacgctctcaccctggcgaagaccacatcaatttgttttccctctggcatggatgatcagaggaactttgacatcaccatcctacctgaagaccgatattacatgccaagcgctatcactatacctttcaagtggacccatcttatcctcatgatcctccgacggacacatgcacagacc

SEQ ID NO: 182605 - DNA, 300 bp, Zea mays
  Clone ID: MRT4577_98119C.1
tggaatttttgctttttcatataacatatattatatatactatgcttcgcaagatgtaatttctgtattagcgtcactggaaattgctattgtaactgatgtataccctgcttaccagtaactacattgtttgctatatcatttactggattggcttgttctggtaacagggcttcactttatgtctctctatattcctaccatttctccggagctattctttccacactagagacagttgagtcgggttctaacttaaacacttaacttgtattcaattcttctgagaacacgtctcag

SEQ ID NO: 182606 - DNA, 705 bp, Zea mays
  unsure (1)..(705): unsure at all n locations
  Clone ID: MRT4577_9811C.1
tctgatgcggttccaaattctaccctctagcagccctagagctgccgccgtgacttagcttcggatcaacgccccaacaacgccccccgccctctccctacggcacaatccctcctcgtgcggcgtcgccgaacatcgccgccgttcccgtttccttgctgtcctgtccgttcttggactttgatttgtttacgaggtatgagattttcgccatccagtgattacccaaatcgacagtacctccacaaatttcgagtgcaccggtgcagacccgtcatcatgccatctagatccgccccttagatgtagagtgctacataagagaggacggaggggcgcaattgattctgtttcttacggatccgagtctagttccaacaaggattctagtagtatatttagattggttcgcagggaaaggcccgacctttttgtctttgcatcggcggagaccaggagcgatggcgagcgcaggactgaagcgtaaagcttgctcctttgccgctctcaccgcccgcaagcgcccagaaaggccgccggggagccttcccaggcgaccgactggtcctccctccctccggacatcacccgcatcatcgccgagcaactggnctggcggaggacgtgacggattacatggtgcttccgcgctgtgtgctcgcactggcgtgccttcaccaccagcccctgcgatctcacgctgca

SEQ ID NO: 182607 - DNA, 329 bp, Zea mays
  Clone ID: MRT4577_98120C.1
gagcttattagtcggcggccgccctcagccttctgtgcgaggcgcgcgactctgttagacgtggcataaaccacaagcgcgactcttgggcaaaactgctcgggtatcaagctcctgtgctttgttctctttcagaaataacaaaagggttcggcgacatatcgccactattattgtttgacatacacaagggcacaaaacaacaatatatgcgctataggaaaagctgcctgaaataagcttgcggaagcccacttgtgctgcctaaatcaagatgtcgcttctaacagaatcctacacaacggtgaggtttaagtttactagataaa

SEQ ID NO: 182608 - DNA, 138 bp, Zea mays
  Clone ID: MRT4577_98121C.1
atcctgcgagcaaggaacaaggagcaccacacgatgagaaccgccctgtcggttatctggggaatgtgacatatctggcagaccgcgttgctaacatttatgttaccaacatgcagaacccactggctgggcccaact

SEQ ID NO: 182609 - DNA, 308 bp, Zea mays
  Clone ID: MRT4577_98122C.1
ccggcgtgtcggcgacggtagatggatcatttatttgtcggcgtcggcgtcggcgagaaaggggtagtctgtgtatccaatgacggggtcggatgtgtagaaggtggtgcggtcgtacttgttgagcggcgcttcggggaggcggaacctccggggcagatccgggttggccaggaacagcctgccgtagctgacgaggtccgtgtagccttcctccaccaccttgtccccctccgccctgtcgtaccctccggcggcgatgaaggtgccccggaatgcctccctgaacgggcgcaggcggtgcggga

SEQ ID NO: 182610 - DNA, 1849 bp, Zea mays
  Clone ID: MRT4577_98123C.1
aattcggcacgaggtgaaagcacatctggacctgcgttttgtgacttttagatggaactgtgaaaatatatatggaagaatttttagcggcttttagtggttttcaccaaacggtttttagatttttagcagtttatagttcacaataacttttttcacagctcacagcccacaacagctttttttacagccacgccccaaccaaacaaaccctaatacctgtttggctgtcccaaattttctccatttagcctttgattatgggtttattatttttttaacgatgaaccatgaatttcttgctataatagaaaacagaaaactgcaatgtgaagtacagcgggtcgatgtcttcaaagagcaatcctgttcttttgtccttaaccgtttggttaattacatcaagtgtccctgaatatacatcacgtacctaacaccactctactgcccccctctccccttgcaaattcacagtattttaggcctcatcagtcgtagcttgttgtcacagtgcagatttcagtatgtctttcaagattcagctcttgtcctccattgccatttttgcttttgccttgcatcttcacccttgtgtgtccactgagtttcgccgtgagctctccagctggaccactggcatagctacgtggtatggcgatgctaatggcgccggaagtgaaggtggtgcatgtgggtaccaatatgctgttgaccaaccaccgttctcgtccttgattgctgccggcagccccttcatctatgactctggcaatggatgtggctcttgctatcaggtggtatgctctagcaatcaagcttgctctggttacccggtgacagttgtcatcaccgaccagggccctggtggtggcccatgcctgagccaagcaagcgatggcatgtgcatgaatgagggagcccactttgacatgagtgggactgcatttggcgccatggcaaagcctggaatggccgatcaactccgtgctgctggcctgctacaaatccaatacactcgtgtgcagtgcgaatggcctggagttgatgtaaccttctctgttgactccggctcgaacccgaactatctggctgtgctcatcgagtacgaggactgcgagagcgatctttcagccgtcgacatcatgcagagctcagcagggcaatgggtgccgatgcagcattcgtggggtgcaatctggaggctcgactctggctctgctcttcagggcccgttccacctccgcttgacgttcagctcaggccgggtactcatagccagcaatgccatacctgcagggtggaatgcgggtgcggcgtaccgggcaggcggagtggcggtgactagggccaggcccaggagtggtggcagccaggccggtgaggctgctgctggaacatttagaggtttggtgtatcaccttctgatgtttgtggtattggcgctgtgaattataatgcaaatgcatctttggtagttttgagatgcaaatttaacaaatttaggactacccagggatttagattgtgcattttgatgttttcttgtagctgaggtctgaaatggggggagtgttgtgcacgtttttgttgtggttgagttaccatcatgcaactgatcaggttggatggtagtccttgcatgtaaatacacatttggtgaaactgcttaggttaagtgtttagttcctttatcggtagctgaggtctgagaggggggagtgatgttaacgtttttgttgtggttgagttatcagcatgcaactgatcaggttggatggtagtccttgcatgtaaatacacatttggtgaaactgtttaggttaagtctttaaaaaaaaaaaaaaaaaaa

SEQ ID NO: 182611 - DNA, 842 bp, Zea mays
  Clone ID: MRT4577_98124C.1
tttcagtatgtctttcaagattcagctattgtcctccattgccatttttgcttttgccttgcatcttcacccttgtgtgtccactgagtttcgccgtgagctctccagctggaccactggcatagctacgtggtatggcgatgctaatggcgccggaagtgaaggtggtgcatgtgggtaccaatatgctgttgaccaaccaccgttctcgtccttgattgctgccggcagccccttcatctatgactctggcaatggatgtggctcttgctatcaggtggtatgctctagcaatcaagcttgctctggttacccggtgactgttgtcatcaccgaccagggccctggtggtggcccatgcctgagccaagcaagcgatggcatgtgcatgaatgagggagcccactttgacatgagtggaactgcatttggcgccatggcaaagcccggaatggccgatcaactccgtgctgctggcctgctacaaatccaatacactcggtatgtacagtgcttcatggacatagctgcactgcaccaaaatggctgcttgcaagcaactatgaactaccccatgtcttctaacctatttacgctgacttttgtcacgatgcatgcattttatggatatgcagtgtgcagtgtgaatggcctggagttgatgtaaccttctctgttgactccggctcgaacccgaactatctggctgtgctcatcgagtacgaggactgcgagagcgatctttcagccgtcgacatcatgcagagctcagcagggcaatgggtgccgatgcagcattcgtggggtgcaatctgggagctcgactctggctctgctcttca

SEQ ID NO: 182612 - DNA, 453 bp, Zea mays
  Clone ID: MRT4577_98125C.1
aataaaacatcaatgcatcttatttacacgttctcaaatcaaaatttacatgttggtgactaggaatccttaacacaccagttagccttttcacagaagttaattaggagatccaacagagaacagtgtgtcttacgaacttgaattctactgctgtatgttatctggaactcatagtgcatcacgaaaacaatatgtcagcagatgctttatccagtaaatgttaggaattctttttgccacttcagttgcgtcacatgacactggattgtcagaattctagtgctgttgcagaacatcccatgaactccgaagtaccaggccgcaggccgtatagtttacatgccagaagctgccctcaaatataccagtcgtcttctacaaccaacatatatcagttaaaaatctgtgccaatgtgttcattgataacataacctgtttcttcatagttt

SEQ ID NO: 182613 - DNA, 299 bp, Zea mays
  unsure (1)..(299): unsure at all n locations
  Clone ID: MRT4577_98126C.1
aaaaccgaaaaagcaaacaggcccaaagggcacacgcggcaagccacgcaccagccaggaagacgacagcactagcagcggagagcaaaacggcaaaaaccgaaaacaccgaagacggaaccggaaagagagaaaaccgaagaccgacggcacgacacacgcaagaagaccgaacggncacaacgagaagggaaacagaagcacagggacaccgaaaaacccgaaacaaagaaaccgagaaaaccgagggcccagacccaaagaccaaagcagaaacaggagaaaacaaacacagaccc

SEQ ID NO: 182614 - DNA, 1157 bp, Zea mays
  Clone ID: MRT4577_98127C.1
caacagttcaacaccacatcgagccgagccgggagatgggaatccagctcagatttcgcttctctccctccgccgtggtgagcccccgcgggcgacgtgtgtcccgttgcctttccttcgcttcgacggccaggccacctgttggcctcgcatggctctgcctcctgccaagcatccaagctccctctcgcccggcggcccagcgccgcggcgtctatatagagccagatccgcgcgatccccgccaatcggcaatcgctgcaccctgcctcaacttatctagctcacccgcatccctgctcggcactgccttgtgccttctcctcgcacttgccttcttcttgtatctagccccccttcatcacaatcaccggcagcggcgcgccgtcgtctcagattgatgcaaggggcggtgacgagctagaggcagcaactgcatatcttgcaagaaaattggttttcgaaccataccgataattttcttgcaagttgtgcagttgttgtctcaagcttgctgcctccctttgccaaaactatgaagaaacaggttatgttatcaatgaacacattggcacagattttaactgatatatgttggctattttaatgcgccttcgtttactttctggataaacaagcagtacggtacgatatcacagcgggtactgttgtgttaggatgttgcaagcagacttcatgaagtcataacaaggcgagtggaaattcttacaagaacatagtgttcagtatctattctacgacaacctttgatgttgtagaagacgactggtatattagaaggcagcttctggcatgtaaactatacggcctgcggcctggtacttcggagttcatgggatgttctgcaacagcactagaattctgacaatccagtgtcatgtgacacaactgaagtggcaaaaagaattcctaacatttactggataaagcatctgctgacatattgttttcgtgatgcaatatgagttccagataacatacagcagtagaattcaagttcgtaagacacactgttctctgttggatctcctaattaacttctgtgaaaaggctaactggtgtgttaaggattcctagtcaccaacatgtaaattttgatttgagaacatgtaaataagatgcattgatgttttatt

SEQ ID NO: 182615 - DNA, 447 bp, Zea mays
  Clone ID: MRT4577_98128C.1
ggaagaacggccgacgacgcgtccgaccaagcagcatagcaaagcggaatccagttttatcaatagaacacaccggagaccaagatgttgtccctccttatgcaccttgctcttattacatgtgatgataacgcgacacatacccgtgaatgctgacaagctcgtatagcttacctctttccccgataccttccatcaattatagcttaactatgtgaaaacccacatcatcaaccatatctgcttgaacacgcaataggcgcaagcaacatacattaatcgcactcgttgcgtcaacaatcgccagccctatttttggtgcagtcatgggtacaaaccatcatggcacaccagctgcatgaactcgtgctacctgtgatcaaccaagtagctatagcaacctctatccctactctgcgaacaacaatttctttcattcaaccaact

SEQ ID NO: 182616 - DNA, 1830 bp, Zea mays
  Clone ID: MRT4577_98129C.1
gggtacctcgaggccggccgggagcagtctctgctctctacataggcacgagggggaaggcccgccccgcaacctccctcccgggcgcaccaacggttcaacaccacatcgagccgagccgggagaatgggaatccagctcagatttcgcttctctccctccgccgtggtgagccccccgcgggcgacgtgtgtcccgttgcctttccttcgcttcgacggccaggccacctgttggcctcgcatggctctgcctcctgccaagcatccaagctccctctcgcccggcggcccagcgccgcggcgtctatatagagccagatccgcgcgatccccgccaatcggcaatcgctgcaccctgcctcaacttctctagctcacccgcatccctgctcggcactgccttgtgccttctcctcgcacttcccttcttcttgtatctagccccccttcatcacaatccaccggcagcggcgcgccgtcgtctcagattgatgcagggggcggtgacgagctagaggcagcaactgcatatcttgcaagaaaattggttttcgaaccataccgataattttcttgcaagttgtgcagttgttgtctcaagcttgctgcctccctttgccaaaactatgaagaaacaggttatgttatcaatgaacacattggcacagatttttaactgatatatgttggtaagacatgacgtttagttggaatcttgcagcatgatacacaattacacaaagcagctcttaggtacttcattcattccaaattataagatgttttaggtattataaggtgctttgggttttctagatacattggttttgctacgcatctagacatggtatatatctaagtgcatggcaaaaattaatgtctagaaaagccaaaatatcttataacttggaatgaaaagagtacaaaactaagagggaacaatatttattactagaactagaaattgcaatctgacttgtccaattttgcaacgtggaggctattttaatgcgccttcgtttactttctggataaacaagcagtacggtatgatattacagcgggtactgttgtgttaggatgttgcaagcagacttcatgaagtcataacaaggcgagtggaaattcttacaagaacatgtcagtataagtaaatgatctcctgattttatgatttgaagggtgccgagtgccttttagtctgctggttcttctacgtgttcagagtgttcagtatctattctacgacaacctttgatgttagtagagcttgcacctgttccaacttaatttcactgccacgtatattttagagcacaattaaccggctggattggcatacacagttttattctacgttctttttttttttgcaaggttgtagaagacgactggtatatttgaaggcagcttctggcatgtaaactatacggcctgcggcctggtacttcggagttcatgggatgttctgcaacagcactagaattctgacaatccagtgtcatgtgacacaactgaagtggcaaaaagaattcctaacatttactggataaagcatctgctgacatattgttttcgtgatgcactatgagttccagataacatacagcagtagaattcaagttcgtaagacacactgttctctgttggatctcctaattaacttctgtgaaaaggctaactggtgtgttaaggattcctagtcaccaacatgtaaattttgatttgagaacatgtaaataagatgcattgatgttttattaataatgactaacaaacatgcctgcgttgcattgggaaaaaaactatcaaatactcatgagaaaaa

SEQ ID NO: 182617 - DNA, 169 bp, Zea mays
  Clone ID: MRT4577_9812C.1
cttatgtactacaaattggagacccctgaggaaatagaatcccccccacctaggattgagccggaagacacagactacaactccaaagcctggttgatgactaacagctacagggaggaccacccacaggagctaatgggaaaaaaattatgatagactttgcgaaagg

SEQ ID NO: 182618 - DNA, 602 bp, Zea mays
  unsure (1)..(602): unsure at all n locations
  Clone ID: MRT4577_98130C.1
ggtggtcaccacctttggcccggcccggcggtaccgcagcgctgctaccacccttcggaacgacgccggctacagtgccgtcagcttgtccgctcacctttcttgttttgtccgttgcgtattttncctttccttgtttccttaccttngcgttgctggtgttggggttgtncctttttttctttttgtgtgtttttttttttttgctttgttttcttttttttttttgtttggtttgttttttttttgttttttgttttttttttctttttttttttttttttttttttttttttttttttttttttttttttttttttttttttttttttttttttttttttttttttgttttttttttttttttttttttttttttttttttttttttttttttttgttttttttttttttttttttttttttcttttttttgtttttttttttttttttttttttttttttttttttttttttttctttttggtttttgttttttgttgttttttttttttgttttttttttttttgttttttcttctttcttttttttcttttttttttttttttttttgtttttttttctcttttttttttttttt

SEQ ID NO: 182619 - DNA, 275 bp, Zea mays
  Clone ID: MRT4577_98131C.1
gtgcgacgagttagtcggattgcacattggtagtagtgctcgcgtacggctgcgaatcgtgagcgtatagctagttcacacaggatgcagacattagactatgtacgcgaggctctcatgcgactgactgtagggaatgctgctgcgcgtgcagctagggtgccgacatgaattcaactcgcgacgagctctactagtgggcggtccgcactttgtctgatttgctagacatgaaaggaacacatgctaatgcctgacagaaaaaagaaaaaggg

SEQ ID NO: 182620 - DNA, 643 bp, Zea mays
  Clone ID: MRT4577_98132C.1
cacagaaccagggcccatcacaggtccaacaacctaggatcttgggggagccccatccaaggtagaaggtaactcagtaatccatcgctatcttgcgaagcaagcgcacagatgttggtgaagagattcagttcgtatggctgcttagtaggtcgtagcgtagttctctagcacctttattttgctttttcttgtttgagtcatggtggtggtataccggaggcggtgaggcgggattggaagtaaatatcatctgtaggggcgtatactggggaggtaaggtggtgctttggtggtaaatacattgtggggggtatactcctgtagtgttaagaaataagtagagtagaaaaggagggcctggaaaaattgtgcaatagctttaacgggttggagctaaggtagtttagtgtaggccagttcattgtaaataaaacataaaagggtttgatcttgggacggtaaaccatgaaatctctgggattttttaatgtgttgggtccggaaggtgtgtttcgccctgcaacttgtattcccaaaaaaaaaaaaaaaaaaaaaaaaaaaaaaaaaaaaaaaaaaaaaaaaaaaagggcggccgccgactagtgagctcgtcgacccgggaattaattgcggaccggta

SEQ ID NO: 182621 - DNA, 225 bp, Zea mays
  unsure (1)..(225): unsure at all n locations
  Clone ID: MRT4577_98133C.1
gctcgaggcaaggagggcccaaccagataccttttctatccgccccaacncccacnaaaagcangagttacattatatgcctcacaatagccccccacccctgctgtctccccgtacctctttatccattgacatgaccgctgctgctgctgttctaaggctactacctgtatcttctaccatgcactttttaccaccacctatgttaccatttgctgccaacaa

SEQ ID NO: 182622 - DNA, 1275 bp, Zea mays
  Clone ID: MRT4577_98134C.1
aagcccccaacaagaaaccagaggcgagaggaggcagctgcagccggcagctccagctgagagccttgagacggagggggatctccggatagctatgggtgacgcgaagccttcggtgctaatcacgatgcccagccgcgaccgcgaccgggaccggctcgtgcctaccgctgccgttgccacccatgagtccccgtctgccctcactgtcggcgactccgacgacgacaagagcaagccctcctctgcttccgccgctgctgccgccgcgcagaccggccgtgaggcgttccataagtgtcatcctcttcccaattgcagttacattctatgtgacatggtggttctttcgctttgtggatgggtttttctccccaatatatgctcacctgggaatcaaaatatttgggcttggttttgtaacatcgatatctttcatttttgtggttggtttattcatgtcatcttggctgggagcatctatccttggtctcggagagtggtttataaaacgaatgccatttgttcgccatatttacgatgcatctaagcaaatcagtgctgccatttcacctgatcaaaacaagcatgcattcaaagaagtggtcatcattaggcacccaagaattggtgaatatgcatttggatttatcacttcggaagttcttcttcagggttattctagtgaagaacagatgtactgtgtttatgttccgaccaaccatctctatattggtgacatatttctggtcagctcaagtgacgtgattagaccgaacatgtctgttcgcgaaggcattgaaattgttgtctctgtgggcacatcgatgcctcaagtattgtcgattctggaaactgagccaaaccagttgaacaggatcagatccacccgaagctgagatgacttcacattttgtaatttcgtgttacaaagtccttgttgtacaagagtaggttctgacagattgtacagttctcctgggtagaaagcaaaatctgtttgtgaacacatctcacctgaacgcgattgcttgtatggccgtctcagcttcttcagaaatgtaacttagcagttgagtagagttgacctatgttaagagttgtcaagttttgaagtggaagaattttcttaaccatttggtttatgtgtccagggaatcttgtgaggcctgtttgaatgggagggattcatttttttttacagtctggttcaaacttgacatgaattccaaaaagattattcaattacatgatcgtgtaataggacgcaccaag

SEQ ID NO: 182623 - DNA, 817 bp, Zea mays
  Clone ID: MRT4577_98135C.1
gggaccctcgggccggccgggattacggcgtctcgaccgattcatgtgccgccgctgcgcctgctctagttccggagggcgtcggcctcctaagcagaaacgatgccagcggttgtccaaaaccacagacatcctccaagcccccaacaagaaaccagaggcgagaggaggcagctgcagccggccgctccagctgagagcctcgagacggagagggatctccggatagctatgggtgacgcgaagacttcggtactaatcacgatgcccagccgcgaccgcgaccgggaccggctcgtgcctaccgctgccgttgccacccatgagtccccgtccgccctcactgtcggcgactccgatgacgacaagagcaagccctcctctgcttccgccgccgctgccgccgcgcagaccggccgtgaggcgttccataaagttgtgcatagctgggcgtccaagaagttcatgaccggatgtgtcatcctcttcccaattgcagttacattctatgtgacatggtggttctttcgctttgtggatgggtttttctccccaatatatgctcacctgggaatcaaaatatttgggcttggttttgtaacatcgatatctttcatttttgtggttggtttattcatgtcatcttggctgggagcatctatccttggccttggagagtggtttataaaacgaatgccatttgttcgccatatttacgatgtatctaagcaaatcagtgctgccatttcacctgatcaaaacaagcatgcattcaaagaagtggtcatcattaggcacccaagattggcgatatgca

SEQ ID NO: 182624 - DNA, 350 bp, Zea mays
  unsure (1)..(350): unsure at all n locations
  Clone ID: MRT4577_98136C.1
cgggccggaacgaatacccgggccgacgagctctctatccggcggccgcccgacagnaanaaggtagggcttaatccaaacaccaacggacgccctcacgcacgggggacgggcgaggacccccacccaaacgccgagcaaccaaccagaggcgaagacacaacccacacgcaggaaacggaccaggagcaaaacagtcacactacccacagaggagatgccagccccagacagacggcacgcaaaaggccaggcagggccaagaacccacgggcgcagaaacaaaaccgcacgcagccgcaggcagagacgcctctagcctgggcaaaacaagccgcagctccccagga

SEQ ID NO: 182625 - DNA, 281 bp, Zea mays
  Clone ID: MRT4577_98137C.1
gaggtcgccaaggagaacgcggacgtgatcatcatggacgacaacttctcgaccatcatcagcgtcgccaaatggggccggtcggtctacatcaacatccagaagttcgtgcagttccagctcacggtgaacgtcgttgccctcatggtgaacttcgtctccgcgtctttcacagggagcgcccctctgaccatcgtgcaactgcttggggtgaacctgatcatggacaccctgggcgccctggcgctggcgacggagccccccaacgacgcgatgatgcg

SEQ ID NO: 182626 - DNA, 233 bp, Zea mays
  Clone ID: MRT4577_98138C.1
tggaggtcaccaaagggtgaactgagagagaagagggaattcacttgcccaaaggtttacagatgcccaagcaaactgatttttccatccagaattatcttgttctttaactctcctcaattgtcatatataaacatgaatttatatacatgtgtgtcacatgagtatgtcgttttaaaacaacgtgtacatatgtaagttttgtctggatacaggaagctgctttagacggc

SEQ ID NO: 182627 - DNA, 552 bp, Zea mays
  unsure (1)..(552): unsure at all n locations
  Clone ID: MRT4577_98139C.1
gaagcaaccaatagcacaaaagaggggggggggggtaccaacaatggccgacaaacgtgctgctttcttcagctccttggtctttctggaagtgttgctaccgcaaccattataccacgaatgacaacaagactcctatagcttaccttcttccacaaaacctatcaccagcggagtggggggggggaaaaaaccccaattgaacaaccctacatgaaccaacaagcaatagcaacaggcatattaccattatcactcttggtcctacaacaaccggcaaacatacaacagcaaccacctgtgcaccatttggcgcaacaaaacatggcggcacaacaactacaacaacttgtactaacaaaccttgctgaatactctcaacaacatcagtttctatcataccaccaactggctgaaaagaactctgctgattattaacaacaacaattaccattcaaccaggtagttgctgactacccccagtaatttctatcaaacaaacaactagcagngaaacaactctgctgattaacaacagcaacaacaactact

SEQ ID NO: 182628 - DNA, 348 bp, Zea mays
  Clone ID: MRT4577_9813C.1
ccaaacaacgccggccccaccgcacactcgtctccgcctcccttcacctttttaaggcaaagaaaaccgggggggcaggcactttttttttttttcccccaaaagcacacccccacactactcaacacgaacttggcctccaacctgcacagccctgccacatggcaccccaccaacccaacgatatcatgtgggacccatttcaaaggtcaggaaaaggtaagaacccagatctatatccaaacaagactaccacccacaagacagttcaacacctcgaattccctccatcctccttgactactgaccttcttgacgaatcccacgcccgaccctacaattttgttc

SEQ ID NO: 182629 - DNA, 284 bp, Zea mays
  Clone ID: MRT4577_98140C.1
ccggccgggattaataatcgtgactagtaaactgttatatatatagccatatgtgtgtggcgcctacatatatgtcatgtggctgtacggcgagttttttttcacaagcgtttgcagcagcatttggtgttgctcatccatcaattaatcgcaagaaattaaacctgtcaccaccgtgtgtgcatttgtacgtgttaatgcagttgctgtatccgttaattgtaccctccatcagataaacgcgggtgcgcgtatgcaaaaaaaaaaaaaaaaaaggggcggcc

SEQ ID NO: 182630 - DNA, 272 bp, Zea mays
  Clone ID: MRT4577_98141C.1
gggaacaatacagatttaaggggtttaatgtgaggttactgttggcccggcctttttatagcttacaaaaattccaatccatgtttggaacacatagaaaacataactgcagcaagatagaaaatattttatgttcaacatgaaccaataactagctttaatacccaacctaaacggtaaaaatttgcagggccaacccaactaaacactgtagttagcttaggccactggaaataacactagaaaacccaaacgtttggttccaaggcaaa

SEQ ID NO: 182631 - DNA, 533 bp, Zea mays
  Clone ID: MRT4577_98142C.1
attgggttctaaaggcggcgggatacttctgtcctaatcctccaaaatacggggaagacggcccggtgataccaactgatcaagagaaaggcccccaaccgctatcaaccggagtattgatggcgcctaggggggaacgaagcaggggctatgataccgcacgacgaggagcctgtcccgagaaggtgagaatcgtccggaagggaagaagtactaggaggagaagcgcctcccctccttcaagtacgaccccggcgaggtccacaacggcaagaacaaagacaagacgagcgtggatcacctacgagatctacatcttcacggggatgaagcaggcgcaccccgacatccgcatctcgaccgagggcatgtccatcatgaattccttcatcagcaacgtcttgctgacgttcaccgcgtagtccgccaagctcaccctgataccacaggacgcccaccatcacctcccgggagatccagacctccgtccgcatgcaccctaacggcgagctctccaagtacgccgtctctga

SEQ ID NO: 182632 - DNA, 403 bp, Zea mays
  Clone ID: MRT4577_98143C.1
aacgaaaacaaaaagacccgccaaaatatgaggcaattaatgtgaaaccaagccctacgattccattccaccaatttttggtgttagacaattaaataagaaaaatttattgttggaagttctttcggggaagaaacacaactaactttggatgctttggatagtttttggaagcttttaaaaggttggttaattacttggggctgtttatgggggggaacagggcgaccactcgggggctggtttcccccttaaagtggtaccaggacacaaccttaacaaaggtgcccatcaaggcaatgacaggcttcggaaaaaaaacgcttgacctggtgtgaccctggaaaaccggggaaaacagggtcttctaggaataacccaaaatggccttgaggggaccctt

SEQ ID NO: 182633 - DNA, 381 bp, Zea mays
  Clone ID: MRT4577_98144C.1
tagtggttctgatcacataatatttgttggtgatttggctcatggtgttactgactccatgttggaaaatgtgttcagagctaagtacccttcagttagaggagctaatgttgttgttgataggttgactggatggcccaaaggatatggtttcgtgccttttggagatctgaataatgcattgtgaagatgtacatttgtgcttgtttgatctgaaaaggggacaatttttagatatagcataataggatatgaagatgaaagatctgtacttagaaatttgttcatgaatgctttgtttgacatttcacttcgtatgctggcatctcagtgtattaagtgttaatgttacagttattcttggatcaacatcattcgagt

SEQ ID NO: 182634 - DNA, 1505 bp, Zea mays
  Clone ID: MRT4577_98145C.1
ccgggggctggaaggaccggacgacggtggaggatatggacctggctgtccgtgcgatgctgcagggctggaagtttgtttacgtcggcgacataaaagtacgccggtgctaacgatcatcactactttctcgcacggaactcaagagcataacaagaaacgaattctaacgatcctcaggatatataactgcatctgtatgtatgtgcgttaggtcaagagtgaattgcctagcacgttcaaggcataccggtttcagcagcacaggtggtcttgtggaccggcaaacctgttcaagaaaatgatggtagagattttagaaaacaagaaagtgtcattgtggagcaaaatctacttatggtacaatttcttcttcgttgggaaggtcgctgcccacacggtgacattcatctactactgctgtgcgatccccgtgtctgttttgcttcctgagattcagatacctctctggggagttgtctatatcccgacgctcataaccctcttgaaggctcttggcacaccaagttcgtttcacctggtgatcctctgggttctgtttgagaatgtcatgtcactgcaccggattaaagctgcagcaagtggtcttctggatgctggtggacgagtcaatgagtgggttgtcaccgagaagttgggcgacaccagcaaggcaaagcctggcgccaatggatcagatgatgtaaaggtgatagatgtaaagctaacagaacccctcgttcccaagctagtgaagaggcgagcaagattttgggagaggtacaactgctcagaacttttcgttggaacctgcatacttctgtgtggtttctatgacttgctttttgcaaagaagggatactacatttttctcttccttcaaggcacggctttccttgttgttggctttgggtatgtcggcacactacctcattgcaatgcataagctggcatggacaattcatataccttcttactagaaacagatcaagcaaagttcctctctcctgcccatatggaacttcaatgatagttgagcaatattcccatgatcagtcttggccagacatgattcactgccaagaaggttgttcagatgtcgtcgtcactcttctgtcagtctttattgtcaagaaggccattcaaatagtgtcaccgttccaaatttataataacagtgtttactgaagcatcatgacatacaagaatgattggtgcagcagcatttagtaaacatcccgtagagatgcagttcacagtcgtgaaagaactgcagctgctgtaaatggaatagcaccagttgccaatttctgtagatctccgaacttttttttggaaattttgtgatattactcagagttcagatcaataatggaagattgttggcttcctcagttcataacctgtgtatgcttaaaacttgtaaatgtaaattgttattgacactaataattttgtcgaacccaggcagttcttgaaatgcaaatgtagcatgcaattttttt

SEQ ID NO: 182635 - DNA, 238 bp, Zea mays
  Clone ID: MRT4577_98146C.1
cgacgcccctcaacctgccccgcctcggccgcgcccctagcgacggcgcgctccccatccgcttcctgccgctccgcttcccctgcgccgaggcaggcctccccgagggctgcgagagcctcgacgcgctcccgggcctcggcctcctccgcaacttcaacgacgcctgcgccatgctccgcgggccgctcgtcgcgctcctcagggacagggagggcgacgccccgctggcgagctg

SEQ ID NO: 182636 - DNA, 289 bp, Zea mays
  unsure (1)..(289): unsure at all n locations
  Clone ID: MRT4577_98147C.1
aaaaaaggggcccaaacccccgggttccgtgggggagaggcaaaaaattttagaaaaacagaggtatggcatgttataatctggggattagattcttttcttaggccacttgggggtaaaaataacaggcggggtttggatacccccggcccctaaatattacctttcggggccccaaacacggggggaaaacacaagtttttttcccctggtgctttaaaatatacaatgaaaaccaccaagagcgccggggggggaaaaacacctttttttntttccgctccccaaa

SEQ ID NO: 182637 - DNA, 642 bp, Zea mays
  Clone ID: MRT4577_98148C.1
gggtacctcgaggccggccgggccgggtctcaccaaacttgctccagcagctttagagcttctcaagcttcacagtagcaaccaagctagctagctagctcttcttgctgcctgcttggctgcttgctcgatcgatcgagctaggtcgaggggcggtggagtaggcaagctggcaactgctatggcctggattgacgatgatcagtgcgaccgccttgtgtcagcagcatgggcggcattgcccgtggtggagaggagctgccgcggcgccggtgacgacgacgacgacgactacgacgtcgctccggctgcgtaaccgacgacgggtctccagcgggcgttgcgcatgcatgcatgcagtcatgagtcatgactgtacgtaaaagcgctgatgagtagcacgtacgtgtgctgctgaggttagttttgagggtgacgtatatttcttgcctccgatccgagctattaagaagaactctactactcctgtactaattaatatgtctagctagcttgtgcttagctagctagttagaaataaagaggcatccatgactggggctgggccgctgggcacctaatataatgatgcatgcatgcaagtagtgggtaaaaaaaaaaaaaaaaaaggcccctagggcc

SEQ ID NO: 182638 - DNA, 254 bp, Zea mays
  Clone ID: MRT4577_98149C.1
cacgacacgaaccgagcaagaaccgtacgagtcgagcccagcagcaggatggcggcggcgagcgggaaggcgccgtcgctggtggtggcggcgagcatgggcgcggtggaggcgctcaaggaccatgcgggcctgtgccgctgggactacgcgctgcgctctatctaccaccgtgccgtcggcacgccatggatccgcgcgctgttcgccatgctttcggactccttttttgtgcctgctgaatactttctttt

SEQ ID NO: 182639 - DNA, 435 bp, Zea mays
  Clone ID: MRT4577_9814C.1
ggagcaaaacaccgcaatgattaaatttaaatcctcaaatccacgtcaaaaaatgtcaataatacaaccccaaaaacatattttgtagcatacacaaaaaccattaactaagtaacatggtccacagacgcacaattcctactcaaattgatcatcatcgtcgtcaggaaggggctgactagcagctgcaagaagctcagcctcgtgctgttgttgcgcagctaaatcaatttgaacttctgggggagccaatgcaggagattctacaaagtgcaagttagtatcgcctgcaagtttcctggccaagtacaaaaatggcttttcaaaattggagttgctcttagcagatatctcgtagtactgcaaattcttcttcctgtggaaagtaacctgctttgccttcacttgcctgttcttgacatcaaccttgttacc

SEQ ID NO: 182640 - DNA, 612 bp, Zea mays
  unsure (1)..(612): unsure at all n locations
  Clone ID: MRT4577_98150C.1
ccggccgggatcagatcaatggtctcgcgacatgtaacggaaaaatcatgttactgccatacaaggaaacacatcccctcaccgctatccacgtctcgcaacaatctaacatgcatgaatcccatcgacgacgacgcgcaggaccaccccgaccaatcgttcttccatgaaccgcgcatgccccgcccatatcctctgtgccccaaacacaatccacgcctcgccatggaaagagtcacaacccaattccctcggcgacatcccgcgcacaaaaccaccatcgtctcacatcccatcgcaagtgtatgacctccgccatctcaatcttaacattctacgccacagccccgcccatatctcgcgatgctcgagaacttcccattctacgccccatccccgccgatatcttgtgatgctcgagtataagatgtaagacgccgatgtgagcgctcataactgaacaccacacctctctgaagacacaaactgactttgtctactaaatatagaactacttgtgcagctgtgcatctcgcagtgtcaggattgagtgtctaacgttgatatatatgatcgctttctccgaanagaaaagaaaaaaaatttgcggtc

SEQ ID NO: 182641 - DNA, 583 bp, Zea mays
  Clone ID: MRT4577_98151C.1
gggggtgatggttattgtttttttttttattcgttttattttttgttcttttttatgtttttttgttttgttgtgtggtctactttcatttgtcgtttttagctttttttgtgtgaacgcagcgaggtatggcacttcgggttcgtgcacccatatggaaagagggggggggggtgcaaaaaaaaaaaaagaaacgcggctaaacaggagccagaaaagccaccgggggcagacaacacaacaaaaacaagtggcgaagaccagaaaaccgggcaggagctagccgcacccctgaaggaagcaacagaggtgggagacgaaacggaacacaaaaaggagagggcggggcacgctttgacacgcccgaagccgatggcaacacgacctgaaaacaccaggggagacacactgaagcttcgtaaacagctaggggaccatctaagacagtttttaaaagaaccaaccaagaaaaggtaatgcatggcgcaggtcggggaacaataaggcccccacgagacttcagcatatatgcgcgcggccgacccgacacaagccaggcctcaaagaacccacagatggaccg

SEQ ID NO: 182642 - DNA, 131 bp, Zea mays
  Clone ID: MRT4577_98152C.1
tttatgcgtacgagtatgcagtgtgaactaactgggtgcgagacacttaagtttatggcgaacaggaaaccgggatgggtactgtgctaatttaaaggtctttacgacgcgtggatgggtagatacaattt

SEQ ID NO: 182643 - DNA, 193 bp, Zea mays
  Clone ID: MRT4577_98153C.1
ttacatcacctcgcctacgatctccatggggtgcatcgattcgagcatcggtcacgtcgccctactgcagaaagttcaacgatcagctaatcaagaatgctagctacatatgcacacctagcaaggctacacttgctgcatatgagttcactggcaccataagcaagcgcctttccagcatcaatgtcaagaa

SEQ ID NO: 182644 - DNA, 564 bp, Zea mays
  Clone ID: MRT4577_98154C.1
cgccgttgtgcacgccgccagcagcagcagcactagcagcgccgccagcgcggctcgccgcctcgccatcgtcccccttggcaggagcgcggcgagccggccgcccggagccacgggctgctcatgtcctcctcctcctcctcctggggccgccgtcggcgtcggagtttgtggcagtggcgtggactggcttttcatgacgacccgaacggatgagtccagtctccagaggtgcgcgcctgtcctgttttcgattcaggccacttgtattgaattgaatggctggctgattggactgcttttcggcgcggccatcagcttcctgtggctgcgtgcggctccggcggcgatagggctggtctggactctccggacagggacgtgcgcgatcattgcagtgctgctctgctatcaaatgtggacaaggaatcctctcgtacacaagggaagaacatctcctcggccggcaaccaatcctctcgcgatcctttgcctccgcgaccttcttccaaagggcgggaggggaaagaaacctgtggttattcggcagaagacactagctag

SEQ ID NO: 182645 - DNA, 483 bp, Zea mays
  Clone ID: MRT4577_98155C.1
ccaccacccggcggcctaatacttccgcgggacgtggctgcgggtcccctgtccacaccaacatgaggccgagaagcgaccgcaggagcaggacaaagacctctgggttacctctttggaaggagtgatgcccccaaaccaacaagggcaccagctgcaagggttccaccgtgctgcgggaggcgatacagctgcagacaaaccaccttgtgaaaaccctgacggcaccactcatagagtgtcgctcgggggtaccacccaaagacaaacctaccagagagtcgtattttgatgaacacgcgagaaacttccattacgaaaccgtacttccagcaacaccacacggactgctcgtggcccgaacatcttcgctggaatacctgattggggccaactgatgccgctccacaaggtatccgcctccactgccgcacgatgctttttctcaagcctgaacatccgttgtaatggtcatgtgtaccc

SEQ ID NO: 182646 - DNA, 295 bp, Zea mays
  Clone ID: MRT4577_98156C.1
cgccctccagtccctctctgggacgtctgtacgccgcgtctctgagtgcggtggccgcggtggccgcactttctccgggtggtgctgtagccgagctgtggggagtgcgcagaagggccgcccgagcccaaggaaagcgtgcgctgaggcgagagtcccgggccggcgagcgcgctgcactagttctccgcgtgggttgggcggagggtcccaggagcgtggcgctgagagagagagatggagagagagagtaagagcggccgcgactctgggcacagcagagggaggaagcgag

SEQ ID NO: 182647 - DNA, 431 bp, Zea mays
  Clone ID: MRT4577_98157C.1
acgggtcgagacatgcctgcgcgaacacacaatggcaccagaaacgatgctcctaggagtatgttccgcgctgatgctgggcggagtcacgagcgcattggaagaccatgttgcgtcagacgtcgtgggcctggcgaggtgcaccgactgcacgaggaacaacatgaaggcttacgaccttttcaagggtctttaggtggatatcaagcgcaagaacagcaactgggacttcgagacaaatgccgtgagtgagatccaaagctccggagccttcaacgtactactcggcgtcgacctccactgcgccgactgtcacgcgcagatccacagctacctctataacgcgccttgacctaagcaagtactcgtcatgaaccagcccatgctatggcgtaccttaattgtcgtgcctgtcaagatgcactaaccgt

SEQ ID NO: 182648 - DNA, 286 bp, Zea mays
  Clone ID: MRT4577_98158C.1
gggagtttgttccgattgctacagaagaatgctgccggagttaaaaagaaaccgggtgttcatattgctcttgaaattgcacgacgcatgaaatatctttcacatttgcatcccaactatggctcattgtaaactgaaatttttaaatcttctatttgattaaaatctgactgcaaaggttgccaattttggtttgtaacggttcaaccatgccacgtttctcactactaagactgggaaaggaaccccttattggatggccccaaaaatttttcccaatgaaccc

SEQ ID NO: 182649 - DNA, 270 bp, Zea mays
  Clone ID: MRT4577_98159C.1
actatgtcgtctgtgcaggaggagcttaatcatacacatgacatgatccacagttacgtggagctctacagttacagtcacgtcgacgtgaggacgatggcgatacggtgtcctatccagctaggcaggcctagcggcatccagcgccgtggtgtggcatgaagaatctcgggcatgatgagtgagaccggcgtcgacccgtcgaagcggccgtatctctgacggatcatgcccttgcttaccgtctacgagatcttggacatcataggt

SEQ ID NO: 182650 - DNA, 274 bp, Zea mays
  Clone ID: MRT4577_9815C.1
cccacgcgtccggctgtttgcttagcttagcttagcaatataataataatgctagtcagttctcatccaaaaaaaaaaaaaaaaaaaaaaaaaaaaaaaaaaaaaaaaaaaaaaaaaaaaaaaaaaaaaaaaaaaaaaaaaaaaaaaaaaaaataaaaaaaaaaaaaaacaaaaaaaatgataaaaatgggatgcctcctaatggattcaacaaattattacttggacattttatcccaaaactattcattagagctacttaaattaatttcat

SEQ ID NO: 182651 - DNA, 412 bp, Zea mays
  Clone ID: MRT4577_98160C.1
gcgggggtaggcgtagccggggttgtgctgctggtccgcggatccaagtgtggagtcagtggtctcctcgaagcccaagctacatcttccacctgggacatggacgctgccggcgatcggaaacctccaccacctcatcggcgggccgtggatccatggcacgctgcgccgcgtctctcagaagcacggggctctaatgatgcgccgcctcggggaggtgcccagggtgatcgcttcgtcacctgaggctggagaggatattctgaagacccacgacaccgcgctcgccgaccggctgaccaccgccgccacgggggcgatgacggatgatcctaccaacatggtgctgtcgcccgactacgagcgctggtgacagctggagaacatctgcgttggtggagctgctgagcgc

SEQ ID NO: 182652 - DNA, 628 bp, Zea mays
  Clone ID: MRT4577_98161C.1
taactcatagctttatctatccttctatcctctttgccatcccgatacaggagacggcaaggatgatgctcatgacgtcccccttcgtgtccgtgctacctgcgtagacgacgatgagctaccatggcgctcgcccggtgctgctgatagagggggtcaggctactgacgctacggggggagactacctatgagaacaagacgcactgatggtatgcgattcgcctagctcttccccgatagacacgagctcagagatgcataactaataaaacaagaagcaatagccgcgcatcaaaacctgggcagagggcagcatgaagctccaactgtgtcaattgatagccgagagcagatatatcaccacatcatggatagcggcgctggatatttgactatgagtgaccgtgctatacgacgataaagatcgtattccaggatgtcatcgatctcgagatgattttgactacgttgtggaggtctcagtctaagagatgcgaggacagtacgtctatatcagatatgatgcattcctactccacacgaagaatctgtctgagaatagctgaacatcgactattcttgatacgatgaatgatgatgtctatgcattgcaccacatcatgact

SEQ ID NO: 182653 - DNA, 1786 bp, Zea mays
  Clone ID: MRT4577_98162C.1
ttgggtacctcgaggccggccgggcgacgaacgtctacttctggaggtcctacttctgtgatttcccccggcggcgttgggcgctggtttaggagacgaaaaggcggcgcgcggcggaaaaccctagcttagctcctctccggcgtcaagtgctctccggtttgagggcgcgatgagggtgaaggtgatttcgcgttccaccgacgactacacgcgcgagcgcagccaggacctgcagaaagtattccgcaactatgatccagcgcttcgtagtcaagagaaagctgttgagtatactcgggcactcaatgctgccaagttagagaagatatttgctaagccatttatcggagctatggatgggcatattgacgcggtatcgtgcatggccaaaaaccccaatcatttgaaagcaatattttctggttcaatggatggagatgttcgcctttgggatattgctgcgaggaagacagtttgtcagttccccgggcaccagggtgctgtaagaggtttaacaacatccacagatggtgatcttcttgtatcatgtggcgttgactgcactgttcgactctggaaagttccgatgcttaaaatggtggatactagtgagcgtgctggagataattcccagccatcagcagtttacacctggaagcatgcattctgggggtgctgatcaccagtgggacggcaatcttttcgcaactgttggtgctcaagttgatatatgggatcctgacaggtcagagccaataaatagcttcgaatggggtaaagatacggttctttctgtgcgatttgatcctggagactctaatattttgattacgtcgggcagtgatcggagtctgacactctatgacttgcgtatgtcatctccagctagaaagctgataatgaagacaaggtgcaattcagtatgctggaaccctagagagcctatgaacttcactgctgcaaatgaagacacaaactgttactcctttgatgctagaaaattagatgaagcaaaaattgttcacaaaggccatgtttcagcagtgatggatattgactactcaccaacagggcgtgaatttgtcactggttcatatgatagaacagtaaggatttttaattatcttggagaccacagcagagagatttaccacaccaagaggatgcaaagggtgttttgtgtgaagtacacctatgatgggacctatttagtctctggcagtgatgatacaaatcttcgtctgtggaagtccaaagcttcagaacaacttggagttcttcttccacgggagcgcaaaaagcaagagtaccaggatgctttgaaggagcggtacaagcatctcccagaagtcaagcggattgtaaggcatagacatctaccgaagccaatctacaaggcagccaacctacggcgtacgatgatcgaagctgaaagccgtaaagaggaaaggaggcgaaagcacagtgctcccgggagcatgcctgtgcagcccttcaggaagcggagaatcatcagagaagttgagtagacatgcggtttgcattgcatggtcgtggtacacgtttgtgtttctgaggcgatggagttgagagaatacatgatgtttcctttgggagttgagctccagttttgcctttcgtactacatatatgtgctccatcaatcagtttgtttgactagttattattgtgtatttgaaataccacacaaaatattcatatcgtgccattgcattgcaagaccgtgaacaatccgaattgaaggtaggacgttttttcatgg

SEQ ID NO: 182654 - DNA, 292 bp, Zea mays
  Clone ID: MRT4577_98163C.1
tttgtgcatttgccaaatgctaatgatgatgtgtgcacatggtgctgatattattaaatccaaaggtggtaagatcacccacgaacctggtgctgtctaggagaggatccactgtcattgccttcgcacaggatccctatggctacatgtgttagcttatacatgagggctgacacacctgaacctgtttgccaggtcatgctacgtggtggtgaccatgatcgttacatcaagttttatgataaagccctagggatgaatctactaatgatgaaggttgttcctgattaca

SEQ ID NO: 182655 - DNA, 244 bp, Zea mays
  Clone ID: MRT4577_98164C.1
aaaacacaactgactttgtttgacttacaaaaaccacaaaaacagggggttaacaataaccaataaaatcagtttcaatcggataaacaataattaaaaagggtaatcctttccttttaggaaagcagtgggaaggaaagtcgggcatgttttcacccccgatctcagatccggtcatagaggcgtccgaggggttaaagggtccttgctgcgcggacgccagggggcgcggctgggggctggc

SEQ ID NO: 182656 - DNA, 875 bp, Zea mays
  Clone ID: MRT4577_98165C.1
ccaaaagtgcttacggcgtataccacgagcgcaccaaccaccaccaccatcctcatccttcgcgaggagatcccttcgtcggggaagagaacccgccaggagacctacccttcctcaatcctccgaccctccatggcctcctcctccctggccctccctccaatctctctcctcctcgcgctgctgctcctctccgccccctcgccgtccgcctgcgcctcgctttccttcctcaccgcctcctccaacggctccgcctccacctccgccgacccggagctggaggacctggccccggagcccaccttcctcgaggaggtcatcgacgccgtctcggagaagtacgactgggatccggacgccgaggtcagggtctggccgctcgacgccggcgccgtccgcgtcggctccgtgcagcggtacgagttccgggcgcgggcgggcgggtcggcggcgctggcgcggttctccgacgaggccgtggagtggagactcccctccgcgccggccgtcgaggaggtggatgggccggacggggtcgacgtcgtccccgccgaaggcgcgttcgggttcgacaccggcgtcagggacgtggagctggttgggccggtggagctcaagcttgctggcaaccaggacggtagcctcgtcgagctccagttaccttcggggaatgccacatacacaaggcttaagaggatatttgttgcggatggcattgcattaaaggtcattggtgcacagaaagtttctgtaacccaccctcacagtataggtcttctatcaaatggcaagtttgttggctagtaacaacgacctaagccaaatatggcctttgagctactcaacctgtgccccattacttcaagtgggta

SEQ ID NO: 182657 - DNA, 120 bp, Zea mays
  Clone ID: MRT4577_98166C.1
attggtacctcgagtcggcgttatcccctttatcgctcctaaatcgagaactaggccgacgatagcctaacctgcgtcgctcggagaactatcgatcactgcccattaaccacctcaatg

SEQ ID NO: 182658 - DNA, 512 bp, Zea mays
  Clone ID: MRT4577_98167C.1
actctggagttgggggtttgctaggtctggccagctcctgagttttgttctagagcaatgcccccccccccccgaataaaataaaataatttctgctcgctcctatttcacgcctagggcttggcgggagcctccacgtgagggagtgttccaatacaattggattgctcatgtcttttcatcaacttaatcttttgtattgaactggtcggtgcatgcaactcaatgcatataaatatcttttaagtgtttcatcagggcgagaaagcatgtctgttagcatataagcatgaaaatgtgttctgtttacatgttgaggttgcttctaatgtttacctttgaaatacttgtttggcatcttatttgtataaactgtgtgctttgtgatgataaatgcttttgagtagggtttgactaaccatttatgtggcttgcagaaattttttcttgatgctggtgaaggagatgaagatgaagatgctgcagaaaatggagatcaggatgctgatact

SEQ ID NO: 182659 - DNA, 261 bp, Zea mays
  Clone ID: MRT4577_98168C.1
gaacatccaacagaatagtagggtaataagcggtgaacagttacattagttcacattaaacaaaaaacatatattgtgccggtagaagacatctaacaggtatgaacccgctattttgatctgattttccatgatataccaggagcttctagatagttcgtagttgatataaataggaggtctaagccttgcttgtaaagtatgctggacagtaaattccatggcctctaatacagtaccctttgacagtagttggaacaa

SEQ ID NO: 182660 - DNA, 570 bp, Zea mays
  Clone ID: MRT4577_98169C.1
atgtgaccccgccatcgttttttttttctgccttaaaaaaaaacatcagttacattccgcgtggcatgtttcacaattcacgcgcgcacacgcacacacatgcagacatgctcactgatgcattactctgtgcatttttcttttcctatttccggtgaagaatcctagaaactgtgggtacagatgagaggtcgcttctgacggacgcaacgcaacgcaacgcaacgcagcattcgtgcgcttattcaactgctagcttgcagtatcttcagctgcagtcgacgacactagcccgccggtgctggtggtctcttgctgagctccctcggcctcctcggtactacgactactactgggcgcgtcaaccaccaccgtcttccttacacggaacatggccaagtggatgtcacctgcagtagacacagagacaggtcgatcgatcgatgcaagagctaacagctagtgatggacgacggttggagatgcatgcatgcagcagaccgaagatgagtaggctgccggggtcgacggacgcggggaagccccggttgagccggcgctcgttgatgt

SEQ ID NO: 182661 - DNA, 792 bp, Zea mays
  Clone ID: MRT4577_9816C.1
accgcgtatcactcctatgggcgattgggtacctcgaggccggccgggaaaaaccctactaaccgcgtctcctctccagcgcccgccgtcgccgccgccctcctcttggtcccgccgtccgtcgaggtcatcatggtgagggtcagtgtgctcaacgatgcgctcaagtccatgtacaatgcagagaagaggggcaagaggcaggtcatgatcaggccgtcgtccaaggtgatcatcaagttcctgacggtcatgcagcgtcatggatacattggcgagttcgagtacgtggatgaccacagagctgggaagattgtggtggaactgaacggcagactaaacaaatgcggtgtaattagcccccggtttgatgttggggtaaaggaaatcgaaggctggactgcgaggctgcttccgtctcgccagtttggctatatcgtgcttacaacctctgcgggaattatggatcacgaggaggcccgacgcaagaacgtcggaggcaaagtccttggtttcttttattaattaaagggtcgtccgagtttcttctattaaatggtgggtcgaccgagtttttgtttttgtttttggtctgaattgaatagagtgtttgctttgttaagactggaatgtgttatgtgcctttgttaagactggaatgtgggaatctttatgagtgattcggcatgtaactaactggaggccacgagacagtttggcgcaaggcctatgaccccctaggaggagtgtcgatcaactagattctcacattttttactgtttttttttatt

SEQ ID NO: 182662 - DNA, 609 bp, Zea mays
  Clone ID: MRT4577_98170C.1
atgtcctccatcatcggcgccgcggacgaccaggccacccccgcgtcgtcgggggcggcctacgccactccccagggcgagacagcgacaccgtccgtgattctggcgtcgccgctgccaccgccacagatggtcgtggtggcgctggacgccacgcgggaccaccgggatgacgagatcaaaacggcgttcaggaatttggtcgagcgaggagacatactccgcgcgagggattcgctgctcgtgctgggcgtgcttcactccatcacccatccaaatgtcgaggagccccgccagggaggccgacggcagagcatgcgtctgcgccggtcatggtgtccgcgcccgcggcagaatagaaggggtaaccgcggattcgaccgggaaggcatggctgcgacagatccagccgggaagacgcgatccggccaaagggacggcagatcgagccgggaaggtcgcagcaacggtgaatccgaccgggaaggccgcgacaacgatagatccaacgaaggcgatgaagggtgggcggtggggcgggtccagccgggcaggggcctgagccgggcctggcagggtattttgacgccggcaacgggagaagcttga

SEQ ID NO: 182663 - DNA, 1545 bp, Zea mays
  Clone ID: MRT4577_98171C.1
tgcatggtatcagcctaggtttaggttttcctctcccacagcagggcagccgccggctgctcccaccctacagccgtcgcctaccatcgttgcccccgggaggctcaaccttccctcccgggggcggcctccctcctcccaaccgtccgcacccccacttcttccccagccgacctctggccgccgccacccccgagccggcgagctcgggctccctccggccgcctccatcccttccccgaccggcgccttcctcctccccttgccggcgagcgcgggctcaagcgcgccccgaccagccggctgctactgctcgacgccggatgggggagacgacgcgacgctcgctcgtggactggcgcccatgggacgaagctgcggactccctcgatcggccaccgtcgtgccctctctgggcgcgccccccactgcggcgccggtccagctgccagggacgcccgcgccaaaccccctccccggcgcgcctcccgctgcgccgctgcccctgctgccagggacgcccgcgccgaaccccttcctggcacgcctcccgctgcgccgtcgcccctgctgctcactcggctcggatccgcgcccctccccgacggtgtggtcgcagcgtcccagcagcacgggcgcaggctggccggccatccccggtgcgcaggccccagcgtgcggcccggtcggtggtcccggtgcacggcttcgacccccacccgccgccggcgcccctgctagggccagtccttgccgtcggccttaggacagatggagctctctgccccatggccgtcggcctccctggcatgtagcgccgtctcccatgacgctctgcccagcagcgcctcacccttcaagcttctcccgacgccggcgccgttatcatcccttgccaggtccggctcaggcccctgcccggctggacccgccccaccgcccacccttcatcgccttcgttggatctatcgttgtcgcggccttcccggtcggattcaccgttgctgcgaccttcccggctcgatctgccgtccctttggccggatcgcgtcttcccggctggatctgtcgcagccatgccttcccggtcgaatccgcggttaccccttctattctgccgcgggcgcggacaccatgaccggcgcagacgcatgctctgccgtcggcctccctggcggggctcctcgacatataacaactccccgaccccccacacccaaacacacaatatgccataatgccaatgagcacaagcacaccttttggatgggtgatggagtgaagcacgcccagcacgagcagcgaatccctcgcgcggagtatgtctcctcgctcgaccaaattcctgaacgccgttttgatctcgtcatcccggtggtcccgcgtggcgtccagcgccaccacgaccatctgtggcggtggcagcggcgacgccagaatcacggacggtgtcgctgtctcgccctggggagtggcgtaggccgcccccgacgacgcgggggtggcctggtcgtccgcggcgccgatgatggaggacatcgacat

SEQ ID NO: 182664 - DNA, 437 bp, Zea mays
  Clone ID: MRT4577_98172C.1
aaaaaaggaaaccgaactttcgggcaaatttttttgattttttatcccatacaaatttgctaaacccaggggattccggaggggcttgctgcaacgttaacccataaagggaaacctggtccgataaaaccaaaaaaaaccctggaatttaggcccgttacacattttgtccaaaaacatattttatttacccggggggcaacacaataaagagccgaaaattgaagttacctttttttgccatcgttcacccccttttttggggagtctagggcttaggttttactaaccctaagcaggttgaagctaaagctttaaatgcttcaaaaatagggggaagcgtgaacgggggcaaaacaccactttttttatgcccggcctttgggggagtccctccaagcgtgcgaaccattggagcctgttgtttattgaccccc

SEQ ID NO: 182665 - DNA, 435 bp, Zea mays
  Clone ID: MRT4577_98173C.1
gccggccgggccggaaagtccagcaacatcgtacggatacactatatacaacaggctgagctagccttccactcaccccatagcatgtgatatcactgagcgcatcgccgtctccgatacagacatactgttttactgaacacaacagggtgaacctgttgcgacccaagattgaccagtgcaaagagcgttgtagctcgagggcatggcactgctggcgctgctcctggggctctgcaccgccggcgtgacgaagggcacggtggacgacggactggaggtgacgggtggcaacgggcgcgtcaccggctcgccctacggccaggtgcagacgctgtacatcaaccgcacctccgcgtcaggattgcgctcctatgacacttatcgctgtctcgcgcgccgcacgcgctgatgaagatcgtgccctactactcc

SEQ ID NO: 182666 - DNA, 230 bp, Zea mays
  Clone ID: MRT4577_98175C.1
gcctgcggaaagggtacagagctggcgcaggcggtggacgacgtactcttcgcgctgccggccaacgaggaccgtgacgggcccattatgcacctaccgacgaccaccttcaaactgccgagggagaaggatatacccaagcggagggcaccgaccaagtgggagctgagaggaaaggcgaaaggaattaccaagcgcaaaaagaacaagcgggaggggaatgagcaaac

SEQ ID NO: 182667 - DNA, 363 bp, Zea mays
  Clone ID: MRT4577_98176C.1
ttttaatacacgcacttctcatcaagaggacggggctcatttaaaataacgtgggggttcaaaacattaaatctcttttccatgtcaatgtccatagtttttttttaacatttaatttttttccgcatttcagtattagataccctgaatacatttttcttaatgttttttcccttgagataaaagtttctcttttcgcctgactctctgatttctaaatataccatccacttgggagacccctcaacaaaaattctttcctaaagactcccctaccccctcttgaggcactgatctttacccaaccggggtgatttcctaagattctgggcaagaacctttcttttttctatttcacatgct

SEQ ID NO: 182668 - DNA, 415 bp, Zea mays
  unsure (1)..(415): unsure at all n locations
  Clone ID: MRT4577_98177C.1
cgcggacacacacacaacgggagcggttcacatttacangcgggggcaccaccgcaccaagaagcagancgnngngaaaaccccgacaggcaagacnagcacccncgaggaggagncggcggacaccacngacaacgcnaaggccaagagccaggacaaggagggcacccccccagaccagcagcggcgcaacanagcnggcaaacagccagaggacgggcgcacgcnngcngacgacaacanccagaaggagagcacccnccaccnngngcaccgccgcaggggaggcangcagancnangngaaaacccngaccggcaagacaaacacccncgagggggaggccncggacaccaangacaacgncaaggccaagagccaggacaaggagggcanaccaccagaccagcagcgg

SEQ ID NO: 182669 - DNA, 284 bp, Zea mays
  Clone ID: MRT4577_98178C.1
ggcgaaggccgcggccgagcgcgacgccgcggcgcgcgcgcgtggcggcgctcctgagccgcgtcgggcgggtgccggatggcgttccggaaggacgagcgcggcgtggtgaacgcggtgcagctgctggacccgagcgcgcgcgccgtgtgacagacggttccccgtgtcggtgctgctggccgtggcgccgtcccggcggtgccgcaagcagatggtggccgccggcgcgtgcgggttcctgcagggcctggtcgccgcacgagtggaaggagctaagcggg

SEQ ID NO: 182670 - DNA, 167 bp, Zea mays
  unsure (1)..(167): unsure at all n locations
  Clone ID: MRT4577_98179C.1
gacggatgcgcatgggtgctaactactgcttgatctaactggccacgcccgggctataattttctgccagcatcggatgttcttgactgaccctnncgcaccttatatttattgttgngagggtcaaattgtaaaatgtctagcccgtgcttcattccttaccaact

SEQ ID NO: 182671 - DNA, 448 bp, Zea mays
  Clone ID: MRT4577_9817C.1
aaaaccgaacacagataccgggttactaaaaaggggggtttttttaataggggccaccaacaaagagggtttaacgggggtacaccgggacgacgacgataaatcgggcagggacggggccggcccgccacgggagcagacacacgaaacctgacacaaaccggttagaccacctcctcgatctggggggcagggccaccggttccaggcgggggggcctcggccatgccgccggagcctcccatggggggacccgggcccgggaacattttggggaagaggggggtgaaaaggctctccagctccttaatttgggaaaaaaactcggccccctcggggagcgggggggggtccagccagctggagggcgggttggaggggccctcaatcttttttttgggggggggagccagcttggacccgaacttctcgtccttggacggggtgg

SEQ ID NO: 182672 - DNA, 300 bp, Zea mays
  Clone ID: MRT4577_98180C.1
tcaaaaacagaaatcaggaatatttcatagcctatcttacttccttccacacctctatcctcattagttaactcaacaataatgttcactaccttcttctactctacatcactcctctctctctatttcttgatacttccttatgaatgattaccttacttatccctaataacaccaccatccccaccaataaccatcatgtattctccacctactcacacaaccagccttatgtcttcatccatctttactatgttaacactaccctcaccctctacaacaacctcctttaaaatttct

SEQ ID NO: 182673 - DNA, 365 bp, Zea mays
  Clone ID: MRT4577_98181C.1
accaccaattttttgccttcttaataagccaatcggaacccagccgcatggccattgccaaccggcgtacaatttcctttgttccaaaaaaacccttcggattaaggaggacctattttacttccacaaacaggctacgatacactgaacattactactgaataaacacgccaacgatgacaaaattacacaccctaccgtttacatgtgcctcctgttccaggtggagtttaacttcacaacgcctttcacaaattaaccacagggggtgcgctttttgttgattaaacaacgagggttgatatccttccaatctttccacactatggctttttactccttggctcactaatgcttctgggcct

SEQ ID NO: 182674 - DNA, 368 bp, Zea mays
  Clone ID: MRT4577_98182C.1
aaagcaggttgagagaatgttaacggaagtgcatgagcaagcactggtgtcatgtgatgctatgcatcgtgagaggagaattcttcttaagcaggaaattggaaggatggttttatttttcactgatcaacctagcctcctagcacctaatattcagatggttttttctgctcttgctttgtctcaatgtgaggtgatttggtacttccaacatgtggggattgcatcatcaaaatctactcgattgaaaactggtgacattgatgcgacagacccaactattggtttcttactagatggaataggcaaactttgttgcctggttcgtaaatacatagcagcaataaaagaatatgccttatcatatt

SEQ ID NO: 182675 - DNA, 721 bp, Zea mays
  unsure (1)..(721): unsure at all n locations
  Clone ID: MRT4577_98183C.1
catttgctatggctgtgcttcaattgttaacaatatttgttacttcagtaaatcagaaatacttcaggacttgctcaaggaaacaaacacaccaagcttcttggctggtttacttgttacgaaaggattggcttgtgctgacctcatcactaaagatagtcgagattctcactgcaaaagcttcctaatgcataccttggtttctttatcaaggaaggtgtcgtcaatgcagttgaggcgcttcttaatcaacaggattgttcaaaatccacccatatgcctgataacatgcaacaacctgagactcaacctgtcataagaaataagactacatgtttctgctacgcatttgatgcctgtagatctgaagctgctgaaaaaaggacttgcaggattgggaaggacagtctttttacttttgccaggcatgtgaagacaacttactttactaaggatgtagtgagctctgagatggggttaactgagattttgcagaaactcaaaaattgctnngtgcagttttgaatgagaccacagacaagtcatctgaacaatgcaatcttcaaaatgaagaatacttatctaccattttaagtgaggtgatgatggagcttcatgggggagaaacaatgacaacctttgaatttcttgagagtggaattggttaaatctttatcaaattacctctcaaatggcaagtacctccagntggaggaaatat

SEQ ID NO: 182676 - DNA, 919 bp, Zea mays
  Clone ID: MRT4577_98184C.1
gcgggcggccgcatcccgaccctcgcctccccgccacggggaagtacgacctcgccgtcgcctccagcggcgacgaagtgacgctggacaccggcgtggacaagtcccgcgtcgcgtccaccgtgctcgacgacccccccacggtcatcctcacggtcgacagcgtgctgctccctcacgtgctctttggcggcgcgccgtccccggcgccggcgcccggaccggccgccgacgtgcccgcgtcggccccggctcccgaaggctccgcaccggcgcccgcccccaaggccgccggcaagaggaagaagaagaaggccaggtccccttcgcactccccgcccgcgcccccggcggactcgcccgacatggcccccgccgacgcgccaacggaggacgccgcggacaaggtcgaatctaaaaagaacggcggcgccgcagcggccgtgagcttcgcggcctcggtggcctctgtcgcccttgccgtcgcgtaccttttgtgagcgagagcggcaggcggtcgacgccgagcccccgtagctctctcctagactctgcgcgtgcggcgtgcatgtcgtgacgcgatgaaatctgttgttgttactcgtaagttcttgtgggctccgttgatgatttgattatggtcacccgatgtttgttcttcctcgtggttggttagttggtttgttgtggggaattctaggatttggtcctccagtcctcctcaggtggagacggtgattgtgacggactgttttagtagtgttagagctcgaaggtgtcattcgatgttgatttgttcttgctcttacagagttgtgcttttcatccagcttcaaattacctaaaaacagtagctgcaaaaaacccccattaaagagacatcttttgtagacaaaatacctaagatacacgattatca

SEQ ID NO: 182677 - DNA, 504 bp, Zea mays
  unsure (1)..(504): unsure at all n locations
  Clone ID: MRT4577_98185C.1
ggaaatgtctaccttgttcctaccacttctaactccaggcagttatctgacatgaatgagcacatgggaagacgaacagtcggcggcctcctcttcaccaagggaggatcaattcttctcttcagagaggacggttcgcgcccgagggccaagaacttttgttcgcgccatggctgcagtggtcatccttctgttggcaaagccaaaggtaaggaggcgcacaggacagcggtgcccaatgaatcaacaccggctaccctacggagaccaaagatttgtaggaatcccgacagaatgccaccacatggaagcagtgctccaggcagcatcagcaaggatgcaggaggctcttgtagcgaaaccggcaacaggtcaagagacactcccggtcccgggcgtcatctactggctcggctcaaggagagggtcaacacatcaaggaaacgatcattgaacagggagaanccgccacagtcaccgagtgcattcactgctagttccccg

SEQ ID NO: 182678 - DNA, 515 bp, Zea mays
  Clone ID: MRT4577_98186C.1
aattcggcacgagctagctagtactcaacgcactgtactaggaaccagcacgctctctctaagacactttcgccccaccgctgacaatcgcactgatccaggtacgagatctcatgccttccatgcgcgcgccagcgacagaacccacgtgtccgcgggtcggccactatgatgcacgcatcgcaaactctgccagagcgtttgacctcagccgactacgccacctgtcggccgctcgcttttcgcctaacatggtccctgagcctacgctcgtgcataaaagcgcttctcctagctgcgctcatggaacaccggcagcatcaggaggtgaggaggaacaggaaagcttgctgcacgggcagacgtctagacaccctctctacggacaacaacgccttcccgctacttcgcgacgacaggttcccgaagctcgacccctatagcacaccgaggctgccgttgaaagagcttcaccggccgtcgctgacatcggtgccgccatctgactgccggcc

SEQ ID NO: 182679 - DNA, 204 bp, Zea mays
  Clone ID: MRT4577_98187C.1
tcgggtctttagaccattagctttatttacttcagagcgcagaagaacccgatcgacaccattagggtggtggttggtggccttgcttttctgggttttggttggagggccaacttcaagcattccaagggggggttggggttgcaagcaaccgcggccggttaatttacggccgcgggggcatttgcaacttccggttaactt

SEQ ID NO: 182680 - DNA, 600 bp, Zea mays
  Clone ID: MRT4577_98188C.1
ccggccgggaaatcaaaccttgctgccttctgcatccggtagcagcaagtcgccgcttgtgcccttcctcctcactttccctcgctgacgcccgatccccatgattcgattacgcgacccgccttgcaaaccctagcttctcccgctctctccctttccaatgcgcccaaaccctagcttcccgcccgcccacccgccggacatgcgcgcctccgcctccgctgtccccatggaggcctccgcctccgcccgcagatccgccgctagccccgaccccggcgcgaagaagccgcgcctcgcgcagccgccggcacgggaccccagatcttacgccgctgccgccgccgcctccaatggcggagcaagcgccgccgagcaagcgctggttgacgagctgctcggccagtaccggaccgcgcttggggagctcaccttcaattccaagaccatcatcaccaacctcaccatcatcgctggagagaacctccagggcgctaagaccatcgccggcgtaatctgcgccaacatcctcgaggggacctttgtctgtgactcctcttacggtcgtcaaactgccgactccccttcttcctcaattca

SEQ ID NO: 182681 - DNA, 160 bp, Zea mays
  Clone ID: MRT4577_98189C.1
cttgtttcaagagcgttctgctaatctacacttttattttctggatcactggcgttaccttcttgcagttggactttggggtaaggtgagcctggagaattacttttctcttataaatgagaatggcaccaatgtccccttcgtgctcattgctactggt

SEQ ID NO: 182682 - DNA, 333 bp, Zea mays
  Clone ID: MRT4577_9818C.1
tatgggatccaatttacatttccgtagtcccataaacttggatctttatcgatggtatcatcttgtgttgccatcatgatgttgtgaaatgtctttcgaatccaatttggatgtatcttatagatcacatactctggttgtgtacattttcattgccttcattatgtcagtccttttaattggcttgctcttcgatataagaaaaacaagataataaaaaaaactgaaagattagctaaccttttggctctgtcaaatgcacatacgtgacattacacctacacctgatgttatttgaatcgaggaagaactctttccgtgcggtgcaagaac

SEQ ID NO: 182683 - DNA, 171 bp, Zea mays
  Clone ID: MRT4577_98190C.1
gatctcactgcgttcgttttttctttggcaggaacatttgtaacagaacaacaagatgtgcctaaatctagccgtgaatgagataagagacgtggaccttcggttagattagacacacataataacggggcttggatagaagtctaacacaaatcgttaatatatgacagt

SEQ ID NO: 182684 - DNA, 299 bp, Zea mays
  Clone ID: MRT4577_98191C.1
cccgcgcaagcatgcaccctatagagtcggccttcccaacctttttttttcacccgcacagggcgccccaccggggggggcaaattaaggacacagccgccttcacccccaaaaaggaccccgatacagcacgacccgggggaaccccaaccgccggccaaacgacacacacgcggcaaaaggccacccaaaagcacaagcaccggacggtcgacaacgacccaaacgtaaacaccgcttgctaccagacgcaagccccacctcggtatgagcacaaagggggacccaatcccccggaa

SEQ ID NO: 182685 - DNA, 271 bp, Zea mays
  Clone ID: MRT4577_98192C.1
atcgattcgatggagttgcggtctcatggcggctcttcgtcgcaggcgggttgtggtagcagtcgtagtcggcgctctagcatggaggacgctttgagggagcagcaagaaaggtttcgtgaagagttgcggcaacaataaatgacaatcctccaatagcaatcagggtacatggctgcttacaatgcacaggcggaacaagcaatgaactcttggtttccagagcaggcacaacagcaaccatttgtttttcctcaattttagccactga

SEQ ID NO: 182686 - DNA, 136 bp, Zea mays
  Clone ID: MRT4577_98193C.1
agcccaagcgtccgcggacgcgtcggcgtggcgagcgccaacgtgcgggagagctccagccccgtggtcaaccgcagtcactacgacaacatcaccgtgcggaccaggacggccgacggcaacgagcgcggcagac

SEQ ID NO: 182687 - DNA, 470 bp, Zea mays
  Clone ID: MRT4577_98194C.1
acacctgagccctgcattttattcctcattataaacatgacatccaaactgtacgatggaggcatgctgtacatccgcctctccgagcaatgagaggcgcataccgcttatagtcctgctctgaactgggtgccccaagacacaggcatgcacacacaaagcacatcacatctacgactagcttagagctatagcggctgaccgagactctacggctgaccacggagcgggcgccagcgactttaagggccatatgccgcacctgccggaggaggctcaaggaggccttcgcgcgcggctccatctagtgaggccattccttgaggacccttgcccctggggcacgcggggctgagatggatacgtgatatggctggccttggacgccatccttcattgggtggggaccaacgtgggcctgcccggtggtgatcacaccgtggtagggatacacagcgagctcagtaccc

SEQ ID NO: 182688 - DNA, 621 bp, Zea mays
  unsure (1)..(621): unsure at all n locations
  Clone ID: MRT4577_98195C.1
cactcctatgggcgattgggatcatcagagccggccgggaaaggactttggcgctacgaggcctgcgatcggactttcgtcgtcgtcgtcgtctcactcggcgggcggtcgccgtctccgtcgagcgcgcgtcatcctccactgcacggccacgacagcgtttcggtcgattccgcccgcgccccgccgctctcgccttgaattggcagccgaccaccaacgaattctttatattcccatcccatggctcaccggggcttcgtcctctttatcgccggccccgttcgcggaaagcaaagatccactatcgcgacgaaagcgccgccggactcatttcagatcacagcatggccgacgaggcgggctgacctgacgctccgagcacacgagagggcatgccgcacgcctggtgggatgcgtccttctcttctcccgttagtccttttttctttcagagaaatgaatatgatgtcccctggccttattccccatcttgcgaattgaattctcgagcactatgatgtgcctgatcttcgaccgtttatctccctcgtccccgcccccgcgtcaaaaaaaaaaaaaagaaaaaaaacctnacaagaaaaaaaaaatttgctggcc

SEQ ID NO: 182689 - DNA, 467 bp, Zea mays
  Clone ID: MRT4577_98196C.1
gttccaaggaagaaaatgcagaaaccggaggcaaaggcccaccgacgggggctccgggcacccatgggcggggggagagggagagaggacggaagggaaaaaagagagagagagagagagagagagacagaaaaagagagagggaaaagggggaaggggggaacaagaaaggagacggagagaaaaaagagaaaacgaggggagacccgggagtcagccaacggacaaaaaaaggggagcactatgggcgggtgggaccctaaagaaagagggggggacacggggaaaaacccggcagccaggggaggaggaggtgggggacaaacccacgcacgcaagggagcgggaaaaaaaaaggaggaacaagggggggccaaaagggcgcgccaaacaaaattagggcactacgggccacggcccccttgcgcagcggaaaaaaggaatagcccccggccggcaggaaacgc

SEQ ID NO: 182690 - DNA, 599 bp, Zea mays
  unsure (1)..(599): unsure at all n locations
  Clone ID: MRT4577_98197C.1
gtggtcttccactcctcccatccgagctctccctctccacgcagctccctcgcggtgctccctccatagcgcccgagcgctctgtcctcggatcggagcttctctgcgtgtcgcagccaagcttccttccccatggcgcccggtgcccaagtccccagccgtgaccctgccgagctccgccccgactccacgtctcctggtacgttaattaatcgcgcgatgcggaagacgacccaagtcgaccccaagcacgggctactccacaggatgatgctgatggacaaacctgaagatgatcgtcaagcggacgtcgtctaaccaacactaacatagtgtttattccaggttatagttttgtgctgctgttgatggtgttaagtgccggtgggctcgaccttcttatataagtataccccgcctttatcttcttattgaggatggtcacttgagctagcatatatttcaaaactataaataatttataaccgttcaaagtttctttctttgaatcaatgtagtaatcactctgatcatgtacgaagtaaaatttttgtaatttgtaaaatttggtaataagatttccgctgcaaaaaanaaaa

SEQ ID NO: 182691 - DNA, 367 bp, Zea mays
  Clone ID: MRT4577_98198C.1
ctccgcttcgaccaccaaaagagggtttctggaacaaattccttgtttttcccccctccccgacgtacaccgtcggtcgccgtcatggcgctctccaagcctttcctctcttgccttctcccccttccttttcgcctacgtcctcaggcccgctttctctgcctcgccaccccgcctttgaccccgacccccacccaaatcgacgacctgccacccgcggacgccgtcgccgagcgccgccgccgcaagcgcctcctccgcgtggagccccctctcttccgagggcccccgccgtattgtgcgccgggggcttcctgccccgtgttataccccatcgcgcccaatattcctgagccgttctcggtgc

SEQ ID NO: 182692 - DNA, 2348 bp, Zea mays
  Clone ID: MRT4577_98199C.1
cccgcgctctattatcctcccgttcatctcctgcgtccgtcccttcccatctctatcttctaactccacgccaccccctttctcaagcctcacgttcaatttccaggaattccctgctatcgctagcttcagcgaccaacgttgctggccccctcatttccctacgtcggctccctgtggtcttccccgcgtccggtctcatccttatccccatcgcccttatcccctggtctgtgccgctcgtacttggagaaaaatctccagccgccttacctgctgccgccgcttcccatccgacagattatttgtttgcagccactgatcttctccctcgctcagccgagtggtcttccactcctcccagccgagctctccctctccacgcagctccctcgcggtgctccctccatagcgcctgagcgctctgtcctcggatcggagcttctctgcgtgtcgcagccaagcttccttccccatggcgcccggcgcccaagtccccagccgtgaccctgccgagctccgccccgactccacgtctcctggtcgggctctcgttctatgcctgatgccgctgttccctggtgctccctgctcggtccctgcccagcgcctgactacagctccagctcgcggcgtcccctctgcttagccaggattgtcgtgcctctgctccctggttttccctacgcgcgagctcgctggcgttgcccctgctccgcttggccgcgtccccctcagtccaccactctgctcggccatggaagacacgccgcaccctggttccagctcgcgatactccctgcacgccggagtcgcccagctcggccacctacctccctatgcgcgacctcctctagctccctgtttctccagagtgtcttcctctgttggctcgccggcttcctgctccctgctcacccagcgcacgcttctccttgtgtgccgtgcctgcgtgctgctcgccccagctcccagccatggcgtcggccaaagctcctgcgcgttatgtgcccagctcccttttccgcgtatgcgcgcttagctcgctttcctgcgcgcccagcgttctgctcccgctcgtccctgcgcgccaagctccttgcgcggtccttccttgagctcggtcctgcgcttttcctttctctgtgctcgtgctcgccgtgccgtgagtcactggccagcagtccagctcgcttcagaatcaatctcgtcgtcgttccgcgcgtcagcaagaaatctcaagagttgggtgaagtcggaggctaacagcatggtattcaccatgtgcgcgacaggaagctcgagccaggatttatccgcattcgtacgagtattggatcgcgtttgatactggtgagccgatttataatttttgtaagtttatttaatgattggattaactagaattattaatcgtaataatcctcgtatttagcgcaggcgtattgtggtagtattaaaaataagtaaagtacgatgggtttagtaatgcgaaaggtgtattaatttaggtgatatctgggcgaagtaacgacgtaaaggatagatttagtgttttatacaactacttgatgaattttgtcattgtcaattgcattaaataaataacataaagagatgtttgattaattgttgatatgtaaaatatgtaaggagtgaaataaaattaaaatagttccttgtgagccatgtagtataatttataaaacaaggaataaggttagcaattaatcaattagctggtgagttgtgtaggctaattgtatttaatgtgtatagtttgttgttcgtgatgtttgcgttaggttcgaggggcgtaattattgcgtgtagtcgtatattaataactagggattccgtatgaaattgtacaacgcctcgccgctaggtgtttaaattcgccatcacgtaacactatttaggtttgtaatatttaaaaatcgcgcgatgcagaagacgacccaagtcgaccccaagcacgggctactccacaggatgatgctgatggacaaacctgaagatgatcgtcaagcggacgtcgtctaaccaacactaacatagtgtttattccagggttttattccctgttgtttttcaggttatagttttgtgctgctgttgatggtgttaagtgccggtgggctcggccttcttatataagtataccccgcctttatcttcttattgaggatggtcacttgagctagcatatatttcaaaactataaataatttataactgttcaaagtttctttctttgaatcaatgtagtaatccctctgatcatgtacgaagtaaaatttttgtaatttgtaaaatttggtaataagatttccgctgcaaggaga

SEQ ID NO: 182693 - DNA, 130 bp, Zea mays
  Clone ID: MRT4577_9819C.1
aattcggcacgaggcgcaaccctctctggtcgtcccactttcttccacaccagaaggaaacttgagtcgcgcgcgagcagtagtgcatccaatccaatccacaaagaggttagtcagccatggcggcacc

SEQ ID NO: 182694 - DNA, 964 bp, Zea mays
  unsure (1)..(964): unsure at all n locations
  Clone ID: MRT4577_981C.1
ggcaaatggtagcctgggggatgtgctccnacagtgagaaacgccacatcttggattggcccatgaggtataagattgctgttaacgctgctgaaggactctcatacctgcaccatgactgtaagcccgtgatcgtccatcgagatgtgaagtcgaacaacatcttgctcgacgcggagtatggtgccaagattgcagattttggtgttgcaaggactattggggatggcccggctaccatgtccatgattgcagggtcttgtggatacattgctcctgagtatgcctacactctccatgtcactgaaaagagtgacatatatagctttggtgtggtgatccttgagctcgttaccggaaagaagccgctggcagcagagattggcgagatggacctggtggcgtgggtgactgccaaagttgagcagtacgggctagagtctgtgcttgaccagaacctcgacgagcagttcaaggacgagatgtgcatggttctgaaaatcgggctgctctgtgtctcaaaccttccaaccaaacgcccgtcaatgaggtccgtggtgatgctgctgctggaggtcaaggaagagaacaagccaaagctgaaggcggtggcaactctgcccatctgacctggaggaggcgaccccatctgatcaataataacaaataaaagtagtgtctgttcttcttgggatagtgtactaaaaaaactatttgcattatatctgatcttgagaagttcattcagggcagcagctagctagctaggtctgagaacattttcagcatagtgtttgctaaagcttatgactgtggtatccttttgctctaaatgagaaagtgctggttgctgtcaattttatccctggcaaaaaaaaaaaaaaaaaaaaaaaaaaaaaaaaaaaaaaaaaaaaaaaaaaaaaaaaaaaaaaaaaaagaaaaaaaaaaaaaaaaagggccccta

SEQ ID NO: 182695 - DNA, 157 bp, Zea mays
  Clone ID: MRT4577_98200C.1
attctaaagggctaaggttttcagagccttggtgtggtcaaaccacagagtccgaggttttttacagcatagccaacggttgactggcactaacatgttaaaatgcaggcgggcaaataaggaaatgaaggttcaagaagcaatcccccagggaacc

SEQ ID NO: 182696 - DNA, 333 bp, Zea mays
  Clone ID: MRT4577_98201C.1
ggaagcttactcttgagtgatagcaagtagatatgagtaaatacagtgtgggagcgccagttggtggcgggctcctgcgcctgcaataagaatagttcagacaagattagacatgcagcgctgtgctagagagaagattgttccttagctcctacgatcctataaggatgatggtatggccaaccggtgagatctctattaagaaaaaaaacatttatgacaagcctccgtcaaaaaagtcaagctctgtctgaaaggagcctagaaacaacactatgatactgaaggtgacgcagttagaggagatctataaacggagttgagcgaagcaac

SEQ ID NO: 182697 - DNA, 427 bp, Zea mays
  unsure (1)..(427): unsure at all n locations
  Clone ID: MRT4577_98202C.1
ccggccggngagtcacacgacgctgccatcgagcctccactaccctgaccctgaccccgaactcgccgtatgcaacagggcaagacgcagcagtagaagcaccaccaccaccaccaccgacacacgaccccggcggaagcgagtgccatcctctgctagatgacgctctagcaccagacgatctgctgcgcggtgtctgacgaagcgtatcattctggggcgtgacggtagatagccagggtttatctgccatctgtggtgctacaacaccatgcccgattaccgcatcccgctgatagagctgaggcgcgaagtaggagcgcgatcgcgcacatattgcatcacagcgactgtggtgtccagtgagtgttcaactggcacaagtatacgttctacgtgataatcatacttctacacccgcaaccac

SEQ ID NO: 182698 - DNA, 256 bp, Zea mays
  Clone ID: MRT4577_98203C.1
tctcaatcggaggcttccttcagggttcctagctactgacttacgtaacctctacaccataaaactggattcggctgacggctaacgcagagggccatctccatactagacggtctacagcgactcggaccatggaccgcacggtcttaaccgatgcctctcggtccaaactggatcaccactcaggcgtatcttgcactgacgtcgtgattgacaacgacacctgcctataccggcctatggacctaaaaatcga

SEQ ID NO: 182699 - DNA, 757 bp, Zea mays
  Clone ID: MRT4577_98204C.1
ccggccgggagctgcgagttcgttttcgtttatggattagaaaatgacgtgacgagctagcatccggccgccgcggcggcagcggacagagccagatgcggtcagggtcaatctctccttgagctctcctctccaccgcgctgagaccagcctttcggcccttgcacgccgcacacgccagtccaggtctcaccgtcgggctgcttcaccggtgcctaatagcgatgcccaccaccatctgcagtttgagcaagcaacataaatggaagatagcagtctctgtgatgctgttctccgtgctcctaatagcatgtgattcgccattcagggccttttttagcaagtacctcagctccattgtaccatcatctggatcatcacatgacactgcactaacccaggacaaggcagcgaaacagatcgaacatggcatgtacaacatgaacaccagttcgaccaatgcggcttccagttggagcattatgaaggaggagttcatatttcaagcacatgatcgccctttcaataattgccatgcttccaccattgtagaggttgagaaagaaatttttttggtttcatattttggtggatccatagaaggggctcctgatgtcaaaatctggacacagagatacagtgatggctattggcatcctccagtagtagctgatgaagaaatgcgacagcaatgtggaatcctgttttatttcagctcccctctcatgagttgcttctcttctacaagattggtgac

SEQ ID NO: 182700 - DNA, 563 bp, Zea mays
  unsure (1)..(563): unsure at all n locations
  Clone ID: MRT4577_98205C.1
ccggggcttcctcgcgtcgcgccgccggctcatcaanacgcagcagagcatgaagctcaagggcgtctcggccttccgcaagaaatccgaggagaggaccagcggcggaagtggcagtggtggaggtgcaaagatcgcgcctttgatcgacgaggaggcggtcggcgacttcttcgtcgaggtgtacggcggcccgagggtgagctcggacatgagctgcagcgacatgtctctcgacgagatggatgccacggtgcggaggatggagttcgtcgtgttcgatcggtgcggcgcggacgaggacggtgagaagggcaaggatcttgcgttttgcgatgatggtgaacctgagcctcgcccggtgttgcaacagaagcatggtgccttcggggacagcttgtcggagtgcagtggggtacacatcgacaacgatttcgtcgaggagttgccatggatgaagtaccacggatacgagtatgatgatagcttggacgatgagatcttggaagaacagagaattggggaacaggaggttgttggagcagagttttctgtggagcaag

SEQ ID NO: 182701 - DNA, 1385 bp, Zea mays
  unsure (1)..(1385): unsure at all n locations
  Clone ID: MRT4577_98206C.1
cttttttagcaagtacctcagctccattgtaccatcatctggatcatcacatgacactgcactaacccaggagaatcgacatttatactcagaggtcagagcatgccactaacctgactaacagcaaggcagcgaaacagatcgaacatggcatgtacaacatgaacaccagttcgatcaatgcagcttccagttggagcattatgaaggaggagttcacatttcaagcacatgatcgccctttcaataattgtcatgcttccaccattgtagaggttgagaaagaaatttttttggtttcatattttggtggatccatagaaggggctcctgatgtcaaaatctggacacagagatacagtgatggctattggcatcctccagtagtagctgatgaagaaaatgcgacagcaatgtggaatcctgttttatttcagctcccctctcatgagttgcttctcttctacaagattggtgaacaccctcaaaactggagcggtgccatgaaaagatctctcaatggtggtatgtcctggttagagagggagcaattaccacctggtattcttggccctattaagaataagccctttttgcttgatgatggccgtttactatgtgggacatctgttgaaagttggaactcttggggtgcatggcttgaggtaacagaagatgctggccggacatggagcaaatatggtcctatatttatccaaggcgagaaacttggtgtcattcagccagtaccttatcagaccaccaatgggagtatacgtatgttgctgaggtctcaccaaacaatcggttcggtatgcatggctgattcctacgatggaggattaagatggagttttgcgcgcaagagtgtgcttccaaaccctaattcagggatcgatggaatcaagatgaaagatgggagagtggcacttgcctacaacaccgtctccagaggcacgctcaaagtggccgtctccacagacgacggcctctcatggcaagaggtggtgacgctggagaacgcggaaggctgggagttctcgtatcctgcagtgatccaaaccatggacgggctcgtgcatgtcacctacacatacaaccggacgcagatcaagcatgtggttcttcggcccagttgaatagggtcttgaacttgccgttgcagctggacgggtggactgctggaggattcaagcgtgtgatgtgtctgctcctgtaggacagttggagggagaacctcagcgtgtaaagcagcgtgctcgttacggttttctaccttcctgttacaacaatttcgtatgaaactatacactatacagtgtgcttatgtgaacttgcgacntttgccaaaaaaaaaaaaaaagcggccctcgagcntcagcttt

SEQ ID NO: 182702 - DNA, 531 bp, Zea mays
  Clone ID: MRT4577_98207C.1
ccgccggggttcggtccgatcgggtttctgagacgaggaggatttgctcgctgtcccgtgggccaggccatgggctcggccgtttctagttggcagccatgaccatgtgtgtcagtgtgtgggtctcacttctaatccatatccatccgtggctcgtttccgggacgaactggatcagaaagacatgcttgtttgtaattttttattattttgtttagattttctaaggaaaggcgtcgtgttcttcgcggggtatttacagaaatgcaggatcgccagcctgctcgctctgttggcggctgccgagtcccggttgcgttgctgaactttaattgagcctcgacctttatctacgtggactatgaggctgagtccagtgcacagcctccctctcgctcctgccacgtcagctctcgcctccactctcgtccctgctgctccagtgcacaggctgcagcaggctacagcctcaggctatagccacgtcagcttttctatttcagaattaagtaattcacgcggatttatttc

SEQ ID NO: 182703 - DNA, 618 bp, Zea mays
  Clone ID: MRT4577_98208C.1
gcgaaaaaaaaaaacaaaaaaaaaaaaaaaaaaaaaaaaaataaaaaaaaaaaaaaaaaaaaaaaaaaaaaaaaaaaaaaaaaaaaaaaaaaaaaaagggccctggattggttttttggtggcgggtttggtggtggaaacggggggatttttgggggccgtttttttggtggtgatgccccgaactttgacgggttgggcattgggttccccatttttagttgctttgggtttgccatgccattcatcctatgggcaaggatttgctggggccttccctggattatatttggtaggggttttaaaaaaaaaacaaacaatacaaggggggcttcctaaaaatttaaaaagggtttgcctacatttaaattcaaaatcaaaaaacgtcgccatggttcaggcagggaaactgaaggccaggaaggggggattttggctggaggaactgacaaggggcgatccctttttggtgaaaacccaatttggtgcatttgttttgcaaaatatgcccacaatgatgagctccgggaacttccatgggcacactggttcaaaaggactggggcgaaaaagggctcaagaaaaatgccctttgccctttgggcaaatttgaaaaag

SEQ ID NO: 182704 - DNA, 443 bp, Zea mays
  Clone ID: MRT4577_98209C.1
aactaaactaatatactaaaaaaataaaaatacaaaaaaaaaatatacacataaaaaaatggggtgggtattaaataagctgggaggcggctaaacactctagtgattgcgtttgttctgacttctgcggtcacttgttaaatacaaattgtaatatgtcgtgcttgttccattaaattaccacgtcttttacgtcaacacccttgttaaacccctggctttccccttttaacttttcctcctgtaaatccctctttatcccccatgttaccccccctctagccccctaccaatcacttttccaaacttatttgcaacctgctatggccattggaccccccccttaagtggcgcatttttcgttggatttgtcacctttacttctagccttaccaacccccttgccacgggatttttcccctttttttctccttttttccttc

SEQ ID NO: 182705 - DNA, 900 bp, Zea mays
  Clone ID: MRT4577_9820C.1
ccccttctcctgcgagttgccgagttgtgactctggagctgtcgcctgcggcctgcctctccgtctccgtccacgtcgcgtcataaatccccctttccgagccccgacctagcacctacccccgccacccgcccattccattccccaatccgactggtgcacgagccccgaatccactgtcgcatttgttggcggcctctagctcccgctaccctttccgtcccagagaggcggtcgccttgcggtaggcggaagggggatttaggtgaacaagcatcttgattttttgaccaatctttgctctacccgccttgcggtcttcgcctttaaatctctggaggtgggaagactgacgaggcaaaggcgaaggcaagaacggtcgtttcaaggctcctgctggaaccatcaagtgttccggtggagggattgggagtggaggggaaaggatcgtagaggttgttgttttacctcgttttgctaacaatgttgaggcagagctctagtagaaatcagagatccaaaggtctgaagctgaagaaagctcttcagattagtctcttgcttctggtttctgtttggttgctctaccaagttaagcattcttatgagaagaaggcatacagcgaagatgaagtgagtggttcacataaagatgacaaggaccagggagagacagtcagactaggcaggaaggatctgcctccaaagatggaggccgactcttcaacattggatgaacgggttgaggatgaagagaatgatgaaatggagcaagaaatgaaacatgatgagaacgatgatgatcccatcgatgagcaagacctggagaagaatggaggatcttcctgagcctgatgaacattcttctgaagggatggagatgtgggtgtgtttgatgat

SEQ ID NO: 182706 - DNA, 450 bp, Zea mays
  Clone ID: MRT4577_98210C.1
ggttggaaccttttgggctgatttatgtgcttgtttatgtgcttgttcgtagctactcttcttattattattattaagtctaataatagttagtgtgtgaaaacaacgaagagttgtagtacggtactactggttgtgtctccggcgtcagtttctgtgtcagcggtggttattgttttataggcagtggaggtaaagaagaagagagtggtggagagtggtgaggtggtggaggtgaagaagacttaggatgatcctcgtctgatgtcgcgtgagggtaagaaggggatggattcggctgcgcgtaaggagcttcgtgtctctctttagtagcttaattcggcgtcgcatggtaggacttagcgtaagggtaagcgtattgagtagaagggtactatggtgttggttacgaaagctcgttaggaggagcgtgataaggtgcatgcggcg

SEQ ID NO: 182707 - DNA, 277 bp, Zea mays
  Clone ID: MRT4577_98211C.1
agagtacccggaagaacaagctactcctctccctctccctcgtgtcgcctgagtagaaccaagtccatccataggtccaacacagagagacgatgggcgtgcctcatggacggctacggcgcgtactcgatcccgctgctcctctggtggctccagctccagattctcctcacgaccggctgcgaccgctgcgtgagacactccaagggcggctactacagctccgggttcaccctcgccgacgggtcctgtggatacagcaccgatgccgcctcct

SEQ ID NO: 182708 - DNA, 314 bp, Zea mays
  Clone ID: MRT4577_98212C.1
acccacgcgtcaggagtcagtcctataacaccacccggaacctgtgccaggccggcacggtgaaacggataagggaggtgaacttcaaggtgacccgtcagccgccgctgtccagggagttcgccagagaagaacaacgcgcaccggaatgagacaacctgaaaccgccagccactacccaccgggcctggaagacacgcgcatgctcacgatgacgggcatccccgctggcacgcacaacactggccaggccgcttctcttcactcaccttcagaatgcagcgcaataatcagcttccggacggtggcgtttt

SEQ ID NO: 182709 - DNA, 519 bp, Zea mays
  unsure (1)..(519): unsure at all n locations
  Clone ID: MRT4577_98213C.1
cagtcccctctgcntgtcagcaagaagggaaagaagcctacgcgcttatagncttgtcgagccagtgggccaccgccgctcgtcgtcttagcctnncctcaagtcctnnccttcgcgggccttcccggcttccacggcccccgccacgccggaccctacacnncggcagtccctttcagtggtgagccacnncggcccgtcgcccggcgcaccggcgccggggctccaattctgcgccgtccccatgtnnccatgtccnntacctccaacnnccgccctaacgactcnntgacgtcnnctatccggttcaagcccccattcaagggagtcnccaatcgtgtcactcgcgaggatgaatnnccgtcgcttacccatgacccggacatnngatcacnnctacgctncgacacncgacccgtcgtnncatcgtgggccgctcggctttccgcgggggcttggtcctggcgccgtaccgagccctctccaaggaccccccgccgtgagcattcgccatcgtgg

SEQ ID NO: 182710 - DNA, 118 bp, Zea mays
  unsure (1)..(118): unsure at all n locations
  Clone ID: MRT4577_98214C.1
ttttnctgctctgttccacgcctccgtcaccgtcgggtcggttcgatcctaccgagggcacacttataagtttgttccattgcatacaacacaggagcattatgatggctttatttta

SEQ ID NO: 182711 - DNA, 554 bp, Zea mays
  unsure (1)..(554): unsure at all n locations
  Clone ID: MRT4577_98215C.1
tacctctgtttgcagacattttgttggtgatgactggaaggttcacagagtaataatcaaatttggcatgttttggtcctcacctactaantttggagaggataatacactgcaaggaggcttctgtcccggagtctgaaagtggatcgtacaacgtcatgtgggatgcaattagagactggaatcttgatcagaagattttgagcttgacttctgttggtgatgttaggaacaatgcagataccgttaagctaaaggaaatgctcatagaaaagaagtgccttcctattcgaggcaagctatacaacattgcttgtctggtctacatcttaaatagtgttgtctccgcagggcaagcagatatacttcgatttgttggtgacgcagtaatggaattttttgtggcacatgcatcttcaccttcagcccaacagcagcttctggaagtcatttcacagatgagtttgaagtgtccacaagaagatgctaagtggtggcacaaattttattttaggcttgaagttcttttgcatttcaagaagtcatttccttct

SEQ ID NO: 182712 - DNA, 752 bp, Zea mays
  Clone ID: MRT4577_98216C.1
ccgggttcgacccacgccgtccgtcatccccctctatcagcaccaataatcccaatagcaaccacgtctcgatctccattaccaaagaaaatgaagatcgtggtggtgctcttcgtgttggtcctcgcactcatcgctggagccgctgccgacaagaaggagaaagaagacacttgcaaaaatctctgtgcagaaaagaagctcaaggagccagcctgcaaggagtcctgcgccctcaacaagcgcttcaaaaaggtgtggatcgaggctgtccaatgctcgttgaaatgcaacaagaagcacggctttggcactccagactccaagtcttgcgaagaaggatgcaaaaagaagtacgaggataaagtggcggagatcactgctagctgccacacggtttgcactaaggtggagaaggagcagcttgctattgaagaatgcaagaagatctgcaccccgtccctcatcttcaaggaaattaaggaggcgttgcattgagctatctatacgctggccaccatggtctgccaattaatcatttgatggatatggaccaaactaccaattaattaatttgatattttctttgctaatttgttttttgttcaaatcgatcagtcaaaggatccatcgatatatggtttcatctgctggacaggcagtccaatgtaatcccaatgtaatgccacacacggttttttaatttttttgtttgattaaataaataaaagggcatgttggcaattatcgct

SEQ ID NO: 182713 - DNA, 382 bp, Zea mays
  Clone ID: MRT4577_98217C.1
cagccgcgtcaagtgagtcaaaccgccagacttcgcagtactcctacactaccagagcatgcgcgttgtcgcgacccgaaccggcgccgccggcgccgctcacgctgcgagcgccttcctgctactactcgaactcctcggttgcgcgtacatcgcgatcggcggagcagccatggccggacacgtcctaccggagctgaaggaaaacccagacacggccaacagcgcccagtaccgacatggtcggccagttcttccgtagcgggcacaaaatgcgagagaaacgcctgcatgagtattgtcgcgtggtggaggccaaggagcaggtggtgtactgaacgctgcaccagctgacgctcgaggacggctcggccgggaggaa

SEQ ID NO: 182714 - DNA, 667 bp, Zea mays
  Clone ID: MRT4577_98218C.1
atcatacatagaataaaattgatttactgcagactgcagctgaacgaattacatacaatcagggcgacgctccatgacctatctatactggtacatggtaaaagcgccactgtgcttcatacgactacaagagaagctgcattcctcagaaaaggagtcatttaccaaccactgtgcatccagtcaaatcatacataacatgccatggatatatgaattgacagaccgacatggcacctgccaaagatccttacattgccactggggtgctataggacatcggcgaattatctgtcggcgaccatattgcgctattgtacaaaaactcactggatttactatggtgcacagacactcaacagcccatatcacaagtctgatctatgctcgtttgagatgaccttgacttactgtgctcttaggagataatatcatgcgaacttactacagggtccttatgcaagaatgcatgcagtagggaacacatgtactgaatgtattgatggcacaataggtgtgactgcatgattggatagcttatcatacttgagaagccgtatcagcggtgccagacgatctttagggttgttcatggagcaaatcttacttctcttagatcagagaagacatgatatggcgctcgtaggggtggatacggcgcagcaac

SEQ ID NO: 182715 - DNA, 423 bp, Zea mays
  Clone ID: MRT4577_98219C.1
gcggcacgtctctgaactcgaagccagtgacgcgctgcctgcggtcacaggatacccccgcgcacgagcataatgatgcagcagcattccatttgctggcaaggatgccaagggggtccttgagcattgctttgaaggcgagcagcgcatcaaggtctgtggcactggatggtggtggggtgagtgcggcggcactacttgctgctgtgactgcgagcaagatgagtaccatgctgacgcggacgaacaagaaagccattttggtgagagtctatgagtatgattgacagaatatggatgtggtgacgacttgactgctgctcttatatgcagctttggacgtccagttggctcaagtggttggaaacgtacagcgatctgaagccaacttttgttgaatatggtcagcaagctgtttccttt

SEQ ID NO: 182716 - DNA, 227 bp, Zea mays
  Clone ID: MRT4577_9821C.1
gattcactcatcctgagactttctttttgcagtggagagagagaataatctagttggggcaaacactgaactttgtcaattaatttgaggctatttcctatttgacgcgctttcttgtgtgaaattccctgaaatgatgttattctagataacttctatgtcaggttcctttggatacccttgaattcagtgtagtaatattgtcagacgtttccccaataagtgtg

SEQ ID NO: 182717 - DNA, 268 bp, Zea mays
  Clone ID: MRT4577_98220C.1
tcactaatacccatcctccctttttttctttttccaaatattcttctctcaccacccatcaacttcttaagaaaccaaattcatcccctctactcctttcctatctcatataaaaactatattccccttaactcattttattttcccttccaactcaaccaaattatctcgtattataccaataacttccttctcttcttactcatcaatctcactaccctttttcccatcatttactaaaacatatatctcattttctttttattcc

SEQ ID NO: 182718 - DNA, 767 bp, Zea mays
  Clone ID: MRT4577_98221C.1
agagattaggcaaaggatgggcgaggatctggacactctggagttcgacgagctgcgcggtcttgagcaaaatgttgatgcggctctcaaggaggttcgccataggaagtaccatgtgatcgccacacagactgaaacttacaagaaaaaggtgaagcactcgtacgaggcgtacaagaacctgcagcaggagctgggcatgcgcgaggacccggcgttcgggttcgtggacaacactggcgccggcggttgggacggcgccgcggcggcgctgggcggcggcgccccggacatgtacgccttccgcgtggtgcccagtcagcccaacctgcacggcatggcctatggctcccacgacctccgtcttggctagcatcgtcatccacagccagcgctgcctgctgctagctagctgcattgcgcgccgccatgggtgctgctcctccacggcgagcacgtactgcatgcacgccaatgcaagttactagctagctagttcatgcaccaccaacgcaagcaagcagcaatataatgcatgcaactaccgaggtattgtaataacaaataagaattactgcgagcccaatgctgcagatgatgaacagcttaattaccgcgcgcttgtttcgtgataccatgcgtagtcgtcattatattcctgtggcatgtatgtcgtttatgatgtgtgttgtgtgtgtgttcgaggaaaatggttgtattctattatgatcgtgtggcattatatctatattgttgactctattccc

SEQ ID NO: 182719 - DNA, 284 bp, Zea mays
  Clone ID: MRT4577_98222C.1
gccacgcgtccgcagctcgctagctagcattctagctggtgcggctgactcttcgttcggagtcgccatggaggagaggcggaggccccgcgagagcgccatcgtctggaggcgcacgtcgtcgcgcgcgaactgtgctgcgctgcgaccaaaggtgccgcagctgcgccgtctcacgccctgcagctagtaggcgctcgaggggaccctgcttatccgcacggccgaatacatcgtatggatacgaactagggtggatcttctcagggcaataacatccgtct

SEQ ID NO: 182720 - DNA, 506 bp, Zea mays
  Clone ID: MRT4577_98223C.1
cagctcaaacatacatagttttgttacaaaacaaacaacttgtccataaacatcgtactacataagatggttacaaaacaaccccccaaacactatcacttaaaatggctccaatatcgggaatcacggactcatttttcagctaaaactaaacaggacggtggcccaaaaaggggaaggggtaaagctcatcatcagtaggaaaatcttcacccaggggggtttggccaccttgcccatccttatccagtttcggacgatcatttcctgggaagggagggccctccgacacataattagccgattcaggacacttttgggtctcttcaacagggaatatttcccctgggttcttaaaagcttaatggctgcacagaaaaggcctccctttgacagtgttaaacaaatcctgaacctgaaaagccttcggttcttgaagctaaggcttcagccgttgggcgctgggggcatcacccctcttgcctgaggaagacatacccctaggg

SEQ ID NO: 182721 - DNA, 292 bp, Zea mays
  Clone ID: MRT4577_98224C.1
ctataacaccacaactcatgcatttgcgctgccattaagctttcatttcttgggcaggcaattttcttttactgggtcacatcaaactttttctcacttgtttacggtgctggtatgtcactttccagactttatcttcggttcatggtctctgtctatcttatgatctatgttccttaattgattaaaaaaatcatctttctcagttctccggaatccggctgtaagactctttttaaatcttcctcgcttggaatctcagcccacaactgcagaagtcatccccttaaac

SEQ ID NO: 182722 - DNA, 123 bp, Zea mays
  Clone ID: MRT4577_98225C.1
catttacccgagctaccgagctaaacctgagaaaaccttaggcgacatacctaatagacactaataccccgcatcgcaaacataatctcccatgtacaggcgtggataactatcaagtactac

SEQ ID NO: 182723 - DNA, 408 bp, Zea mays
  Clone ID: MRT4577_98226C.1
tctcggcatccagcagacccatgcatgaaccagcatgcactgcggatcgatgggtcgccgatacccccgtcaggctttattctaagttaaatcctaaggaaaaaaatggcgcttattggcgctcgcgacttgacaaggccttccatcgtctcatgatcccgcccaaagaatcctaatagtgtggtaacgttacagccacagtccagaagagccgcatacagctgcattcccagcactctcaggtggcatcataagcggcttcagctgcacgaaatgatgaattcaaacgtcaggatctgacactgctgcacggagccacttccgccaggcacaaatacaataagtggagatcgttaaaggaacaaacgaatgatccttccgcttatgaggacgatgatctatggatat

SEQ ID NO: 182724 - DNA, 426 bp, Zea mays
  Clone ID: MRT4577_98227C.1
ggaaaaaggggatggaacctttggctttacaaaaaaaaagggaaaaaatttaaaatcctttaaaccaatcacctacgggttttttgaaccctatggatgtttggttataaacccccgggggtttgttcccaacttattacaatttcattcaaggcaaaaaaaacggggaaagattggtgacccttggggggtcgttttttttgattcccccaaaaaagggagctgtttttttttgctcccgccgggagagttaaattgaaggggaacctggggccggggggggggcttttactgttttttggggggaagaggttttgggcaaatttttcccccgcgggaacggcccccggggagcccacggggttttcggccaccatgttggtcccaaaaagctggaacccaattttggggttaaacggggtttcc

SEQ ID NO: 182725 - DNA, 326 bp, Zea mays
  Clone ID: MRT4577_98228C.1
cggacgcgtgggggaaattcaacatatataataatgcaagcaccggaaataaaattctactgtgttctgtgaaaaaaaaaaaaaaaaaaaaaaaaaaaaaaaaaaaaaaaaaaaaaaaaaaaaaaaaaaaaaaaaaaaaaaaaaaaaaaaaaaaaaaaaaaaaaagaataatataacaaaaaaaataaaaaaaaaaaaaactaaaaataacaaatacaaaaactctacaaacataatagattacactaatttatagatttgcataacctatactttctgctctgaactaaaatcccattaaaacagcaaacttactgattaatcaa

SEQ ID NO: 182726 - DNA, 1187 bp, Zea mays
  unsure (1)..(1187): unsure at all n locations
  Clone ID: MRT4577_98229C.1
aattcggcacgaggatttttataatactagtgctattatagtattccgtgctttcttttaaaactgttttttgcgcttcgtaatcgtctctgcttcgcttctccgctccgcctgtcgccaccaccaccaactcgccggagggagaactgtcccgacgaccgcgcggagagctgtgggggagcgggagagggaggtagtactgggaatggaggaggagtcgaggcttagcggcgctttctcgctccatctctagggtttggttgctagtctgccccggctgggggcgtgcgcgccggcctggagctggactggaggtagcagccagcgtccggctccccgttgcaagcattaagctgcgcggctggagtaccccccctttttggccccgcctccgcgcctttcaactctggtgaaggtgctgctgttgtggcctgcgccatggaaccgtttccccagcttgcggctgcgtccacaggttgcgtgcacgcgtcgggctccggactgtgacgccgacgaggggatctcaggcgcccaactggtccggggtgaggcgcagcgcccgcaggatgccaaccgagcagaggcgctacatgcccccggcccattttcttccggcggagtcggaatcgtcctccttccctgacgagcttcgcttgcgtcctgagaggcaagttggacttttgaagcagggttgctttcctgagcatgctggcagatttgcttgttctcccctgcaaaagctcaagtgtattggcgcaacagntagtggatcagctagatattatgcagccacacaagctaatggaccagaaagtgccatttagccttgatgacaagttgtttggatgttaagctgccaccatcttcctggagagaggatcaggatccagcaaaccaactcgattcttttcccagccattggtttcacctctagaggtagagggggaagtgtaatgggcccaatatgaaagcggacttttctctagctcccttccagaattttttgacaagaaaataagattaactccaaagaacagagttgttggtcatctggttggaaaagttaaccatgctgatgatgaaccatttgagttgacaaaggaaatcgaggcccaaataattggcaacctgctccctgatgacgacgacttattgacaagtgtttgtggtgatattgggtataatac

SEQ ID NO: 182727 - DNA, 141 bp, Zea mays
  Clone ID: MRT4577_9822C.1
gtaagtagttgggtataagatctgaacttttcatctgcagaggcaagaaaaatatttgacattgtgacttgactgtggaagatgatggttgcatgtttctagtttgtatatgtttccatctttgtgataagatgatttaat

SEQ ID NO: 182728 - DNA, 528 bp, Zea mays
  unsure (1)..(528): unsure at all n locations
  Clone ID: MRT4577_98230C.1
agacaatgcactgagagcctagtgccttatagcgctcttgtgcaccgtgcttggcgagaaggtatagtggaaggacgacgattcaaaagcgaactggtgcagcgggtgcttcaagatcaccaagttgggcgcctttggcaatgtcaagacggatagcacgaaggctatgcaggaggtgtgcgcatagaactgcggcggcaccggaaagcaaaacatcctcatccccaagggcgacttcctcgtcagaccactcaactgcacaggcctatgcaggggcgacgtgactctccacgtgaatggcactctgctggcgatctccgacctaagccagttcaaggatcatggctattggatcgagattctactcatggacaaccttgacatgatcgtgaagggaaagctcgactggcacgggctaggcgtgtggaacaagaactcctgcctccagaactgcgactgcaagatccttccgcaatagctggtgatgtactctgtcgacaatggagaggtgtnaaggatcacgctgct

SEQ ID NO: 182729 - DNA, 334 bp, Zea mays
  unsure (1)..(334): unsure at all n locations
  Clone ID: MRT4577_98232C.1
gcagctgccttccaccacaagaacaccccttgcccgaagctcgccagtgcagcagcccgnccaaccaccccctccaacctcgnacattgcaacaggcagctctcacctcccattcctcaagaccgacaaggacccctccctctgctcaacatgaccaggcagctcttccgtgccgcagctgccacgcccagacccgccatggcgcacgcccgcatcctgccatcctcgccaaacganccgagcgccgntgacctcccctccaaacagactgcaccaaccttgccctatttccccaccaccccctccataaaatcaccctcgcaccacccgcgag

SEQ ID NO: 182730 - DNA, 278 bp, Zea mays
  Clone ID: MRT4577_98233C.1
cagagactcagagcgcgaccatcatggtgctggctcgtgtcgacaaggccaacgtctaggccgactggggtgacgtcagcgcgcacgtggcgagtatcgtgcgcgaagcactggagatgctgtgcctgtcatatgccagcaccaagaaagacgtcgcggacttggacctgacgcagggctcagtccatgttaagggacactggcataatgtggcctacgctatgagcagagccgtggcgcatgtggacgacatgcacatcgcgctctgcgacctgtgc

SEQ ID NO: 182731 - DNA, 357 bp, Zea mays
  Clone ID: MRT4577_98234C.1
attggaaaatgattacatattacaatcactttattttataaacacatcggtaacattacaaagaaaacttattcaaataaaataacatattaaaataataaaatttttatacgtttaaaaatacatgctaatttaaataacaacccttaatagacaaactaaagatcggatatacttatataagaatgcccagcccaccggctctaagcaccatccacaatagaacaaaataacaacctgcgataacattatgttaatgttgttaattgaccaccacttattgagcacggactcgtgctcgtacactttgtttaacccctgaattccttaccgtttcctgcaggcttaccaatttta

SEQ ID NO: 182732 - DNA, 2700 bp, Zea mays
  Clone ID: MRT4577_98235C.1
atgccccctgcaccaccacagggcatcccggctgatgaaggagaccctaacggagacagagacgacgccggtggcagtccgagccatagtacggagctctcggaggagccggagccggaggggtggatcgctagacccatcactcgtgacaccgctcgcgggtgtcacttccacgacactctcgacaccttgtatggtcgggccttcgaccgacacacttggtccattgagtaccgttgtgtagtctaccagcatcgtcgcgggttatacctggaccagtgggaggctacttgcttggtgcgtcgtccggatgatgatctccggggtgcagaggccttctcagagcactattctatcactgagagggatattgccgaggcagccatgcaagatgcagcacgatgtgcactttctcagtattgctcgttgttcagcggggtagccgacagccttgacttgaagtactaccctcgccgttcgaccggtagtgctggaggtgtgattgtctcgcctattggtgaaggcaatccaaggctgaacagcttggtcaacctagccaccgtgctcaacacagagctggaccacgcccttgatgagtcgggcaaggttcgggcggaggttgcggaattgcgtgctgagtgcgcagcacgccactatttggatggtggttctcctgccactgtcgggattcaacacccttaccgttcacagcctcgtggtcgctttgactatgttagagttaggttgcttatcatttgttggaatgcttgtcatgatgaacatatgtctgagaacatgcacagaggtgcaaggcgtgctcagccagaacagcaggcaccccaggaagatgcagctcagcagcagcagttgccaccgccaccaccgatgaccattgagcaaatgttcctgatgcagactcaagcagtacaagcaattggtcagaccttagcagcgatgcagcaggtgcagcagcagccacccccacctcagcctccagtgcaaatccagatgccacaggtgcctagagacaaacatgcagaattcatgaggggccatccccctgtctttgcccattctgttgatcccatggacgccgaagaatggctgcgctccatggaacccatcacctgggaggaattcaaggacaacttctgtcgctaccatgtgcccgagggactgatgataatgaggaaggaggagtttctcgccttgaagcaaggtcccctgtctgtcagtgagtacagggacaagtttctgcagctgtcacgttatgccccagaagatgtcaatacggatgccaagaggcagtaccgcttcctgagaggattggttgatcccctccactaccagctgatgaaccacaccttccctaccttccaccatttgatcgatagggctattatgactgaaaggaagcgtcgggagatggaggacaggaaacacaagattggtggatctcaggtcaggagtagcagccatccccgctactcaggcaactcacctcaaccattcaagcaagatgtcatcctagggatgaactggctaaccaaatatcaagccagtcttagctgtgacaagagaacggtgaagttagtgtccttatcaggagaagaagtgttagtggagttaatcttgtctggaccaaggaaaggaagctgtcaccaagtcaccatccatattgaggagattaaaccatcagaggctatcaatgtagtatcagaattcccagatgtgtttcccgaggagttaccaaagcctataccaggcaccgcccctatttccaagagagcctatcgattgtccggaccagaattagtggaactcaagaagcagattgatgagttgttagagaaaggctacatcagaccaagtacctcaccttgggcagccccaatgctatttgtggaaaagaaggatggcacaaagaggatgtgcattgactacagatccttgaatgaagttactatcaagaataagtaccccctgcccagaattgaagacctattcgatcagttgagaggagccagtgtgttctcgaagatagatttgaggtcaggttaccatcagctcagaagccgaccttcggatataccgaagacaacctttatcaccaagtatgggcggtatgagttcatgttcatgtcatttggtttgacaaatgcgctagcttatttcatgtacctgatgaacagtgtgttcatggactacctcgacaagttcgtagtggaagggagagtggtggcatactcgtcccgccagttgaagattcatgagaagaattatcctactcatgatctggagctagcagcagtggttcatgcattgaagacctggaggcattatttgtatggacagaagtgtgatatctacacggaccacaagagtctcaaatatatattcactcagtcagagctaaacatgagacagcgaagatggctagagctgatcaaagactatgagctggagattcattatcacccaggcaaagcaaatgtggttgcagatgctcttagcagaaagagtcaagttaatatgttgcccgctcacccgatgtcgtatgagctagtgaaggaattcgatagattgagtctcggatttctgaacaacacccaaggggtgacaattgagttggaacccactctagagcaagacatcaggaagggtcagaggtatgatgagaagatcaacgagatccgatag

SEQ ID NO: 182733 - DNA, 2265 bp, Zea mays
  Clone ID: MRT4577_98236C.1
atgccccctgcaccacctcagggcatcccggctgctggaggagaccctgacggagacggagccgacgacgccggtggcagttcgagccacgacacggagctttcggaggagccagagccggaaggatggatcgctagacccatcactctctaccagcatcgtcgcgggctatacccggaccagtgggaggctatttccttggtgcgccgtccggacgatgatctccggggtgcagaggccttctcagagcactattctatcactgagagggatactgctgaggcagccatgcaagatgcagcacgacgggcactttctcagtattgctcgttgttcagcggggtagctgatggccttgacctgaagtactaccctcgccgttcgaccggtagtgctggaggtgtgattgtctcgcctgttggtgagggcaatccaaagatgaacaacatggtcaacttggtcgctatgctcaacacagagttggaccacgcccttgatgagttgggcaagatgtctgagaacaggcgtagaggtgcaaggcgtgctcagcctgaacagcaggcaccccaagaggaagtagccccatggcagcatttgccaccgccaccaccaatgaccattgagcagatgttcttgatgcagacccaagcaattcagacaattggccagacattaacagcgatgcagcaagctcagcggcaaccatcaccgcctcagcctccagtgcaagtccagatgcctcaagtgcctagagacaagcgagccgaattcatgaggggccatgccccagtctttgcccactctgctgatcccatggacgctgaagattggctacgtactgtggagcatgagttgcacactgcccaatgcaacgatcgtgaggaacatttgatcgacagagcaatcatgactgaaaggaagcgtcgggagatggaggacagaaaacgcaagattggtggacctctggttgggagtagaagctgtccttgctactcaggcaacccacctcagcaattcaagaaaggccattgggcgaatcattgcccaaagaaagcagatcagcagcagccagctcccaatgcctcagtcaggcagaatgcaatgcagcaaggaggcaacaaccgtgggcaacctcgtgcccagtatggaaaggtgaaccacttggaggccgacacagtccaggagactcgaggagtggcattacgtacgttttcagtcgagtaccattttttaaatgtcttatttgatactggggcaacacattcttttgtgactgcatcatgggtagaatcacataatataccagtagcacccatgtatccacctattagagttagttcagttggtggaaggacccaaactaatagattttgccctagtgcaaaggttcaaataagggggatagagttccccgccgatttgatagttatgagtaaccaggatacaactatagacgtcatcctagggatgaattggttaaccaagtatcaagccagccttagttgtgataagagaacggtgaagttagtatccctatcaggagaagaagtgttagtagagttggtcttgtcaggaccaaggaaatggagttgtcaccaagtcaccgcccatattgaagagattaaaccatcagaggctatcagtgtagtatcagatttcccagatgtgtttcccgaggagttaccagacctattcgatcagttgagaagagccagtgtgttctcaaagatagatctgaggtcaggttaccatcagctcagaatccgaccctcagacataccgaagacagcattcatcaccaagtatggactatatgagttcacggttatgtcattcagtttgacgaatgcgctagccaacttcatgtacttgatgaacagtgtgttcatggactacctcgacaagttcgtggtggtgttcattgatgacattcttatatattcccagaatgagaaagaacatgaggagcatttgaggaaagtacttcaaaggctacgagattgtcagctgtatgccaagcttagcaagtgcgagttctggatcagtgaagtcctattcctgggtcacattataaaccaagaaggattagctgtagatccgaagaaggtaacaactatcttggactggaaagcaccaaaagatgttcgaggaatcaagagtttcatcagaatggccggttattatcagcgtttcattgaaggtttctccaagattgccaggcccatgacagctgttggggacttgttctcaaatgctaagaattaa

SEQ ID NO: 182734 - DNA, 1284 bp, Zea mays
  Clone ID: MRT4577_98237C.1
atggacgctgaagattggctgcgtaccgtggagcgtgagttgcacactgcccagtgcaacgatcgtgagaaggtgttgtacggtccccgacagctcaggggaacagtccagtcttcttgggagtcttacctcgccacccatgccaaccctgaatccatcacttgggaagaattcagggacaacttccgtcgctaccatgtgcccgagggactgatgatagtgaggaaggaggagtttctcgccttgaagcaaggtcccctgtccgtcagcgagtacagggacaagtttctgcagctgtcgcgttatgtcccagaagatgtcaacacatccaagaggcagcaatccacttcagccattcaagcaaggtcaccagcaccagcaccagcatcagcatcaaaaccagcaacagcagtgccaaaggcagtttcctcagtagcagcagcagtaccgttagaacaacaagcaaggaggaaatcaatatcagcgtcagggcaatcaggcagcccgtcttcttgccccagcaaccaatcagaacaaccaagcagcgccagcgcaaggaggaagtcgtgcatgtttccactgtggggaacaaggccattgggcaaatcattgcccaaagaaagtagctcagaagcagccagctcccaatgccccagtcagacagaatgcaatgcagcaaggaggcaacaaccgtgggcaacctcgtgcccagtatggaaaggtgaaccacttggagtccgacacagtccagaagactccaggagtggcactaggagaagaagtgttatggagttggtcttgtctggaccaaggaaaggaagttgtcaccaagtcaccgcccatattgaggagattaaaccatcagaagctatcaatgtagtatcagaattcccagatgtgtttcccgaggagttactgggtatgccacctgaaaggaaggttgaatttgccatagagcttataccaggcaccacccctatttccaagagagactatcgagtgtccggaccagagttggtggaactcaagaagcagattgatgagttgtcggagaagggctacatcagaccgagtacctcgccttgggcagccccagtgctatttgtggagaaggatggaacaaagaggatgtgcattgactacagatctttgaatgaagtcactatcaagaacaagtaccccctgcccagaattgaagacttattcgatcagttgagaggagccagtctgttctcgaaaatagagaccagggccatggtgggtgcaccagggttctcgatctag

SEQ ID NO: 182735 - DNA, 2217 bp, Zea mays
  Clone ID: MRT4577_98238C.1
atgaccattgagcaaatgttcctgatgcagacccaagtagtccaggcaattggtcagaccctagcagctatgcagcaggtgcaacagcagccaccaccgcctcagcctcaggtgcaagtccagatgcctcaagtgcctagagacaagcgggcagaattcatgaggggccatcccccagtctttgcccattctgctgatcccatggatgccgaagattggctgcatatcgtggagcgggagttgcacactgcccagtgcaacgatcatgagaaggtgttgtacgaagatgtcaacacagatgctaagaggcagtaccgctttctgagaggattggttgatcccctccactaccagcttatgaaccacactttccccaccttccagcatttgatcgacagagcaattatgacagaaaggaagcgtcgggagatggagaataggaaacacaagattggtggatctcaggtcgggagtagcagccgtcctcgctactcaggcaacccacctcagccattcaagcaagcgttagagcaaccaggcatcccgtcttcctaccccagcaaccaaccagaacaaccaaccagcgcaaggaggaagtcgtgcgtgtttccactatggggaacaaggccattgggcgaatcattgcccaaagaaggcagctcggcagcagccaactcccaatgccccagtcagacaaaatacaatgcagccagaagacaacaaccatgggcagccttgtgcccagtatggaaaggtgaaccacttggaggccgacacagtcttggagactccaggactggcactagcaacacattcttttgtgactgcatcatgtatccaacacccatgtatccacctatgagggttagttcagttggtggaagaacccaaacagatagattttgccctagtgcaagagttcaaataagggggatagagttccccgctgatttaatagttatgggtaaccaggatacaactatagatgtcatccaagggacgaattggctgaccaagtatcaagccagtcttagctgtgacaagagaacggtgaagttagtgtccctatcaggagaagaagtgttagtagagttggtcttgtctggaccaaggaaaggaagttgtcaccaagtcaccacccatattgaggagattaaaccatcagaggctatcaatgtagtatcagaattcccagatgtgtttcctgaggagttaccagagcttatgccagacactgcccctatttccaagagagcctatcgagtgtccggaccagagttggtggaactcaagaagcagattgatgagttgtcggagaaaggctacatcagaccgagtacctcgccttgggcagctccagtgctgtttgtggagaagaaggatggcacgaagaggatgtgcatcgattaccgagctctgaatgaagttactatcaagaacaagtaccccctgcctagaattgaagatttattcgatcagttgagaggagccagtgtgttatcaaagatagatctaaggtcaggttaccatcagctcagaatccgaccttcatatataccaaaggcagcattcatcaccaagtatggaatgtatgagttcacagtcatgtcgttcggtttgatgaatgcgccaacttacttcatgtacttgatgaacagtgtgttcatggactacctcgacaagtttgtggtgattgagcaagagcatgaggagcatttgaggaaggaagggagagtagtggcatactcgtcccgccaattgaagattcatgagaagaattatcctactcatgatctggaattagcagccgtggttcatgcattgaagacctggagacattatctttatgggcagaagtgtgatatctacacggatcataagagtctcaaatatatattcacccagtcagagctaaacatgacacaacgaagatggctagaattgatcaaggattatgagctggagatccattatcacccaggcaaagcaaacgtggttgcagatgctcttagcaaaaagagtcaagttaatatgttggccgcttacccgatgccgtatgagctagcaaaggaattcgacagattgagtcttggatttctgaacaacatgaaagggaaatgtgcccttgggccatttctaagtattttggtgattgagtgtcaacacaagtgtttaactgtgaatcaacgcccatggatgaacaaagtgcaaatctag

SEQ ID NO: 182736 - DNA, 989 bp, Zea mays
  unsure (1)..(989): unsure at all n locations
  Clone ID: MRT4577_98239C.1
gatccaggaacggaatcaaacaagccaagccaaattcagagacagtcggtgcacttggtcatggcatctgggaaccacatattcacatcaaggacagctaatattttgaccaaaatctcaaggtacctgaacactgaagtagcatacgctctccaaagccaaattatgtgcgctatctacgaaacaaaacaaaaaagagtggcctgctgcagctttaccaccgtgaggcgacgaaccagaggttgaaggtggcagaggcggccatgaggagccaggacaagaacgccatcatggcagacagctggtacctcccgcagaacgtcggggagctgtgggatccatggagctggaggaggaggtcgatcaccgcggcgctcgagcaggcgccggcgaacgagactatcgacagggccacgacgatgaccatgacgcccggcacgcgcagagggcatcccacgaacacggagtacacgtcgatcatggccagcgtgcagctccaggggatgaccagccccatgatcgtcaccaggaagcagaaggcggtgtagctgaagaactcgacaccgaccgacatgaacagcagcgacgccgacgagaagaccgcctgcccgacgcggagaccgaggctgccggcgctgccgacggcgcccgcgccagcgcccgacctgtccccgttatccatccacggagtccacgcgccgccggacgatcatgccattcccatacgcgcgcgcacggcacacccgacccgactcacccctcgcctcctccccggggcggcgcgtttctcgctagcttttcacctcagctcgtggagtcgtggtgcagtgcagtgcagccgggatgttggaaggaatctggcgggcgggaacaaaagcaggggacgggatcgaaagcccgggggctttgcgatggatggagacggggcaccgctaccgcacctgcagactgcagggacgacgggatgattctttcttttnccgcgaaat

SEQ ID NO: 182737 - DNA, 196 bp, Zea mays
  Clone ID: MRT4577_9823C.1
ggccatgtcgaacgcccaggcgtagcacaaggtcaacctgcccaccgctggcttccacagccacacggtgtacccatccatcctcgtcggcaacggctgcggcggctgcaaggtaggtagcggtgctgatggccatgacacgaacggtctgctgcccacctatgacgtgcacatctacaaggctgctgcttaacca

SEQ ID NO: 182738 - DNA, 259 bp, Zea mays
  Clone ID: MRT4577_98240C.1
aatctgtgctgcccagaaatgattaataaaactgacacgtatgccagtattttgtaccattcagcattcaccgatgagatgacccaaggctaagctcaaagcccagactgttattcggaatcaacctatcactcaagactctagatacaaaaaggaccagagatatagcgggtggaagcttttttgttcgggtattgtcacgatttatagacggataaagtaaaatatttatagagtatatgtgtacgtgtaattgtgt

SEQ ID NO: 182739 - DNA, 1553 bp, Zea mays
  Clone ID: MRT4577_98241C.1
ctatcgggacgagtatgccactactctcccttcctgcattaacacacatcccagtccggtgtacgaagcatcacaatatactgagaatggcttgtgaacatctggcagaatcaatactggtgtcattgtcaacttctccttcaatgtcttaaaggacttttggcatgctggggtccacttgaactcaaccttctttgccaacaatgttgccattggcctggcaatcttggagaaaccttcaatgaaacgccgataataaccggccattccgatgaaactcttgattccttggacatcttttggtgctttccagtccaagatagctattaccttctttggatctatagccaatccttcacggtttataatgtgacccaagaatatgacttcgctgatccagaactcgcacttgctaagcttcctcaaatgctcctcatgctcttgctcatttgggtcctctccactgatcgaataaatcttcaattttgggcaggggtacttgttcttgatggtaacctcattcaaagatctgtaatcgatgcacatcctcttcatgccatccttcttttccacaaatagcactggggctgcccaaggcgaggtactcggtctgatgtagcctttctccgacaactcatcaatctgcttcttgagttccaccaactctggtccggacactcgataggctctcttcgaaataggggcggtgcctggtataagctctatggcaaattcaaccttcctttcaggtggcatacctggtaactcctcgggaaacacatctgggaattctgacactacattgatagcctctgatggtttgatctcctcaatatgggcggtgacttggtgacagcttccttctcttggtccagacaagaccaactccactaacacttcctctcctaatagggacactaacttcattgttctcttatcatagctaagactggcttgatacttggttaaccaattcatccctaggatgacatctatagttgtatcctgattacccataactatcaaatcggcggggaactctatccctcttatttgaacctttgcactagggcaaaatctattagtttgggtccttccaccaactgaactaactctcataggtggatacatgggtgctaccgatatattatgtgattctacccatgatgcagtcacaaaagaatgcttggctccagtatcaaataagacatttgtagaatggtagtcgactaaaaatgtacctagtgccactcctggagtctcctggactgtgtcggcctccaagtggttcacctttccatactgggcacgaggttgcccacggttgttgcctccttgctgcattgcattctgcctggctggggcgttggaagctggctgctgctgagctgctttctttgggcaatgattctcccaatggccttgctcaccacagtggaaacatgcacgacttcctccttgagctggcgctgcttgattgttctggttggttgctgggacaggaaggcgggctgcccggttgctctgacgctggtattatttcctcctgctcc

SEQ ID NO: 182740 - DNA, 559 bp, Zea mays
  unsure (1)..(559): unsure at all n locations
  Clone ID: MRT4577_98242C.1
cgggcacacccagcggggggcaacggcagccagcacaaaaggccaccaacaagggcagccaaanaaggcaacngccgcaacggcgaccgncnncccgcaaggcccgcaaccgcaaccagcnncccacaanccccccaagcncacaccggcgccgnccncgccccaaacaaagcaccagcggcaaccccacagggggcaacaggcaaccgcagcccgccaggaaccaacaggaccccgcagcaggcaacaaaccncagccacccnacaacagccaacaaccgnccgcccaaaagcagaaaacaccagggcacaacaaccacaaccaaaacagcaaggcacaacaacngcaacaacncagcaacagaaaccncgcccccncaaccaagcaacagcagngaaccccaaacaaccaacccaacaacaacaaccccccngcagccagccaacaacaacccccccccagcaagcncgcccangcaaccacccagcagcggcnngcagncaaccaacgggcagcanngaacccngcngcnnanggacaacagcaacagcnaccacc

SEQ ID NO: 182741 - DNA, 3180 bp, Zea mays
  Clone ID: MRT4577_98243C.1
atgccccctgcaccaccacaaggcatcccggctgctggaggagaccctgacggagacggagacgacgacgatgccagtggcagttcgagcaacggcatggagctctcaaaggagcctgagccggagggatggatcgctagacccatcactagtgacaccgctcgcgggtgtcactttcacgacgctctcgacaccctgctgcatcgggccttcgaccgacacacttggtccatcgagtactgttgtgtagtctaccagcatcgtcgcgggttatactcggaccagtgggaggctacttgcttggtgcgccgtccggacgatgatctctggggtgcagaagccttctcagagcactattctattactaagagggatactgtcgaggcagccatgcaagatgcagcacgacatgcactttctcagtattgctcgttgttcagcggggtagctgatggcctcgacctgaagtactaccctcgtcgttcgactggcagtgctggagagttggaccacgcccgtgacgagttgggcaagatgtatgagaataggcgcagaggtgcgaggcctcagccagaacagcaggcaccccaagaggaggcagccccgcagcagcatttgccaccgccacccccgatgaccattgagcaaatgttcctgatgcagactcaagcagtccaggcaattgatagagtaatcatgatagaaaggaagcgtcgggagatggaggacatgaaacgcaagattggtggacctcaggttgggggtagcagccatcctcgctacttaggcaacccacctcaaccattcaagcaagaatcacataatataccagtagcacccatgtatccacctatgagggttagttcagttggtggaaggacccaaacggataattttttccctagtgtaaaggttcaaataagggggatagagttccccactgatttaatagttatgggtaaccaggatacaactatagatgtcatcctagggatgaatcggttaaccaagtaccaagccagtcttagctgtgacaagagaacggtgaagttagtgtccttatcaagggaagaagtgttagtggagttgttcttgtctggaccaaggaaaggaagttgtcaccaagtcaccgcctatattgaggagattaaaccatcagaggctatcaatgtagtattagaattcccagatgtgtttcccgaggagttaccaggtatgccacctgaaaggaaggttgaatttgccatagagcttataccaggcaccgcccctatttccaagagagcctatcgagtgtccggaccagagttggtggaactcaagaatcagattgatgagttgtcagaaaaaggctacatcagaccaagtaccttgccttggacagccccagtgctatttgtggagaagaaggatggaaaaaagaggatgtgcattgactacagatctttgaatgaggttactatcaagaacaagtaccccttgcccagaattgaagatttattcgatcagttgagaggagccagtgtgttctcgaagatagatctgaggtcaggttaccatcagctcagaatccgaccttcggatataccgaagacaacattcatcaagaagtatggactgtatgagttcacagtcatgtcattcggtttgacaaatgcgccagcctacttcatgtacttaatgaacaatgtgttcatggactacctcgacaagtttgtagtagtgttcattgatgatatccttatatattcccagaatgagaaagagcatgaggagaatttaaggaaggcacagggtgcagcctgtgtgaaattacgtttatgtcctttacaatcgattacaataattacacaaaacatcatgggtcttaaagtcaattcatctttaagtcggatcttcggctacgaagcatacccccaacagctacgagattgtcagctgtatgtcaagcttagcaagtgcgagttctggatcaatgaagtcatgttcttgggtcaaattataaaccgagagggattggctgtagatctgaagaaagaagggagagtagtagcatactcgtcccgacagttgaagattcatgagaagaattatcctactcatgatctagaattagcagttgtggttcatgcattgaagacctggaggcattatctttttgggcagaagtgtgatatctacacggatcataagagtctcaaatatatattcactcagtcagagctaaacatgagacaacaaagatggctagaattgatcaaggattttgagctagagattcattatcacccaggcaaagcaaatgtggttgcagatgctcttagcagaaagagtcaagttaatatgttggccacttacccaatgtcgtatgagctagcgaaggagtttgacagatttagtctcgaatttctgaacaacacccaaggggtgacaattgagttggaacccactctagagcaagacatcaggaaaggtcagaaggatgatgagaagatcaacgagatccggcagttgatcatagatggaaaaggcaaggattttcgtgaagatgcagaaggagtggtatggttcaaggacagactgtgtgtccccgacatcaaattgatttgggaactgattctcaagaaagctcatgagacagcatactctatacaccctggtagtgagaagatgtaccaagacctaaacaaaagattctggtggtacgggatgaaaagggagatagcagaaagaagggaacttagttttgaagtgggagactatgtctatttgaaggtgtcgcccatcagaggaaccaaaaggtttggagtcaaaggcaagctagcacctctatacattgggccgtatcagattcaagcaagacgtggagaagtggcttatcaactcagcttaccagagaatctctccgctgtgcatgatgtgttccatgtatctcagttgaagaaatgcttgagagtgccagaagagcagtttccagcagagtatcttgaagttcaagaggatctgacctatattgagaagccaactcaaattctggagacagcagatcaagtcacccggagaagtaccatcaggatgtgcaaagtcaaatggggtcaccactcagaagaagaagcaacctgggaaagagaagacaatttgaaagccaagtaccctgagctcttttctagccagccctaa

SEQ ID NO: 182742 - DNA, 858 bp, Zea mays
  unsure (1)..(858): unsure at all n locations
  Clone ID: MRT4577_98244C.1
aaccggtagccacacacaagacacaactactgtgttgacctactccagtccccagctatcttgcgtagcggcattctcgatcgagctcgtacactcctaaccatcgacatcacgcatcctactcgctctagcggccagagcgtcagagccaggggcggcagcagcgcgcgcggcgcacgacgacgacaggttcgttcgcggcatggtgaagggcgcagnnctccaggacgcggcggccgacgccgccgccgcgccccactactactcctactcctcctccgccgcctccacgatggccgccgacggcgccacccctccgtgcagctacggcgacgcgtcgtcgggcgtgagctccccggagacggccgggaacactgacgacctgtgctacggcgtggcgcacgacgacgacgtggacatggtggcgggcgacgcggacctcgccgcgctcgcggacatcgagtccttcttccggtcgcccaagtgcatggagtacgctatgatggacccatgcagcacgttcttcgcgccagcgcccatggcgacggacgcggccagcgagtgggagtgggggaggaaggccagatcgacctctggagcttctcgtccctcaactgaccggtccatcatcagctcctccccaccagacatcagttcggaggtcaagccggcctcaagcggtcaccattcgtcccaactcaacgctgactgattaattacaactgcaacctacgtgatcaagaattggtcacggtataaataagcatcatatataaatatgctattaaggattatttgattcatactactagttaattattgtactatatactactagtgctaggctaattatgcgat

SEQ ID NO: 182743 - DNA, 192 bp, Zea mays
  Clone ID: MRT4577_98245C.1
tgtatacctgtggacgaacaaccctagtacgagtctagggatgctcagaggggccgtgtgtgctgtcctactgctaaactcccacgtgtgcttatggagggcatggaaaggactgtctagacctaccgtggtagcctcatgcactggattttcattcctcagacattggatagcctcatgttacttcatgac

SEQ ID NO: 182744 - DNA, 342 bp, Zea mays
  Clone ID: MRT4577_98246C.1
tccacgcgtacgtgctggtgcaagggatcttgccaagatacgagctgagagcatagatcggatcattcatccgtaatgccgaacatccagcagtgcttggatgccggcaagggtgaggcccagggcgagtaccaggcggagcacgcggagcacagcgtcaaggacaccgccgaaagcgcggacgtcagtgcgcacctgcagaaggaccgccccaccgacaccgctgagcaggtggagcacacggtccaaggcgtgaaggacagcgtcaaggacacggtggctggcgctgcgaacaccgtcacgaacacggtggcgggcgttacggacaccgtcacgaaacca

SEQ ID NO: 182745 - DNA, 288 bp, Zea mays
  Clone ID: MRT4577_98247C.1
gatacttccctgctattcctatatcctatgcttcatcactccacttaaaataccactctagaggaagctcatcaatgtcggcttcattggatcataaaacatcctttatcacttggatgcatgctgccatgaccccgatggacccatactctgcatcaatatacttttgctacattgaacacaatcacactatgaactaatacatccatgcaccactctgatatgataccttaacaagactcaagcccactgactaacatacttatcgacctcatcgagaaccgccat

SEQ ID NO: 182746 - DNA, 102 bp, Zea mays
  Clone ID: MRT4577_98248C.1
cacgaatcgcatgtggcgcaagactcggtcgcacacaggatgctccctgtgtattggcgtggaccccaagaggtactgggacgctgactttgggttgtccgg

SEQ ID NO: 182747 - DNA, 306 bp, Zea mays
  Clone ID: MRT4577_98249C.1
ctccaaaacccgaaaccctcggtcaatatagccgttatccgaagttgggcacccgaggcaagctctagggagccaccgtaaaaccatacccaaaatgtcgacagcctcttccatgctcaccgccggggacaatacacgccccttcccagcccctctcctgcttgacgtcgccaccatctgctccttcgatacaaagggcctaacggcagtggcactcttcatgcgcgcggaggccgcatctcccaagtcccctgccgcggtggaggcgactcctacgaagatcagggggaccggtatcacccatcc

SEQ ID NO: 182748 - DNA, 501 bp, Zea mays
  Clone ID: MRT4577_9824C.1
agcagtggtaacagagggagaggagcggttttttttttttttttttttttttttttgctttttttttttttttttttttttttttttttttccaacaggaaacactacatagttcgtctctgaaaactgggaacccattcacagctaccctggggcatccttttactcggggggggggggggggcaaaaaaaaaaaaacaaataacccgaaaaaaggagtagctcccataaacctaaacattaactcccttaaaaaaacggaggctgaaacccaggggaataaactaattggacttataaatcgccccggccgggcggcagcattttgagcccctggaggaaggggttcttgaggcggcccaggggcggccgcacgttctgcttgcccaggtccggggtcttgagcgcgttccacccctgcttgggggtggccatggggcccctcaccaccgggggacccttcgggtcctgctcgctcagcgtcggctcgcccggctgccc

SEQ ID NO: 182749 - DNA, 360 bp, Zea mays
  Clone ID: MRT4577_98250C.1
cctcctgctttccacgacttccgagcgctctgattgtggcgcgcgcggcagcatggcgactgcgaacggcaacaggaaggggtctttcgaggtgcccaaggtggacgtcaggttcaccaagctcttcatcgacggcaagttcagtcaacaccgactccggcaagacgtgcgagacccgggaccctcgcaccggctaggtgatcgccatcatcgcggagggaggcaaggccgacgtcgacctcatcgtcaaggccgtccgggaggccttcgacaactgtccctggcccaggatgaccggatacaagcgttgtccgatcctccacaggttcgcagacctgatcgactagcacttgggggagc

SEQ ID NO: 182750 - DNA, 5022 bp, Zea mays
  Clone ID: MRT4577_98251C.1
atggatcctaaggaaaaggggatggtggtcaacgacaatgagaaggagtccatcttcaacgagccgaaggacgacaaggccaatgactccggctcgagtcaaaagaagaaggatggaaagaagaagaggtgcatcaagaagattgtctactacgacagcgacgaatcttcctcttctcaaaaggacgacgaatacgaggagaaaaataaaacggttaactcgaacttttctttcgattattctcgtattccgcataattccaatgctcatatgctttccattccacttggtaaacctccacactttgatggagaggactacggattttggagtcacaaaatgcgtagccacttgttctctcttcatccaagtatgtgggagatagtagaaaatggaatgcaatttgatagttcggataactccatgtttatcaatgaacaaatccataaaaatgcacaagctactactgttcttttagcatccttgtgcagggaagagtacaataaggtgagcggcttggataacgccaagcagatctgggacaccctcaagatctcgcatgaggggaacaacgccaccatgctcaccaagatggaattggtggaaggcgaactaggaaggttcgcaatgatcaggggagaggagccaactcaaacgtacaataggctcaagaccctggtcaacaagataaggagctatgggagcacgagatggacggaccacgacgtcatccgacttatgctaaggtccttcactgtccttgatcctcatcttgtaaactctattcgtgagaatcctaggtacatcaagatgacgcccgaagaaatactcggaaagtttgtaagcgggcgaatgatgatcaaggaggcaagatatgttgatgaggcgttgaatggcccaatgcccatctacgagcctcaaaaggttgctctcaaagcaacaagtagcagggagacgctacctagcaaggtggcgcaagttgaggtggccgggctaaatgaggatgaaatggccctcatcatcaagcgcttcaagacggcgctcaaaggtcgcaaggagcatcccaacaagagcaagacgaagggaaagcgctcctgcttcaagtgtggtaagattggtcactttattgctaactgtcccgacaatgatagtgaccaggaacaaggaaagaatgggaagagagagaacaagaaggtttacaagaaggctaagggcgaggcacaccttggcaaagagtgggactcgccgcctcggccttcaacaaatcgtctctcttcccaaacgagcatcacacctgcctcatggcaaaggagaaaaaggtgtaagaattttaatgttgatgcttgtagtgaacacttaatttccatttcaaaattaaatgatgaagtggctagtctaaatgcccaacttaagactagcaaggatgactttgataaactgaaatttgcaagggatgcctacactattggtagacacccctcaattaaagatgggcttggctttaagagggaagccaagaacttaacaagtcaaggggctcccattttcaacaaggaaaaagggaaggctcctatgactagtaatagtcaaaataattatgcatttatttataatagaaaattttctagaaatgcttatcataataggagttgtaatgcctatgattcaaatgccatgattgcttcgagttcttcctttgtgcatggtagagatatgcctaagaaaaatgttattcatcatatgcctaggagaaatgttgttcatgtacctaggatagcaagtaattgtaatacccaaattgtcagggccgtcaacaaccttccgttcgaggcgcggctcatgcggtcctgctcgaatcctcctccgcgaagtgcgccgatgaccgaaaccaaccaggggattaaaaccccaatcgaccccgccgcaaccctggaacccccttcatcgaagcctgggcgagtttctgggtgcccaattgggatttctggcacttcgcgggagataaggtgtatggggtctgatcaactccgtggcaaatgggtaacacgacttgtgggtaaagatgcgcaacctctgcagagtgtaaaactggtttatgcatccgggggctcaagctggattatcgacagcggatgcacaaaccacatgacaggggagaagaagatgttcacctcctacgtcaagaacaaagattcccaagattcaatcatattcggtgacgggaatcaaggcaaggttaaaggactaggaaaaatagctatttcatccgagcattccatctctaatgtgtttttagttgaatcgctcgggtataacttgttgtccgttagtcaattatgtaatatgggttacaattgcttatttacaaatgtagatgtgtctgtctttagaaggagtgatggttcattagcttttaagggtgtactagacaacaaactttatttagttgattttgcaaaggaagaggccggtctagatgcatgcttaattgctaagactagcatgggctggctgtggcatcgtcgtctagcacatgtggggatgaagaaccttcacaaacttctaaagggagaacatgtattgggtctaacaaatgtaactttcgaaaaagatagaccttgtgcagcttgtcaagcaggtaaacaagtgggaagcgctcatcacaacaagaatgtgatgaccacatcaagacctctggagctacttcatatggatctcttcggacctgtcgcctacctcagcatagggggaagtaagtatggtcttgttatagttgatgatttttcccgcttcacttgggtattctttttgcaggataaatctgaaatccaagggaccctcaagcgcttcctaaggagagctcaaaatggatttgagctcaaggtgaagaagataaggagcgacagcggagaggaagaacaggacgctcatcgacatggcgaggacgatgcttggagaattcaagacgcccgagcggttttggtcgaaagctgtgaacacgcttgccacgccataaaccgggtctaccttcatcgcctcctcaagaagacgtcatacgaactcctaaccggtaacaaacccaacgtttcatattttcgtgtatttgggagtaaatgctacattctagtgaagaaaggtaggaattccaaatttgctcccaaagttgtagaagggtttttgttaggttatgactcaaatacaaaggcgtatagagtcttcaacaaatcatcgggtttggttgaagtctctagcgacgttgtatttgatgagactaatggctctccaagagagcaagttgatcttgatgatgtagatgaagaagatgttccaacgaccgcaatacgcaccatggcgattggagatgtgcgaccacaggaacaaaaggagcaagatcaaccttcttcctcaacaatggtgcatcccccaacccaagacgatgaacaggttcatcaagaagaggcgtgtgatcaagggggagcacaagatgatcatgttatggaggaagaagcaccacaggcccctccaactcaagtccgagcgacgattcaaaggaatcatcccgccaaccaaattttgggtgatataagcaagggagtaactactcgctctagattagctaatttttgtgagcattactcttttgtctcttctattgagcctttcaaggtagaagaggccttgctagatccggactgggtgttggccatgcaggaagaacttaataacttcaagcgaaatgaagtttggacactggtgccacatcccaagcaaaacgttgtgggaaccaagtgggtgttccgcaacaaacaggatgagcacggggtggtgacaaggaacaaggctagacttgtggcaaaaggttatgcccaagtcgcaggtttggactttgaggagacttttgctcctgtggctaggctagagtctattcgtattttgttagcctatgccgctcaccattctttcaggttgtttcaaatggatgtgaagagcgctttcctcaacgggccaatcaaggaggaggtgtacgtagagcaaccccctggctttgcggatgaacggtaccccgaccacgtgtgtaagctctctaaggcgctctatggacttaatcaagccccaagagcatggtatgaatgccttagagactttctaattgctaatgctttcaaggttgggaaagccgatccaactttattcactaagacttgtgatggtgacttatttgtgtgccaaatttatgtcgatgacataatatttggttctactaaccaaaagtcttgtgaagagtttagcagggtgatgactcaaaaatttgagatgtcgatgatgggcgagttgaactacttccttgggttccaagtgaagcaactcaaggacggcacattcatctctcaaacgaagtacacacaagacttgataaagcgatttgggatgaaggacgccaagcccgcaaagactccaatgggaaccgacagacatgtcgacctcaataaaggagttgctacgccttgcttcgggatctggtatccaaaggggtcaacctttgacttaattggatactcagactccgattatgctggatgcaaggttgataggaagagtacatcagggacgtgccaattcttaggaaggtccctggtgtcttggagttctaagaaacaaacttccgttgccctatccaccgctgaggccgagtatgttgccgcaggacagtgttgcgcgcaactactttggatgaggcaaaccctcagggactttggctacaatctgagcaaagtcccactcctatgtgataatgagagtgctatccgcatgacggataatcctgttgaacacagccgcacaaagcacatagacattcggcatcactttttgagagaccatcagcaaaagggagatatcgaagtgttttatgttagcaccgaaaaccagctagccgatatctttaccaagcctctagatgagtcaaccttttgcaggctgcgtagtgagctaaatgtcttagattcgcgtaacttggattga

SEQ ID NO: 182751 - DNA, 1839 bp, Zea mays
  Clone ID: MRT4577_98252C.1
atggcgattggagatgtgaggccacaggaacaaaaggagcaagatcaaccttcttcctcaacaatggtgcatcccccaactcaagacgatgaacaggttcatcaagaggaggcgtgtgatcaagggggagcacaagatgatcatgaaatggaggaagaagcacaaccgacacctccaacccaagttcgagcgacgattcaaagggatcatcccgtggaccagattttgggtgatattagcaagggagtaactactcgctctagattagtaaatttttgtgagcactactcttttgtctcttctattgagcctttcagggtagaagaggccttgctagatccggactgggtgttggccatggaggaagagctaaataatttcaagagaaatgaagtttggacactggtgcctcgtcccaagcaaaatgttgtgggaaccaagtgggtgttccacaacaaacaaaacaagcacggggtggtgacaaggaacaaggctcgacttgtggcaaaaggttatgcccaagtcgcaggtttggactttgaggagacttttgctcctgtggctaggctagagtccattcgtattttgctagcatatgccgctcaccattctttcaggttgttccaaatggatgtgaagagcgctttcctcaacgggccaatcaaggaggaggtgtacgtggagcaaccccctggctttgaggatgaacggtaccccgaccacgtgtgtaagctctctaaggcgctctatggacttaagcaagccccaagagcatggtatgaatgccttagagactttttaattgctaatgctttcaaggttgggaaagccgatccaactcttttcactaagacatgtgctggtgacttatttgtgtgccaaatttatgtcgatgacataatatttggctctactaaccaaaagtcttgtgaagagtttagcagggtgatgacgcagaaattcgagatgtcgatgatgggcgagttgaactacttccttgggttccaagtgaagcaactcaaggacggcaccttcatctctcaaacgaagtatacgcaagacttgctcaagaggtttgggatgaaggacgccaagcccgcaaagactccgatgggaactgtcggacacatcgacctcaataaaggaggtaagtccgttgatcaaaaggcataccagtctatgatagggtctttactttatttatgtgctagtagaccggatattatgcttagcgtatgcatgtgtgctagatttcaatccgatccaagggagtgtcacttagtggctgtgaagcgaattcttagatatttagtcgctatgccttgcttcgggatctggtatccaaaggggtctacctttgacttgattggatattcagactccgactatgctggatgtaaggtcgataggaagagtacatcggggacgtgccaattcttaggaaggtccctggtgtcgtggagttctaagaaacaaacttccgttgccctatccaccactgaggccgagtacgttgccgcaggacagtgttgcgcgcaactactttggatgaggcaaacactccgggactttggctacaatctgagcaaagtcccactcctatgtgataatgagagtgctatccgcatggcggataatcctgttgaatacagccgcacaaagcacattgacatccgacaccactttttgagagaccaccagcaaaagggagatatcgaagtgttttatgttagcaccgagaaccagcaagccgatatctttaccaagcctctagacgagtcgaccttttgtaggctgcgtagtgagctaaatgtcttagattcgcgaaacttggattga

SEQ ID NO: 182752 - DNA, 311 bp, Zea mays
  Clone ID: MRT4577_98253C.1
aaaaccgaaccaaaatcccgttttttttaaaacgggggccccgatttttttgttccccaacaaagggttttaacggggttcccccggggcgccccccattattggggccgggcctgggccacccagccccttgaggaaacccccgagtctgcccccacccgttttgtccccccctttttttttgggggcggggcccccttttccagggggggggttcttttccttgccgggggagcctcccatgggggcccccgccccctggtacattttgggaataatggggttgcaaaggttttccaggtttttttttt

SEQ ID NO: 182753 - DNA, 361 bp, Zea mays
  Clone ID: MRT4577_98254C.1
gcaacatctaaagtccaatccattaactacagcagaacaacaatggcgaccaggatcgtttcccttgatatgctacgcgctcttcctacatgtgttgctaacgcgacagattatcgtcaatgctcacaagctcctatagcgtcccttctttacctatactatttcatcaattatagctgcagtatgtgaacacccagcatcttcaaccatatacgcattaacaagcaatcacactaggcaacataccatgatcgtcctagaagtttcaacaatcaccagccctatctctggagcagtcactggtacaaaccatcatagtacagcagctgtagcaactcgtgctaactgagatcaaccaagt

SEQ ID NO: 182754 - DNA, 284 bp, Zea mays
  Clone ID: MRT4577_98255C.1
acgcgtgcaagtaggattttgatgaacacgacctgcttgtgtggtgctggatcgtactctgtgggtgaaggtgcttgacacgctggaaggcgagtgaaagcatgattctctgatcacgagacatgttgagaatagataaacacggacaacagctctgtacatggcagttggcaagctattgttacttgctaatcggttggtacctgaaatgatctctaagttggtctgttatcaaggcctgtacaccggatagagttgaagacgcaggatctaatagccaatga

SEQ ID NO: 182755 - DNA, 211 bp, Zea mays
  Clone ID: MRT4577_98256C.1
gagagaaatagcctaggctagattattacagacattgaggaaagcctatcaaaattccgagggccccttaaaagacaagagcaacattagaagcttagaatcagttaagggtctgcggggatttatcatctcttttgaccattgttcggcgggtttggcgggtggctgtgattccctgtctaaatacctgaacgtgctctaggggttgagg

SEQ ID NO: 182756 - DNA, 980 bp, Zea mays
  unsure (1)..(980): unsure at all n locations
  Clone ID: MRT4577_98257C.1
ctgacgacnaancggaggaggacgaggaggagaagcagaccaaggaccttgctggtgggggctttgggaaggatgaggagctggatgagaacgagaagttcttgaaggaattttttcttaagaggccgtaccttgagacagagaagagtaagtcctatctagataatatccaggaattgtcagatgaagaggagctcgagattcaggaagagtatgagcatgcttataattaccggcatgaggaggccatggcatcaggggcagtggtggcggatcgggtgttgggacattccagggttgttgaaggttcggtgaggaagaaggagagcagcagaaagcagcagcgcaagagcaaagaggagcggatggcccgtgttaagcaagagcaggcagaggagctgaagcatctcaagaatttgaagaagaaagagattgcagagaagcttgagaggatccgaatgattgctgggattgaaggagatgctgcttgtaagcttggtgctgatgacttggaggaggattttgatccggaggattatgacaaaaagatgcaggagatgtttgatgatagttactatgaggctgatgaggttgatcctgagtttggaagtggtgaggagatggatttggagaagccggattttggcaaagaagacgaattgcttgggcttcctaagggctgggctagtgaccattcaaaagaagagtctactgccactgatgcgaaaggtgaaaaagggaagatctctctcaaagacaaggtggagcttgagaaagagatggaagagtactacaagttagactacgaggacactattggagatatcaagactcggttcaagtataaacaagttaagcccaatagttttggtctgagtacctatgatatattggcatcagatgacaaggatttgaaccagtatgtttccgttaagaagctagctccttacagagaggatgaatggaaggttacacatcat

SEQ ID NO: 182757 - DNA, 269 bp, Zea mays
  unsure (1)..(269): unsure at all n locations
  Clone ID: MRT4577_98258C.1
ccgcgacatcactcactctgccaccgccctctctcctcgcgctcccaccgccgtggttaggatctcgccgccgagatgggctccgcccactcgtccgtctccaccgccggcggcgaagacgaagaagacgacgaggatccgtccgcggcagccgtttcctccgcgggcgcacaggcgccaccgcccgctctgtcgccgtcnccggtccgtgtagccgggggctccgcgtccaaagtgctggagcannancccnaggggggggggtgcct

SEQ ID NO: 182758 - DNA, 206 bp, Zea mays
  unsure (1)..(206): unsure at all n locations
  Clone ID: MRT4577_98259C.1
tnctgatccgcgttaccccctctcccttggtgtgcggtcccaccaccaacgcgcgtgccggttatctccgccgccgcccgctttgggaaggcgcgacgaaggcaggcgagaggctccagccggacgaggaggaaagaggagcatcatggccggaggagagatgatcctgtggtactggttctactggttgctgtccttcctatacc

SEQ ID NO: 182759 - DNA, 216 bp, Zea mays
  Clone ID: MRT4577_9825C.1
ggaaaaaaaacgttttttttttcaagtagacaaggatccaaattgcaataaatcacattctctcaaaaaaaaacaaggattttctacccgttcacagctttacactctaattaaaactaaacaacccctcttgctattcacacaacttttttccccattgcacttccccattgccattaaatgaacacaagcttctacaaatcctttttggatgat

SEQ ID NO: 182760 - DNA, 111 bp, Zea mays
  Clone ID: MRT4577_98260C.1
ggggcgcgttctcccactcttccgcttactcttattctccagcacaacctacatcggaagctcttactttttatcatcatctaccctcactaccaacaatccacatcaaat

SEQ ID NO: 182761 - DNA, 839 bp, Zea mays
  Clone ID: MRT4577_98261C.1
attgggacctcgagccggcccggccgccgtccctggagcaacgatctggacgacccgcaattcatgtgctgcgtatgtctggatcttctgtacaaaccagttgttatatcatgtggtcatatgtcatgtttctggtgtgtccacaaagctatgcatattttccgggaatcgcattgtgctgtgtgtaggcagccctatatacacttcccgagtatttgtcagctcttgcatcatttgcttctaaagcttgaaactaatgattacaaaagaagggaaaaagaagtactagaggaagagaagcgcatgcaaacatactctccccaaatcattgagttcttaaactacaagactaacgttggaagctataaggagaacagaaatgaagacagtaaagctagacctccacaagaagttccattgaatgacagcgttccagatgagcatttgaagaaaattaaattggaggatgtttcatgccctctctgtatggagatgctgtatcaacctgctgttcttaattgtggtcatggtacttcaggcagaaaaggaagcactagggcactgcatgctgaagacccgtcaaatattcacattggagtaggatgcgactcatgtggggtatatccgatacgtggtaagagatacaaatgccaggactgcactgagttaataggctttgacctttgcgaagcctgctacaactccagttcaaagctcccaggacgctttaaccagcggcacacccctaatcacagaatggaagttgacaattcagcactcgtgcataggatactgagacaccatggcataccccgaggaaggccctgaggactgatgat

SEQ ID NO: 182762 - DNA, 437 bp, Zea mays
  Clone ID: MRT4577_98262C.1
gacagggcgcagtcaagcgatgcgatgccatgcgatgcgggcggctagcacgaggtccgcggctcggggcttttggccttcttttagcgttggaatcctcgaaatcctgctgcgactgggatgcgtcgcattctctgcggcccttttgttttccgtcaccaaaaccggctgctcctgagctcgctcgttttatggtcacaattcggatccttcagcgagtatcttagcttggctcgttaatgtaattgagctcactcgctagctcgaatcaactggcatttgtcagcaaagcaatgattgcacttgtattagataaattaataagtgatgtactgtgttaatttggtgttgaatttatgtggcacacgaaattgtgagtattattatacttttttagtgttattttaatttgaaactaaatagtaattgattatagt

SEQ ID NO: 182763 - DNA, 2096 bp, Zea mays
  Clone ID: MRT4577_98263C.1
ccggccgggtatctctacctctccctctccgcacccgactcacttccacgggcgcacggaacgaggattccgtgcggatgcttcgtccggattgaacgccgcactcaagctgcgacgaatgctgattgtcagccagctccttagcatacaccctggtttcctcccggctcaaatccaagttgcccaaatgcctacaccagtgaagacgttgctgcccgtactgctcctcatctggggcggatatggccggtacctcctccgccacatcagctactgacattccctccacgatcaaccattggtcgaggccggccgggtgggcgacgcttccggctttccgtgcgaccgtgcccttttcctcctctcgcagctcgcaggcgcaacagattccacccgttccttcgggtggccggacggaacgaggaaggaggcaggatggcctccgatggccacccgccggagccggggaagaaggaggatgtcgccaccacggccgccgggcctggagcaaacgatctggacgacccgcaattcatgtgctgcgtatgtctggatcttctgtacaaaccagttgttatatcatgtggtcatatgtcatgtttctggtgtgtccacaaagctatgcatattttccgggaatcgcattgtgctgtgtgtaggcagccctatatacacttcccgagtatttgtcagctcttgcatcatttgcttctaaagcttgaaactaatgattacaaaagaagggaaaaagaagtactagaggaagagaagcgcatgcaaacatactctccccaaatcattgagttcttaaactacaagactaacgttggaagctataaggagaacagaaatgaagacagtaaagctagacctccacaagaagttccattgaatgacagcgttccagatgagcatttgaagaaaattaaattggaggatgtttcatgccctctctgtatggagatgctgtatcaacctgctgttcttaattgtggtcatgtgtattgtgtatcctgtttgtcatccttgaatgaggaaacgctgaagtgccatgtttgtggaagtcttcaccctggagatttccctaatgtttgcctggaccttgatcatttccttgaagaatattttccagcagaatatgaattgagagggcagaaagttcaatttaagaaggatcagtgcaatcgtgaaacatcatcttcaggtacttcaggcagaaaaggaagcactagggcactgcatgctgaagacccgtcaaatattcacattggagtaggatgcgactcatgtggggtatatccgatacgtggtaagagatacaaatgccaggactgcactgagttaataggctttgacctttgcgaagcctgctacaactccagttcaaagctcccaggacgctttaaccagcggcacacccctaatcacagaatggaagttgacaattcagcactcgtgcataggatactgagacaccatggcatacccgaggaaggccctgagggactgatgatggaagtggttggtcctgatgcaatggtgcagatactcattgataatcaaggaatggaggagggcaatgacgagggcccaggagaggcggccattgaagaaccagttggttctcttggctcaatgtcgcgtctgtcgcatctattcatgtataatccagaaatggaggatggcaatgacgaggactcaggagaggaggcggccattgaagaaccagttggttctcttggcgcaatggcgcctctattcatgtatgatcaagaaatggaggacaacgaggaggatcaggcacactagatgcagattgcaccagctgcagcgaagcctttgttttgtgttgctggggcggctctacttatgtaatgtggaatggagggattgcgcaagcttaaaagtatggctggatcggccttgttttttaactggttctctagttactgccatctaatagccaacatttttcccgcttttgtaaatccgtgcagttgtttgtttcaaaggaaaatgcaataaggatatgcagaactatattccttattttaaaaaaaaaaaaaaaaaaacagaagagcaagtcattttaggct

SEQ ID NO: 182764 - DNA, 297 bp, Zea mays
  Clone ID: MRT4577_98264C.1
gtgggaagacagagtcgtaccaaacctggctaccaagtcggtggtcgtcatcacggtcgaccgcacaagtgcagcaagttgggaggagacgtggaaagtggtacgtgttttgtgggtgatgtgtaggtggaggtcgggagggtgggtagggacgagccggcgcgaggtggaagagcaggtgcaggtagtgccgtcgtcgtcgtggtcgtcgccaggatgagcgtcgtcgacggcgtcgtgtggtggagcggtgccggcggccgtggtgccgccgccagcgccgtagcggcggggaac

SEQ ID NO: 182765 - DNA, 405 bp, Zea mays
  Clone ID: MRT4577_98265C.1
atggcggtgggcataggcgccgccatcgtggcgctggtcatgctcggcctcgccgccgggctcgtctactgcttcatgggaacgaagcgatggaggcggtcgccgccgccgtctgaggagttccgagcaggggtttcacctcgagtcgttacaaccgttggtggaaccacagcgggtatcgagaagtatggttcttcaaccatcggaatcgggacatacatcctctttcctgaagccttgaactatttaaacttgtctacatcttatgatctgtcccttaaaaaaagcaccctcaataggatcctggatgagactcttattatgatcaagtacattacacttggatctttttcaattgaccttatagatgctttaaggcgccatcttaaggtcatcctaaggtga

SEQ ID NO: 182766 - DNA, 1473 bp, Zea mays
  Clone ID: MRT4577_98266C.1
ccggccgggatcgtaacgttcttgtatcggaagcaaaagcagccggccgcaaaaccactcgatagaaaagcccccctcaaaacccacggcgccgccgcagccgcgttcacgaagcttggggaggcgagcaccccgatccggcgaggtgccgcgagcgaggcagcgatgagaggccgtgcgtcccatctccgcgcgctcctctcgcgagcgctctctccaagccttcctcctcctggtcgcgctctgcctcaggtcactaggcccggtgcgtctccgttcggagctggattcgtggggcgcgcgcgcttcttctccatcgacgcctcggctgcgacgcagggcgggtcgaagccccctgcgccgccgccggcgggtactgcgggcggcgagggagggggtggtggtcagtctgggaaatctgaacaagcggacgccgggaaagccgtccgcggagggccggtgtcttggctcagttttctactcctgcttgtgactggaggagggataatcgtgtactacgacaaagaaaagaagcgtcacattgaagcgtcattatgaagaattgaagaatagaacaagtgctgtgaagcctggacaatcagtaggcactgcagccattggcggtccattcaagcttttgaatcatgatggaaaacctgttactgaaaaggatttcttgggcaaatggacgctgctttattttggatttacacactgtcctgacatttgtccagatgaactccagaaaatggctgcagcgattgacaaaattaaggaaaaggcaaaactggatgttgtgccagtttttattacagttgatcctgaaagagatactgttgagcaggttcgggactatgttaaagagttccatccagatctagtaggcctcacgggcacgacagatgaagtaagacaagttgcacgtgcttatcgagtttactatatgaagacagaggaggagggttctgactaccttgttgatcactcaattgtcatgtacctgatggacccagagatgaagtttgtcaagttttatggcaagaactacgacacagattcccttgctgacggtatcgttaaagaaattaaagagcacaagtaaacagtagttggaatgccactttgcaacgtcagccttgtttctgaatttctcccgagagttttgttaaatcaagcaaaaaccaaatggcacacgagatcatgtggcaatagctgatgacatttgaatctcgcggcggcttttatttcagcagattcgggtgcacatgttgcggttttgtgcacgtttttgtcacggcaaacttctgcgttattagcttgggacgccgttcattgctgaatgtaattttatttgcatagtttcataccagttcaatatgaaacctttttccccttctgctccctctgttttttgaatatttggtttccaataaattaagaacacatcaatttgtggagtttctaaaaaaaaaa

SEQ ID NO: 182767 - DNA, 512 bp, Zea mays
  Clone ID: MRT4577_98267C.1
accggctcctaccgtcctgctccacgctcctcggttcccgtgctcgtgtcatcgaccgccggggcccactcaccagtctcccaacacgcagcgagcggcagctcctcctcgtctctcaaagtcgagccgccactcgattaagcgattccaaggcggagcggtgaggtggctatggagtacaggagggtgaaggatcaggtaaaacccgtgtctagaatagcgattgcagaagcctctaacccttagagaactttatcagattcaatgcgctcctcagatttaggtcgcggtcggctgcctcttcgatctaggaagaatctctccctttccggaactatcacccaaagttcctgcggcattgtctttacctagggttcgtacaatctatctgtactgtatctgtcgttgtttgtaagtattttgaacgcaatgacaggagctgtgcctttcaattaaaagtaggaaaggaagttttctatacaaaaaaaaaaaaaaaaaaggcccctagggcc

SEQ ID NO: 182768 - DNA, 647 bp, Zea mays
  Clone ID: MRT4577_98268C.1
gggtaccctccggggcgggcgggaccacaagcatcccacctcgcttgcgttgtgcctctccgcgggctctccctgattcgggtcccccgctcctcgcctctgtgatagtctcctctgacccacattgagccaagcgaagccgtggccgtgatcacgcccatgctcggcgcgtggtagccggattctatcatcgtcgcctcccctccgccgctatttttcagtcgccggcatcagccagactggatctagatgcataaatcaatgcgggcgcccgcccaggatacgatgcctgccgtgctcgccgcatacgctacccttcgatccgacgctgccatggcctccggagactagaccttcccctgttccgatcgcctcaagcatagctttagtagtagtaattttagtagtagtaattgtaattaaccttagcgttccctgcgccgcgcacgctcctcggctcggtgctcaccttcacatttcggttttggtctggttgtgctcgatccgaggctcactgtggatttgcggcttctctccttgtctaatcttgaagactggattcgacctgcacatcggaaggaaccatggggggcattggctccttcaagatcccacaaatatctatatcgaatttgggatcatccggg

SEQ ID NO: 182769 - DNA, 151 bp, Zea mays
  Clone ID: MRT4577_98269C.1
tcccacgcattctaccccactccttatgctctttataccaacgccaaaactaccttcctgaggtacattatatattgcgcaactccatcccctcatctttactgcccaccctcatctacatcttcaacttaccctccttctccccccagta

SEQ ID NO: 182770 - DNA, 172 bp, Zea mays
  Clone ID: MRT4577_9826C.1
acaccatcccttcttcccaacccagaagtctttttaataattatcgaggcccataaactctcaactcacttctctctctccttcatctcattaatcttcccattcactcaatctaccacacctcaatttttacatccatacactcattaaaaaactcaatctccatccatcc

SEQ ID NO: 182771 - DNA, 115 bp, Zea mays
  Clone ID: MRT4577_98270C.1
gtctcactcattccgcctttactccttcctcaccaaataaagtcccgctgtttttttacatgcagcaggggggacagcaaatcatctgccatggcctttattccagcaacttcct

SEQ ID NO: 182772 - DNA, 249 bp, Zea mays
  Clone ID: MRT4577_98271C.1
aaaaacactttttacataaataggatctcatattctgtagctttttaaaattttggtctcaaaaaaagataacaggtctttaaatttctttaatggttgaatatgattaaatactatgaaaatgccattatttattcccttaattttattcctctcgctattacattgccaaagtaaacattctattcagatgtctttgtgcatgtgtgtgaatatttctttagtctggagtccagtaaggtggatttt

SEQ ID NO: 182773 - DNA, 300 bp, Zea mays
  Clone ID: MRT4577_98272C.1
gctggctctgccaaggcaagaacagagctgctggaggggtgggggcggaaggagcctgcttaggactgctctcagctaccggcctcctctggatgacgggactgcaggaaccacgagaaccccagttctagctcccggggtgggcaggctgcttggcaggcaggccgccttccctccaccaggagtcaggtctccagccagaggtcctgacccagggcacaagtgctcgcactgggaagcaggcctctgaggcaggacgtcttctcctgtggtggagtgggggtgtcggcagggcaggga

SEQ ID NO: 182774 - DNA, 1177 bp, Zea mays
  Clone ID: MRT4577_98273C.1
tttttttttttccttttatataacaacagagtgatagagataaatgtcacaatataatcagagtacttattacatagcggaagtcttacaaaataaaagatgaatatagcaggatctaaaatctatccttggcgcgagaaagtcaactgggagacaccacctagatcgaatcgaactcctcgatggggctccacttgaaccacatgttctactcttggcacaggatcagtttgtagtctcagtttgctcaagtgactcgtaacctcgctcgatgatgggaatagcctgtgtgccaaaaactttggtattttccccactctacgcatgtcattataaggcatgttcttaatcaatatgatcttccatatgccaatgaaacccatgctgtccattttctggccttcagattctaaagtgtgcaatgtcacttcatccaaaaacatagcaaagcaaactgtcttctttgagaggcttgtaatcgttttgccaaatggagtcctcagtcgatcagaatttccaaagatgcaggatgatacagcaatgtggcatttactcatgtactttcggtcatcatcagatatatcaaaaccagtacttgtaccatttggacccttaacaaaagcgcatgtcaactgttggtcatgggctttgtatgactcctctctttcttgcaggctttggtggccggcaaatctcggttcccaaaattctgatccaataggtctttcttcaacttctacatactccaacttaaaactagcaaatttctcattcctcacaggctccacaagctgagcagttgagttaagaaacttcatttgacaaattgaaccagacttcttgcgtttcggtttcttcttgggcccatgcttcttgtctccagtacctgaaaccttctttttgtctgggctgctaatatcatgactacccgcaatccctccacctgcttctgtgtgcctctcagtagcgaccctgtccttctcagcaccctcatggctgccaccaccaagcttcctctcaccatcagatgaatgcaggtgagcttccctccatttcatcctgtgtatcgatgccatcgtcatactcatcatctggatcaacctccttcacccctgttcctgtggctcccatggctgcagcctcgtactgctccagctccttcctgccgacagcaacg

SEQ ID NO: 182775 - DNA, 200 bp, Zea mays
  Clone ID: MRT4577_98274C.1
aattcggcacgaggactcattccggctctagccgcctctaccgagacgccgctacacagggcatggcgatggcgccgcctccgccgccacgcctagacgcctaccggcggcgccgtttccggaactacctgctccgactggaggtagaccgaaccgaggaccgcgcggaccagcgggagggggccctcaggctcgacctc

SEQ ID NO: 182776 - DNA, 582 bp, Zea mays
  unsure (1)..(582): unsure at all n locations
  Clone ID: MRT4577_98275C.1
gncggccgggtcctgactgtgagacccgctctctgattacccccaaggaacgaagacgacgacgatggagtcgcctgcctggttgctccaagtttccacgggtcttcgctccacgacttactccctctcgtagagatctcactccccgctacgccagggacgcagctgacccgccaaccgacccggtgcgggagctctccatggatagtatccggctcgccaagagctgccaaaagacggatcgcaaggagcttaccaagtgcccgcgcgagtattgggatggtgttcggcacaatgggattcggctcattctttgacaagataatcttcatccctatgatcaacatcatcgtctcggtcctgttgatcagttcaactcaggatatcgactgcaggagtgaacaatggagactctaccttgcagagactaccgttttttaggtctgatttacgcacagtgatttctttaggatttgtgaaggtaaagattaactcccttatcttttcctctcttgagagtgctgtgggagacctgtaaatcatgtgaaacaggtgccgaacatccttatgtgaatcatcgaa

SEQ ID NO: 182777 - DNA, 232 bp, Zea mays
  Clone ID: MRT4577_98276C.1
ttcctctcgtccgcactcacgtacgcccactcatgcgggaaaaatcatacttggtatgcatggtggcgtgcctgcattccttacacatgatgggagctatgatcgatactatactgatgacgctagtggttgaggccataatctctcagaccagcgtttgggtgatctgtacacagagtttggtatggattaacctattgggccaattgacgacctttgagagcaagatgac

SEQ ID NO: 182778 - DNA, 298 bp, Zea mays
  unsure (1)..(298): unsure at all n locations
  Clone ID: MRT4577_98277C.1
cgggtgttctgtcgtatgatatactttgtcatcaagaatttcttttggcccatttccacagagtatctgaacatggaaacatctgatcgaagtcaaggagcaaagtcagccaatgaagttgctctgcatgattcaggtagcaccagaactgacatgtcacatatggacagcattgtcccatcatgtgtgctcgaggattcattaaataacccagaaactggtgtgccacgtggggcagttgttgctgagcaaaatgnaaaagaaataggattgagaatcatcagacggtgtatactga

SEQ ID NO: 182779 - DNA, 1889 bp, Zea mays
  Clone ID: MRT4577_98278C.1
cccctaaaataaatacaaacagtggaaaggtttcattgtatcgacccagcgtccttaggaagggtgttctgtcgtatgatatactttgtcatcaagaatcccttttggccccatttccaacagagtatctgaacatggaaacatctgatcgaagtcaaggagcaaagtcagccaatgaagttgctctgcatgattcaggtgcaaaggatcatgatacttatactctagggcattcttgtactggtaatgaaaacagtgccgttgatgaaggtagcaccagaactgacatgtcacatatggacagcattgtcccatcatgtgtgctcgaggattcattaaataacccagaaactggtgtgccacgtggggcagttgttgctgagcaaaatgaaaaagaaaataggattgagaatcatcagacggtgtatactgaggaaggaacaacttcaggtgtaagcacaaaagatgctgaagcatcacacatttcaagatctgctgaggatgtccatgaagaggtccttgacaaagaaaaaatgatcatttcactagaagaagaggtgaaacgtcttaaagctaaactagatcagcttgaacagcataagcatctagtgactgagagcaccagtggtgttgagtatcatggaggcaaaaatggcaatcatgccttgaactttggcaaacttttcgtggcacaagaaagtacaaaccagtcctactcaccacaaatcaaatacacgaaactaaactttaaggttgatacattctttgctgttggatctcccttgggtgtcttcctttccctgcgtaatgtccgtattggtattggcaaaggacaagactattggcaagataagaacataattgaagagatgccatgctgccggcagatgttcaatatttttcatccttttgaccctgtagcatacagaattgaaccacttgtatgtgaagattatctaaagaagcgtcctgtaattgttccctaccatagaggcggaaagaggatacatgttggagtgcaggagttcacagaagatatttctgcacgttctcaagcaattgcctgtcaattgaagtcactgaaggtcaaagcagtagctgctttgctagcattgagcagaaatgacacagaagaggatggtgagagtgctaatgaggaaggaagatcgtatggttccattatgatggaaaggttgaccggctcaccgaatggtcgaattgatcatgtgcttcaggagaaaacatttcagcattcatacctatctgctttgggagctcataccaactattggcgagatcatgacactgctctcttcattctcaaacatttgtatcgtgatatacctgaggatcctccaagcgatgtcattgaaaggatgcctattaaactgttttatgaaaaagatccggttgaggaaaaaacgcccgtgacattttcagcccgtgcagcaattaaggagttttgcagaaaggtgagagcctactcaacaaaaatggaggatgatgccaactgctaagtctcttgatggtgtcatttcctgatggaaaccatgttacagcccaacgttcctcgccaaaaaggaaaatgcaggcatgggaaggaagaacgattccccaaaatcgttatcccaggataagaatccaagaaatgtagttccccgcttgaccccagaatcaggacccttgagaaactttgcccaaagtcggttccccatgttgcttcacttgttcctgtcgtcaaagcaatgctgtacatagaacgtcctgctggacccttctgtataaaaaatacttgcctgctgtgcctccagaaaaaaaaaaaaaaaaaaaaaaaaaaaaaaaaaaaaaaaaaaaaaaaaaaaaaaaaaaaaaaaaaactcgaaaggggg

SEQ ID NO: 182780 - DNA, 1860 bp, Zea mays
  Clone ID: MRT4577_98279C.1
ctttgggccccatttccaacagagtatctgaacatggaaacatctgatcgaaatcaaggagcaaaatcagccaatgaagctgatctgcatgattcaggcgcaaaggatcatgatacttctagtctagggtattcttgtgctgataatgaaaacagtgtcattgatgaagatagcaccagaactgacgtgtcatgtatggacagcatcctcccatcatgtgtgcttgaggattcaccaaataaccatgacactgtcgtgcctcgtggtgcggttgttgctgatcaaaatggagaagaaaagaaggttgagaattatcagtcggtgtatgctgaagaaggaacaacttcaggtgtaatcacaaaaaaggctgaaggatcaagcatttcaagatctgctaatgaagtccatgaagaggtcctcgacaaagaaaaattgatggtccttgccaaagacaaattgatcctttcactagaagaagaggtgaaatgtcttaaagctaaactagatcagcttgaacaacataatcatctagtgactgaaaacaccagtggtgttgagtatcatgaagggcaaaattataatcatgccttgaactctggcaaacttttcgtggcacaagaaagtacaaaccagtcctactcaccgcaaatcaaatacacgaaactaaactttaaggttgatacattctttgctgttggatctcccttgggtgtcttcctttccctgcgtaatgtccgtattggtattggcaaaggacaagactattggcaagataagaacgtaattgaagagatgccatgctgccggcagatgttcaatatttttcatccttttgaccctgtagcatacaggtgggcttttatacagaattgaacgacttgtaactgaagataatcgaaagaagatgccaattatcaagccctgcgatagatgcgtaatcacgatacatgttggggtacgggagttcaggttagagagcaaggcacgatctaaatcaattgcccgtgaagtaaagtcactgcatgacacctggaatagcatccgcgcgatgcagttccgctcaaaacagtagcagctatactagcattgagcagtaatgacacagaagaggatggtgagagtgctaatgagaaagaaaaatcatatggttccattatgatggaaaggttgaccagttcaccgaatggtcgaattgatcatgtgcttcaggagaaaacatttcagcattcatatctatctgctttgggagctcataccaactattggcgagatcatgacactgctctcttcattctcaaacatttgtatcgtgatatacctgaggatcctccaagcgatgtcgttgaaaggatgcatattaaactgttttatgagagagatccggttgaggaagaaacgcccgtgacattttcagaccatgcagcaattaaggagttctgcagaaaggtgagagcctactcaacaaaaatggaggatgatgccaactgctaagcctcttgatggtgtcatttcctgatggaaaccatgttacatccccacgttcctcgccaagaaggaagatgcaggcatgggaagggagaacgattccacaaaatcgtgatcccaggataagaatcctaagaaatgtagttccacgcttgacaccagaatcaggacacttgagaaacgttgtacagagtcggttccccatgttgcttcacttgttcccgtcgtcaatgcagtgctgtacagagaacgtcctgctgtacctttctgtatatgtaatcttgcgtgctgtgcatacagaatatgatttaatttttgcattgcaaaaacctaaacacaaaaaaacccacgcgtctgactagttctcgaacccga

SEQ ID NO: 182781 - DNA, 510 bp, Zea mays
  Clone ID: MRT4577_9827C.1
gccggccgggccggaaattacagttgttttattcatgtactggcttgccaagtgctgttcttttgtgcaaactttgccagtgcttagatcttaatttgtcctgctacttgcaatttagattgctatatatgcttctcaaggaatgcatgctgtttgttctttgtatccttctgttttcccgttatgcctcaatgctattttgcggtggataataatatatttattttctcattgtgttctgttcaggaggataggcctgctggtggacaaggaggcccccgccctggtcctggtgctgctgctccagctccagctccagcacctgttgctgctcgcccataggctttagcttttcgaccgtgttaagtcttctgcccactcagtttcggaattgtcgcctatgggtgtgtgaagctgctatattagagttactttttgtctaaagcctgaacattttcaaagaatttgaatatctgaatatttcaaaaaaaaaaaaaaaaaaggccccta

SEQ ID NO: 182782 - DNA, 2116 bp, Zea mays
  Clone ID: MRT4577_98280C.1
attcggctcgaggtgagaagaacacacaaaatgagggttcttgtagagaagctgttagtctctgtgtttttagcagcattctattcagggtgcatggtcgtgtctctagaatatgatcacacggcaagcatcgagtgccttggcgacccaatgaaacccttgtacaagggcggcattgtccagaacagcgagttcaacagcggactgatgggctggtcgacacaccggaacgtcaaggccggcgtgagcagatcgccgtccggcaacaagtttgcagtggtgcatggggcgggaagctacgtgagcagcagcggcaagctcctaccgtcccacagcgtgtaccagagaatccagatgcagagcgacaggcactactcgctatcagcatggctgcaggtgtcgaacggcacgtcggcacatgtgagggcggtgatcaagtcccccaacggcgaacgcgtcatcgctggtgccatcgttgcccagtcgggctgctggagcatgctcaagggaggcatgaccgcttactcttcgggacccgcagagatctactttgagagccacgcaccagttgacatctgggtggacagtgtctcgctgcagcccttcaccttcgacgagtgggacggtcacacccgccgctccgccgacaaggtccgccggcgaaccgtgaaggtggtcgccatgggcgccaacgacaagccgatggcgcatgccaacgtgagcatcgagctcctccgcctcggcttcccgttcggcaacgcggtcaccaaggagatcctcggcctcccggcatacgagaagtggttcacgtcgcgcttcagcgtggccaccttcgagaacgagatgaagtggtacagcaccgagtggacccagaaccatgaggactaccgcgttccggacgccatgatgagcctgatgcgcaagtacaagatcaaggtgcgcgggcacaacgtgttctgggacgaccagaactcgcagatgcagtgggtgaagcccctcaaccttgcgcagctcaaggcagccatgcagaagcggctcaagtccgtcgtgtcacgctacgccggcaaggtcatccactgggacgtggtgaacgagaacctgcacttcaacttcttcgagacgaagctgggccccatggcgtcggcacagatctaccagcaggtggggcagctggaccgcaatgccatcctattcatgaacgaattcaacacgctggagcagcccggcgatcccaaccctgtgcccgccaagtacgtggccaagatgaaccagatccgcggctacgccggcaacggtggcctcaagctcggcgtcggcctcgagagccacttcagcacacccaacatcccgtacatgaggagctcgctggacacgctcgccaagctgaagctgcccatgtggctcaccgaggtggatgtcgtcaagagccccaaccaggtcaagtacctggagcaggtgctcagggaaggcttcgcccaccccaacgtcgacggcatcgtcatgtgggcagcgtggcatgccaggggctgctacgtcatgtgcctcacggacaacagcttcaagaacctccccgtgggcgacctcgtcgacaagctcatcgccgagtggaagacgcaccgcgcgtccgccaccaccgatcacaatggggcggtggagctccacctgcccctaggcgactttaagttcaccgtaagccacccatctttgaaagccgctgctgttcaaaccatgaccgtcgacaattcggcgtcggcgtcccagcataccatcaacgtcaagtcctaggagacgacatcaggcactctgtggcggatctttaattaatttcttctttatttttcattctggtgaataaataggtcccaaagagagagataaaaggagaaggaaaggagacgtggcagcatggccacgttagtgattttttgttcggtgatttttttttgtaagctatatatagatagagagtagtcatttttaagttattaattatatagttgcaaatgcgcacgttaatggttgtcaatagctttgtcacatctatatggattcctagtaatacacataaacattacagatctttgaactaaaaaaaaaaaaaaaaaaaaacaaaagg

SEQ ID NO: 182783 - DNA, 221 bp, Zea mays
  Clone ID: MRT4577_98281C.1
tttgatataacgctaacacagcatgacattgttaatctggctgcccagaaagaaggttaagaacaacaaactaacaaatctacaatttgggtgagacatagttgatttatttacactaacttatgtagcgatccaggggggggggggggggctgtggccaccggtttttttgactgtgcttcatgtttcatgctctttttagagcctaagactttttacct

SEQ ID NO: 182784 - DNA, 274 bp, Zea mays
  Clone ID: MRT4577_98282C.1
gagccaggcaggggactggtgtctcggggggtgaaatgcataactccccaacgcactggcaacaatggccatgcccagcactaaaaacacagaacctgacttcacactctagtaactatggtgcgaaatgtgcaccatgaacagctggcgaacaataagtcgcagggcatgattgagtgtgaccccgaaacagtggacagacaccacctgacacaagagcaaaattcgccatccagatggcacccgtgtggagaggcatccgggatcaccacgt

SEQ ID NO: 182785 - DNA, 533 bp, Zea mays
  Clone ID: MRT4577_98284C.1
cggacgcgtgggttttgcggcttcctattgataatgcttcgaagataatattaactaagtatcccttgtgaattgtgacactgttttgttgctttaaaagggattacaccaatcctgacctttttgtcaaccaaataataattgaggggattgtgcagcccacgataggccggagcctaagagcagcgtgcttttaggattagttgagatttgagaacatgcaatatgctgtgacggtggatgttctgcaaactgtgttttctgtttttggcgctgttaaaaaaatcaccatgtttgagaagaacagtggattgcaggctctaatataatattcaggtatgtgctcacctatgcacccaacaaggtatgctcttgatcttggtgctgaatgttgctgttccgctggtgccaacaaaagctaggagggtcttgtttggtatgtttaagtgtctcaagcagaccgtggtgaatggattggttgcaacaaagccttcacctgtggagctggagatagacacagagtattggcacat

SEQ ID NO: 182786 - DNA, 452 bp, Zea mays
  Clone ID: MRT4577_98285C.1
tagtgtagtaatgccttacggcgcatatgttggtgccccccccccccccccccccccccccccccattaaatacatacccccatcccacggcccccctcccgccgctgaccgcagaaaactagaatccctcccgaccttcagagacaccccggggactctagacccaaagacttaacaaaatcaaaaatttacagaaaactcccaatttatgccccgcgcaacggaaatggatcggcaccccactcgactcctggctaccaattgggcgaagtgcctaaaaattactagccaacgccccaccagcactcgctttggaaatgcgccgccgtttttataacgggcttgcccagcgagccttttgcttgtaaggtaatctggacccgacaaaatagccatagtctttatggcctttaccgttagcattacggacgccgataggccccgggccgcg

SEQ ID NO: 182787 - DNA, 700 bp, Zea mays
  Clone ID: MRT4577_98286C.1
gccgccctttttttttttttttaaaaatcaatcccaaggagatctcaccattttcctctctttagatcaccacatgattcaatcaaagaatggcggtacaagttgcatgcgtgcaaggtgcacatcatcagtcatcaccacaggtaaaagatgtgcggctgcatcacgcatttctaacccacccacccagggagtaaccgtagtagtacaacatgtagtgcaaacgtctgcaccagccccagtttttttttcttttcttttcttttcctttcctttctactactaataaaaaataataatgttgtcaccaaccaatccggcgcggcgcctaaccaatccttccccttcccggcactctcaccgtcccttcgccttattcattggcctgggcccgtccctcccacccacttacaggtgggccctaatcgtggaatcggcatctccagctggtcgacctgcagcatattcacacatccgacacacccacttcgtaacttcgtttgcccgttgccgttccgttccgtttcagttgcccgtgtgagcgaggggaacggcacgccgccggcgccgctgctgcgacgcgtgctcgcgccgccacccgacgacgacctggtccacctccgcggccgcgccgtcgcggcagccgccttcatcggcgctgcaggcccaccacggctggccgctggccgtgccctcgtgc

SEQ ID NO: 182788 - DNA, 269 bp, Zea mays
  unsure (1)..(269): unsure at all n locations
  Clone ID: MRT4577_98287C.1
aaggaannacccgaccgacccacgcgtccactcattctctttcttactctcaagcacctcatcatgaaaacttctcttccgctggccgtctttttaatcagatccccctccctacctccacncaaggcagctccattcgcaaggtcgccccctacttccagcaggccctcaccccgcccctgtatcttctcccccctacaccggacggctccctcctctaccccgccttctccgacctcctgcacccccacttataccagtgcttcccc

SEQ ID NO: 182789 - DNA, 627 bp, Zea mays
  Clone ID: MRT4577_98288C.1
gggagtcctctccctttcgagccccacttgaaagtacggcctcgacgaagagaaggcgtgcagcgagctcctgagcttttccgattccagtggctcttcacaggataactgtccggacaggaactccttgcaccttctcactgtccccgtccccatggagaggagcgagaggagcaggagggcgaggaaggacaacaagtggcgccctcgacggggacgaactcggtcatgtacacgcaggagctgttggacgcggacgactgtgacagcgccccggactcagcggctaaacgagatagacttcctagagcggatgcacggcaagcggctgctgctcatgggcgactcgatgaactggaaccgtgaggggtcgctcgtgctctgcaaaggtacaaacaatcatgattgtggaggagcgtgacggcgagggtcgattggcgtccgaccacgatttgcatgtggcttgtactcggcgccaccgcaatgacgcccacccatgtgctcaccaccttaattgtttagagtgctgagtttggcaagttagaagcataatctttcccaaacaatctacactgtctaactgtgaaactgacagatgagtggctttgaaatttataatccttcacc

SEQ ID NO: 182790 - DNA, 535 bp, Zea mays
  Clone ID: MRT4577_98289C.1
cgcgcatctggagcatcggccctgtccgggttgcaatttgcatgggcagcatctccaactagtgctcgccggcgagggtattgtgcatggagggcggcggcctccgggggaggcgcggcggcagcggcaacatgtcgcttgcgtacggaggaaggaccgccaagcttaagcagccgcagcgttgactgggcgtctcgcatctcgagaagatccgactacacaaccagatgctggtcaagtaccgctccgtcaccctgcagacgtcgcacgaccacccccagcagactcatggccactacttcttcgttgactctggcacacattttcagttggtgccgtcgacactgaccgactccagcccgttccatccgtaccaccaccggggcttgcttgcattactacggaggcatgtacagcaggaccataacgagcccgtcgtcgttgctcgcgcacgatcgtttgtactcgatgtgacacacgctgggtccgccgccgccggagcatgactactgcatgactatgatgagcagcagca

SEQ ID NO: 182791 - DNA, 263 bp, Zea mays
  Clone ID: MRT4577_9828C.1
gctcgccgatctgttcgcctcctggttccatcgtgctcgctggtgggtctcgcgctgccgtccccatccggtgggcgccccgcatctacgcggtgacgctctgggctcccttccggttcgcgcctcgttcggggtctggtgcttcctgcggtagctccggtgggtgagggatagccttggccagttgcttgccgtaactggagctttggccgctgcccgaccaccctcaggatctatgggatctggctggcttccgagcggat

SEQ ID NO: 182792 - DNA, 369 bp, Zea mays
  Clone ID: MRT4577_98290C.1
gcaatcgctctcacacaccaaacacaactgcaacggcggctgcaagagcgtggggggagcaaaaaccaacactttcacacgaatcaaaaaaaaaagggggaccctcccactctgtcgatatccatcccccggatcttcgactgtgactctaccagaccatggacaagatcacttccttctccatactgagctcatccccatcggacatttactcaggctgcatatgctactgctcgtccacctggttcttactacggtccatcagtctctgacatttgtagcagtacagcacatatcaaaacatgctcaacttctcttgcttctgcaaatagcaattctgatctaaaaaatcctgataatgttatatcc

SEQ ID NO: 182793 - DNA, 747 bp, Zea mays
  Clone ID: MRT4577_98291C.1
gggtacctcgaggccggccgggtctccatccccgccgaaacgctctctgccgttctagaccccttctaccagccgtgccgccgattcctgaatccgaccatggctgacggaaagaataagaggatctcccaagcaaagaacggtgatgagaatgagaccgtccaccctttctctaataacgattggcatgacatcacggcaccgacgctgtgcagagtgcgcaacatcgggaagactctcggatccgagacacaggcgatcatgattgcttctgaggaccatgaagcacatagtcgtttgaggacttgcctattctgatcttctgggctgccagcatcaagcttacatgaaaatcaccgtccgcgctgaatatgcgcacctcaggaatgcgctcacatgcttttgctgcatgaattttaccactgacttactcagatccctagtgaagatgtgcgagatattaatctgaacccatgcgtgtatgtcaagacaaccgacaatctacatggtgcgacttgttctcgcatcgatattcaccaagaggctccctaaccatgttaagacaacctgctatgctcatgcatcccagatccgacagatccgtcgaaagatggttgagattatgatctaccatgcttctacatgtgacctgaaagaacttggttcgaagttcattccataaggtattgataaagagattgagaagtctacctccagcatcttcccacttcacaacgtcttcatccg

SEQ ID NO: 182794 - DNA, 176 bp, Zea mays
  Clone ID: MRT4577_98292C.1
cccacgcgtccgcagcatggtcgccgtcgtcctggctgccatcgccacaataccgctgggggaggaagccattccggggccactgccggaccattgaaccaccgcaaaaaattccaaggccacattggacgccaaaacccggaaggctttcaacggcttgttggccgccgttccgg

SEQ ID NO: 182795 - DNA, 542 bp, Zea mays
  Clone ID: MRT4577_98293C.1
gcgttcgccccggcccgctgcatcttctccagtgaccgcccatcccacaatcacagtgccgcgctgccccgcagcctcagccgctggggttcgaggtgtcgacggagcccatgccggagctgccgaacccggagaagcccgacttctgggaggggcctcagtgggaggccctcggcttcttcgtgcagtacatgtgggcgttcggcgtcgtcttcggcctcattgcttgtggcgtcgctgtggccacctacaacgacggggcaacggatttcagagacacgcctgcttacaaggaatcccaatcacaggagttccctgaggagtcggaatcatcgagcgctgatgtgttcgaaggcaacccgactgaggtagcaccagctcttgagtaggactagcaaggaggcacgggggagaaaacttgtctgtctattcaagctttagcaccagctcttcgcgtttgcagtatagatgtaaaaaggtttggttaaaatctgatgctacgaaaattggctggtaattattttgtactggatttcccctta

SEQ ID NO: 182796 - DNA, 138 bp, Zea mays
  Clone ID: MRT4577_98294C.1
cattggacaaaggtagttttgatcaaaaaccatgatcaatcttttctcgtctagctatatagcagcagcattcaaagggaacaactgggatggcatcacggaatccaatagcagcacggtcactatctcggcgacaaa

SEQ ID NO: 182797 - DNA, 998 bp, Zea mays
  unsure (1)..(998): unsure at all n locations
  Clone ID: MRT4577_98295C.1
cattgggtacctcgnagccggccgggaaaaaaattcatctctccccgtcctcccgtcctccatgtcgacttgtcgagacaccacaggctccaactccccggcccgctgcatcttctccccgtgaccgcccatcccacattcacagtgccgcgctgccccgcagcctcagccgcatggctctcctcgcctcccccacgccgttcggcgctgcagccatccgccgccgcgtcgccccgcttgctctcatccctgcaggcggtcgcgccgccctgcacgtggccctcgcgcgccgcggcggggtctcgtcccgcacgcagcggcgcctcgaggagcgcggaggcaagaagcgccgcggcggggtcgcggcgcccgacgtggacgaggacgcggcggaggcggggacggcggtggagtgggaaggggagccgctggggttcgaggtgtcgacggagcccatgccggagctgccgaacccggagaagcccgacttctgggaggggcctcagtgggaggccctcggcttcttcgtgcagtacatgtgggcgttcggcgtcgtcttcggcctcattgcttgtggcgtcgctgtggccacctacaacgacggggcaacggatttcagagacacgcctgcttacaaggaatcccaatcacaggagttccctgaggagtcggaatcatcgagcgctgatgtgttcgaaggcaacccgactgaggtagcaccagctcttgagtaggactagcaaggaggcacgggggagaaaacttgtctgtctattcaagctttagcaccagctcttcgcgtttgcagtatagatgtaaaaaggtttggttaaaatctgatgctacgaaaattggctggtaattattttgtactggatttccccttagaatcaaatatagatggatggctagtgcctggtggtgatgggattcaactgtgttattccaaaaaaaaaaaaacgtgtggtgatggtgggggtcaaaaaaaanaaananna

SEQ ID NO: 182798 - DNA, 1163 bp, Zea mays
  Clone ID: MRT4577_98296C.1
ccggccgggatctcatctctctccccgacctcccagctctagagtctagacagccacaggcaggagctccacgagtccacgtgacctcagacctcacacattcacagtgtcacgctgcctcaacgtcatgtctctcctcgcctcccccacgccgttcggcgtgaccgccatccgccgccgcgtcgccccgcttcctctcctccctgctggcggtcgcgccgccctgcacgtggccctcgcgcgccgcggcggggtctcgtcccggacgcagcggcgcctcgaggaacgaggaggcaagaagcgccgcggtggggtcgtggcgcccgacgtggacgaggacgcggcggaggcgggggtggctgagtgggaaggggagccgctggggttcgaggtgtcgacggagcccatgccgcggctgccagacccggagacgcccgacttctgggagggacctcagtgggaggccctcggcttcttcgtgcagtacatgtgggcgttcggcgtcgtcttcggcctcattgcttgcggtgtcgctgtggccacttacaacgatggtgcaacagatttcaaagacacgcctgcttacaaggagtcccaatcacaggagttccctgaggagtcagaatcatcaagcgctgatgtgtttgaaggcaatccgactgaggtagcaccagctctcgagtaggactatcaaggaggcacgggagaaaagttgtctctcgattcaagctatagcctatagggcttcgccttcgcaatatagatgcaaaggtttggttgatgatgctaagaaaattggctggtaattattttgtactgaattttcccttagaattaaatatagatggctagtgtctagtggtgatatgatgggattcgtctgtattattcttccaaacagtggggggcaaaagaaagagagcaagcattgctgtctatcctgtattttgcattcatcatgcccctatgatggcttttggcacttagtccaggggaaatgtataattcaacacaaatacattctgtaccggcacaatccataattaaggaacatgtagcattatcagcttccgagctccgccatgtcatgaccaaccttggcgagaagctgaccgacgaggaggccgacgagatgatccgcgaggccgacgtcgacggcgacg

SEQ ID NO: 182799 - DNA, 508 bp, Zea mays
  unsure (1)..(508): unsure at all n locations
  Clone ID: MRT4577_98297C.1
tcccacgcgtccgaccgcggcgccgggcgggcgtcttttgaccacatcggggctcctatcctgcaagggtcctgtgcggtatggtatgctagctcggctccctgtggtttcccccctcatccggaatgtgatggcgcggtggatggtgttttgatctgtgttcgcttttggcggatctggtcgcgcgcagtagcgcagaggggtcggagtcggagtcggagtcggagaagatgatgggcgggttcctctccagggtcctcctgtaagcgctcccttgctccgaatcttgtaacgtcggtgttctttgtagattgacactttgaggttggagccttatcagaggcaccagtgttccggttgtaataaatctgttttttttttcaaatttggatttgtggggacccattcggagagttcagcagcctctctcttggtttacttcactcattcgctcctccttaatatgttgcttttttcaaaaccaaacanaacataacataaagaggag

SEQ ID NO: 182800 - DNA, 126 bp, Zea mays
  Clone ID: MRT4577_98298C.1
gccgggcacgcgtccgccctagacaaaggaacccatctactttctcatatcaagcccaagcaagcagccaccaccatgtgccattattagaagccatgggcatgatcctacaccagctccagctcc

SEQ ID NO: 182801 - DNA, 962 bp, Zea mays
  Clone ID: MRT4577_98299C.1
gtcgttacttcacattaaaaagctcagtaacgacgagtatctacctaaggctttcaagttctttgacaaggacaggaatggttttattgagatggccgagctgatggaggctctaggtgacggtgaactgaagcctaacgagcaagtggttaacgacattatccgtgaggttgacaaggataaggatggtcgtatcagctacccagagttcgaattgatgatgaaaggtgggtcagactggaggaatgcctctaggcggtactcgagagagaatttcagtagcctcagtcgaaagctgtgcaaagacaccttatgaaacaagaaagtagttttgcaagcagcagttactgactgacagtaccacgccctcgactaagcagcaagcgtcagaagacaatgcaaaagcaggattactggatctggtggaactgtggaaataagggttaaaggagatttgcgtcgattgacagactccgtcaaacagcaaccccctcttggcattgtcttgtcctttgttcttgaagtaaaatttgctattcctagtatacatatcaatgacttaggcataggcagatacagatgtaaaggaaacttcagcatccgttagacctgtgcaagtgtgcattatgcacggtacttgaagttccattgtaccgtgccgtccgcctgccggtgacctgatgatgtgcgctgccgccaagtttagcagttgcacgggacgggacctggcgccggtgacgctttggggctccgagaaggcagaggtcttccagttgcacggctccgcccccctgaggtcggcgacgtgttgaactcgaccttgcagttggtgtttccagggctccatcgggagcgaaccagtaagcttctccaattatgtaaatttagtaccctcaattatagatttaaaaagttgtttaaacttttaaagagtaaaaaaatgtatgtgctccaacagtacc

SEQ ID NO: 182802 - DNA, 259 bp, Zea mays
  Clone ID: MRT4577_9829C.1
gccacgcgtcgccacgcgtcgccactcgtcggcgacctgtcccacggcatgcgaggagggcatagccatggtgcggcgagcctttgcggcgcgaggcgctagcggtcgggctgctgcggcaccggacggcgcctacgcgcccgtcggtcccgtggcgatcttgctcctgcggtggccggaggcgccgggcggcatcgcggcgttcggtgcgcgcagggcgccagaaccggccggcagagcactgcacaacgcatactac

SEQ ID NO: 182803 - DNA, 315 bp, Zea mays
  Clone ID: MRT4577_982C.1
cttcatcctctagatttgccgccctttttttctttcttttttcccccgcaaaataaataaaaaatgcccgttttaccccctttccccttttccccccccagggcacacccctgggtccccccggaaattccctacccaatcccctccggccatccaacttcccctattatcaacaaaataaccccttttacaaaccttggcaaaaacttttaaactcgtaaaaattgtaacctctcacaattccccaccacataccaccctaaacctcaaagctcaaaacctggggccccctatgggcaaacaaactcaccaaaa

SEQ ID NO: 182804 - DNA, 385 bp, Zea mays
  Clone ID: MRT4577_98300C.1
tcgctgccgcgtctttagctggatccctaggcggccgcccgtggggggtttttttttttttcttcttttttttttttttttttttttttttttttgggttccagggcccggtgtcttttctcccctttgggcccatttccccggggtgggctccggaataaccctgggattctgcttcccaccccggtggggttgggtgccgccccggctccccgggttgccggttccttgtgcccttggcggccccttccggggggttagtttcccggcgggggggtccccccgtctctcgttgttccggcggggccttgtcgttccccgggtgccgccccccgtcgctggcctgtctctccgggggggttggtcctggggtgctggtttcccc

SEQ ID NO: 182805 - DNA, 274 bp, Zea mays
  Clone ID: MRT4577_98301C.1
tattttttgtcagctcctgcattcattctgggcaattcaatatataggtcgtgaaccacaaaaacatcaaagagaccggtacctcgaaagcctcctcttgcatcgatgcctattgaattcggtccgaatatgtgcgcttcgtcctaaaccccataccaccaaacacgctgcccaactctgaggcatccacccaatgactaaatggcgcatttcctgcatctactctccggacgacctctttccttcgatgaggcatctgtaccctttgtcaacc

SEQ ID NO: 182806 - DNA, 604 bp, Zea mays
  Clone ID: MRT4577_98302C.1
aaacccaaaaaaaatatgattttttggggaaagtccttaaaaaaaatatgcgggccccaaacccccatattggcctttttttttttattccggctttcctataataaccatgacgccggggcagaaacatgacagggaggacccaaactactttttgccagttagttagttaggccctcccccccaattgggggggggctacaaagttggggggaggaacaaagctcctttggaacgtttttgaaattggggggggggttaaaggacaaccccagtttgacaacccttaaaatgcccttgaagccggaaaaggggagggggcggaaccacggggggttgtcccccttgagaaactcggggggggggccgaagaggcaccccggggggggcatgaaaaacggggcccccgttgccccccccactcccaggggggtcatcacccggggctggaggcttttaaaaaacccgttcggcacaacctcaagctggcatccaaagttgacaaaaaagggcccgggcaaaggctccaccctgatccaggcgcccctgggggggacctcggggccagggaccatgctggggaggaccaaggggaggaggttgg

SEQ ID NO: 182807 - DNA, 339 bp, Zea mays
  Clone ID: MRT4577_98303C.1
ggcagggggaaaaaatttttttttacaaaagggttccacgttacatcggggtttttttttccctcatgggggggtttacaaaaaaaaatgattcaaaaagtttccactttggatggttaaaacattttttaggtttaaaaaatttgcttgcttaaggggccactctcaataaaaaaactaaggaggggattttttttttttaaaagacccggcccaccggctttttatacctttccaaacagggcaaacttttaaccggggaaaaacactacctttgggtttttaaaagaaggccccttgacaaaaaaattttattttgaccccccttttgtccattta

SEQ ID NO: 182808 - DNA, 139 bp, Zea mays
  Clone ID: MRT4577_98304C.1
ctgaacatcatctagcacggattaagagcacatcatacattgatgaagacgactgtggcctggagaatgctatcgtcatacagggcgctaatgatgtcgcccttattgctgcgggcacaagctggggccgttcaactga

SEQ ID NO: 182809 - DNA, 874 bp, Zea mays
  unsure (1)..(874): unsure at all n locations
  Clone ID: MRT4577_98305C.1
cattgggtacctcgaggccggccggattccacagtccacagagacctccaaagagatctcatcttccccccgtgacttcaattcacgtggtattcttcagctaacatattgatactgtaaacacacaggtactaaggtcttcccactcttattttatacattcacaccccttggcccctcatcttgatggtagaggttttctacgagcactcaggcaccctcttcagatcccaaatctgcaatcgcttaatcgttgaaaccggcggaggcaacaactactagactatattctcattccaattaattcaccacaatatgaagatcgaacaagctttccactctccttatggacaagtacacggcaaactcgtagatcaagaacaaatcaatcgcagccttcgtaaatcgtacgacgatgtagaagatgccaaagctcagaggcagcaggcagaggagcccgtatgtctgtccactttgacttatcttaagctgaatcctctgtcctctaaactggactgtgtcttcttcaagagagccctcaagaagcaacctgcctttgacaagattgagtttttccacatcgagccaaaccgtgctaacaaatatacttcctcgactgtcacctctaaagcattcatcgcagttaacgaatgtatttcgttcatagaggcgatcactcctgtcatccagacgaacaaggagagcctctctacactcttagatcttgtagatgattacggctgcgagaagatgtatgcctgtgtagacnaagagaacgccaatgcanaacattgtccactcttacctctctgtgggcttcatttgacgaatgatgtcgtctttccagggtacatcatgcttctgcaggagttta

SEQ ID NO: 182810 - DNA, 213 bp, Zea mays
  Clone ID: MRT4577_98306C.1
tctcctgcccccacgggatttgtttctgtaccttcctatgatgacgtgttctttgactgtgtttctgatgtctatgaccgtcccctctatggcgtctggcttcctgttttcatctggactggtctaatggtgagcccattatgctcgttcgtcgtgtccattattgaggaacactgctcatcacctccttcatctccctcgtttgtgacgccc

SEQ ID NO: 182811 - DNA, 494 bp, Zea mays
  Clone ID: MRT4577_98307C.1
ggctaaccctagcgccacgcacccggacagactttcgtttgcagagcgtccgtcgagcgataagtaggtgaagacaggtggcgcctgtcctctgccggctcaccggcacttgctatctcctcgcgcgcgctttcgcagagaacgagtacgtggcgctccccagcgagcgcctctctcaccaaagccactgtcaccgccatcgtgacgggagccgccacggccctgcttgcaggccgcacaagtatgaccacaggacgcgctgctggccgcaggaaactgctgactccgccttcagcctcgccagttcaccggcaaggccagggacgccttctccttcaagatctacgtgtgcttgccggacaatgtcatgctcgacgatgaccagaagactaccgcctgcgacacctccaagatgtcccaggaagagtacctcaacacgacaggcgagagctactccgccaccctaagcgtgccgtgcgtctaccgcttcgact

SEQ ID NO: 182812 - DNA, 235 bp, Zea mays
  Clone ID: MRT4577_98308C.1
tgcaacactctatagtgagtcgtattaacgcgtgggcggtcgaagcccccgctggcgccgccggcgccggcgccggcaccgggagcgccgctgggccctccgccagcggcgccgcgcccgcgctcaccggcgcgccgggcgcgttcctggtcccgctacgcggcgactacctgcactaagcagatggacggatggacgctcgcatggcattggcatgcctggagtgttgaacatc

SEQ ID NO: 182813 - DNA, 389 bp, Zea mays
  Clone ID: MRT4577_98309C.1
cccacgcgtccgcccacgcgtccgaaaaaaaaaaaaaaaaaaaaaaaaaaaaaaaaaaagaaaaaaaaaaaaaaaaaaaaaaaaaaaaaaaaaaaaaaaaaaaaaaaaaaaaaaaaaaaaaaaaaaaaaaagaaaaaagaaaaaaaaaaaaagggggtagctttaatataattcagagtttacttaatttaaaatggaaatggaataaaatttttttaaaggacaaaaaatcaaaaaaattggagggtttataaaaataagtcgtttgggaaaaaaacgggttgtaacgaattcagtttcttaaaaaaaaagccgcttaatgaacagttgaaaaaatcgaacaaggaaggattaaaaaccgtttgaagggtattttggacattaaaagg

SEQ ID NO: 182814 - DNA, 414 bp, Zea mays
  Clone ID: MRT4577_9830C.1
tgggtacctcgagggccggccgggacccccgtacctagtagcatggatttcccgccccgtctcccattctccttcacaccccgattctatatgccagagattgtcaatgccttttgatagagagatcgactggatcacaccgttatggtatgtgacgatgtcaacatcgagccacactagtgctgatcaactccatgtgccgaacgaggtactctggttgccccgcatgctaccacaactattccctgagcctcttatactgagaagccatcctcattgacgaccaccatctaatggaagagtgcgctcacatagacagagaacgcctctctgaacttgccgagcatcaccaccgagcgaatgctcatgagtactttgagagaacgaataatgtctctaacataacatctgctg

SEQ ID NO: 182815 - DNA, 230 bp, Zea mays
  unsure (1)..(230): unsure at all n locations
  Clone ID: MRT4577_98310C.1
tcgagcggcgggcgggttaaagcaggcntgctgctatggcgacatgcagatggcgagggaagtgagcacggccatgctgctgctgctggtggtggtggcaactgctgctggggactcggcggcagcatcgtccggtagcaacctggggccaagaaagccgctgacgctgcaggcaggcgctgatgattgcatcacaccagaaaacttctgctacttctccgatgctcagc

SEQ ID NO: 182816 - DNA, 1741 bp, Zea mays
  Clone ID: MRT4577_98311C.1
gggttactcgcctgctggtgctcgaccatctgttgatgttaatcaagaagatcagcattatgatccactatcagttgttttagattgccagttttgtggtgcatgtgttgccttgtggcctttttctcttgtgcaacgacctcttcaactctttaagctgatttcagattctaatagacaagatgaccaggataatggacatgccaacatagtgagtggagtaggacattcaaaggatgccaacattagttttaacttcactattgctgggggtcctccaccaactagacaaagtttccgaccaaaagtttcatttcctgtcgttagtcgacatttgaaagctgatttgaactcccgtgtgaatttgctttcctccagaagtgattgctacatggttcctgttgcttcgcatgcttcaggttccatgaagcgtataagaagcacagatgagcctcatttgttggaaggtgatgccgatgatgttgatacatccaccataggggcaaatcatgaccagccaggagaaaattctgaaaagagcatatcaaacttagtagtgagcactgaacagaaacaagatggttcacattccaatgcagctaaggatactgaattggatgaagcttccaatgaaacacaaccagaaacaggttctccattaagaaaaagtataacaagcacatatgcagatgctgatcaacatggattggaacctagattttgctcagtccagggtacgaatgaagaaccttctggtggagtgaccctgacagagatgcatgcaaacaattccaggtcaactgaggtcagcacaatcacagaatcattagttaacagggaaaaagaaaaacaagggctgtatgacagaatgaatgagtttgatcctatcaagcagcaccggacgttctgcccttggacttcccctgattacggcgaacccttgcctggatggaggcttactctctcggcattacttgctggggacaagagatctgatggggacttgcaagtggatattcagaccagccttctcgatgaggaggatgaccctcttacctctgttaggaagcttttcatgacaccacctccgaaaaggcggaggatacagcaatctgaaaagagctgagaagcgaactggatccacatgttgggaaagctggggtcaaactcatacggttggacaatatcatggggcagatccagaatgccatatgaattgaatattggaactggaaatgtttacgctgcacatctgtgcgatgtacaaattcttgaggcagcagctgggaaaaggattgatgacatggttaactgttccaggatgatactgctgttgtagtcttgtagaagccattgttgtggtggttaaggaatgtagaagttgggttacctcttccccgtttgaaaccacctgagcatatacaccatgatttcgtagcttagtaatgttgtcaacttgttatattgcattctttatattgctgtacgagcacctgttaactgttaaaccctcggggaattttgattggcaagagcgaattcgtttgacgcctttgctggctgacttacctgtaataactgcttaaagatctgatcggcttgaaacgataggttctaccattcaatagcctacaatgaatcatttttgtcaattaataacttaacaaaaaaataaattgggggggccgcttttagagaaccaagtttttttacccgttgtttgggaataataatttttttt

SEQ ID NO: 182817 - DNA, 210 bp, Zea mays
  Clone ID: MRT4577_98312C.1
ggggggaattaccttcgtttaagggtcaccttaaagattccagcagagccaaggaaacgttttaatttaggacggacacaaaaaggggttgtcatttaaaaccttataatcaaaccaatttatttttaaatatctttaaatatgcaaaacccaggttttctaaaaggtggggccttttctttcaaaacgtcctcttctctttttgccccc

SEQ ID NO: 182818 - DNA, 222 bp, Zea mays
  Clone ID: MRT4577_98313C.1
ctcatttctccccctttttggcatgaatcgccaggaacggaatcattagagcccttgaagtaatttcttcccctttggtcataaggcagaactgccagatcccggtacagcattcaatgtaaatagctgggggacgtgtcattgccatgacgatacagcggcgtgatgttagaaacctcgcactactttttttttcagaaagtaaaaaactttttgtggttt

SEQ ID NO: 182819 - DNA, 320 bp, Zea mays
  unsure (1)..(320): unsure at all n locations
  Clone ID: MRT4577_98314C.1
cccgctctcacgccgctccaggtcgagggccgagggagggggtgaacaccttcttcctcttctgcgggtgcgtggaccaggccagcgtggcggtggtggagaagtggggccgcttcctccgcctcgccgacccgggcctccacttcttcaaccccctcgccggggagtgcgtgggggggggggtggccacacgcgtccagtccctcgacgtccgcgtcgngaccaagaccaaggttaatgtgttcgtccgtctgatctgcgcgttcctgttccgtgttgtctggggtgttgctggtggtgctttgtgtgtgttggggggt

SEQ ID NO: 182820 - DNA, 676 bp, Zea mays
  unsure (1)..(676): unsure at all n locations
  Clone ID: MRT4577_98315C.1
ggccgcttttttttttttttttttataattccagcacactagttcttcccaatagaggttcaaacatacaaaggttccaccacaaaggtttgaagcattcaaacagattgcacgtagttctgacaaagttctaaccacaaatatgttctagcaaaggcatcaaacagattgcaactcttcctgcttcctaacagcttcctctctttcagcttggagtttttcctcaaactgatataagatttcttcaagtgcggccaatcttagccagctcatcgaggaacttggtgactgcagccgagttcttcttgatgaccttgactggcttcttatccttgaacagagcctccatagattattcgagtgctagaagcaacatcgtgtgatatgttggtcttcagccaattgcgtacagcagcatgaacttcttaagatgaagaagtttcacctgcaaaagccttcttctgcctaaaacatacatcaaaagttttgcctgcttccctctcttccagcagctctcctatgcaggcaataaccttaacattttgggctcaatgcatatgcagccttctttccaataaactcatcattttcaccaataatatgttacgctcagagtgtcccagaataacccattgacagccgatgttcaccagntgttctgcattggaattttaag

SEQ ID NO: 182821 - DNA, 1732 bp, Zea mays
  Clone ID: MRT4577_98316C.1
ttatcctctcggctgctcaccaccccagacaagtccagtcctctccctcccctcaacctagtgccgccactcgtgcccaccatgccgtcgcaccgccgccgccgctggtgaacggatccgtgcaccccgtacacctgccttggcctcctcccccctcccctcaacctagctccaccactcgcgcccacctccgtccgccggtggcgcaggggaggagccggccatcctcagggtggcgctgggctccggcaagctgcgcatcgaggggtcgctgggctttggcaagcttccgcacgcggcgccagctcaccgaccgcgccgtgctcgtggagcagagctggtggaagctgctggactgtgccgtgctcgaatttggacgcctctctctctctctcatgttgccatgctggacgcaagaaccgagcagcgggcagatgaaggagcagttcgtcgtggagatgctcgctaggccctcgagtgcggcggggtcaggccccgggagatcgcagcagcgtcaggaggacgcctcctcagctcaaggcagcaggccgcagtcgtcggctgcttctgatacaccggtggcgcagcaacctgacgcgaactctgtgcgagcgaagctcgagctcgccaagaacaccaagctcgaggcggccaagaggaagctccaggaaggctaccaagagtttgataatgcaaagaagcagagaagcatacagatggttcatccccagaacctgcccaagcaagcgaacaacacccagaatttccaacctagcgggccagcggcaagccaaggaatggcagcaacaggaattggtagcagttccaattccttttgagcgccaccagggatcatagacttcaaatcccttcctccctctttcttcctttggttcttgatcgactactaagatttttttagaccatgcgagtacagaaaacagcaataaggctagtttcgaaagtgcatggagacgtggagtctattgaaagttctggtcaattttgacgaacttttttgagagctcgtcaatctgcttgtgctctgtcctctgtggcttgcagcttccaggcaacaggattctttcgtgtgaacaccattaacttagtatggtgaccatctaaaatagaaaacagcaggacaattgctatgtcatcaaacatgatcatcatcagtactagggtttctttaggccatgttattagtcttgatctgtctaggcagcattgatgcatgttcatgtgttctttttcttaaactgtcagtcattatttgactatgttgtattgttgttggcatgtaccaatatttcatggcaaatcttatatcccaagtttttatatgccgcagaggactaagtacaacaacatggagccggatgctgttgatttctttggggaatgtatgaatagtccccgaaatggtcatactctgcttgcaaatgagatatatgagaaaatggttgccgagaaggaaagagagctagaagaaggagaagcacaaaagtcaccctccaagattgttgctgatagtctcagccagatcagtcgctcatccaccttccttccaaacattggtgtctgtttgaatgcttcaaacctttgtggtggaacctttgtatgtttgaacctctgttgtggaagaactagtgtgctggaattatgtatgacttgtgatgagaatgttgtgtatgatggcttttctgtgtattatgattctgtgagctctccc

SEQ ID NO: 182822 - DNA, 596 bp, Zea mays
  Clone ID: MRT4577_98317C.1
acacaattccagcacactagttcttccacaacagaggttcaaacatacaaaggttccaccacaaaggtttgaagcattcaaacaaattgcacgtaattctgacaaagttctaaccacagatatgttctagcaagggggaaaaaccttaagcaaaggcatcatcctcagacttggtatgcatccctacctcaatctttctgaagtttcaggacagctcgtagcagtgcattggtctcttcaaacttggtatgcatccccttcacttcctcttgggcctggcgcagcaaactttggttttcttcaagtgcggcctgttgagcttgtagttgtgcttgcaactcttcctgcttcctagcagcttcctctctttcagcttggagtttttcctcaaactgatataagatttcttcaagtgcggcctcatttagcacagcgcaaatattatgaacatgggagctcatctcagaaatcagatggccaatctcagaattagcagtagaagaaaggttgcttgctttcggagtggagccagcattcgtagtagcagtgaaagttgtggccgtaccggtgccgcgggtcaatcgcttccaaccagt

SEQ ID NO: 182823 - DNA, 874 bp, Zea mays
  unsure (1)..(874): unsure at all n locations
  Clone ID: MRT4577_98318C.1
cattgggtacctcgaggccggccgggggccgccttcgtgcccaccatgccgtcgcaccgccgccgccgctggtgaacggatccgtgcaccccgtacacctgccttggcctcctcccccctcccctcaacctagctccaccactcgcgcccacctccgtccgccggtggcgcaggggaggagccggccatcctcagggtggcgctgggctccggcaagctgcgcatcgaggggtcgctgggctttggcaagcttccgcacgcggcgccagctcaccgaccgcgccgtgctcgtggagcagagctggtggaagctgctggactgtgccgtgctcgaatttggacgcctctctctctctctcatgttgccatgctggacgcaagaaccgagcagcgggcagatgaaggagcagttcgtcgtggagatgctcgctaggccctcgagtgcggcggggtcaggccccgggagatcgcagcagcgtcaggaggacgcctcctcagctcaaggcagcaggccgcagtcgtcggctgcttctgatacaccggtggcgcagcaacctgacgcgaactctgtgcgagcgaagctcgagctcgccaagaacaccaagctcgaggcggccaagaggaagctccaggaaggctaccaagagtttgataatgcaaagaagcagagaagcatacagatggttcatccccagaacctgcccaagcaagcgaacaacacccagaatttccaacctagcgggccagcggcaggccaaggaatggcagcaacaggaattgaggactaagtacaacaacatggagccggatgcagntgatttctttggggaatgtatgaatagtccccgaaatggtcatactctgcttgcaaatg

SEQ ID NO: 182824 - DNA, 377 bp, Zea mays
  unsure (1)..(377): unsure at all n locations
  Clone ID: MRT4577_98319C.1
ggaatntcccgggtccgaccgcacgccccgtccgcggagcgnnngtgggtcccagattgggggtgcgatctatgtcggtctggtgacccagaggatatttcctgacgncgcnttcggcgtatgcatctgtccgggcgggtggacagatcccctgtacctgtcacagccgacaccggccccggcgttcaaggggggtcggcgccccatcaacattgtctcgatctgtctccaccacggtgctgcgttgggcgcctggggtcccgtggagatcnttcatgnagccgccacttgcccgcttctggtaccgcctaccgcgtgccggcttcaagtggcttggagcgcttttgctctacaccaaaacaccatcgttgtacccc

SEQ ID NO: 182825 - DNA, 393 bp, Zea mays
  Clone ID: MRT4577_9831C.1
gaaacttattttagatcataaaattaagaaggattagacacaaatacaacaaggtgggcccaggtacgcttttggatgtttgagtggtacggtattgcttccgtgacaccacggcaacctagcgcctcgcctcaggcgtggtgcatggcttgcccgccgcccggcttgtgcttggcgaacgcgacgagccagaggaggacgacggcgagcacgacgttcagaaccacctgccggtgcctgctgaggcccctcgcgagccgcctcagcgggtgacgcccgccgtctcgccgcgctgccaggccgccgccgccgtgggcgtcgtcgccggtcttgtccactccccgaaccgcgtcctcgtgcaccttcttctccgccggctgctgctgttgctgc

SEQ ID NO: 182826 - DNA, 141 bp, Zea mays
  Clone ID: MRT4577_98320C.1
gcggcattacgtctgcgctacaccaccatacacacacaccatccctggcacgcaacaagcagcctttgtttacggtagctgctatgcagaccatggggaaccctgctccgagcatcgtagtggccatcgccgcagccgtgg

SEQ ID NO: 182827 - DNA, 893 bp, Zea mays
  Clone ID: MRT4577_98321C.1
attgggacctcgagccggccggaaaaaaaaaaggcaaatcgaccggacctgagtgctctcgttctctctactccgctctctctcacgcgaggcagtgcatccttaatccagtgcatctttgagccgccgccgccgtgaggagctccgcccatccgtcgtcatccgtcaaatcagttgatacgaagacattagaggatataatcggcccttcaacttcaatgaagtctcatacacatccagtgaagcctcgctttcaagtcagcaatcggcctaaatgcaatttgctaaataaaagttctattgattctgagcaaactatccaatcttctatagcctccaagataacaactttgattgacccgcggcaccggtatgaccacaaccttcactgctactacgactgctggctccactccgaaagcaagcagcctttctcctactggccgcacttgaagaaatcttatatcagtttgaggaaaaactccaagctgaaagagaggaagctgctaggaagcaggaagagttgcaagcacaactacaagctcaacaggccgcacttgaagaaaaccaaagtttgttgcgccaggcccaagaggaagtgaaggggatgcatactaagtttgaagagaccaatgcactgctacgagctgtcctgaaacttcaaaaagattgaggtagggatgcataccaagtctgaggatgatgcctttgcttaaggtttttctaccttgctagaacatatctgtggttagaactttatcagaactacgtgcaatctgtttgaatgcttcaaacctttgtggtggaacctttgtatgtttgaacctctattgtggaagaactagtgtgctggaattgtgtatgaccaaaaaaaaaaaaaaaagggccctagg

SEQ ID NO: 182828 - DNA, 537 bp, Zea mays
  Clone ID: MRT4577_98322C.1
gcgttctttaaacagcaacatcatcgcaagggggtagggtagggttgagtactactctgcgccgagcggacggaccgacggacagagagatggtatcgcttgcccatatctacccaccgctatgatgtaattcccgtcggagagcctggggctgcgcgcggcgctgctggactctcacaaccaggcggtgagggggctcaccttgcacagcaagtgcatgaacgcgctgcgcaccaagaacaagtcagtcacgtagttgattagcacggtgctcttcaactcgttccaccccctgctcaccaacctgtcgctgtgctttttcctggcgagctgctcgccatcgacgatcagtgctcgcactttgaccaagtgtgggtgtttttggtgagcatactcggcctgatccgcgtacacgagcgtgttatcttgctcagcgatcacataccaatatacagcagccctacaacaggcgggctgctcaagcatacatgaaataacggcaccgagataataatcactctcttagaactatggggg

SEQ ID NO: 182829 - DNA, 296 bp, Zea mays
  Clone ID: MRT4577_98323C.1
tattcatacgagcttcgccctctctcttttaccccttctcatctcctacgctagggctggctaccgacgtgagttagccgaccaagtcgtacgcgcaggatcgcctcgtgcacctgctgatctagcgcaactcacacgaactcattgtggatctctgccttgccgtcgagctcctcacggtatccaccctcgacgaggtagtgtacaaccgctcgactgagttcatgtggctgttgcagaccgccttcctgactgacaccttttgattcatcatcaagcaaatgtggttctacact

SEQ ID NO: 182830 - DNA, 1182 bp, Zea mays
  Clone ID: MRT4577_98324C.1
gccggcacgagggcgacgtctcctcttccacgcatcctagggcggcgacacctgccaagaacacccgtcgccgcgctctcccgatggcgaccagcgacgagctcgcccagatcgacatctctaaggaggagaaggacaagctggtggcggaggtgatgcgctacgtgctcttcaagacgcaccagggctccgactgccccatcaagcgggaggagctcaccgggatcatcaccaagaactaccgccagcgcgcgcttcccacgctcgtcatcaacgaggccaaggagaggctcgccgcaaccttcggctacgagatgagggagctacaaaggacccgcgcgccggccacgcgctctggccggccggcacagcggcagtttaacgcggatgccaagagctatgttctggtcagcatgttagaccctgaggtgtacagcaagtacgtcgaggacaaggccgccgcccatctgtccggcttcgctttcgctgtcattggcattattcatcttgctggtggcaaaatgcccgaagaggacctctggcatcagttgaagcgggtgggtttgaacgagactgatgaagctcaccttgttcttggcaacaataagcaggcgctcgaacacctagtgcagcaaaggtacttgctgaaggagaaaattgctggaccggaaggtcatttcgtgatgtacgagcttgccgagagggcgttggatgaatccatcagcgtgaagattaaagatcatatttcacaggttgtgggcacatgcttgcagaagtagattgaagtggatggatacgacaatcagtagccctgtaggttatctgccttgcggtaggactagctgactcttatcaggctgggaagctacatatcatcttgcatggatatacgaggctcgtactctgcatgcagattttgtacaggagatgtgtgcttgacaagccctggcaactttggtgttactatatccttgattatctagattattatgtggacgacatgctgttgatcatcgcagcaggcttggcactaccttttgcagtgacctaatgtcacaaaacagcctgtcagtcattgcatgcgttgtgctctccttctgtgtgtagctgagtattcagtgacctgaccacatcgacatcataacgataatgctgtagcgcgccgagtccattcacaagtct

SEQ ID NO: 182831 - DNA, 1623 bp, Zea mays
  Clone ID: MRT4577_98325C.1
gtgacagatccataaatccaaccaacttctttcccccattgtgtcttattctcgtacccacaatttagcacatggatgcaatcatcaaggcttttgagcatgtcgaagcgacaaccttcaccattatcttgcaatgttgaagccaaaaatgcatctgactgcccaaatctcttctcaaacttttctcgaggcacaggaggtgcagtttctcttccagctacttcgagagcatgcacgtgggcggacgcgtgggcgggctttcctgcccaccgcgccgccgccacaacaccggccgcagaacaccgaccccgcctgcacagcactgcgccgccgccgccccaaatcccttcctcggctagctgccccgcaggcaaagctcaccgcgccgccgccaaggtcactagcaacatcgcgcccgatctggacatgctcatcgtcaaggccaccagccacgacgacgagccggccggggagcgccacatccgcgagatcctccaccttacgtccggatcccgcgcccacgttgctgctgccgtggcagggtgctcccgcaggctctcccggacccgcgactatgtggtcgcgctcaagtcgctcatgctcgtgcaccgcctccttgtcgatggcgacccgttcttccaccgcgagctcctccatggcacacggcggggtacccgcctgctgaacctctccgattttcgggacgaggcgcactctggatcgtgggatcactctgcctttgtgcgcacctatgcgctctaccttgaccagcgcctcgagttcttcctccatgagcgcaagcaggggttccttgacaggttccttgcttgaccacctacagcagctgcttgacaggttccttgcttgccgccccactggtggcgcaaagcaaagcaggatggtgctggttgcgctgtatcagattgtgagagaaagcttccagctctactctgatatctgcgtgctggcggtgctgctggacaggttctttgacatatgcggagtgcgtgaaggcttttgaggcatatgctactgcgcaggatgagctctgcattctatgcatgagtccgactggagttgcaaggtcatctgagtacccagaggtgcagcgtgtcactgataagttgctggagacgctagaaaagttcatgatggaccgggctttcccttcaaatggtggcaacgaggtgacttcggcatggcagaatcctgcagctgaacctgggaaggctgattgggagcttgccctcgtagagacaacaagcaacttgtccatgcagaagccagcaatgtcaagtggtatggacccgctgctgcttaagatgcatttcattgttgtcactctctttaatatctcttatcataggataaaatagaacttaaaatttaatataacagtagaatagataattaaatgaaacctgcttggacgcattcctgcatttcactttcttttgatgttcttgttttttcttagctttggaacattttcttttcgatccacaacacaaaacagcatgactttggccagcagttacatgtcttgctaggaggttttgttgcagttggggcatcataaccatacaaagcatgtcttctgaaaacataaccaggcccaacata

SEQ ID NO: 182832 - DNA, 845 bp, Zea mays
  Clone ID: MRT4577_98326C.1
accagctctctctcaccagccctttcctgcccaccgcgccgccgccacaacaccggccgcagaacaccgaccccgcctgcacagcactgcgccaccgccgccccaaatcccttcctcggctagctgccccgcaggcaaagctcaccgcgccgcccggccggggccctttcccctcttgcccgagtcgctagcctccctgcccctgcccctgccccgcctcctcccgtggaccacttcctccaccttcgcttccatagcaggctagcagctgagcgaggtcaactcttccgccggcggagagagagggagggagcggggaagagacgggagggtctccgcgcacctgccatcagccaccacccgatacccagatctaaatcaaagcttccgctccggttgttgtcggttggtcggtacctgggcggcggcggcggcggcacgggaggacagcgaacatgtcgtcgagcacgatccggaaggccctgggcgcggtgaaggaccagaccagcatcagcctcgccaaggtcactagcaacatcgcgcccgatctggacatgctcatcgtcaaggccaccagccacgacgacgagccggccgaggagcgccacatccgcgagatcctccaccttacgtccggatcccgcgcccacgttgctgctgccgtggcagggtgctcccgcaggctctcccgcacccgcgactatgtggtcgcgctcaagtcgctcatgctcgtgcaccgcctccttgtcgatggcgacccgtccttccaccgcgagctcctacatggcacacggcggggcacccgcctgctgaacctctctgattttcgggacgaggcgcactct

SEQ ID NO: 182833 - DNA, 237 bp, Zea mays
  Clone ID: MRT4577_98327C.1
gtattgtacctttttggtacgtgcttataaaatagaggcccacttacccagagagttcgtccaataccggtagagaaatgggagctacaggttgaggtccaaccgtccaggaacatgcatgcatacccgaaatttacggggtcatgcatgccacaatatgccttaaatcatctgggcaatgatgcatggctggatactagagacacacaataccgtagtacagtacgccaggagcct

SEQ ID NO: 182834 - DNA, 819 bp, Zea mays
  unsure (1)..(819): unsure at all n locations
  Clone ID: MRT4577_98328C.1
gaggccggccgggctattccattatacagctaatatccggaatgagcccgctcggccaaatcgaccggacctgagtgctctcgttctctctactccgctctctctcacgcgaggcagtgcatccctaatccagtgcatctttgagccgccgccgccgtgaggagctccgcccatccgtcgtcatccgtcaaatcagttgatacgaagacattagaggatataatcggcccttcaacttcaatgaagtctcatacacatccagtgaagcctcgctttcaagtcagcaatcggcctaaatgcaatttgctaaataaaagttctattgattctgagcaaactatccaatcttctatagcctccaagataacaactttggtatgtgtacttctgaacagagaaaaaaactttactactgaattgcagtagaaaaattctcttgtgtcatgtcttgttaatttatgtcctagtgtactgttttcttgatttttagaataacgccacaggctaccaaagttacaaacagagttcgttctcagatgaagacaggtcagaactgcggcgggtctgagtgtccgtactagcttttcaaactgagatttgtttttacgagcagattgacccgcggcaccggtatgaccacaaccttcactgctactacgactgctggctccactccgaaagcaagcagcctttctcctactggccgcacttgaagaaatcttatatcagtttgaggaaaaactccaagctgaaagagaggaagctgctaggaaagcaggaagagttgcaagcacaactacnagctncacaggccgcact

SEQ ID NO: 182835 - DNA, 732 bp, Zea mays
  Clone ID: MRT4577_98329C.1
caataatgaggtcaatactgaggcgacacagatggttccaggaactcgccctcaccaaaagatgggaaatatgtagcataataattaccatgtgctactgaaataggactaagtacaacaacatggagccggatgctgttgatttctttggggaatgtatgaatactccccgaaatggtcgtactccgcttgcaaatgagatatatgagcaaatggttgcagagaaggaaagagagctagaagaaggagaagcacaaaagtcaccctccaagattgttgctgatagtctcagccagatcagccgctcatccaccttccttccaaacattggtgtccctcaacgtccaagactggtcggtccacatcgctagctgcacaagcacgcacaactacaagctcaacaggccgcacttgaagaaaaccaaagtttgctacgccagacccaagaggaagtgaaggggatgcataccaagtttgaagagaccaatgcactgctacgagctatcctgaaacttcagaaagattgaggtagggatgcataccaagtctgaggatgatgcctttgcttaaggtttttctaccttgctagaacatatctgtggttagaactttgtcagaactacgtgcaatctgtttgaatgcttcgaacctttgtggtggaacctttgtatgtttgaacctttgttgtggaagaactagtgagctggcactgcgtatgacttgtgatgaaaa

SEQ ID NO: 182836 - DNA, 389 bp, Zea mays
  unsure (1)..(389): unsure at all n locations
  Clone ID: MRT4577_9832C.1
tgctttgacaaagttcagctcaattttgtatataaagaagtggtagacaatggcgctacctgtatttgttgttcactttgttgtgactgggagtactcagcttcctgaaactgtacagccataacatttgttatttttcttcaaatgtagaatgttttaaatcgctcaaaaaaaaaaaaaaaaaaaaaaaaaaaaaaaaaaaaaaaaaaaaaaaaaaaaaaaaaaaaaaaaaaaaaaaaaaaaaaaaaaaaaaaaaaaaaaaaaaaaaaaaaaaaaaaatataaaaaaaaaaaaaaaaaaaaaaaaaaaaannnnggggggncccctttttaaagtaaaaaaattttttcccggcgtatgtaaaataatttttttttttttggggcccc

SEQ ID NO: 182837 - DNA, 998 bp, Zea mays
  Clone ID: MRT4577_98330C.1
atacccttaccttcttctctagaaggaagatagcactgcagtttttgctgcaagaatggcttgccatctaagatctccaagtgcgctttctagcccttatatatccagagacaccattagagcaccatacccttcccttctctaaaaggaagacagcactgcagtttttgctccaagagtggcttcaagatctgcaagtgcactttctagcagttgctctcgctccaatgaaatcagtgttggggaccagttgcagagcacaaggaaactgtatcttcagcctcttcaaccattgcaacaatttacgtgttttggagaggtttggaagcgtgttcaacggcattgaggagactatgtccttgcctagcagccaagtcaaccctcgccaatctaagaaaaggaaagcagcggaggatgagctcgagcactcttttctgctactcgatctttgcagcgccatgcgtgcgagagagcacctcaggtattaaggtgggtggccatgaaaaacaattggttgtaaaaagaggagaaaacgcagaaattgaatccaacattcagtttcagtcctatatccgctttgcaaagaagatccagaagcagttcaagaagatcagtgaacagtctacttcagccaaccaggagagctgcaggatactcaagcgggtgaaactagagacactgatagctcaaatcaccagccctactcacatatcatattgaatttaattgcagtgcaaagttctagagtggtctctcatcctccataagacattccaggagagcagagttccatgtgaagtggagcaattagaggtcttggagatagaaattgttgatctggaggctttgttcacaaagctgatccaaagcagattttcccttctcaacactgtcagcttgaagatagtcgtatcaactctgagcctgtcacatctgatttgaggattagcttatccctctatataagaagaattgtacaacaaaactgtcttttttcc

SEQ ID NO: 182838 - DNA, 804 bp, Zea mays
  unsure (1)..(804): unsure at all n locations
  Clone ID: MRT4577_98331C.1
agccttttctcgtcgctggttctccatctccttcatccagtcagtccctgctctccatcgcacgttgagctcccttggcgtccctcccacggtcgcctccttcccctggtcgcccatggcggcgccctccctgctgcagctcgccccatctccctgaactccctccgtcgtgcccctgttccctggctcccgagcttcaaccatggagtacggcgggatagggcacgggtacatgtaccactgcatcaccatggggagatcaccaaggcctccggcgccatcggtctctcctacggcgcactccaacctctgcatcaacaaggtcgtcccggtgccggggtcggcgtcccctccctcatcccttccccagctgagctcttcaccaccgttctcagcgcccaaccccagcgcccggccccagctcggccaaattgggtctctcgcctctccctggacgccgccatggagttcgccggtagccgcccctctctgctcgtcctcgccgtcggctctagtctccagttcgctgttccccttccctgccatggaagctggccgctgctgctcggcttctctggtgcacgcgcggttcgccagccaagtcccctcaccgacggtctccttgctgcgtgctctgatagttgtgccatgtgccctcctcccatcgcccctctctgcctattctccaaccgtgttggcggntggtcgcattggccgtcgacctcgtttgggctcgtttggccttgtgtcgttaggctcgtcgaccatggtcactgccgcgtgtgcttgtccctgatgcatatc

SEQ ID NO: 182839 - DNA, 606 bp, Zea mays
  Clone ID: MRT4577_98332C.1
ggtacaagatattctcggcagcttgtctatttaaaataatcgtatcaactaagaggaacaagagaaagaactccacgctagcatactgtgtgcctttatacttcatattaaatcacacacaaaatttaaacatgcactgagactgcatattgcatagtatcaacaaaaaataataaaccaaagatcattatagatatgtagcactgtagggaactcccctacagttttcatggtaaaataacaaagatcatatgcataactagactgccgaggccaagataatacaaaaaacacattttaaaaaaaatcttattgaacaattgaaatatgactagttttaagtgtgttttccaggtaatgtttgccaacaacctccatcaaatcacagatgtattgtctacagcatgcaaaacttcaaccatgtccatgaagtgcccaggccacagatatagggagacagaacgttcaatatttttattcattattatagtcgaaagtattgccagtagactcaaccaaattggagttatgttcgcagcttcattctgtccataccttgcctcttgcatatgattgggtttgaagatttgtactttcaataatgac

SEQ ID NO: 182840 - DNA, 290 bp, Zea mays
  Clone ID: MRT4577_98333C.1
ctatcactagagaagtgttctttaaaaagaactgattccatatagtgagagccactgattggatggaggcgactcccagctcatacctcagactgaacaccatcacgtattttctaggctcacacgaaccctgacaccgcttgcgtttcaagctatacgctctacgaacggactacctcaaacatactcctggtgacatagaccagttccaccggcgtgcaccttaacaatctaggactggacacactacgttagcttcattcctttctaatacaccacggtgccgacag

SEQ ID NO: 182841 - DNA, 307 bp, Zea mays
  Clone ID: MRT4577_98334C.1
cggacacctgagccgaatcctgcacgagacacttgggaaaacaacaaacatgggagacggtcataatatgtggaaccatcaagaaggtggtcacatctaaagtatccatcttgctgctggtgcttatcagagttactcaagaggcctcgtcattgccaaagtcgatcatttggcagcacctgaacccgtacttcaaagggaacaccatgaaccagcacaactgaatggaattgtacctgcatcagctttacctctacagcaactgctacagcatgatgcgccagtatcacgtgcatcagcaagtgct

SEQ ID NO: 182842 - DNA, 448 bp, Zea mays
  Clone ID: MRT4577_98335C.1
gggcgtccggtcgccgtcgcacatgatcacaacatcatcgaactgacagaggacaaacaggccacgactgctctgtgaggtcagcgctgtcatcaccaccctcaaccgcaactgggccagcgcccacatctggacccacaacacccttttcgcggcggtgtaggcggatcactgaccatgacactgcgctggatgtcacggacgccgagaggctggagaggatcacggacaatccagattacctgtgccgtggacgcaatctctctcgaagagccacagcgtctaggaggactggcaccacgcacaccaagagaaggatgcaccaaatgatgctcgacgatggcgactacaagcacctacagcggcactctccatgacaggctcagaggcctaacgtcaccgagaggaactgcaacgacaaggactactcggtggtgaccatcagatg

SEQ ID NO: 182843 - DNA, 272 bp, Zea mays
  Clone ID: MRT4577_98336C.1
gggggggtgctgtggggtttctcttccttctcctcggggacatcctcaacctttccctcctcagcgtctttcttctcttcctcatcttcatcatcggaaatctccttgtgcggtggcttttcggtcctcagggtgttggggtcgctgctgatcgtgggggggggctcgtcccactccttggggcgacgctcctcacggtgtcctcactgccctcccttggggcgacgtgcggtcgttggccccctgcctggctgctgccctggcgtgctgcg

SEQ ID NO: 182844 - DNA, 927 bp, Zea mays
  Clone ID: MRT4577_98337C.1
cggggcaactcggcggctgcgtctggccgccgcgctcctacacgtgcaccttctgccgccgagagttccggtccgcgcaggcgctgggcggccatatgaacgtgcaccgccgcgaccgggctcgcctccggcagtgcgccccgccggatcatgaccaggagccgatcgccgcgcctcttccagcgccggaattggcggatcaccagcagcagcttctgcaactgcatggatctcccatgaccaaggcggcagtattattctctggccgccctgctgctgcttgctgtactcatcagcaaacttattgcaataacaacagggagggggagggggaggattctcctgctcggtacatatcaacgacgacgaccatcatcaaggacagcaagagcaaggtactcatctccatacctgcagcaacgacagcaacggggagcaaaaaagccgctactactatagcaatcatcggtgaggaggaggaggaggaagaagaagaggaagagatcatggtgacggggcggaggacgaaacgaaggcggctagtccatcagccgttctacgacctgcggcggcttccgccggcatcatcatcacccaataaaggaggagttgaagatgatgatgcaaaggtacccaaattaagcagccctagtagcctcagtcatcatcttgcaggccggcaagaagaagtggatctggagctcaggcttggcactagctgctagctagtcgcgatccgccgtccggtccctaaattaagttgcgtgaatggatccatatatctctcttttcacttcaccataattaagatcgagtgtgtgcgtgcacaactgaatcatatatatcatctgctgcttgcttcattcatatatcatatatatagtatgcttctcgtgaaaaaaaaaaaaaaaaaaggcccctagggcc

SEQ ID NO: 182845 - DNA, 274 bp, Zea mays
  Clone ID: MRT4577_98338C.1
tcggcaccactagccttgtgcaagggacgaggccacaccctgatatgctctgctgtacccggagtgtgtgtcccggcgcctgaaacaggctttgcggccccggtgctgatcccttgccgctctgtatacaaactggtctgctactacacggagccggtcccagcaccgcgaaggcgatggttgctgtattccagatgccctcgaccggtgcctataaacccacatcatctacagctgtgccaatgtactcaacgaccacaatgactcctaggag

SEQ ID NO: 182846 - DNA, 333 bp, Zea mays
  Clone ID: MRT4577_98339C.1
gtagaaaatttattttttccccggacaaaccccggggagggccggggcctgaaacgggacaaaacatttttgccctcccccccctgctttccctcccgggtggggcacaatacaattttatttaccccggagctgccctgcactgcactgcactgcactgcacaaaaaactgctcgctggctttagaatgggctcccttgttttccacccaaaggaaaacccaacaagaacccgggctccctcccaaggcccaacccctgtttgtacagtcaatcggaggttttcgtttcgtcccgtcccgtcccgggcggtaattttcccaaggggaagggg

SEQ ID NO: 182847 - DNA, 690 bp, Zea mays
  Clone ID: MRT4577_9833C.1
gagccggccgggacacccattgactcttcatctacagaccatagcatatcactcacaactcaaaatgaagtccagaccagtcttcctccggacgctccgactgcgaaacgccccgaccgcgaacattctcgctcgcccatcgctcctctccccgcccgccctcgccgcccctagccccttcccgtctttccgcgccctgtcgacctcgtcacgcctcctgaacgagacgaagcagcaggagcagcaacaaaagggggctgagagcggagccaacaccaagaagcccccgccaaagcaggaggacaacgcgcccccgcagtccccctggaaggtgttcgtcaatacgctcaaggaggagattgagaagaaccagggatggcaggacaacgtgaagcagctgcagggagaggtggacaaggcggcggacagcgaggctatgaagcgcgcgaggattctgtacgagaagacgaggatcaccacgatgatcaaggagaacccgaagctcgccgaggcggtaaaggatctgcaggacgctggtatctccgtctcagaggcgacggcacgagcgctgcaagatagcggggtcgcagaagcgttggtccgactcacaaatatgggccgacggttcacgcagccgatcaaggactcggcagtgggttaggcggatatcgaagcgctggacgacctggg

SEQ ID NO: 182848 - DNA, 603 bp, Zea mays
  unsure (1)..(603): unsure at all n locations
  Clone ID: MRT4577_98340C.1
gcgtcgacttttttttttttttttttttttgaaccacttataatatattataatatataatatttgaagatctatttatacacccttctataatacacgtttcagggcaaccaacataacaaagtctatgtctattctgcacgagcctatacaagcaaccaaacaaaagaatctgcatgaactcactctttttctaccaatactagctaagctcatacatgcttgnatcgacttatagggaaccaaacatatggatagtgcctcaaaaattttagagcatgcactacaacaactaactccaattcaggcgttgggtagttcttccatgcttccttagttgccttagtgcataaattattactgccttggcccgggcttttttcgtgcttcgagtcagcccacaagacacagcctaaatgtacacctctactatcagattaacaagatttcctagcctacctcatgccctctataagggtttattcggtttcatcaaaatctatatagatggaaggagatttacatggatttcaatccatagcaaatcaaaatccttcacaattttttgatctcttccacgagacatagaattactgaccacga

SEQ ID NO: 182849 - DNA, 590 bp, Zea mays
  Clone ID: MRT4577_98341C.1
ttttgttctaacccagacgtcgcacatgtgctaaggaggcaggggaggctctctctggaaacaagatccgtatgtgcactggatgctacgcggtggagctgcacggcgcaactgccctggacaacacgggcgtcaagaacctctacatcatctccgtcaagggaatcaagggacgcctcaaacgcctcccatcctcctgaggcgctcacatgtccatgcccaccgtaaagaatggaaagcccgatctcaggaataaagggatgcccgccgtcatccgccgccagcgtaagccgtcgctggtcgaaaggaccgagtctacatgtacttcgaacataatgctggagagattgtgaatcccaacggtgacaggatgggttctgtcatcactgaacctatgggcaaggagtgagttgacctttgcactaggatcgccagtgcagcaaatgccatcgattgacagcttgatggaatgagtttacacttgagtatgatcatctcaaatgggtgttgcaggtgtagtaatggcgctataggactcgatggctccatacatgctgggtgacacagctctgaaaggaacagatgtttct

SEQ ID NO: 182850 - DNA, 342 bp, Zea mays
  Clone ID: MRT4577_98342C.1
cggacgcgtgggtttacccttttatccggccctgtttgcaaccgtcaagccgtctgtaacttctctagacagcacgcatgatcgactacttgaagggaggttaatttatggtgttggatcgccagtgcgctgatgatgccaccgtaaagcatgcatgaagcctgggcttcggaaaatgcccatgacgagaggaggtgcaaataccttcagagcccaaacaaagacactggttgctctgtatactgcatgtgaccgtattttgcctcttacattctgtctactttacatgtggtaataccagaggaccctactgccttgcgcatggttaagctaacgctccat

SEQ ID NO: 182851 - DNA, 325 bp, Zea mays
  Clone ID: MRT4577_98343C.1
acgaacagatgcaagaagacgtgagacaggggatgcacacgctctagcttatgcagtgtcctggtgatctcggaccactcttcgtcagcgaagcacgttcgactcacagcactgtcgctgactacgacaacgccacctccatcacagagcacgaccatgacatgagagtcctctgcaaaatctgagagctcagcgctgtcagatctgacatctgagtcttacctatatcatatctgagatctgcacagcaccctgcgagtcaccctcagccaactacatgctcgtccaccagaccacaagttattcagcgaagactagaacaacc

SEQ ID NO: 182852 - DNA, 384 bp, Zea mays
  Clone ID: MRT4577_98344C.1
attcggctcgagacacaatccagagccgccagtgtagttgtgcctcaggtctgttgcgccagggggctcttttaaccagatttgggacttgcgctgacactgcaccacactgtttgtactgaatgttttttccacaaaataaaggctggggaggaggaagcggcggcggcggcgctctcaaaagagagggtgagatgaagactcgcagctcaatgcgaggagaaccatggcgatacgcaaacgcggctgttctggcgcttatactctgatccatcatagagctctccctcatccggaggagattcgtcccaatttggagatgccatcaaatgcgaggacgaccctctggcggcttgcgctccaccgtaaaaatggtttaccgtc

SEQ ID NO: 182853 - DNA, 317 bp, Zea mays
  unsure (1)..(317): unsure at all n locations
  Clone ID: MRT4577_98345C.1
tccaatcccaccgggccgacaccangaggggggggggcaaagaggaagaacccggaagtccccagcgacaccgaacacatacgcaagggcgcgagccaaaaaaagcgcccgaccaggagaccgagccaacaagggatcgcgcgaggacccgccgacagaccggccggcggacatggagacggagcggaaccgaacggacaccaaccgggacgagcaagagccaacagccggaggtgacggaggcgcaacagccaccggggcccagcggggcccaccaggagcaccgcatgaaggccgagagcgacaccgaccgcgac

SEQ ID NO: 182854 - DNA, 647 bp, Zea mays
  Clone ID: MRT4577_98346C.1
tggaaaaattccagctcaccaattcaactgaacagaaagcgcacctaccctacctgcaagcgcaccgcgcaccggacgccgacgaaggcgaagagctaagctcccgatgctgtcgcgatggctgccgcggaccgccgcgagccaggggagagcctccttgcggagctcctcctgctggcgctggtcaacaccgggcaatgcctgaaaacgcaccaacgcagaataaagtttccgcggcgaaaaaacgagatccataccccgcgtaagacgagagaggtgaaagtgaagcaaaaccgcaaattagaccacatcctcgagtggctccgccgaaaccaacccgacatagacggactcacgggacgagattccaaccaactcaacgaatcagatccctgctcccctgaaaaattcatcacccaccaggacggttacgacgactccgaccccggtcacggtttcgagaacatacgcaagcacaaattcggctacgccaacacatccaagggagacgccccccatgatcggatctccccagaaaacgcgcagaatggtgctcagcatgacgcagaacgtcatgaacggcttcaaaacccgaaggcgaactcatctacgtcttgctcgccgatgacttaatcgcgatcgaccgc

SEQ ID NO: 182855 - DNA, 387 bp, Zea mays
  Clone ID: MRT4577_98347C.1
agtgttaagagccccgtcatcggtgatctacttattgggaggggaatgagcaggtgtcagctcgctcttcatatagggtgctcgccaacgggctctccaccaaaccactgaatgagacagattacatgagctgctgcgagtggaaacgactgcgaaggcgactatctgaggccgggacccgttcgcgttcctctcgagaggacccgccaacctaggaacctagggcaatctctaagaccgtcgcgaatgtacatggatcagacaagcatttaccagctgaatgtacctcaaagccaaagcaaatacctgagcagtgcatgtccccacagtttgctggccccacagtgctcacaccaattgccatacttaatgccggctacgatttcc

SEQ ID NO: 182856 - DNA, 223 bp, Zea mays
  Clone ID: MRT4577_98348C.1
ttcgtagaaaagggatgcaaccagtttggtttaggaatcaaaagttttgtttcaagttttttttatactcgctagtagatgatttggaaaatctctactataccttaaggacacagtgagggcgtccaccaagcatcatcgggcccccgccaatctccccacgcgcgtcttgcttccccgctgtcgacatgccgcacgcgccccgccagccatcgccgccggg

SEQ ID NO: 182857 - DNA, 765 bp, Zea mays
  Clone ID: MRT4577_98349C.1
tgaaaatcgctgattttggtgttgcacgaattgaggcttcaaatcctagtgatatgacgggtgaaacaggcacacttggttacatggcacccgaggttctcaacggccatccttacaacaggaagtgtgatgtatatagctttggaatctgcctatgggagatatactgctgcgatatgccgtatcctgatctgagtttctcagaggtcacttcagctgttgttcgtcagaacttgaggcctgagataccgcgctgctgccctagctccttggccaacgtgatgaagcgctgctgggacgcgaacccggacaagcggccggcgatggcggaggtggtgtccatgctggaggcgatcgacacgtccaagggcggtggcatgatcccgaccgaccagccacagggatgcttctcgtgcttcggtcggcaccgaggcccctgacgaacttgatctgatggcgtcactgataatttgttatcgctatatctcagtgtaatctaatcgcattcgctatggctaatttgaggagctgtgtgattgatgtaaatgccttaacggtccagcacctcagcttcatcgtcgtatgatcgctgcgaatcctaatgcttggcctatgataagatcgagcttagaagagattattgtgacagagctgccgacgaagtttacaatctcatcatatatggtcatgaagtagacccactgtactattgcagtgtaatcgacatctttgcagaatgttaataaaagaacaaaatcaggatgt

SEQ ID NO: 182858 - DNA, 1120 bp, Zea mays
  unsure (1)..(1120): unsure at all n locations
  Clone ID: MRT4577_9834C.1
attgggtacctcgaggccggccggggcatatctctcactcacaatcacaagcaggcacatctagcttgcttggtttctgattgattagcaggttgttgtttagcgttagttcgagtagacgatgtattctctaccaggagcaatgtctactgcacctgcacgcgtcatctcttcctcctcctcctcctcctccttcgtggagcctcttctccttgcagcagcttcgccggcggcggctgcggcaaacagccaccaccaagtccgccagcgcggccacttggtccgtactttggcagcatcatcatcgtcgtccaacacgctgctgcggagtgacttcgatctccaggagggcctgacgacggacgtcaaacggatgctgcgtcagcgacagaagaagagcggcggcgggcgggagatgctggtcaccatcgacaacctcaagcgcctctgcatcgaccactacttcgaggaagagatcgaggccgccatggcgacaggcgcctgcacgggtctcctccacagcgacgacctcttcgacgcaacactcgcgttcaggctcctgagagaggcaggccacgatgtctcagcaaaagacgatgtcctacggaggttcatcgacggcgccagcggcgacttcaagctatctctgagcaacgacgtcagagggctcctgggcctgcacgacatgtcccacctggacgtgggaggggaggcggcgctgctccacagggccaaggagttctcgagcagccacctcgcgtccgccgtcaggtacctggacgaccctagcctcgcggagtacgtgcggcagtccctggaccacccctaccacctcagcctgacgcagtacaaggccaggcatcacctccgctacctgcagagcctgccctgcagctgcagagacgccgccgtggagagactcgcggttgccgagttccagctcaacaagtcgctgcatcagggagagatgcgagagattaaaaggtggtggatggacctagggttggctgaagaaatacctgtggtgcgggatcaggtgatgaaatggtgacngtggttccatggcagncctccaaggatcttccttctgccagntaaccgggtcgagatcaccaagnna

SEQ ID NO: 182859 - DNA, 945 bp, Zea mays
  Clone ID: MRT4577_98350C.1
ctggagctcgagggccgctttttttttttttttttctaatgcaaacttattaatcatttgtttccaaagatcattgccttcacgtcgcattatccaagttgaaagattaagtaacctgaagtcctgaaccctctgttggagtgctatcaagccgcgcacccaaaaagtctgtgacggccagcaacgagatctcaattgcgctcacgcgcgcgcacacacacacatgatcagacacaactggagcacgacaagaatgcttggagcttctgcctgatggctatagtctacgttcaagtggaagcagcatcctgcgtgtcccctggttttcctggagctgcctcgcggatgatcctgagggactcggcgaagtcgtccaggagctgacggccatccggaaactgcgcttcgtctaccgacaggactagcttcacggagtttatgtagctctggtagtgcacagtcagggcatgtgggtggccgtaggtgctgggcgcgatgtagacgatggggttgccgcagaacagcacctgctcagtcggcccgaccatgctggagaaggacagggtggtgtgcgtgaacatgccgtagcagagcgcagcagctgccttgatgccgaagagtctgagaaccatgtccccgctccagaaggtgaaggccgactccatggagctcttcttcctgcgcgtcaccttggccgccgtacggacgtactccgtggggtcgtcgtgcttggccaggtggaaggggatcagcatgtaccccagcttgtttccccacctcgcgccgccgttgttgtcgttgccggactccatcatgcttgccagtgcatgtatgccgggcgtcgcccgtaagttgacgagaacagccgaccgcaccgtgatgctcttactgtcgctttcacctgttctccggtaataataccgagacagagcgctagaggttatc

SEQ ID NO: 182860 - DNA, 558 bp, Zea mays
  Clone ID: MRT4577_98351C.1
ctgcttccaaaagatcattgccttcacgttgcaggatcccctttttttttttttttaacctgaagtccagaacctctgttggagtgcaatcaagccgcgcacccaaaaagtctgtgacgaccagcaacgagatctcaaaatgcgcactgttactgatcagacacaactggagcacgacaacaagaatgcttggagcttctgcctgatgggctatagtctacgttcaagtggaagcagcatcctgcgtgtcccctggttttcctggagctgcctcgcggatgatcctgagggactcggcgaagtcgtccaggagctgacggccatccggaaactgcgcttcgtctaccgacaggactagcttcacggagtttatgtagctctggtagtgcacagtcagggcatgtgggtggccgtaggtgctgggcgcgatgtagacgatggggttgccgcagaacagcacccgctcagtcgggccgaccatgctggagaaggacagggtggtgtgcgtgaacatgccgtagcagagcgcagcagctgccttgatccgaagagtcccgg

SEQ ID NO: 182861 - DNA, 810 bp, Zea mays
  Clone ID: MRT4577_98352C.1
aagaaaacactgtccaatgtgatcattgcagagaaccagttatcttctgcgctagacagtccagaagaagctttcactctgcagacagtggaagagcttacacaatctcaggggtagctggccaacagtgtagtgcagccagggcagcagagcgtgaggtgcactaccaggcaacaaggaaaaaaactatggagctccaggcaaggtgcgtctgcgtcgtcgcgatgctcctggtggccagcttcgcggggctggataccgcgcacggcgcgggggagtgcggccgcgtcccggtggaccaggctgcgctcaagcttgccccgtgcgcggcggccacgcagaacccgcgtgccgcggtgccgccgagctgctgcgcgcaggtgcgcgccatcgggcgcgtccccaagtgcctgtgcgccgtcatgctgtccgacaccgcgcggaaggccggcgtcaagcctgccgtggccatgaccatccccaagcgctgcgccatcgccaaccgccccgtcggctacaagtgcggcccatataccctgccatgaggtgatcatgaggagccaagtgatggcgggcagtgttgtggcagtggcacctgaaggactccaaactctgactgccaatatgccgtgacctctgtcgcatcttactttccaaagatcccgagaataatgtggctgtaataatgcctcaactttggaataaaattgtatctttttcaccaagtcgataacactgtaaaatgcaattgacaagaacagtttccaaaattctgtcaaaaaaaaaacaaaaaaaaaaaaaaaaaaaaaa

SEQ ID NO: 182862 - DNA, 479 bp, Zea mays
  Clone ID: MRT4577_98353C.1
tcgacccaggcctccaaattgtctcaaatgattactcctctcaagaagcacaccatcgtgaagaagcacaccgctaccttcaagcgtcaccagtctgaccgctacaagaccgtcaaggagtcatggagaaagcccaagggtattgataaccgcgttcgtcgccgtttcaagggccagattgccatgcccaagattggttacggtaacaacaagctcacccgccacttgatgccctctggcttcaagaagttcctcgtgtccaacattgccgagttgaacctcttgttgatgcacaaccgcacctttgctgccgagattgcccacaacgtctcgtcccgcaaccgcatcgccattgtcgagcgtgcccagcagctcaacatccgcgtcaccaacgccaacgcctcgtgtcagaacccgatgcttaaatatcttcgtctggaaccccgcccccccttcctccctcctacattttttttttg

SEQ ID NO: 182863 - DNA, 135 bp, Zea mays
  Clone ID: MRT4577_98354C.1
gcaattgattttgggccgtttgcactttgttaggttcattagggttattgtacgttgcaattgtccagttatctttgtatggatttgtactttatgtctgagaaaattagtgattgtgcttttatgccggacttg

SEQ ID NO: 182864 - DNA, 123 bp, Zea mays
  unsure (1)..(123): unsure at all n locations
  Clone ID: MRT4577_98355C.1
tccacttccagttcaacccggtccattacaagccaacattcnncnatcggtncgagtaancaaccaaaacgcgtgggttattactattgcgaatgcagtctttggatcaaagccacctatctc

SEQ ID NO: 182865 - DNA, 895 bp, Zea mays
  Clone ID: MRT4577_98356C.1
cgaggagcccgcagctgagcctgagcggctgcagctctctcttctccctgtccagcaccagtacgagccgcgacagcgccgccctgaaggcgccggtgccagcgccaccggcaggcgcggtgcccccacggcgcacccctctcctgtcgctcagcgtcggcgaggaggaagaggacgagggtgaggacgaggaggagtacctgctgggggccggcgccctggatctgcagctgacggggcccggtggcggcagcaacagcagcggcggctacgacgacgagcggaagaacatccggatgatgaggaacagggagtctgcgctgcgctccagggcaaggaagagggagctggagaaggaggttcgtcgcctggtgaatgagaacctcaagctcaagaggcagtgcaaacaagtaacaaatagtagcacactttgtctcttatagctaaaaatgaatgaatactcatctgtttgtatataacatgtaccagctgaaactagatatggctgcactggtccagcaaagcagcagcaagagcagctcccacatcagaagaacctcctcatccactcagctctaggctgctaccaataggaatatgtatgtgaatttaaagccatatatgaccaaggaagaatgggaggaagacgaacaaagctagctagactagactgcagcccctctaatccatggccattcgctgattaatacgataatatctcttatttgttggcttcttctagcttgcttcaatttcctagtacagcagtttatgtagtatttcctagattgttagcgcaaagctgcctttttcacccatggcatccactctagtggtgtccaggtagtgtcgatccaattttagtatagaggtcactcaaacctctctccatgac

SEQ ID NO: 182866 - DNA, 1174 bp, Zea mays
  Clone ID: MRT4577_98357C.1
ctccgctgtccgctggctgcgatagtgctgcctgctgctctaagctctaacccaatccaggaggatgccgaggagcccgcagctgagcctgagcggctgcagctctctcttctccctgtccagcaccagtacgagccgcgacagcgccgccctgaaggcgccggtgcccccacggcgcacccctctcctgtcgctcagcgtcggcgaggaggaagaggacgagggtgaggacgaggaggagtacctgctgggggccggcgccctggatctgcagctgacggggcccggtggcggcagcaacagcagcggcggctacgacgacgagcggaagaacatccggatgatgaggaacagggagtctgcgctgcgctccagggcaaggaagagggtacgaacacgaatctaagcagctcaacccatgtctctctctgacacacaaacactacaggcctatgtgcaggagctggagaaggaggttcgtcgcctggtgaatgagaacctcaagctcaagaggcagtgcaaacaagtaacaaatagtagcacactttgtctcttatagctaaaaatgaatgaatactcatctgtttgtatataacatgtaccagctgaaactagatatggctgcactggtccagcaaagcagcagcaagagcagctcccacatcagaagaacctcctcatccactcagctctaggctgctaccaataggaatatgtatgtgaatttaaagccatatatgaccaaggaagaatgggaggaagacgaacaaagctagctagactagactgcagcccctctaatccatggccattcgctgattaatacgataatatctcttatttgttggcttcttctagcttgcttcaatttcctagtacagcagtttatgtagtatttcctagattgttagcgcaaagctgcctttttcacccaaaaaataaaatctaggggggtccgaccccggtggatccaattttagtatagagctcactctctagtggtgtccaggaagtgtcgatccaattttagtatagaggtcactcaaacctctctccatgacagagctttttattcgtttcctgtcttttttttattgttctaatcataataagatacgcacacattcacctgtaaaaaaaaaaaaaaaaaaaactcgagactagttcctcgtgc

SEQ ID NO: 182867 - DNA, 278 bp, Zea mays
  Clone ID: MRT4577_98358C.1
atttgggatttgttcagcttttttactaaagatgcctaaagccacaggttttattgcctaacttaagccatgacttttagatatgagatgacgggaagcaggacgaaatatcggcgtgtggctggagccttcccactggaggctgaaagtggcttgtggtattataatgttcagatttcaagaggaaggtgcaggtacacatgagttagagagctggtgagacagttgggaactctttgtgcttgtgatctactggacttttttttgcaggaagtgca

SEQ ID NO: 182868 - DNA, 554 bp, Zea mays
  Clone ID: MRT4577_98359C.1
tcttgtttttgttgaaagttctctctggagtctgaatgacttataattgggtttgtacctgtttaaaaagatctttcaaataatctagacatatctttgctattgatattgctaaatgctagtaaaaatctctgaccttatgtatgtataactgtttttgaggttcttgggttggttggtgatgcccatgtgttaattcgagatagacaacgcaagatctttgggttagtcaacatgccaaaacttcaaatattcaaatctgcagttgatggtcttgttacaagtttggagaagtatccagaggaagaggatatatacggtattatgttttccattggtaagaaccatgggagcttttcagctaacatagctaaacatttggccaaagagattactatggcatctgacggagagcttatcttggacaaaccaagggtcaaagcattgttaatagtgtctatttcagcacctttttctaatgataagcacaagcagctgggtataccttcgattatcttcttgtatgcaattcccctactggagaagatctcgtg

SEQ ID NO: 182869 - DNA, 789 bp, Zea mays
  Clone ID: MRT4577_9835C.1
tcactcactcacaagcaggcacagctagctgctcacagctatacatcggcgcatcgccattaattagcagcggcttgctttggtttctgattgattagctggttgttgttcagttagttcgagtagtagacgatgtactctctaccaggagcaaccatgtctgctgcacctgcacgcatcatctcttcctcctcctcctccttcgtggagcctcttctccttgcagcagcttcgctggcggcggcggcggcagtgcaaacagccaccaccaagtccgccagcgcggccacttggtccgtactttggcggcatcatcgtcgtccaacacgctgctgcggagtgacttcgatctccaggagggcctgacgacggacgtgaaacggatgctgcgtcagcgtcagaagaagagcggcggcgggcgggagatgctggtcaccatcgacaacctcaagcgcctctgcatcgaccactacttcgaggaagagatcgagggcgccatggcgacgggcgcctgcacgggtctcctccacagcgacgacctcttcgacgcaaccctcgcgttcaggctcctgagagaggcaggccacgatgtctcagcaaaagacgatgttctacggaggttcatcgacggcgccagcggcgacttcaagctatctctgagcaatgacgtcagagggctcctgggcctgcacgacatgtcccacctggacgtgggaagggaaggcggcgctgctccacagggcccaaggagttctcgagcaggcacctcgcgtccgccgtcaggtacct

SEQ ID NO: 182870 - DNA, 1821 bp, Zea mays
  Clone ID: MRT4577_98360C.1
cattgggtacctcgaggccggccggggacacgactctcggcaacggatatctcggctctcgcatcgatgaagaacgtagcaaaatgcgatacctggtgtgaattgcagaatcccgcgaaccatcgagtttttgaacgcaagttgcgcccgaagccttctggcggagggcacgtctgcctgggcgtcacgcacggcaacttgtgcgaccgccggcgccgacgccccaaggcaggtgccctgtgaccaggccttcgccggtccctttcgcgtccttcgccggcgacgagcaccaccagttcgtacgggagcacaatcagaggtgatcaccatttgctgcctgtttggtgaaagttgcgtgatggatggatatggagaggcggctgctgtggccatggagttggaggccgaggccagcccatccagggggcgctcctctcctgtggtttcagggtcaccatcccagaattctgatggaagcatgtcctcgtggcggctgggcctcaagaacagcatccagactaactttggagatgattatgtcttccaaattgcctcttgccaggagatctcaacgcttgcagtttccttgtcaacaaatgcactaaagttttattctccagaaaccggacagtacctaggggaatgtaaaggacacgaaggaacaatccatgaaatctccttctcagctccatcgtcaccacaagtaatctgctcttgttcttctgatggaactgtcagagcttgggatacaagaaactttaagcagatatctttgctaagaggaggcgtgtcacaagaaatgttcaccttcgcttttggtggatcaaatggtagcctacttgctgcgggctctaatgcccaggttctattctgggattggagaagttcaagacaaattgcatgcttagaggaatcccacatggatgatgtgacacaagtcaaattcacaccagatcaacaaagtaaactcatttctgcagcagttgatggattaatatgtgtttttgacactgatggtgatattgatgatgacaatcatctgttatctgttatgaatgcggaaacatctgttgccaaggtgggtttttttgggaacaagtataagaagctttggtgtttaacccatattgagacattaagtgtctgggactggaatgatggggctagagagttgaatatagaggatgctcgttccttggccactgataggtggaaccttgatcatgttgactatttcgttgattgtcactattctgtgcctgatgaccggctatggttgattggcggcacaactgcagggacgttaggttacttccctgtaagaaatgaccatgatggaccaataggttcagctgaagcaatcctcgaaggaggccatacaggagtcgttaggtccgtgtacccctcttcaggaatccatgggagacttggccaaaacaggggcatctttggatggacaggaggtgaagacggtcgtttgtgctgctggcgctctgacgaaattgcagagacaaacaaatcttggatctctagctcactggtgtggaagcagcaaaagaaaaccaaaaaccggcatcagccctactagccgcaatggataccgtttggaacattcggcactgacaagggaaagccctgtatgtgctgtgagcatgttgtatcttcgctttgaattctactaggtcgtgatgaaacagcacattgtaggtgcagttttgacgttgcttattgtttgacaatgcttgtctatttcagtaactgattattaatctagcaaagacatggaaaagttgagtattgaaaaaaaaaaaaaaaagaaat

SEQ ID NO: 182871 - DNA, 802 bp, Zea mays
  Clone ID: MRT4577_98361C.1
cccacgcgtccgggcgtgtacagcgacgacgacgtgcgcaacgacaaagctgcaggcggcagcagcagcagcaggaggccggagatggcgtggtacgagcggcgccggccacggctcgggatcgtgtcgcgcaaggggaggcgcgtggtcgagaaccaggcggccgtggcgcagctggcggcgtcggtcgggttcgacgtggacatcatggagacggccaacggcgcgccgctctcggccgtgtacgcgtccgtgagctcgtacgatgcgctggtgggcgtgcacggcgccgacctgaccacgttcctgttcctgcgccccggccgcgcggcgctggcgcagatcgcgccgctcggcatcaccatgctctcgcgcaacctcttcggcgtgccggcggccaggatggggctgcactacgtgcagtacgacgtgagcgcgcgcgagagctcgctgagccgcaggtatccgctcgaccatgtcgtcgtggccgacccggcgagggcaaggcgggagcaggggaagcaggagtgggagcttgtggagcacgtgtacctacgagggcagaacgtcagcctggacctcggcaggttccgggagacactggccaggatccactcccgactcaaggagcaacaacaaggtcacgcttccaggtccagtccagatgcgtcaccgcaaatataggcttgttgcatactgctaggtaacgtagacgtttatttggtgctataaatattgatattttacttataaaattagtgatataaaaaaattacataagaaaaaaaaaaaaaaagcggcc

SEQ ID NO: 182872 - DNA, 609 bp, Zea mays
  Clone ID: MRT4577_98363C.1
ctctaatcgccgtgaaggagcgcacacaggggagaaaaaaaaagcgtaacatctatggcggcggtccaaagatagaacagtggcgctagacagggagagggcaaactctacctgtgctactacatgggacacacaggctagtcaacgcacaagtcactatagatgaaatggaggccatacggcaagctcagctacgcttacaactccaactacaagaacgacaccatcatccgcacggtggtcttcttctacatcctacaatgctagcacaggtcagcatgatcatccactaatgcgacatcatgaaggatgacgacagcaactggaccgagacactctgaatctgccggcaggagcttgagatcgccatgggcaacgagcacatttgattcaccacttggaagatctgcttcctcatcaatgtccagtccatcatggacccaaagagcctgcggatcttctactaccttgcccatgatctgaagagtatgagagcctccctcattaacctctacttcatgatcaagccaatccaatcttgagctacatcccaagccttcatgtatatagcctgtgagactgcgagtgttatgacagagaaccttttaa

SEQ ID NO: 182873 - DNA, 801 bp, Zea mays
  Clone ID: MRT4577_98364C.1
atggccatacaggacgagctaaacaactacaagacaaatgaagtatggagtttggtgccatgtcctaaacaaaatgttgtgggaaccaagtgggtgttccgcaacaaacaagacgagtatggggtggtgacaagaaacaagccaagacttatggcaaaaggatatgcccaaatcgcagctgatcctactcttttcactaagacttgccatggtgatttgtttatatgccaaatatatgtcgatgccatgatatttggttctactaatcaaaagtcacgtgaggagtttagcaggatgatgatgcagaatttcgagatgtccatgatgggtgagttgacttacttccttggatttcaagtgaagcaacttaaggaagggacattcatccctcaaatgaggtacgcacaagatgccataaagaagtttgggatgaaggacacaaagctcactaagatgctaatgggaactgacggacatttggacctcaatgtgggtggtaagtccgtagatcaaaagaaggtaaagaataaggtagagatgcaaactctcgtggatgacgtcggcatttttaccgaggtatccaaaaccacgcaagactccgactatgataggtgcaaggttgataggatgagcactttagggacttgtcaattactgagaaggtccctagtgtcttggagctcaaagaaacaaacatttgttgccatatccaccaccgaggccgagtatgttgccgcaagtcagtgttgcgcacaactactttggatgaggcaaacccttcgaactttggctacaatttga

SEQ ID NO: 182874 - DNA, 506 bp, Zea mays
  unsure (1)..(506): unsure at all n locations
  Clone ID: MRT4577_98365C.1
ctcagaagatgggctggcttctctctccccctcttaccaagtcacgtcactcgggtctagggttccttcagggctctggggacgggcgatcgcagccgctgctgtggcacactcgaggcttcttggggggccgttgctcgggccaggaggagcaaatgcttggcacaatgtgcttctgctcctacgagcaaccatcctcatgctnccaaggataatgggccaggcctcgtagaaggaggaggtcaagcagctgcgcatgaactaggtgagctttaggcagctgcttgctgacctgtatgagcaccttttattgtgcttcatgaccatgaacaaggccaggagcatggtgatgaacttcatagctggcgcagagcagaactccagttgaccacaagaaaaaaaagtgttcgtaggacagattgtaacttctgtgcatactacgtagtttttatttctcagttctggaaaaaaaagagagactaatatttccttaataaaaagaaact

SEQ ID NO: 182875 - DNA, 269 bp, Zea mays
  Clone ID: MRT4577_98366C.1
gggccaaaaatcccgagagccttcaatttttgcccctcctgatagcaaacaaagccccccccccagggggcccccgacgtttaccctccccaaacaacagggccccccccagcaaagcttaaccggccccaataaccggaccccccccttacaaaactttgggatggagggcccagtcaggttttgcaaaacccgatcccggattaacgcccgggtgcatcatttttttttggcagctgccttggaaaccctggccccgggcgggtcct

SEQ ID NO: 182876 - DNA, 167 bp, Zea mays
  unsure (1)..(167): unsure at all n locations
  Clone ID: MRT4577_98367C.1
tcccggttcgacctaagcgtccgcccactcttccagtatttattccctggggagtgagactgctttcnacccatcctactgccttttggggtggagtttggcaaatttgcctccctttataagttctacagcggtcgtaatttgcttgttgtcaactttgctttcct

SEQ ID NO: 182877 - DNA, 231 bp, Zea mays
  Clone ID: MRT4577_98368C.1
gcacgagccgctgcctcggcgccgtcgagggaggcacgtaaggcgcgcgcgaagagcgcaggaaggtggccccggcgcccgcgcacccaagcacaagccagcccgcaccgccgcttccggtgccggcaagaaggtcaacaaggccagcgcctgattagcggcggccgtcctggtcccctcgcgcgcgcctccgtgtattatactagccggtagtagcagtaggagttgcaa

SEQ ID NO: 182878 - DNA, 235 bp, Zea mays
  Clone ID: MRT4577_98369C.1
attatctaactgctaaggaaaaaatttactggtgccatggctcgcactatgtacaattttaacacctttccaggggtggttttcaaaaaggtatgaaacaggattaagccaaaaaaacatatgacacctgttgtgtcaggttacatttttcaatctttaaaacatgtcattcaaaacagaacttaaggtgcgtttgagatacttagtttctaaaacaggctctcaacggcctaat

SEQ ID NO: 182879 - DNA, 1581 bp, Zea mays
  Clone ID: MRT4577_9836C.1
actactcctcggagcagcagagctgcagtagtggaattaattaatcgaacccaccccaccggggaagaagaagaagaagaagaagcctctccttctcctttaagcttcgaatcatcctttccttccccctcccccctccctccctcccacttcatctcgccgcgacgaagcttccaaaacccccaaaaggatcccccaatcttcgcctctgcctccggcccgatcaatctctcagcagcggctgccgcgcggctccgcccgcgacctcggatccatggagaggtacgagctgctcaaggacatcggcgccggcaacttcggcgtcgcgcggctgatgcggaacaaggagaccaaggagctggtcgccatgaagtacatcccccggggcctcaagattgacgagaatgtggcgagggagatcataaaccaccggtcgctgcggcatcccaacataatccgattcaaggaggtggtggtcacgccgacgcacctggcgattgtgatggagtacgccgccggcggcgagctcttcgaccggatctgcaacgccgggaggttcagcgaggacgaggccaggtacttcttccagcagctgatttgtggcgtcagctactgccactccatgcaaatctgccaccgagacttgaagctggagaacacgctgctggacggcagcccggcgcctcgcctcaagatctgcgacttcggttactccaagtcgtcgctgctgcactcgaagcccaagtcgacggtcggcacgccggcgtacatcgcccccgaggtgctctcccgccgggaatacgacggcaagacagccgatgtgtggtcctgtggagtcactctttatgtgatggctggtcggtggttacccttttgaggacccagacgacccaaagaatttcagaaagacgatcgggaggatcatgtcaatccaatacaaaataccagagtatgtgcacgtgtcgcaagactgcaaggagctgctttcaaggatctttgttgcaaactctgcaaagagaataacgatcagggagatcaggaaccacccctggttcctgaagaacctgcccagagagctcacggaggctgcgcaggccatgtactacaagaaagacaacagcgccccgacctactccgtccagtccgtggaggagatcatgaagatcgtggagaaggcgcggacgccgcctccttcctccacccccgtggctggcttcggttgggcggaggaggacgagcaggaggacagcaaggaaccagacgaggaacacgaggacggcgaggacgagtacgagaagcaggtgaagcaagtccacgccagcggggagtttcatctcagctgctgagggttttcgccggcctgctagtctgtggtaccagccgatgatggacctgctagtctgtggtcttgttttcaagttttctttcatttttttctttcttttgctgtggtgccgcatgactgcaacagttgtaaattattgaagggggttccagcgttgcccttgtattgactcattcaagctagcatggggaacataattatggaataaaacaggtcgttgagcatgctgtaactgc

SEQ ID NO: 182880 - DNA, 809 bp, Zea mays
  Clone ID: MRT4577_98370C.1
catggtcttatccgggatgctgagggtcgaaaaatgtcgaagacattagggaatgtcattgatcccctagataccatcaaagagtacgggacagatgctttgagatttacactatctttgggcactgcaggccaggacctcaatctctctacagaaaggttgacgtcaaataaggctttcacaaacaagcgtggaacgcagggaaatttttgttacagaacttgcctgataaaaatgatgtctctgcatgggatgtcttgttatctaataagttcgactcagaaacatcactccagaaactgccattggcagaatgctgggtgggtacagggacttcctgaacttattgataagggcagcaaaagctttgataaggttttttttggagatgctggttgaaaaatatatgattacttttggggggattttggttgttgggtttttggaacttggcaaacaacggtttaccaattcaggggccagaaccgttgttgttccagccaaaagggttttggggtttgtgttggaaaccatactgaagtattggcttcctttaatgcctttcgtaattgaaaaataagggcaggcttttccatacaaaaaacaagcactaatggttactccttggcctaccactgaccttcttaaaaattggaggtccatcaaacggttccagaattggcaatcatggttaaaaggaatcaaaattgttcaaccaaaatattttgttgagccagttaaacggatataagctcttgttgttgttactgcaaatgtcctgaatttgtatcaaggaagaagcaggtcct

SEQ ID NO: 182881 - DNA, 328 bp, Zea mays
  Clone ID: MRT4577_98371C.1
cacggtgactacaaggtcaccgtcagccacccggcggccaactccaccgtggtgcataacctgagcgtcgacagggagaccgatccccataccattcaccatacacgtctaactgccttagatactagcctccttcctacccctagtcctaggactacacatatatctatagggcgcccgagagacagaattcctggtgaggcgatccatatgtaatgttcatatatacagtataaaaaaggaggaatatacatatgatatatgttgagagggtggtctgtccattctataatatacagctttataaaaattttaaaccatacataaa

SEQ ID NO: 182882 - DNA, 457 bp, Zea mays
  Clone ID: MRT4577_98372C.1
gggggcaaaaacaaaccaattttttccccaacaaaatagggggggggggggggatgtttcaagccccaacgggccaggttgttcccaaaaaccgcgaaaaaaaagaaaggcccccgggcttggttcaactggggggacaaaaacccttgccccgcgaaaaaaaacccgagtttgcccttttttggaaggaaaaaccccttccatgccttgaaaccccctcccctcggaaaaaactggaggggaccggctttgctgcaaaagggccccaagcaaggaacgggtccattgatgtaaaaatccacccccttggccttggggactggaagtagtaattccaaaaactccttaagggccccgggcccacccacacccctaagggggggaagcccaaccacaattttccaccttgcagttgattttttaaaaacccaatccaaatccttcaaaaaaatggttt

SEQ ID NO: 182883 - DNA, 382 bp, Zea mays
  Clone ID: MRT4577_98373C.1
cattattgtttttttgtttattcttttttcggacaagaaaaaaatccttgtatttatatataaaaaacccgccgtgcagagcactttattttaagcagcagtatattgcgttacatgcatgtcatactggtagcctacagctctacgcattccaaatgcttaacgggaatccattatctaacgcagtctattgcgggcacaaggaaattattttatggcccagcctgaaccttctttgccggtgcactcagaggaatccttcttgcagggcttacagcgggggacgagcagggctcgaagaagcccccataccctgttggacactgcttcaactttccatggatgtactttgtgccagtggaatgtgtccagtgcatgaccc

SEQ ID NO: 182884 - DNA, 761 bp, Zea mays
  Clone ID: MRT4577_98374C.1
ccggccgggaaacccgcacgcaccctgtggagaatggagatggcccaccccggcgcctccgcgtccgccggcgttgccgacatcaccggcgaggtagcgttctggaccgcgtgcccgcactgctgctacgtgcactcattcccgcgtctctaccttgggcgccgccttcgctggccgacatcgggctggcggcgggccttcgtcggcggtgagctccctgggccggcgcctattggccctgggtttgacatggacttctggacctgggcattcttttcactagggccgcccggaaccggcgagaggtgggtgcccttcactacatttcacccctttaattctcgggcgggacccttccccggcccaaaccccgggggcacattcggcgacacgccattcattggagggcctactttcaggaggaagatgggcgtatgtttcaagggtagggcacgggctgaggcggaggaggaagaggttgcagccgccatcgatctcgaagtcgaggccgaggcgggtgtgctcggggagcaatgggacagcggcatcgccatcaacgagacggtggacctcagcgagttgggcttccgcgtcgacgagatgggagtgctccacgatttgccctgaccgatcaagggttgatgaagggaaaggttgtgcctttttgatcgccaacttgctcttgttaattctgcctacatagtaacagctcaactgggtcgatgggttggttggggaaactgagaactgcgctatcaaac

SEQ ID NO: 182885 - DNA, 317 bp, Zea mays
  Clone ID: MRT4577_98375C.1
ggaattccagtgtcgacctagacgtacgcgtacgcgtacgcctacgcgtcctgttctcacatatataggacagagaacaataaattgcagaatccgtatcttattatcaactggtaataatcccttcgcgtcaagcgcatcaaggccctgttcaaagcccacacaaagcatcaccggacggtgctactcgacaacatacagatcatcacgaatcatactatccctatgctatcacggatgcacgacactgaccgcatttctgagctcatctactagaatacccgcaacgtactcaagatctttatggaaaacttcat

SEQ ID NO: 182886 - DNA, 322 bp, Zea mays
  unsure (1)..(322): unsure at all n locations
  Clone ID: MRT4577_98376C.1
cacacacacacaagcagagcgcacccaaagggggccgggggcgccnccccaaaaagacccgaaccgaggcaaacacacccaccggcagaccagacaccacccagggggaggggaccgacaccacacaacagcggaagacggccacacccaaaacaaacaaagcccaagaccagaccagcgcaccaaacaggggagaggacaaacagcgaaaagacgaggacacgcacccggacaacaggaaacacaaagagaaaaaccgccaacaggaagaccgccacaggcaagaaaagaaaacgcaacgacaaaaccaagcacaggcaac

SEQ ID NO: 182887 - DNA, 290 bp, Zea mays
  unsure (1)..(290): unsure at all n locations
  Clone ID: MRT4577_98377C.1
gggggccacngacattgcggaaggnncaaaggaacagggacagngcnngncacgaggnanngccngaggaaagaaaccccagggcaaaacgngaacccncagngacaaagaacggggacacngaagcgnnagacaagggagagancgacaaaganaaaggcaanccccaaaagagngcanccaacggcgaggagacaaacccaaaccnaannggcacagagcngacgagaagaccaaggccaaacnacacggaggggcngcaacgcgacaacacaaagggcangagagaa

SEQ ID NO: 182888 - DNA, 1230 bp, Zea mays
  Clone ID: MRT4577_98378C.1
cggacgcgtgggcggctgcaggccatggaggcgtcgacggcgcggcattgggctgaaaacatcaaagcgggcagggcggcggccgagcctgaactgcgctcgcctggcgacgcacttgggccgggtcacgccgtgctttgcacagatagaatggtacaaggcgctgttcgacgcagagatggggtactacgacgcgttcaagcagcggcggtcgcccaggaagtacaccaaggtgaacttaaaccgcatcaagctgggccagttctgggaccgagtgctgagcatgctcgacgccggccagctcccccacgatttccaccgccgtgccaagtgggtcaacgcctgccgcttctaccagctcctcgtcgagcctcttgacattgccgactaccaccgccacggccaccacctgacgagcgggagctacatgactcacggccgggagaggaggtacgagctgttcgacaggtggtggcaggagaaggcatgtacgggcgctggcggcgacatcacgtcctccatgttggcagcgtcggcgagcagccggagacgcagcaaatacgccgggctcacgcaggacccgtgcttctgggcgagagtggaggaagcgagggaggagacggagagcgctcggggcgagcgcgacgtggcggagctggcgatgaagctggaggagctgcaagagttcgagcgctactcccgtgagctggtggcgaacaaggaggtgtctgttgacgtgctcgcgccgcagtcgagctacacgccccacgtggaggagtggaaccagctcaagctcagggatgaggtgaggacactgttgctccagttttgagctgagttgcaaacagctgatgaatttgtagatagctggtgggcattctccaaatggttcagaagtacatgaatcatttgatcattgtccatggatgctactatatagctgattgtaaatatatctaaacctagaaacattgcagtggattacaatatatttattctttcatgggtaccttgatggcccgatactgattcgaaaaagctttcgagcaaggaggcttgaaaacagctgaagttcagatatggatggatggatgctagtaagctccaagggcagagccagtatttcggtttgcgaaactgtgcagaagattccctctacatataaaatgcacaaaattaaatctggaccattcatatctaatcattcaatatctaacggcttaacggttg

SEQ ID NO: 182889 - DNA, 364 bp, Zea mays
  Clone ID: MRT4577_98379C.1
gtctatttatttggttcttgttctctaccggcaccaggccaacacctgctgccaccgtgcgcgctcaaccaaccactaccagatggtagtaatggcaaacagctgctgcatcttggagagcgacccatttaactggggcgaagcgggggtgatctgcccgagatccacctggaccaggtcaagcgcatggagccgcaggaccgaggggaacaggtcaagaacgagggctccaccgtctgggttggccatgtggtcgccgcggcctgcgtcaaggacgccgttccatgcatgcatgaaactgaactaagatgacagtccgagctgcaaggacactaccaagtggatcctcgactgcatcggccac

SEQ ID NO: 182890 - DNA, 458 bp, Zea mays
  Clone ID: MRT4577_9837C.1
ggaattacaagagccctggcagacccatatagcaggggttaacacaggggcccaaaacaaaagggggacggaccagggggcaagtctaccggggcacaaataaaaaaaggggcaggggggaccttatgagcccaaaactggaaaaacatcaacagccccagggctgggaaaagggggctccagctttttgaccgaataacggatcccgccgggaaactaaggggggttgtccccggaggggcggaaaaagcggttgtaggccgcccccccccacaagggaaatccccaaggggacaatggggatccccaccccgggggggggggggcgcaactggttcccccccaaagggggccccccccactcgcccctccgccggaaaaaaccccaggcgcgttgaggcccttccctccggtggccattggctccgccgggcttttaaaacccttccccttttttt

SEQ ID NO: 182891 - DNA, 608 bp, Zea mays
  Clone ID: MRT4577_98380C.1
tttttccaagcccagaggaactgaataaaatgttaaaggccatggatgatgttgacatgctaacccttgttattcaaaagatgagcaaggcatttcctagtttgatggacacccttctccatgagcgagatatgtatatgttttcaacgttgttgaagtcggccagggaatattcttcagtggttgcagttgtgggaaaggggcatgtttctggaataaagaaaaattggcaacagccaattcaggtaaactgcttattagaattacctgatgctaaccaaggtccttcaaagctgaagattttggcatccattggagcattaaccggagtaataatagcatccggaatatatgtatggggtagaaagtaacagacgtgagtgcaatgtgttcaatgagcctttaaatctcgaaaaaaagtatttagtttatttacctataatctgtttcatttgttctaaatataaatagatgtaatttctgaaattgaaattaaacaaatgaaaggacaggtgcaaaaaataaataaaaaaaaaaaaaaaaaaaaaaaaaaaaaaaaaaaaaaaaaaaaaaaaaagggggccctaaacttaaagtaaagggcccct

SEQ ID NO: 182892 - DNA, 263 bp, Zea mays
  Clone ID: MRT4577_98381C.1
gcggccggtcgggaaaaaaaaaattacgtcgtcctcttcatcagcttctgattgctctggggctaaggagagagatagagcgatagagagatctattacagaggctagctaggtggtcctccaacgaagatgttgcgcgtccgttcaatcgaacaggtggtgtaggcgccgaagcatgtgtggttgccggcaagtcgtacgcctgcacctcaagacgaatgcgtcctagctgaagaaaagcttccatgggcccctacgagccg

SEQ ID NO: 182893 - DNA, 230 bp, Zea mays
  unsure (1)..(230): unsure at all n locations
  Clone ID: MRT4577_98382C.1
cngacgctgggcgacctgggnnggatgatgggntgcaggcacgngtaccgccttantccggccggcnncacgccggcnnccacgttcctctcgggctccnancccagacccgcccacctcaccttcttcccgangctnacncctacctccntntccnccgccgcagctgccaatgcnccgcngccccacatngtcgncgtgggtccgcnanngncgacatctaggtcgng

SEQ ID NO: 182894 - DNA, 252 bp, Zea mays
  Clone ID: MRT4577_98383C.1
cttgacttgatcatggataagcacgctcgcgtgtgcgctgtagccgcgagctgctacgacataggccacctgacgtacgtcctcgacggcgacaacctcaggcacggactgagcatggaactcagattcggagcatatgacggcacgagaacatcagcagagggaagtagcagcactgtttggcgatactgacgtcgtctgacacgacaagctcatatcgaccgacagatgcgaacgaagcacgtgtcgcga

SEQ ID NO: 182895 - DNA, 405 bp, Zea mays
  Clone ID: MRT4577_98384C.1
tctcttttttttttttttttttttttttttggggttgttttttattataaaaattcttagtttccccccgtttttttccatttttttcatgggggaggaaaacgcaaaaaaccagggggcccggaaatgattaaatggcccccccaaacagagaaaaaccccgctgatcggacgcggggtgttataaaaaagccccccgaggaatttgatttttcccggggggggttgaacaaaaaaaaaaaattaagggtgcaaaaagggggggcccccccaaatataacacccgagaaaaaaaaggggggggggggaaaccgggggggttcaaaccggggccggggggcgggaaacatgggccggggagaaacagccaggaggccggcgaaaacacccccggggttaaggacg

SEQ ID NO: 182896 - DNA, 289 bp, Zea mays
  Clone ID: MRT4577_98385C.1
cagacgacacacctttttcatggtgtttttcatgtaagtcattgacagttggaacatgaaaaatcccacctgagcttttggctaccttagcttcacgtgtatcagcagaattttccatgcttacttgagaaaatcccttcaagaggagctcagtagctatatgcattgaggatactttcacttcttttttttgctttattgcagtcttctaaccatgttactttcactatatttattacaccccatgcagccagacgtcttacctccttttttttcctcatctgaaggt

SEQ ID NO: 182897 - DNA, 567 bp, Zea mays
  Clone ID: MRT4577_98386C.1
catcaggtcgctgctatcatagatgctcgctcgagcaataccggtaaatcacagcctttcgacccgcatcatggcacactatctgggtccgagaacgttaagcgcttatctttcaccaagggcagacctcataagaggtgctgcgaggtaggtgcggcaagaaacaaggatgggggcatccttgctcgggattggtcatggttagctccagcatgatgtttgttgcagccccctgcctaacactgtgcctgcgatccgtcaccaccaccttatttctatccagcgctcttgaacatatcccaccgaagattaacaagggtgaccgcagcaaattatcacaccctgtggcaactcgaacaataagggtgtaaaaggtgggctcattacgagtctgccctgctcgccaagctgggtatccgacccttctggtactgtctacaagccaccactgtttaccaggatgggtccttgctaacccctgcagtgctttacctttatgcagatgacctgattgaacaatgttccactggtgcatccatggctgctcttcctcattactggcagatc

SEQ ID NO: 182898 - DNA, 482 bp, Zea mays
  unsure (1)..(482): unsure at all n locations
  Clone ID: MRT4577_98387C.1
tntnnnnaaaaaaaaaaagggaaatttatttgtgggggattatataaaaaaggattggcggggaggaaaaaaaattaaaggtttatttgatggaaaattgaaaaaaaagaaaaaagagaaaaagggcgggggtttaaattgttaatggggaacccagggaattggaaaggggggtcctcctggttgaattgttgtttgaaaaaaaaatttttaaagggggggggaaccgtgggttaaaccggaaattttggaaggggacttggaggggaaaaaaatttttttataaggaggggtattaaaagttggggaaaaaaagggaaaaagtgttttttgggggaaaatgttattcgttaaaaatttaaaaaaaaaaaaaagggggaagaataaaaggaaaaacttgggggggctaatgagggaggtaactaaaattaattgggtgggggtaaatgggcgtttttaaatgggaaaaaatgtggggccag

SEQ ID NO: 182899 - DNA, 316 bp, Zea mays
  Clone ID: MRT4577_98388C.1
gggggcagaggaacattcatccaacaacacacacccagaaaagacccaaggggttcaaaagcagctggggtcttgcttgattctgaagacaagccccccaacaatgaaatagatcacgacagaagtctcgaaccctggaccccgggggatcaagggggactttatctttaccacccccattaaagcggccccaccatcctttcctactcattggggggaaccagccccatacaaaaagacagcagggcaaatcttgggggagggagtccatctggaacagttccaggtggtttccccataccaaggggtctacccc

SEQ ID NO: 182900 - DNA, 383 bp, Zea mays
  Clone ID: MRT4577_98389C.1
aaccgcgtgtagtgtctagagcgagtggagctgctgatggtatgctgtttgttgcagtcaaagagagtttacgcaacaaacctagagaaaacaagttcaaggtggagcacgagcacacatgtggcacactctttatcgtcaacctaagcggtgcatgcaacatggtgaccatagcccgagtaatgggagtaaaatataccttctcaacttgtacgatgatcatgctcagcgttataggaaagtgtggatgcaccacactctattggccacgataggacaagagctcaacagaaggggaggtgcctagcaacaagtagctacaggtccccatctacacaaaaatgaatgttaaagatgctctgtaaggctagtgagagaattgc

SEQ ID NO: 182901 - DNA, 368 bp, Zea mays
  Clone ID: MRT4577_9838C.1
cgcacagacaggcggccccgtactcgcctatctacgtagactcaaagctgtccacatttaccgcccttcttccatttctcagcacactcgacgctgaccacgttcaacaacaccatgagggagtgcatctaggatcaaatgggtcaggctggtatccatgtagaaaacgcgtgctgggagctgtactgcctcgagcatggcattcaagctgagagacagatgcccggtcacaagaccattgggggaggtgatgatgcttctaacaccttgttcagtgaaactggagctgggaagcacgtcccccgtgctgtttgtgatgaccttgagcccactgtcatctattaagtgaggactgacacctaccggca

SEQ ID NO: 182902 - DNA, 433 bp, Zea mays
  Clone ID: MRT4577_98390C.1
ggctctggacctttgggctgatttagtgcttggtaaagcgacaatctcgcagtcgacttacccatagaggtacctcccctcagtatcccgtgggataccgaaccctagaagtagaaaggcggaatcacaggtgaaaaacacgaataaacaaagataagcctacgatctggaataaatatgctatgacgatcggccccaaccccgccaagagaacctgactacccgcccgatacggcctagcgaaacagaaattgctagccccagcagtacttaatcaaaggacgcccatacgagtcgccacctctaaactctatggctcgagtgggcccgtctgtttaccggtaatacccctaggcccagctaagcggtaacaagtcgcttcccggcgagtataggctcgcataggaccatccgcgcctgcgaccggcctcat

SEQ ID NO: 182903 - DNA, 946 bp, Zea mays
  Clone ID: MRT4577_98391C.1
atgtgctggctagaggtctagagctggatggatgctgttggacttcgaagcccagcccacggaggccggccgggcagagacgaatcccatcgtgttgtggccggagagacgagaggactccagagagattccgacaccgctgggctcagatgccgccgccgccgccgccgccgcagcagcagcagcagcagtccggcatgactctctgccgcctccccacggccactcttggccttcccctttctctcccctgtttgctacctcgttcccgcccccgcctgtgcttcgccgcacgtcatgccagggccgtcgccgccagggcttcctcatcctctccatcaccggactcttcattcggttcgcggatggaggagtccgtcaagaagacggtggccgacaaccccgttgtcatctactccaagtcatggtgctcatattgcatggaggtgaaggcgctcttcaagcggatcggtgtgcagccccatgttatcgagcttgaccatctcggtgctcaaggaccacaaatacagaaggtattagagaggctgactggacagtctactgttcctaatgttttcatcggtggaaagcatgttggtggctgtacagatactgtgaagctgtatcgcaagggggagctagctagcatgctgtccggcctggatatcaacattaacaactcatgacaagtttgaccatgttttgcaagtatagttttgatgtttgagagacttgggcagtcatgtattgagtttttttaacttatgcagattctttatgtctgcaagaaaaaaaaaagctgtgtcatttacacatttttgtttggtactctgattaaatcattgaatttgaccactgtatgcaaattgctagaaagaaaaacgaacgaactcacagattatgtgttcttggcctttttgtcaaaaaaaaaaaaaaaaaagggtta

SEQ ID NO: 182904 - DNA, 482 bp, Zea mays
  Clone ID: MRT4577_98392C.1
ctttgggctgatttatgtgcttgtttatgtgcttgtttatgtgcttgtggatccgcgggctgtgagtagttaagaacctaatgggtatggcttgtttatttcttgcccttgtccttctttcttatgctgctctggctccttctcttcgcaactttgcgatatgggcggtcgtgatggtgaactagactttcatttgcggtgccggctgcgaaccggtgttgctctttttcgttagttggacctttcgtcccgcctctaggtaataccccgcctatcagcgcggcagtcccgccgaccggagcgtgtaacgcgaggtcgcgtgggaaaggcatgctgcgacgatgaagaaaagtccgaccccaaaggcggaaacgcctacaccacaataagtaacgagggtcgggattagaagaccgtagaagtacatagagacgggaaaatcgccgccgtaaaccctagtgtccttcggcgcgggttacgtt

SEQ ID NO: 182905 - DNA, 722 bp, Zea mays
  Clone ID: MRT4577_98393C.1
attcttcagaaccctagaagccgcagcttcccattcctcgccgccgccgccgctccgtacccgctcgaagccgacccgaccatggcggacgtcgacgttgacacggaggtggccgcgggcgcgcagccgaagaagaggacgttccgcaagttcagctatcgcggcgtggatctcgatgccctcctcgacatgtccaccgacgaccttgtccagatgttccccgctcgcgcccgcagaaggttcaagaggggtctcaagaggaagcccatggcgctcgtcaagaagctgcgcaaggcgaaaaaggacgctcctgctggtgagaagcctgagccagtgaggacacatcttcgtaacatgatcattgtccctgagatgattggcagccttatcggtgtctacaatggcaagaccttcaaccaggttgagattaagcctgagatgattggccattaccttgcagagttctctatctcctacaagccagtgaagcatggtaggcccggtattggtgccacacactcttcccggttcattcctcttaaatgagttatgccgctttctactttgaaagaaatcagtacggaccatctgatggcatgtccatctagctgtctcccttgttttgaaccagttatatatctagtatttggttctgtttagctatataatttcgttatgcacaatgagctgttctacctaaatgctctgagaatcttatttca

SEQ ID NO: 182906 - DNA, 996 bp, Zea mays
  Clone ID: MRT4577_98394C.1
cccacgcgtccgcacacgcgtccgctgagcattgttattgaagcgtcgcttaaacggtaaaacacgattaaggattagaacgtccgcacgttttatgaaaaagggttagagcgtccgttttggacgttttactgacgttctatggcgttttggacgttttacggcgttttggacgttttctggacgttctagatgttaatgggccttcctgggcctttagctgtcctcattcctcaaaccctaaattctaagcctccacagccgtcttcagccgcccagccgacgtcctctgcgctgcccgctacggcgctaccgtcgtccagagactccatagccgccaggtatgccgccggtcgccggccccccctcctccctcctccctcttacctccgcccacagctcccagtgcccatagccgccgccagtgcccagttctgcttctgctgagtgctgacagtgaattaatttgtttgttgacagtgctgagtgctgacagtgcccagtccatagccaccgccagtgcccatagccgccgccgccagtgcccagttctgctgacagttaatttgttgaatcaatctctatttggtgacagtgaatttgaatggcaacaaatagcgaggcattgtctgccggttaaattctataacaagtctgaaaagacgtttcaacgttcgtttaaacatttaaacgttgaaaagttggttcataacgttttaacgttttaccgttttaataaccatgggtctgagtagcatccctcagatcctgagtttgacttttaggctggaggtaaaaaaaatcccatattaagatcttaatatgatgcccggggttatcttaccccgcaggtcgagtttttttttttttgatagactggctgcatgatatagggcaaacctaatttttcccctttaaacattttgttgttattgtgtacaccatttatgcaccttgcatgcacttctaacattcattactcatcctactgggaat

SEQ ID NO: 182907 - DNA, 253 bp, Zea mays
  Clone ID: MRT4577_98395C.1
agaagttcgatctcatatagctagctggagtctttcttttcaaatcaaagtgaaacgattttccttttacgttgagatatttgaattggattttctttcaccactactatcgtaacgcacagaaaacactgacgtttccgctcgctttcaaccactgccactttacctgagcactgtgacgcagtcggtcaagtattgaggctagtatatcaaggacttatgagaactgaaaaaaaaaaaaaaggggcggccg

SEQ ID NO: 182908 - DNA, 427 bp, Zea mays
  unsure (1)..(427): unsure at all n locations
  Clone ID: MRT4577_98396C.1
cgcatccnaaaaaggggagcatgtcctcgagctctccctttttaaatcaaanananaagtgcggaggggtaaaattgctgaggcagcaggacattccaactaaactcaacccttccgcaacttacatttgcctggcataacaagccaaggctcaatccgaagctcacattcttttttcaatgtggatgtacacagtttccggacctattggctcaataacatcaagattggcataatcatgatcgttcattacacatctcctgggaaccttgacaacgtgatgcttctattctatcttacaccgattaaaatctccataactgctaacatggtgaggaatagatattctctctttttttctctaggacttttctttttcatataattgtctcaagtatagcgttagcccataccatgccttttttta

SEQ ID NO: 182909 - DNA, 141 bp, Zea mays
  Clone ID: MRT4577_98397C.1
gggcggcatttaaaacaggagcttaaataaatatctaataacccctcttttgaccggcctgtttcaaatatcccaactcaatccatagtcctagaaaagttttcacctgatttttgccccacaacacaggcttttttaaaa

SEQ ID NO: 182910 - DNA, 481 bp, Zea mays
  Clone ID: MRT4577_98398C.1
accaaactgacgcaagcctaggatgaatatcctgaggcagcattggagagccaaaatgatgcacaactaaggattttccgatacctatctagtcggaatatagggtgaccctgaaaggatccaagagggtcctccatgtcacactgcaaacgcctagtagagatctggttgccatccaaaggaagcatactcatacacacctgaccttacattgaccctgaataataaccttgcaaatgcttatactgtaccgaagtgcactagcccatatgcaaatgcatacggactgccttgtccgcattgcccacaccttacagaaattgctactcctgctcatgtagagactgatcacacacctgagcataccccagctgaaccccctggtgcccatcatgcaacaggtgatgatgacagagatattcttcacactgaagccgatgaatcatacgctaacccccacatcaagatgcttgatgactta

SEQ ID NO: 182911 - DNA, 371 bp, Zea mays
  Clone ID: MRT4577_98399C.1
gagctcatatgtcggcggccgcccttctttcatttggtcttttttttgcatttttttgtggcatatgaccctaggatgtcaaaaatattttcaaagttgctacgacatccctggctatttaggatgtgctgtagatgacaaatgacaattttgtcaggggattggtaaacctaatctgaggcaagactatgaatgtcacaggcatggctgagaccctcctgtgaccgcattgagcaccttagtgaaaggtggcataccacgatctgacaggccctggagaaacttgaccaactggagcatggtgggacgagcagactcgttttcttgaatggaccaaccacgaagcttgcattctatgtcaacctccttga

SEQ ID NO: 182912 - DNA, 638 bp, Zea mays
  unsure (1)..(638): unsure at all n locations
  Clone ID: MRT4577_9839C.1
ctcaactctgaaggcgctacagcaacgtcgccacttcactcggggttggagtttcacctcggcagcccagccagccagtggttcctcggctcggaggaacagcaagagcttctgaagatgaaggcgatccccgtggctctcctgctcctcgtcctggttgctgccgcctcctcgttcaagcatctcgccgaggcagcagacggcggcgcggtgccggacggcgtgtgcgacggcaagtgccgcagccggtgctcgctgaagaaggccgggcggtgcatgggcctgtgcatgatgtgctgcggcaagtgccagggctgcgtgccgtcggggccgtacgccagcaaggacgagtgcccctgctatagggacatgaagtcccccaagaaccagcgccccaagtgcccctaggccctaccgctctagcctctaggggagggaggatgacccttggagttgccaggatttcgctcgcgatcctgcacagcttctactactagtttagcgcgccgagcgtcggaatgtcgcggcggttccttccgtgcttgtgtgctgtgtatcctcggacgtgctagaacctagaataatagccaatgcattggatcaaaaannanaannnnnnnnaagaaaaaaaaannana

SEQ ID NO: 182913 - DNA, 127 bp, Zea mays
  Clone ID: MRT4577_983C.1
ggcgcgtcgcgcacagctgcacggtgggccgccggagctcctgccggcgctccagcctccagccgctcggagcctcgcactcgatttgccaatttctaaatagcagtcttcgatataaacaaaaaca

SEQ ID NO: 182914 - DNA, 151 bp, Zea mays
  Clone ID: MRT4577_98400C.1
tttttaagcagtggtaacagggagggggcgcgggattagatagcctgatagttggaagaatgagtgtcagcagagtgagggctgtgggatacaagattccatttgcgatgatggtcacgctgaaactaatatggtcagttctgatttgcta

SEQ ID NO: 182915 - DNA, 411 bp, Zea mays
  unsure (1)..(411): unsure at all n locations
  Clone ID: MRT4577_98401C.1
caccccactaaacggtaggcggggtcattttatgccttaacagacagaagacaaggtccttttttatttattaccctgaaaaaactagcccggaagggggaggcaaaaaatttttctaaaatacaacggggggggggattggttcaaatattgggcgggggggggtcggattcaggggcccagcctggagggtcgatgttgggccaatcgcctttggaaccaagcctgggggagagggtttttttccctggtagctttttggntgctaaggggagctgcttgagggccaaaagggaaccctgggcaaaaacccggggggacttcggggcccattcggcgaggtttaacaacacggtcggctttggggaaaaaaagctttccctggttacgcttctttggggtttctttttt

SEQ ID NO: 182916 - DNA, 1557 bp, Zea mays
  Clone ID: MRT4577_98402C.1
ccggccggaagcgtccgcctccttcaaccctatccacatctggcacagaggaaaattggctacggtacaaaacaccgaggcatcgatggactcttccaccagctgacagctatgatttcccctgctcacctcgccttcgccgccgccttcctcctcgtcgtccggtcgtcggcgcctggcgctgctgccgcccgcccgatcttcgatggcaagccatccccctccgaggccaccgccactgcgaggtggctcgccgcccagaacacgtggggtgtcctcagcacaatatcaagtgacttaagtggagctccatttggcaatgtagtttcatatagtgatggagtaccaggcgagggccgtggaataccctacttttatctgacaactctggatcccagtgcaagagatgcactggaagatgaaaggacctcttttacccttagtgagttccctctgggaacttgtggggaaatagatcctgaaaaccccacttgtgcaaaacttactcttaatggaaagttgaagatggttgaccttcagtcatctgaagcagatttggccaagtcagcactttttaccaaacatcctgaaatgaaggattggccaaagaatcatcatttcaaaatcttcaaaatggaaatcgaaaacatattcttgattgattggtttgggggtcctaaacccatatccccctcccagtaccttgaatttggaagaaatcagggctcattgatgtactcataagcgaagaatgcttcatcgatcaatatcccgtctgtgtatgctcttctcaaaaatgaaatccatattgcacatattgtaaagacatctctgtgcacggaataaacctgtagtgttattaaaatgaaatccatatggcacatattgtaaagacatctctttgcatagaataaagttttagtgttattattattaaaaaaaaagaaaaaaaatcacatgttagtgaacatttaacgcagtacgattcatcagagaagaaaatccttccctttactcctctcccacaatagacataagttgaatactataacatatggtttacaaactattatatattgtggatgccacattgctgtactcgtttttttccatacgataggcatttgctatttttgcagttgaagatggttgaccttcagtcatctgaagcagatttggccaagtcagcactttttaccaaacatcctgaaatgaaggattggccaaagaatcatcatttcaaaatcttcaaaatggaaatcgaaaacatattcttgattgattggtttgggggtcctaaacccatatccccctcccagtaccttgaatttggaagaaatcagggctcattgatgtactcataagcgaagaatgcttcatcgatcaatatcccgtctgtgtatgctcttctcaaaaatgaaatccatattgcacatattgtaaagacatctctgtgcacggaataaacctgtagtgttattaaaatgaaatccatatggcacatattgtaaagacatctctttgcatagaataaagttttagtgttattattaaaaa

SEQ ID NO: 182917 - DNA, 898 bp, Zea mays
  unsure (1)..(898): unsure at all n locations
  Clone ID: MRT4577_98403C.1
cctcgaggccggccgggccgggatcgatggactcttccaccagctgacagctatgatttcccctgctcacctcgccttcgccgccgccttcctcctcgtcgtccggtcgtcggcgcctggcgctgctgccgcccgcccgatcttcgatggcaagccatccccctccgaggccaccgccactgcgaggtggctcgccgcccagaacacgtggggtgtcctcagcacaatatcaagtgacttaagtggagctccatttgggtattccttcttgtctcacttctgcaaacagctggcatatactcttttctgactggtgaacttgattcatggcttcttttatgtatagcaatgtagtttcatatagtgatggagtaccaggcgagggccgtggaataccctacttttatctgacaactctggatcccagtgcaagagatgcactggaagatgaaaggacctcttttacccttagtgagttccctctgggaacttgtggggaaatagatcctgaaaaccccacttgtgcaaaacttactcttaatggaaaggtactaaaaattacatccatgataagatgatcgatcactcgccgtttgtatgcatttagcctatttgtttagttgtgtttgaactggcaatgatctatttgggcctgaactggttttctacctataaatttcacagctgatgtttctgtagaatgaatacacgctgatgngcttgaactgtcactatttgngccatgggctgtatacttatagctgcatgtgtgntttcatttcatgttagtaatgctaatggcctatgtatttctcataattaaacttttcgactggatcatgaagttttcaataaaagaaagggacactcggtggtatcaatttctacaatcatgaaa

SEQ ID NO: 182918 - DNA, 268 bp, Zea mays
  unsure (1)..(268): unsure at all n locations
  Clone ID: MRT4577_98404C.1
tttggacacccatcacccgatgtgtttctagggggaatttcccgggatgataccgcacaccgggntgacatgtttcgggggtcatacgtgcataccgggagaacgggaccacgggatgaccccctcacacatttcccgtacaaaaagaaggcctgaccgctcacaccataagattttgcataatgtttaccgggaccggatgcccagacactacctgaaatggtggatcgttctggcccgatggagcatcaccccaaaaaaacaaacc

SEQ ID NO: 182919 - DNA, 701 bp, Zea mays
  Clone ID: MRT4577_98405C.1
cattgggtacctcgaggccggccgggagtacgacctcttaatggactcttgacctgcgagctactcccggagagacgagcatgatgaccatcacgatgcactgcgttgcgatcctactgttgtccttgtccattttgactccgcgcagcgcagggtcctgcgcactacttgccccgactacacgaagggcaggcaatcggctcccggcggcgttgcggatcgagagcatcctgattgccgcggccgacactccaaaccacgaccacggcggagtactcagctgcaccacgtacatggtatatggtagcgtctcacggtcacgacacattctcctggcatctcgatttccataatcagaacaccagggacctctaccaggaggacgctgtctactcctccgtgaggaagctgcgaagcacatgtactgatgtagaccttcaacgattccaccgtgtgcagattgagacgctgaatgacattaggcgttacaagggtatccggcacaagcttggactctcagtcctcgagcttacgacgaacaacaactgaccgactctttatgtgaacaagtattcagtagccacgaaaaaaatacccgtctcccaggatgaataaatggtattgcgatgtattgaagtatatctctctctctctatatctctctcactatgtgagttcatacatggagctgtgtgtagcgc

SEQ ID NO: 182920 - DNA, 320 bp, Zea mays
  Clone ID: MRT4577_98406C.1
cgagataaatctcaaccaatatattgattatttctaggaaacacatgccggtatgggggcaccattatcgagtacatctgatatgtaatttaaattatggcccctccaactatggggggctgcctggacaagacaggattcatcaaagagaaccggttggatggcacaaattgttgcttctctaggaaggcagccaccaatgggttatgccctgccaatggattaagaaactttaggcctttttgcaggtccccaacatagttctacatatctagttggttgaatggaagcacgttctccatgttggctacaaggtttgc

SEQ ID NO: 182921 - DNA, 231 bp, Zea mays
  Clone ID: MRT4577_98407C.1
aataccctgctcgacccacgcatactcccaaccttcttaacacacatattttaatttaaccaaccattattatacacatggaactgttaaatttaaacaatgaattcccaaaccataaattcaacatcaactaatacattaaatatacttcttatttaaatccttacaaagcataatatatccaattccaatatattacttaattctacaaattatactttatatatcaac

SEQ ID NO: 182922 - DNA, 492 bp, Zea mays
  Clone ID: MRT4577_98408C.1
ggagcacaatcagcttcacaatgtggatacatcagctaggacgcggagaggaacaaaggcaaaattgtgtctggcctcgcacatgggctcaccccagcctaatgcaccatggttactcagcaaaagcgacagctccttccctcccccctaaggttaggcgtaacacttaccaaaacctgctccccgcctgcgactgtgacaatgcatatgcctgcaacagataactgggccgccagagagagcaaactttattgctcaaaagggccccaaccctgctgataagcccagtgcctagtaccggtcatcggccggcttatcagcacccttcatgcggactctgatgtaccccccctgagacttggagagcctgggaccttgtcccaaccttgcccaactggctgataaccaccttcttattaaaggcttggggagcacatacaccgtatcatgatactcgccacgagtcttctccttgcaacgtaactttgggca

SEQ ID NO: 182923 - DNA, 203 bp, Zea mays
  Clone ID: MRT4577_98409C.1
tcttcggcaaatatggaagaatacgagtagtggagttgaatcgcgactatgcggttaagtagtccagtgaacatcgggatgcccatgaatcacggtgccaactagatcgctcagatgcagactaaactgtctcagcaaaaaatgcctgacaatcttcttcatttgcaggctataaattcacatcgtcctgatcgggctctaca

SEQ ID NO: 182924 - DNA, 305 bp, Zea mays
  Clone ID: MRT4577_9840C.1
acgggctaaccagtacaccgctgcactgtaccttatactgttacaggcactcataaggaggaggcttggaggatccaccgaccagaaagttgtggatgagaaccttgcgatgctgaagaacgtgctagaggtgtacgaggcgcgcctgatcaagtgcaagatccttgttggagacttcctcagcctagtcgacgtgaaccatgtgtctgtcactgtttgacagtctgctactatctacgcgtatatgctgaacgcctaccctcatgtgaaggctatgtaggatggtatgatggagaggccgattg

SEQ ID NO: 182925 - DNA, 564 bp, Zea mays
  unsure (1)..(564): unsure at all n locations
  Clone ID: MRT4577_98410C.1
tcgcggccgcgtgggcggccgcgtgggggggggggggggcgccgtgctgccagagcaatgcgccggagccgacgacgaacggcgcctgcgcgaccagccaccacggagcggcggaggaggagggaaaggagtggtggttggaggacctggagagggagttgggcctntggggcccggggtacgtttgggactaccagtaccagtacccaacgggcccacatgggctggtggctgaccacacggacccgcttcctgccatgggggacgacccggtgtcctgctacttccaagcgggccccgcctccgcagtgctccaggaacccgggtactcggtgactagtggtagcaacctgatggggttgtgagatttatcgtcgtcgtcgtcgtcgtttttttttgtgatttttttttagatagcagaacagaaatcctgaacaaacggatcgtactatgcctggcaaaccatcggcgccagcatactacttgcttgcacaatgattgtacaagtgcatagctcagaggagcagaaactcaatactaaaccgccgccggcgtattattata

SEQ ID NO: 182926 - DNA, 225 bp, Zea mays
  Clone ID: MRT4577_98411C.1
gtgggccagtgttcgcgttggccgtctcttcctatgggattctcgcactaaaggccttctaaaagtggtaaacattgatggccaagttgatacccgtttcgacatcttatctgctcaggattcatatagctatgagacaaagcaaactctgttctctccgaggaaagagaaagctcgcagtcctgttggtttcttgcagagatcacggaatgcttttgtgggagc

SEQ ID NO: 182927 - DNA, 2233 bp, Zea mays
  Clone ID: MRT4577_98412C.1
cttaccgagagtcgaattccgggcgacccggcggacaggccgcgacctggcctctcgccgggccggccaggccattgaagagagttctcggaaggttctcctcccgtgtccgcgtagctggcgtgcgtgcgtgtcccggggagacctgctgcacacgcggcggcgaggcctccatatctctatcatcacggcgcgcgggggaggaagccagcgagcaagctgaaaggggagagggagccagccagccaggggttcacgcgctcgccggagacgacgacgacgacggaagatgggcggcgacccggggaaggtcatcaggaacgtgaagggcgccgcgcagaagtacctcggcgttggcttcctcctcggcttcttcctcgtgctcctcacctacttcaccgtctccgagcagttcgcgatcacggcgcccaacgctgttcggaggtcatcgccgggccacgcgcacacctcggggtcgccgatcacctcggccgttgaagagaagaggcagcagcctcctgccatagaggagaagccacccaagccagagcttgcaccagaggagaagcctccgaaggaagagaagccgccacgcgttgatgttgaagggccccatgctgaaacagaggaggaccagaagaagcctgtccctgacgatgatggtaggagcagtggtaccggcggcggcgatggcatcgccacggagagtgctcccgccaagaagccggcgtgcgacatccagggcccgtgggcgtccgacgtgtgcgacatcgacggcgacgtgcggatccacgggtcggcgggcaccgtgctgatcgcgccgtccatcgagagcggcggcaacccgaacccgcaggagtggcgcgtccgcccctactcccggaagcaccagggcgggatcaaggaggtgacggtgcgcgagctggcgtccagcgccgacgcgccggcgtgcgacgtgcggtcccccgtgccggcgatggtgctggccatgggcggactgactggcaactactggcacgacttcagcgacatcatgatcccgctctacctccaggcggcgcggttcgagggcgaggtgcagctggtggtggagaacatccagccgtggtacgtgggcaagtaccgggccatcctgcggcggctgtcgcggcacgacatcgtggacatggaccgggacgaccgcgtgcgctgcttcccgggcgcggtggtgggcatccgcatgcacaaggagttcagcatcgacccggcgcgggagccgctgggccactccatgccggagttcaccgcgttcctccgcgagacctactcgctcccgcgggccgcgccggcgaggctggcgggcgccgacggcgaggaggacgagcgggcgcggccccgcatgatggtcatctcgcgccgccacccgcggaagctggtgaacttggacgccgtggtggctctggcgcggcgcgtcgggttcgaggtcgtcatcggggacccgcccttcaacgtcgacgtcggggagttcgccaaggaggtgaacgccgtggacgtgctggtgggcgtgcacggcgccgggctcaccaactcgctgttcctccccacgggcgccgtcttcatccagatcaacccgtacggcaagatggagcacatcggggaggtggacttcggcatccccgccgtggacatggggctcaagtacatcgcctactccgccggcgtcgaggagaccaccctggtggacacgctggggcgcgaccacccggccgtcaaggacccggagtccatccaccggagtgggtgggggaaggtggccgagtactacctcggcaagcaggacgtccggctcgacctccagcggttcgagcccgtgctccgcaaggccatgcagctcctcagggacagggagtagcagcgtcgcagagagcagcagatgaaagtacagttttttttccaaatgacttttagagttttcttccctccctatacctccttaattatatatatttctcaattcttttccatttttggtgttcttttataaagtaaaaaaaggataaatcaaagactcacatgcttacttgttaaaaaaaccgctctagcaggtagcagcagtcgcttccgtcccccttcctcttgtattcgcttcgccgcccaacccagcctccaccgctgccttcgcgaccgttctcgccgccgctgtctcctcaaaaaaaaaaaaaaaaaaaaagaaaaaaaaaaactcgagaagggg

SEQ ID NO: 182928 - DNA, 1151 bp, Zea mays
  Clone ID: MRT4577_98413C.1
cgcggcgcgtcgggttcgaggtcgtcatcggggacccgcccttcaacgtcgacgtcggggagttcgccaaggaggtgaacgccgtggacgtgctggtgggcgtgcacggcgccgggctcaccaactcgctgttcctccccacgggcgccgtcttcatccagatcaacccgtacggcaagatggagcacatcggggaggtggacttcggcatccccgccgtggacatggggctcaagtacatcgcctactccgccggcgtcgaggagaccaccctggtggacacgctggggcgcgaccacccggccgtcaaggacccggagtccatccaccggagtgggtgggggaaggtggccgagtactacctcggcaagcaggacgtccggctcgacctccagcggttcgagcccgtgctccgcaaggccatgcagctcctcagggacagggagtagcagcgtcgcagagagcagcagatgaaagtacagttttttttccaaatgacttttagagttttcttccctccctatacctccttaattatatatatttctcaattcttttccatttttggtgttcttttataaagtaaaaaaaggataaatcaaagactcacatgcttacttgttactgcttcatttgattgggtcggcgaacgattcgcaagttcgcattgcattcagccatttgccctcgcgtgcgtggattgtgaacatgtgtttcaacatcaacaagcagatgccgaaaagaaaaggctaaaaaggagcccagtacagatagcaatgaagcccaggacacaaacgaagatggaccaaatcgttgggccggtaggtgacgggtggttgtcagtcgccagcgttgacgaagatggtagatatagattacgttagttaggtatatagataggtgatcggcaatcaagggacaacaacaacggcgactcgggcggcagatacgtgcaagcaagcaatggaatggaaccgacgtgtactggacagcctagcccctggtagcgggcacatgacaatccacagcgaacgcccatagcaaccaaactgtagcgctcagtgtgatgcatgttacctaagttttatttttaaatctactttataatttctatactatgaaagccggttcaaaacggcgataaaggcgct

SEQ ID NO: 182929 - DNA, 563 bp, Zea mays
  Clone ID: MRT4577_98414C.1
attgaagagagttctcggaaggttctcctcccgtgtccgcgtagctggcgtgcgtgcgtgtcccggggagacctgctgcacacgcggcggcgaggcctccttatctctgtcatcacggcgcgcgggggagggagccagcgagcaagctgaaaggggagagggagccagccagccaggggttcacgcgctcgccggagacgacgacgacgacggaagatgggcggcgacccggggaaggtcatcaggaacgtgaagggcgccgcgcagaagtacctcggcgttggcttcctcctcggcttcttcctcgtgctcctcacctacttcaccgtctccgagcagttcgcgatcacggcgcccaacggtgagttcaattgctctgatgacatgggtttggttccagcagaaaatccataggaggctggggctcaataattagaacaccattccagtttgagcaacttatttcctgcggaaactgatgggaattgagctgacgtgcgcagctgttcggaggtcatcgccgggccacgcgcacacctcggggtcgccgatcacctcggccg

SEQ ID NO: 182930 - DNA, 304 bp, Zea mays
  Clone ID: MRT4577_98415C.1
accacatacttacatgaaagtgaatgtgcctgaggagtctcggaacggagaaaccagtccccgaaccaaaatcacgtggatgaaagcagaagactcatctaaagttagtggtggaacacctatcaaaattgaagatccagatcagtttgttccttgaaacacaaacccgaatgaggtactagaaaagagaaataagattcgggaacaagatcgatatgacttgaaaacagcaggaccacaatctcagttgcttgctggaattgttgtggataagccaccttctactatgcaatttgaagatgat

SEQ ID NO: 182931 - DNA, 284 bp, Zea mays
  Clone ID: MRT4577_98416C.1
acgcagaaatgcctggtttctatgcatagggtgaatattatctaagtcgttttgctgtcgatggtgaggataaacataaactgtctcacgcacaacacattgctaccgatgacacccacatacgtctgtcttcaaggtctcatcatacttaacaccaactctctcatttgaatattccatatcaacaacggacacattatcaaactactacctccacccattatacccatacccattactgctctccacccttttattgttccacccttcctactagccatact

SEQ ID NO: 182932 - DNA, 469 bp, Zea mays
  Clone ID: MRT4577_98417C.1
accggttctcggaatctcccggctgcagacgatgcgcgttgcatgataaaataacctgcgtcactctctgaactttcgttcagtcagctcatgcccatgcatggagcagatgaccatgatacacgatgttatgactacatactcctacttacactacattgatatatcgcacttatctcgattgccgatatgctggacgtgcgctacactctacatgctgacatttctaataacgtcctgccagccttacggctaagtgttgcatacagctaatcgcaccaaagcgtacaaaacacgagtataccaacggcgccgacaccgaagcttggacccaacgtgaacgccttgtttgcccgtgtaccgaaccgaggacctgcaaacccaggcccttgcgatggtccagcgccgttggcgccaaaggctacaatgccgatctcctcgacgtccaatacggctgcctcaatttcaa

SEQ ID NO: 182933 - DNA, 281 bp, Zea mays
  unsure (1)..(281): unsure at all n locations
  Clone ID: MRT4577_98418C.1
cattgggtacctcgagggccggccgggaanatgcataattttacaatatacaacgccagctccgtaaactaggtattccactaaggattgtgatggtagactaacaccaaaatcgaattatatatcttcggtatatctattaaggagggttgtccatctcctcgtggcaaaaagggggggcagctctggtaaaaaattaccagcgacattcatttagcaccatggagaaagactacatttagccctcctcggcgctcttagcagctaaaactgatatattg

SEQ ID NO: 182934 - DNA, 846 bp, Zea mays
  Clone ID: MRT4577_98419C.1
cggccggaaactatgactaactgggtgaacatcatgtatacaggagtgaccatttagctttctctcgaacaaagctggttaattttgttgtagctttgtgatactaggtgatgaagcatgaaagatggtggttaaatagcaaatgggaatcgaacatagccatgagttggaccaattgataggcacagtcagataccattggacaaaagctatcctaaaaagatagttccactcggtaaagtatctggtttctttctaggtggttgagcctacgttttatcttacctatctttaatccaatagcaccttattgtttgaattgtacctcagttgttgcctgtcttggaaagattaatttaatagtatgtgtcaactgtatcatgcgaatataatagcttctgaacgctatataaatgttcaccaaggtctttcaatcccttgcgcgcctacatctccaatgttgtctgcactggaaacctagagctaagactgacaatggcatgactctcttggtccctctctcccttgaaggctctctctctggtaaatatggttgcctttcacaatgaacttccatcagatctttgtgagagagccttcaggagggggggatccaggtgagccacagtgcctgtgcccagcagccaagatgtgtactgtttagccattttgtgtatttgattaattgtttgtttctatgagaacttggttaatcatgtgttgtattgattgttcacaaatgaaattagcttttctcaatcagcatcggtcaccggatgcatgagaaatggatagcgggtggagtatgtattcttatgtttacaagtaagtgggccggtactgatc

SEQ ID NO: 182935 - DNA, 834 bp, Zea mays
  Clone ID: MRT4577_9841C.1
gccggccgttccggggactcacactcacaccgaaagcgcctcaactctgaaggcgctacagcaacgtcgccacttcactcacgattgggagtttcacctcggcagcccagccagccagtggttcctcggctcggaggaacaggcgaacagcaagagcttctgaagatgaaggcgatccccgtggctctcctgctcctcgtcctggttgctgccgcctcctcgttcaagcatctcgccgaggcagcagacggcggcgcggtgccggacggcgtgtgcgacggcaagtgccgcagccggtgctcgctgaagaaggccgggcggtgcatgggcctgtgcatgatgtgctgcggcaagtgccagggctgcgtgccgtcggggccgtacgccagcaaggacgagtgcccctgctacagggacatgaagtcccccaagaaccagcgccccaagtgcccctaggccctaccgctctaagggagggaggatgacccaggatttcgctcgcgatcctgcacagcttctagtcttgtactgctagtttagcgcgccgagcgtcggaatgtcgcgacggttccttccgtgcttgtgtgctgtgtttctcctcggacgtgctataacctagaataataaccaatgcactgtatctgcgtgcttgtcttttgggaaaaaaaaaaaaaaaaaaaaaaaaaaaaaaaaagtataggtttagaagaaaaaaaatttgtcagttagcataggctttctgcactttttcactaaaaatggaaaattaattgtgcgaagcaatgaagaactactactgtacaatgcaagaagtttcaatgatttccattgccc

SEQ ID NO: 182936 - DNA, 523 bp, Zea mays
  Clone ID: MRT4577_98420C.1
gctttggaggcccaccagagtgactacaaggaccacgacgaactggtcccgagtttggatgacaagaagagtttgctcaagaactggcccttcatgtcatccttaattacgtactgtgtgttttccttccatgatatggcttattcagaggtgttctctttatgggccgaaagcgataggaagtatggcggcctcagtctatcatctgaggatgtaggtcaagtgctttcagtcacaggcgtcagtcttctcatataccaactctctgtgtaccctcgtaccaacaaaatccttggacctatcaagacttctcgagttgcagctgttctgtgcatgcttattctcttgggctacccctacatgacacatctgtcaggaactgcactgtccgtcgttctcaacattgcgtcgatcttgaaaatcaatcttgcttctaccatcatctcgagcagcttcatccttcagaacaatgccgtgcctcaagatcagagaggagctgcgaacggactgtcggtgacagtga

SEQ ID NO: 182937 - DNA, 130 bp, Zea mays
  Clone ID: MRT4577_98421C.1
ggggggctttttcgttcattgtttattaaggaacccacttatttcttttccactggtaaaaggtgtaaactaggtggggtgctatcttgaaggctttctgccttcggaaaccaaacgggtttttcttttt

SEQ ID NO: 182938 - DNA, 467 bp, Zea mays
  Clone ID: MRT4577_98422C.1
acgcgtccgcccacgcgtccggtgatcagagtctgagcgaatttttaatcaaatcgtcctaaaatgccactttttggattcagcctattcaaaaaagtcgtcccgggagtctcggcccaatcggacgacgacgacgaactgatcgaccctcaggtaactataagggaatcgtgcgcccctcactgtgcctctctcaaagcgaaactcgacgaatgcaacgcccgggtgaactcgaggtccgcgaccaccgaaacttgcaccgaggagcttttcgatttcgttcattgcatcgaccattgcgtctccaaatcgcttttctctaaactcaaatgaaagaaggacgacggaaccacccttttagcgtcaaaggaggtgaatcgacgtttttcttttgtatttatttagttttcctctgttgtacaaacataaattctacgttaaatgttaataaatatgtctaagtagtc

SEQ ID NO: 182939 - DNA, 602 bp, Zea mays
  Clone ID: MRT4577_98423C.1
tcttcctccttgtaggcgtcgttgttgtggagtcttttgtcggcgctcgttgttctgtcgttagtcgctacgttgcttctgtcagccctaccagccttgcgtatggtagtgacgtacacacccagcttgctcctctctttgtgggtggagctaggctggcgacttgacttgagatctgacctgactggtgagtgactcgtcagctctgttgacgggactcttgttgttgatagcatcagcaaatgccatgccggcaggtgcatcagtagcatatgctttatctgctactgaccatcactaacgatggaggatgccgcctggtaaccgttaaccctcgaacgctgagccgatctgggaaccccactcaccattcagtgcctcggcccttcaagcattccagggatccttgcgcgtaatggacgggagacaagggagcaaatggactgcatggactcctgaggaggataaagatcaatgaatattaggcgatcttgtggcacgatggcgattcattgcggaaatctactgaagatgctgcatagctagtcttatctatgatgtttaatctggaaaagagaatccaaaagaagatgcccctgaaa

SEQ ID NO: 182940 - DNA, 582 bp, Zea mays
  unsure (1)..(582): unsure at all n locations
  Clone ID: MRT4577_98424C.1
cctcgaggcttgnccggggacactccttcatcctcgttcttctggttccgttcctctttccctcctcccctctgtcttggttcttgacgcctggttcttctgtcttctgttgtctccgtcgtccgctccggggaacccgcatcgttcctatttcttgtgctgcttctgtcctcagctctagtaaattgctttgtttgccagcgagagatcgaggagggcttgctaaaaaatcaggtttgttttcgtcgtgtctccatttgtggaagtgattaaggtgaagtaaatattctttgctcgaaacgtactacactttggcgcatctattactatacttatgcttttcccctgcggaaatccgatttgctgggtctctgggtccgagtccgagcccgagcctgatgcggaagaacatattgctctgcatggtgaggtctcacattctgaggagagctcatgtgcatcgacagtacgatcagaatactcattcgcttctgcgaagaacgatgatctataaagccccgcttacttcactgaccctgacagttgacaacttctcaggtcgctgttgaagattcagttatc

SEQ ID NO: 182941 - DNA, 1470 bp, Zea mays
  Clone ID: MRT4577_98425C.1
acaaaacaattcggtatatctgcaacgtcaaatcaacacaggctgttgtttgcttcttttggtaaaggctttagctgcggcagatccaccggcggcgccccgagaatcgaagatgccggtgaaggtgttcggatcgccgacgtcggcggaggtcgcccgcgtcctggcctgcctgttcgagaaggacgtcgagttccagctcatccgcgtcgactccttccgcggcaccaagcgcctgccccagtacctcaagctccagccgcacggcgaggcgctcaccttcgaggacggcaacgtcaccctcgtcgagtcgaggaagatcctgcgccacatcgccgacaagtacaagaaccaggggtacagggacctgttcggcccgggcgcgctggagcgggcctccatcgagcagtggctgcagacggaggcgcagagcttcgacgtccccagcgccgacatggtctacagcctcgcctacctgccgcccgacatgcagctcgacggcaggggcgtcggcggcctcccggcggcgacggggacgatgaacccggcgcaccggcagaaggtggaggagatgctgcagctgttcgagaagagccgcaggcagctgggcaagctgctggacatctacgagcagcgccttggcgaggaggccttcctggccggaggcaagttcacgctcgccgacctgtcccacctgcccaacgccgaccgcctcgccggcgacccgcggtccgcacgcctcatggagtcgcgcaggaacgtcagcaagtggtgggacaccgtatcccgccgcgactcttgggtcagggtcaaggagttgcagcgcccgccgtccgcggaggcgcccttctgatgtcgatcgatcgcaaattaaggcggtggcctttgctcaagcctacgtgttcggtttctgcataattttttaataaataaacgccactggcccctctacgtcattggcgattgttcattgtgtaataaatcgttcaagagcatatgatgcttcttgccgtgaaaataaactcgtcgttgcctcctccaccgacgccatcgccaagaacggccagctgggccagcagcagcacctgccgtcgtccaccgacggccacggcgtgaagagccaacggctggtccagaacgagcggcacttctagccgttgccgtcccttcccgccgacgaataaactacctgcgccgccgccaccgccgccgtccatcaacatgctgctgttcgtgtcgttttcatacgtcatacgtgtcttgctgcttttgaagctccgttcccgggtgcagggacctacgagtccattccgccgtttgctgattctgtttgtcgtgtaataaaatgaaaaccccaccccgttttgaatgaaattcaattctcagtgtcgtgtgaaaaaaaaaaaaaaaaaaaaaaaaaaaaaaaaaaaaaaaaaaaaaaaaaaaaaaaaaaaaaaaaaaaaaaaaaaa

SEQ ID NO: 182942 - DNA, 1796 bp, Zea mays
  Clone ID: MRT4577_98426C.1
ccggccgggacgccacaccgaaatttcccccacggagctcaactgccggtgccggtgcgcgacaggcggcacacacgcccgctcctcgcgtatggcgaccacgttgacgcccacgcagcgctatgcggcggggacgctcctggcgctggcgctccgccaggcgcagatccaccagtccgagcccctcggctccggccccgacgacgaggagcgcgccagcagcgccagcgggagctcctcctccaccatatccagcaccggctccgacactacctcgggcgccggcctctggacgcacgattcccgcggcctcctccgccccgtcttcaggttcctggagatcgagcccaaggcatgggcggggatggaggagacggccgcgtcgccggacgccgccaagcatcacatcggtgcgtttataagcatactctttgaggaagacggcgagagctcttcagacaggctagagcaggagatcgcattggcgaaagcagttgatgtgatggtcatgagcttgggcagcgacactgctccagatgagaatatcaaagacgagcgtaaatactccacggcctgtacctatgcaacctcggagtctatggaggcaggctcatccgagaacttgcttggaatcgtcaagctgtccttggaaaatgttcctgtgaatgagcaccgcaagatggtgttgctttatgcgcttctctctgcatgtatcgctgataagcccgtatcgcaagaggaagaggacaggaagtcgtctcacttcaggaagggctatgacgctcgacatcgtgttgctcttcggttgatagcagcatggcttgacgtcaagtggatcaaaatggaagctatggaggtgatggtcgcatgctctgccatggctgcggcaaaagaacaagaacaagagcgtgaaaatgcatcaccaagaagcaagtgggagaaatggaagcgtgggggaattattggtgccgctgccttgactggaggagcattgctggctattactgggggtttagctgcaccagccattgctgcaggatttggtgctctagctccaacactgggcacacttgtccctttcataggggctagtggatttgctgctatggctgctgcggcaggatctgttgctggctctgtggcagttgctgcctcatttggagctgctggggctggcttgacgggtaccaaaatggcaagacgaattggtaaagtgaaagaatttgagttcaaacctattggtgataaccataatcagggtcgccttgctgggcgcatcctggtttctggatttgcttttcgatgagaacctcctggccggcaagggccttttaagccctgatgagtattttgttaaccaagagcgctgagacaacggccctcgtgaaggcatatgctgctgatgtcaatctttttttccagcactttgcacagtttatggtgaatatgggaaacatttcgcccctgacagggtcccaaggtgagatcaggaagaactgcaggaggctcaacaatgacccctgagggcactgaagtcgcttgatgtgctgaattgtttgtgatgttggtggcgtattttgtttaaataagtaagcatggctgtgattttatcatattatcgatctttggggttttatttaacacattgtaaaatgtgtatctattaataactcaatgtataagatgtgttcatttttcggttgccatagatctgcttatttgacctgtgatgttttgactcccaaaaccaaaatcacaactcaataaactcatggaatatgtccccctgttttttg

SEQ ID NO: 182943 - DNA, 1448 bp, Zea mays
  Clone ID: MRT4577_98427C.1
ggcccatctactggtagaactgttgaagagcaaatcactgggtgcttgaatcaagaagccaagtcaatacctatggccagagaaggtgaacttcccaaagagaagccttttcgatgttcttgccaggagaacatttccagagagtctcatcaaagtgttgttgccagaccaacgctgaattttactggaaagcaggttccgcaattgcacattggttcgagggcatcatcatctttcagcatgtaccaaagaaccagcgcaaagcccaacccttgcttagattcacatgaccatctttcagcggctaaggttgcagcggaatctgctgtcagcctcccttcttactcaacagattgcataagcccctcattacaaactcagcttccttcgccatcaaatcctatcttgaggctgatgggtaaggatttgatggtgatgaacaatgaagagagtgtgcatcctcaagcaccaagttcagactacatcttgagagggaattatgaggcacctgttggttttatgcctccaagctaccaacatctcggtaattctggatttatcagcatgccaccaaccgcagccagccaccagattcctctaccaagtgttcaagctagcggccttgttgctcctccgttgcacagcgtttccatgatgcaacctgaccatcattcccagcagaagtcctacagaaatattatgcctgccatgcatcatccaacctacatgatgaaagaagtgattgtgatcaaggactctcctgagcgtagtagaactgagccacaagctagcatgcttttcccccctgctccacctcccacactctcgataccaaacaatacgccaccccgtccattttactgtcttccaccgcaaatcccaatcttgccaagggagagggctgctggatccatgcctgtgtacgcaaactttggcgcattggctggtgtcagtccatcaagtcaagaaagccaaacgggagtagccaatccttacatgccgaatccgttcttcgtccagtcccgaactggttacatgaaccacccgccagtgtactactcacagaatctggggtgatgatttctcagtagctcaaatgaccagaactccatttaacttgccggtcgtcgctgtcgaagtttgtgggggatgagagtttcgtgatgggtcaaaacatgctgagatcaatgaacctgcatgagatgtgtctgactttcatgaggattttcacataggttgctttagatttttttcccctttctttctcccttaaagctacagcatgtttgccgtcaaaagtatcttaattactctctgcaaagctgcagtagtaaattacagtgtgcaattcccaatagctctgcaaaggaatatatctcagtatttatcgaaaaagctggcatttgatattcccaaaaaaaaaaaaaaaaaaaaaaaaaaaaaaaaaa

SEQ ID NO: 182944 - DNA, 388 bp, Zea mays
  Clone ID: MRT4577_98429C.1
ggaattatttactactactctctctatgtgaatgatcggcctttgggtaagggcacacgcgactttgtagcggatatgtcaatttactacagaggttccaagacagatccaccacctggtaaggccgctccaacatctattggacctgacccacaaggattgagattgatggtgcagtacctacaagaaacctatgggaaccttcccatttatatcctcgagaatggttatggatcaagcaatgacactgctcatgacaatgacagggttgattacctgaagagctatatagggagtatcctgactgcactaaggaatggcgccaacgtgaaaggttactttgtgtggacatctcgggacgtgtctcagtacctgacggggtacggtc

SEQ ID NO: 182945 - DNA, 223 bp, Zea mays
  Clone ID: MRT4577_9842C.1
ttgtcctactgctcgtccgctgtggcctagccgatctagcacttggagctcttcaaggcccgctcggagtcggtgtccttggtcgccgcatcaacgatggtctcctcgctacaagcgctggccacgctcgtaccgggcctgtcctacattcacgcaggaccggtgctccgactacagtccccggccgctgaggctcttggccccacgcaccttcttcacaccc

SEQ ID NO: 182946 - DNA, 346 bp, Zea mays
  Clone ID: MRT4577_98431C.1
cagccgcgtgcgtagctggaccctagacggccgcctagctttctttcttttaggtaatctgtggttcgtcttctggtggcccagcagcagcaaaccacgcggcagagcaactgggccggcggcacaacaaccccacacgacggggaagacccacagccaacaacgggggtaacgcccgacgaccgccacccacacaaaagacaggccgacacagggacaggccggcccagacgcgcgacaagaacatttaatgggcgaacccccccctctagagggccggggccccgagaggggggaaaggaccgccgtcgggcccctgccggccccggggaagtgcccccccccc

SEQ ID NO: 182947 - DNA, 270 bp, Zea mays
  Clone ID: MRT4577_98432C.1
gttccgtctcattctcatccccgacccccgcaccgcagcgtaaaccctagtccccggcggcgaggttgcggccttcggtgcgctctgactggtgcgcttttagacgaggtactgtggtgttcaataccaattcgaccattgctacccgtatccagtttgagaacaactgtgaaattggtgttttttccatgctgacaaatgtctactgtcttttttctttttggtgggtcagaagatcttctacagggccttcgaggcttaacttgcata

SEQ ID NO: 182948 - DNA, 994 bp, Zea mays
  Clone ID: MRT4577_98433C.1
cgggtaagccaagaagcaattcaagtagacccccattcatcatcgctcctgcaggacctcgtgcactcatttgctcgctgtaggtaccggtcgctgcacaccgtcgtcatgggcgaaggtgtccacccgttggaggtccagatccgcacgaaggagatgcacctgcaggccgagtacggattcgccgcgcactggaggtacaaggaaggccgcacctgcaggcactcgttcgtgctccagatggtggaatgggcgaggtgggtcctcacatggcaatgcgaagcgatggacaaagaacggaccgcctcctccctaggcagtggcgacgccgcgagcgcgaggccaccgtgcccgttccccctgcactcagaggactgcccttactcgtatacccgccagtgcaaccacgacggaccgctgttcgtcatcctcctggagcacgacaaggtttagccccagctctgactggttgcacacatggctcgcccatcgcgtgtttatgttcggttccagccatatctgataaggtctgtggtgccgtttcagatgtctgtccaagaattcccggcagactcaacggtaatggatctcatggaccgtgtcggcgccaacagctcgagatggagcccctacagcatccccgtgaaggaggatctgcggccgcgggtgaaccgcgagcctatattcgacccgaaccggaagctgagcatgggggacgtggtggagctgacgccggccctgcctcgcaggtccctcagcgggtaccgggaaaagatccagcgcatgtacgaccgtggcggatttgcgctttcagcccaaggcggcggctcgagacgctgctgccagtagcaatacgatgatgttaacctttcctacccttgtattgtacccttcaattcgttgtaaattataagctagctaggtcttgcagcctgaagctgcaaatgtgtaaaggtagaaccctgtgtatatataagctgttcaggttcgtttc

SEQ ID NO: 182949 - DNA, 264 bp, Zea mays
  Clone ID: MRT4577_98434C.1
atgaaggcaagtagagatgcctgaaccatggtcttcagaacgcgtggtgcacatctcagctcagccacagtcggtagctcttagggttttaaaggttaggagggaaatgaagttcgggatgacaactatcaagagccaactgaatctgtaaagcaacacttagacggcggagatctcttctcatgatctgatggcagtcagatggtggttcagtttttctgtggcgcgaagtgttttccgtttttcttgttattcttccaattc

SEQ ID NO: 182950 - DNA, 235 bp, Zea mays
  Clone ID: MRT4577_98435C.1
ggaagaaagccgcaacgtgcgagcactggaagttccaagcctcctgccaagcgaggtcgtctcactaacaatgctagcctaactgctctcccagctcccaccacattgacccaggctccctgccacgcatcatactccaacaccaccccctcccgcacctcatacgcgaagacctaagcgtacaacgcgcgaagcgcaaaagagtgaggggcgggggactaataccagtgagcta

SEQ ID NO: 182951 - DNA, 693 bp, Zea mays
  Clone ID: MRT4577_98436C.1
gatctgctcctttttttatctagatccgatctagctatatttgtgcttgatcgtgctaccttgtcttgctgcagaatagtttgttaccttgttaataacttgcttcatggtttgaaactgaaaagtggaaaggcaccgacgaccagcagacagttgcggcacaccgactggatcaggagcatgatagtccttttgatccgattcgtggagggctcggcgcctcggtcggatctgacccagggggcgccgccggtccgtccggttgcagccgcgtctgagtttttaagatttggaatttaccatattaaaggaggccgaggatgattgactgaagtctgaatctggatgatctatatattaaatcatactcacgctgaattactgcacgaaaagaacttgggaagcttaaggaggatttatattttgtatagtttttctttactttatgaatattgatatgtattgtacaccaattatatgtatagatgttgaatttcccaccagtcttgatccaaacaatcgagagctagggatcgttctgagataaaagctttgcacaaggaggtgaagaaactctgcttcaaatgtttcaccttacatattagatttttaccaatttactactctttggttataagttatacattgctcatttgactgtaataatgacaaaacatgggcttttgagatggg

SEQ ID NO: 182952 - DNA, 277 bp, Zea mays
  unsure (1)..(277): unsure at all n locations
  Clone ID: MRT4577_98437C.1
cccacgcgtccgcggacgcgtgggcggacgcgtggttgccgtgcctgttgaaaatttcaaactgcttcgatccggagatgggnnctgtcgctcaacatatacagaatatataatatcaataaatcctggtgattcatctatgcgtacaagttacatcacatacattgtgaaattaaggtcaaattccctcggcacaaaatttgtaatattcattacttatccgccatacaatggaactagctaaacaggggtatcgaaaacaagttaaagattcaac

SEQ ID NO: 182953 - DNA, 273 bp, Zea mays
  Clone ID: MRT4577_98438C.1
tgtggtgccctacaccggaccaggcgatcttaggttgttcctgcattccattcgggggcgaccgcctcaaaacggccaggtcgcgatgctagtaccggcgcttatagcgcagcacctgactgcgacatggaggatgaatcactccactccatgcccataacctactgccaggggcttgcctcaatgaacaaactatatcctgaaacacagacgttcgctagctagctatttgagacctttatcaccgatgatgcgatacttaacgcgaacgca

SEQ ID NO: 182954 - DNA, 228 bp, Zea mays
  unsure (1)..(228): unsure at all n locations
  Clone ID: MRT4577_98439C.1
gggggggcgccagatgtngctcatgagtgcgaccttgggcggcttcgttcttttccacagcccgtctagaagggagtataatacatcacgtgggcccggcgtggcacgatcgattgagttgccaagcgttcacatgccttcaggttatccgccctacacacaggagaggggactgtttgaccaggacttgccgcagaatgacatgcgtgaacaggtactacatgctac

SEQ ID NO: 182955 - DNA, 333 bp, Zea mays
  Clone ID: MRT4577_9843C.1
aaaaacatggagagattactttgctttacacttttatcaagggggggtcctacaaaatggatgggagaagggggcaaaaataaacaaataaacccccccccctatttaccctttttttttttttattaacctataccctcctatttatcctggacccaaaccaaaggaaagtggtgagggggaaaatcaacggctaaccaaatgttttaaaaaaactacacgggtgggactgtccaaaaacccccggggacgaggagatcaatttactttaacccagcttgccccccccggtgaaattaaaaaattcacccccccccccagggttggggagac

SEQ ID NO: 182956 - DNA, 563 bp, Zea mays
  Clone ID: MRT4577_98440C.1
ggccggggaaaaaaactgcataccccaccgtagagtcagcgagccagcgtaccataagtagcggcaacaggctccgcaggggcaaaaaggtgttaagcttcccttcggtgtacccagtatcactagcaacgcaaccatcgcgtagccacacgagaggtcggggatgacgcaaaagcagaccctgtataagagggcacgacaagaataagactatccctgccaaccgtcacggcaaggggccatatgcccgcgacggaaaaactgccgccaaccccaccaagtgcccaaaggacatgatcggccggcagggactcaccaagctcatcaaccagggcaacacactacaaactcgcaatgttgttagcatagtgggcagccacctccacatacggacggcgagtggtgtcgaatctcaaacaaagtaaaaggaacccacaaactggaaaccaccgcgaagactcggcatgcgtggcaagctgctgaggcaacagagcatgccgaaaaaaactcacttactggttcgcctgagagcaaagaacatgcggggagcagtggtggccagg

SEQ ID NO: 182957 - DNA, 318 bp, Zea mays
  Clone ID: MRT4577_98441C.1
aagttcacagcggcgaaactctaagctgatgtctgatgcgctggcacgggcggagaagggtcatgggcaagggccggggccaagcgccaccggacggcgcatgggtgacaacatacagcgtataaccaatccgccgatccgcaagttggcgaggaggggcggcgtcaagcgcatatccggggtgatgtaccatgaaacccgcgacccgctcaagattttacttgtgaacgtaatacgcgatgccggaagctacaaccaacaccccccacgcaagactgagaactgcatggacgttggctactgtctcaagtgccaagg

SEQ ID NO: 182958 - DNA, 345 bp, Zea mays
  Clone ID: MRT4577_98442C.1
ttgttttttttttttttttttttgtaaaaaagaatggagagtatttttatgctgctgctatgcacggctcatacatttctgttcgacaggctcaaaatataggtgggctgttacatacatgcatggctgctcattgggcagcaaataactaacaatgggactttgctgtgtccaagaagcaatgccttcttttaaactggccatatttggtttgcatattacccccaggcaaatacaatattttgcataagcttggaacccttgctgattttctaccgaccctgtggttttttagggggggcaccgaggaccggcatatgcatatgcgggcacactctgtttggc

SEQ ID NO: 182959 - DNA, 219 bp, Zea mays
  Clone ID: MRT4577_98443C.1
acctttccctgtccctgtccacccctagaggcggatcccacttttatgatagttctcccccaattccaagccatcatcatcccccagtagaacaccttcttcatctactacaatgtcctcatgatgctcaccaagaggatcaagatcgcccgcctcgaccgcgctgtccttaataccatcaactaccacgacgactccaccaccaccacctatcacttc

SEQ ID NO: 182960 - DNA, 301 bp, Zea mays
  Clone ID: MRT4577_98444C.1
gaaacaacggaggaaacggcggacagagagagccacacaccagacgcaaaaggcagccggaagggagacgcaagcactgcgggggcagcaagcacacaaagggagacacagagcagcgcaaaggagcaaaaggacgccggaaaaaaggacagcgaaccgcaacaggagaccaaacacgcacgcggagaagaaaagtggagagcaggagcgagaccgcaacaccaaccacaaacccagagaccgagaacgggagcaagcggggacaccgaggaccacacgggaaggccggaccaaagccagc

SEQ ID NO: 182961 - DNA, 316 bp, Zea mays
  Clone ID: MRT4577_98445C.1
tcgctgtgaacatgaccataactatttactctgcgctgataaccaactctttgttttatatcacaccttctctacagggagctcatgcgggaacagcttaaggaacctcgctccggaggggttcgaggacgaatactctggacgttatatttctgcgggtggcgtcttttacaagtgtataagtccagtcaacattggctcgtagaacatgaacatccattgcatgcactgttttatgggaatgctattctgccatcctaagctatgttgtcaacgacctaggttgaagagattcgatcatcatgcaagcatgctg

SEQ ID NO: 182962 - DNA, 252 bp, Zea mays
  Clone ID: MRT4577_98446C.1
cccaaccccagaaataggggaattaaaaaccctcaaaataaaaaaaattttttggggacaaaaacacaattggaaggcctggcaaaagtttgtagaccttaccaaacctggtgagcacctaaccccaaaagctgggaaaaaaaattttataaccccggggggttaatcctacatggtttcccaggccccccacttccttggggcctgattgctcgaaaaaccccacaagggggggggaaggggaaatccccc

SEQ ID NO: 182963 - DNA, 428 bp, Zea mays
  Clone ID: MRT4577_98447C.1
agcgttcgtccacgcgttcgattgattcttcaagagacgagcttcttttgcaccacatggtctaggatgaaaggccgctgcggatcaagctgtggctgcggcaaaagctgcaagtgcggccagaagaaccctggcctccaggagacgaggggggtcaaccaacccaccgttgtactcccggtggtccccccaaagaaggccgccccacatttcggggggggccgggaagtgtacaaccttggttttttttgtttgaacctgccgccgcagatgtacgtgtgatcgctgcaactgttggtcccattttttgttggccaacgacctccccaaggtctatctagctttgtggtgtcggttggacaataataagcgaggcccagctgggtgggggacatactttttgcccggtccgcgtgtgagagagaggg

SEQ ID NO: 182964 - DNA, 352 bp, Zea mays
  Clone ID: MRT4577_98448C.1
cgggagcatgtattatgccaaatctattacgtcaatactttgtatacttaccaaaatgccgattcaggcaaaacttactgttatcgttgtcacaggtccggctatgcctggatcgtcaagattatgtccgagcatagattttatcaaggggaatcagtcctagagtatttgacagtattgttcagggtgctctggtagatattccttccctcctggaactgaaatgcatctatctactatgaactgaacggatgactcggtatgtgatgcttctcaatctcaattagatcacaatgcactactggcctgctattcgttgccattagtagctcgcatttcatattggagccga

SEQ ID NO: 182965 - DNA, 800 bp, Zea mays
  Clone ID: MRT4577_98449C.1
actcctatgggcgattgggttcctcgaggccggccgggaaacggcgcctatgtagcggagagggtggcgagcaataaaagaggggtcacgcaatgaattgtctctctgttaccccgagccacgatgagatgagcacaggatggaacccttaccggcgctagaggcaacagacgtgcccagccacggtgtgggggaggtttcctgtgtccgccctactccagcgagcggcgcaccgttttgcggtacgccgagacgatgccgaaggccacgattgattcacagcagaccgaagatccccaaagccacgctccaggaccaaacaatcaccgagccgatgtacgctccgcgacggtgcccgcattcttccccgcggaaattgggtacgacgattccgtgattccgagctaatcctaggtgcggttcaagcggagggttctgcgactatggtatttgtagcccgtgacacgatcaccgccaaaatcgtgccgacgggtgcgaccgaatcagcccaggagatgtgctcagtatctcaatggatttcgttggagacgaaccccacaggaagggcccaccagtcggtgagacaccagggcacccgtagcttactgaggtcttagtagtgtgccccgcaaactagtgaatagagtgagaagcgagcgccagaggtggctatccggtgggacccggccgtcagtgcgcgatggaagaagaaatttgggccactcggagtaacgggccgaggctgatagataggccaagcgcatggagggttggctttttcctttatttccatttctttt

SEQ ID NO: 182966 - DNA, 1451 bp, Zea mays
  Clone ID: MRT4577_9844C.1
cttcccctgtccatctcttttttttttggtttcctcgcgtttaaagcttcgaggccgaatcccccttaagttcggcagggtaggacggcttcttcctctgcgccttcaccttcgcctgcgctgccggggctcgtcgcatggtttttaaatcgggtttgtaagccctcgcgcccatggagggggtagagctgaagggtcgagctttacacgcgtcgaacaatacgatctttatgtcaactaccaatctgaggcggcgactccatcatggagacgttgatggaaggaaaaacgagcatgttgacatatccagtgctgattccctcaatgaacctctattagggaagtccaatgatgacaactttggatcagaggtgtatgatcctagaaaacaggatctgtgggatgatgatatgaagaaagaacaactacactggtcatttcttttctcaaacttgattacacaatgggcacaatggttagcaagcattattgtgagctcaggatctatctttggtagattatcccccttctcttaagagaaccaaataaatccggaataccttagccctttataggaactaagccttgaagactttaagacagagatcgcagatgtcttttggtagctcccgtattaaacatcaagatgacattgggtgtgtgaatgatgaggtgctggagttcgacatgcgccattgccaggaggtgtagagattcgatgtacgcttctgtgtctgaatccaaatgtgttttgtgatgtgagcagtgaataaacagactggttgtgacgagaatgtcgtgatccggaatgtatctaaaatcggttcagattctactgaaataaagaaaaaggacagagatcagattgggagtacccttttgcagttgctggtatcaacgtttcattcatgctggtccagatgttggatctgaagtcaagtgttccatcttctaagtatggaattcgtttccttgaattgcttggacgtgatgagaacgcctttgaccacctgtactgtgtggcctttcggttgcttgatgctcagtggcttgtgaaacgtgcctcctatatggaattcaatgaggtcttgaaatcaacaagaactcagctggagcgggaactggttctagatgatgtgctggaggtgaaggacctgccgtcctacactatgctggatgagtaagctaaagccgagctgttgaacttggacgctggagaattgactaagctggtctgatggctaatagttatctagcgtatgctgatgtctgatcctaaatgcttaggcggcccacatgccattttacattgccgcatattttttttcttgttgtatactgaggtcttatgaggtgtttatatatgattcctttgtaaatattgtgtttgttatatgttatccttttggacatgctggttccaaggaaataaagcaatcgatctcgtattc

SEQ ID NO: 182967 - DNA, 223 bp, Zea mays
  Clone ID: MRT4577_98450C.1
cccttaatattatcctactttatattaattctgaaagggggggttttaggggcaaaggggggccaaaaccgacccggcaaagcacacaagaaccagggaacaaggcgcgccccaaaaagggcggaccaccgacccaacgggcccggaggggggggaaacaatgcccggcccaaggcacagcggagaaacggggcccaacgcgaagggcgcccccccaccaaaa

SEQ ID NO: 182968 - DNA, 886 bp, Zea mays
  unsure (1)..(886): unsure at all n locations
  Clone ID: MRT4577_98451C.1
agaaatgatgagttagtccctagccaggtaactttaactgatggtaactttgagaatggttcacatcacgaggctacaggtgacttttggaccgaggagatggtttcgggagagaaagaactgctacctgacccagtaactcatgaaggggaacacttattgagggatgaacttctcagcaaaataatggacaaaagttctaaattaggtgacaaagttttctctctgagaggaaggagtatctatgataagcattcaaatcaggtttcatttttagacatgcataggcaaaaggtagtggataaactcagaagagcatgcagtttagttgtggagcatctacgtagtagtcaaaatcacattgctcaagaggacagagatgggaaaataaagctaataattgaatggtttactatgctgctgtatgcttttctggaacacatgaaatgccaacgtaacaggcttgatatgcagcaatcagcttcaaggatcaaggagtctcaattgaaggaagaaacccttcaggcagcaagatgtggccaattagatcaaaattttgatcaacatattccttcaccagattttgaatttgctatggaagaatttaggcacttcagggaagtagttggtagctgctatgttgatccagctgctctggtaccagagtctttggatgacaattcagcaatggaaattatgttggttcaaagcgcaactgatgctgaagtcatcgaagaagtgctaaatcgacctactgaagttcttgttcaaggtccagctcagaagttgttggtccatcagntgatgtgatttgcaattgttctgatggcatcaactcccaaagagatgcatctctgggctgttcattcattggacccttcagtga

SEQ ID NO: 182969 - DNA, 1686 bp, Zea mays
  unsure (1)..(1686): unsure at all n locations
  Clone ID: MRT4577_98452C.1
ttccaaggcgcggaggaagatataattatcatatcaacagtcaggagtaatggagctggtacacttgggtttctatcaaacttacagaggactaacgtggctctaacaagggccaagcattgcttatggattgtggggaatggaaccactctgttcaacagcaattccgtttggcagaagatcgtcaaggacacaagagatagaggttgtttttttaatgccactgatgagaaagagttgctgaatgcaattttcaagcctgctgttgagtatcctcatgctgacaatttagctaaacatgagcaacacggacagaatatatccgacttatcagctactgacacaattcagcaacttgcatgtcagtttacccctggaagtgatctcccaccaaagttctctatcacactcaatgttggttatactacaagaaaattcagttcatcaagcaccctgcttaacagctctcctttgcaactcacagcaacagcggtaccaaacgcagaaccagcttctcatggctcttcagctactggagcagttgaattgcctgtaaccgaagatgggcgcttggttgatgggaaaatctcctttcagaatactgtgaggagcactttgatcagaatcgaccacgaccctagacttgcatttgactttctggcagtagcaactacacgggagcaagcagcacctcttacccgggagcagtttaagaagcatgacagaatggtcgaatctcctgctccagttaccgctgagggttcggaatgctgcatcagactcaatgaacaggagcaagtagcacctcctaccaagctgcaatcgaagaagcgtggtagaaatgttaaagatcctgctgcagctactacaggggctttgaaatgcagcatcggactcgatgaaatagctacccgccagcaagcagcacctcctactcctgagcaatctaagaagcgtggtagaaagagcgaacctcttcctcaagttatcacagagggtttgagacgcagcagccgacttagtgaaaaaggcaagcaccatcaagtagcgccgtctcaggagcaagccaagaagcatggtagaaagggagcgacactttctccagttaccacagaggccctgagacgcagcagcagactgaatgaaaagggcacgcatcagcagatagcgctttctatcccagagcaagctaagaagtgtggtagaaaggccaaaaggcttcctcgagtaaccatagagggtttgaaacgcagcaaaagaatgagtagaaacaacagcgaagaattggctgatgtggattgcaatccatgtgagtgctaccataaaaagcccttctagtttcttttgtcagcactagatgatcatgactataactcatattttttttatttcttgaatgactcttttcatgaaccacaagaaatggcaaggaagcgacgcctacctgccgagtgccgactacatcaaaggaggttacaacaaaattgtataggttgggacatgtctgcancaagcaacatgatcgacccttctcgcactacaggaaactggttaaagaacgtgggtgaaaaaccgtcaaacttaatgtaataggccgtcgaacttaccgtaagaacgtgggtttaccgacgaatatagccgccggcgatttttggaaaaaaaaaaaaaaaaaaacccnaggggggg

SEQ ID NO: 182970 - DNA, 684 bp, Zea mays
  unsure (1)..(684): unsure at all n locations
  Clone ID: MRT4577_98453C.1
gggcaatanngccctcgaacaggctcctaattttttgggtgctctctcactttgattgaggatcccgttttctgaactgaactccagcagaagccccgaaacaaggcccctacttttcaattccctctattttctcaaatactatatgcatatataattgagcactccatgatatataataatttatttacaaaaacctgtgtttcagaacagtggacctctggtttcaccgttgaagactgatggcaactttacttgcgtctgagtgggtaaaggcaaggattagcaagagttggtacatagacacatcacatatgcgagcagagcatgtggcgggtgtgaatcataccggctgattggttagacgggtgagcggcccttggcttgggcgagcctagacggtgggaaacggtatttcctcacgtatccacacacgcagctaggatatatgtttttatgctaggctgcatctgtgggtgcagagtcagtatcgatttacacagttagccaaacaagggatattgcttggtcaacgcatgcagtcagtctggatggacgtgtgcagtataccaatcaggtggatagtgacctaactcaccttggaaatggaaagacagttaaacanaanaaacagttactcattttggtgtttttcttgcaaaaccctagtacatatgcatatag

SEQ ID NO: 182971 - DNA, 212 bp, Zea mays
  Clone ID: MRT4577_98454C.1
attctgtcgggcttccccaccacctacgccaacgcgtgcggtggtggtgaccgacctgctgtgcccactctccatcttaaccggttgctgccgtagtacgaagtgttgactggggcgtacctgcctgtgggcatactgcgagcgctaccatttactccccacggttgatgaggtaacgactgcgatgggccgaacatcccatgcatgaagtg

SEQ ID NO: 182972 - DNA, 357 bp, Zea mays
  unsure (1)..(357): unsure at all n locations
  Clone ID: MRT4577_98455C.1
attattttcaataaancaacggacggttttttgtttctttttcttcttctcaangttttgccaaaaccccaaaacccacgcactcaggagaaagacatttaccagatgcccccaacacaaataccatacccctcctccttcttcaaatatttaaacgcctttactttattttttaactacaacccactattgacacaaaaaaacgactccggcggtctccaaaactcactccaatcttatacccaactatattcactcacactccctccaattacaaacctactatatgcatcgcatgcatagaaaaatagtcctgtacaaactataaaccatatttgtaacaacccacttcctttt

SEQ ID NO: 182973 - DNA, 159 bp, Zea mays
  Clone ID: MRT4577_98456C.1
gcggctagctaagcaacccccaacagcgccactgtcagtgcgcgcgtcaaggttgctcagcaagaagcggacctacggctacgcgcggctcttgctcgccgaggccttctccaaggggctcggcgcaaagctgcaggtcttctccaccgacatcatcga

SEQ ID NO: 182974 - DNA, 552 bp, Zea mays
  Clone ID: MRT4577_98457C.1
aattatctgcaacccttagctaccggcggcgtcgcttcaggaagagaaccataacccgactctgcggaagatcgtcaatctcgcaaacatgacgatcctcctgaagaaccgcgtacgcgacaagaacgcgcggatccaccgcgagtacatacgatgctcccactgaccgccactactgtcactgcgcatcagcgctcatcctcgcctctagccgaagaacatggttcacaaggatgctgtcaagaacacgcagaagaattgtgtgcatgagggatatgtccttctcaaatagtacacccagctcatgcacatgcgctcatgcctaaaccatgaatacattgatgcggtcacctctcgtgacaacaggatctaccgccaggacccgaagggcttcacatgccaggacgatgaggcaaggctagaggagaggccaccgacgcccagaggactggtgccacattaactccgcctgctgtcgatacgtccacctaacctaatgaatgccattcatgtcttatatgtcacacctatgaaataatgtacctttcctga

SEQ ID NO: 182975 - DNA, 168 bp, Zea mays
  Clone ID: MRT4577_98458C.1
aaaaaaaaaaaaaaaaaaaaaaaaaaaaaaaaaaaaggacggacgaatataaaggaatccaagacttacaaacaacatacaatgcaacgtcatagcatcttctatagatgtcaccttaaattcaatctcactgtgccagacgtctttacaactgtctttgacgtggga

SEQ ID NO: 182976 - DNA, 218 bp, Zea mays
  Clone ID: MRT4577_98459C.1
gagcaggggtaacaacgcagataacccattttcactgttaaaaaaaaaaaaaaaaaaaaaaaaaaaaaaatgaatacaactaaattaaaaagaaagggaaagacactgttgcatgttctcataaacacatacaaaaaaaaaaaaagtcctttgcgttgtcaccactgtttaagggcgaaatggagacactggctgctgttttttttgacccttagcct

SEQ ID NO: 182977 - DNA, 1738 bp, Zea mays
  unsure (1)..(1738): unsure at all n locations
  Clone ID: MRT4577_9845C.1
cttcccctgtccatctcttttttttttggtttcctcgcgtttaaagcttcgaggccggatcccccttaagttcggcagggtaagacggcttcttcctctgcgccttcaccttcgcctgcgctgccggggttcgtcgcatggtttttaaatcgggtttgtaagttttagatctttatgtcaactaccaatctgaggcggcgactccatcatggagacgttgatggaaggaaaaacgagcatgttgacatatccagtgctgattccctcaatgaacctctattagggaagtccaatgatgacaactttggatcagaggtgtatgatcctagaaaacaggatctgtgggatgatgatatgaagaaagaacaactacactggtcatttcttttctcaaacttgattacacaatgggcacaatggttagcaagcattattgtgagctcaggatctatctttggtagattatcccccttctcttcagagaaccaaataaatccagtatatcttagccctttacaggtaatgtagaggtaaaggtataagattgcagttattagtttataatgtattgaaccttcaactttccaggaacaaaggttggatactttaagacacagattgcaaatctcttttgatggctcccgtattgaacatcaagtgtgtattactgatgtagattggttttctaggttgacatcatctcatgaagtaaattaattaataatttatgggctttatcattattagtctgccttgaggcaactccggcgtttagcttatcccgctcgtgagattccaccactcaaatctgaattatggaaggagatgggttggcaaggcaacgatccatctactgatttcaggtcctcttgtaatttgatcgtaaggagaatgtgctcatgngagaaaattaacccagttgataaacacatctaatactgatcgcatttatgcaggggtggtggactcatatcgttggagaacctcatcttttttgctaggaactaccctaattcatttcagatgcttctgaacaaagtacaagggcagagatcagattgggagtacccttttgcagttgctggtatcaacgtttcattcatgctggtccagatgttggatctgaagtcaagtaatttcctgttcccaattcccctttacacatatctgcggatttcacattttgttgtttgaactgtcatatttatgcaggtgttccatcttctaagtatggaattcgtttccttgaattgcttggacgtgatgagaacgcctttgaccacctgtactgtgtggcctttcggttgcttgatgctcagtggcttgtgaaacgtgcctcctatatggaattcaatgttagcatattgagtacattgatccttctctttctgttttaagacactggcattcttaatttcttacttctttggctttgttgtaccaggaggtcttgaaatcaacaagaactcagctggagcgggaactggttctagatgatgtgctggaggtgaaggacctgccgtcctacactatgctggatgagtaagctaaagccgagctgttgaacttggacgctggagaattgactaagctggtctgatggctaatagttatctagcgtatgctgatgtctgatcctaaatgcttatgcggcccacatgccattttacattgccgcatatnttttttcttgttgtatactgaagtcttatgaagtgtttatatatgattcctttgt

SEQ ID NO: 182978 - DNA, 598 bp, Zea mays
  unsure (1)..(598): unsure at all n locations
  Clone ID: MRT4577_98460C.1
cgaagatcgctctcctgcgtccacgcctcgcttgcggcgactagggcgactgccgccgccgcccttcgcccagctgcccaggtcttcgtcgggcgctttaccggtgaagagcgcccaccataccagtcgtggcgccgagccctactcctcctcccgccgccgccgccgccgccgcagactcttcctcgcgactcgccgctcgcccgactttccgagctccgacaccaaggaacaccatgggagagtcgagcaaggagctcctggacctgccctccgaccccaggcctcccgcctccttcatcgagtcgcttctcgctggcagggagcagcagcagcaggataaggagggaaagcgtaagttgggggcgtccactgatcccctgcccaaaagccaagttatcgggaaagtgaaggatttcttgggggagattgcaagggccaaccagaagttgcagcttgatgcacagaacaagcctcctgtggagtacgatattgaagcccttactgggaacgaggaggaatacattgagatggatctgcttctaggtgtcgctgatcttcattcanagcangctgtggaggcagctgaagcaacaat

SEQ ID NO: 182979 - DNA, 574 bp, Zea mays
  unsure (1)..(574): unsure at all n locations
  Clone ID: MRT4577_98461C.1
ttttttttttttttttttttttttttttttttttttttttttttttttttttttttttttttttttttttttttttttttttttttttttttttttttttttttttttttttttttctttttttttttcttttttttttttttttttgggggggggggggtgttttttcttttttgttctttttgttgcttgctttccttttttggcctgctaaactttggttgttcatgggggccctcacttgcggaagggttgttttacaggcttatgggttccccgtccacgtcttctttacttattagtggttggttgtgccgtaatacgggtgggctgccgcaggttgttgcggataagcttatggggctgtgcgtgctggctcttgtgctgctggaattgctgccggctgcgggttgttttgttgcgtttaaccctgcgcgggggttgttggtggataatcnccatccgcagctgcttgtgggtcatgctggggcatttggatggctgttgtcttttacttccatatgcgggttttggcaacctgtttttgcctgtcgaacctttccatttgtgccat

SEQ ID NO: 182980 - DNA, 1232 bp, Zea mays
  Clone ID: MRT4577_98462C.1
gcagaagctactcccgagagtcgctctcctgcgtccacgcctcgcttgcggcgactagggcgactgccgccgccgcccttcgcccagctgcccaggtcttcgtcgggcgctttaccggtgaagagcgcccaccataccaggccccgcaccttttaacaagttccagtcgtggcgccgagccctactcctcctctcgccgccgccgccgccgccgcagactcttcctcgcgactcgccgctcgcccgactttccgagctccgacaccaaggtctgagtgtctgactaccacgctgcacctacgacctcgaggcgtctccaccgcgccattggcaaactaactcactttacaggaacaccatgggagagtcgagcaaggagctcctggacctgccctccgaccccaggcctcccgcctccttcatcgagtcgcttctcgctggcagggagcagcagcagcaggataaggagggaaatcgtaagttgggggcgtccactgatcccctgcccaaaagccaagttatcgggaaagtgaaggatttcttgggggagattgcaagggccaaccagaagttgcagcttgatgcacagaacaagcctcctgtggagtgcgatattgaagcccttactgggaacgaggaggaatacattgagatggatctgcttctaggtgtcgctgatcttcattcagagcaggctgtggaggcagctgaagcaacaataaacggccgccagacttcagaaatgacatttgcttgcagctcatctgactcggaagatgatagtgatgacagcgatgaagatgctgatgacaaacctgtcatgtctgacaaagataataaatgtgaaagtcctgatgacgcggagatgggtccagcgaaaggaaagaagcccaataaaagacagaaaattgttgttctcaactagtacccttgtcttttgtacacctaagaacaagggctggagcctagatcagaaggcagagcgcaagtggtgaatgtgttggcctggtaattcttttttatttgtcacggtttagtttaaaaatgaactaagtttaaaaatgaacaatagttgagaaaggagtaagtattttttttcagtgttgtgcaatgttcaggccagctagggcaacttgcacaggagctaaaagaagtaatgcatgttccagtttatacaatgcgtaccaaaaaaaaaaaaaaaaaaaaacaaaaaaaaaaaaaaaaaagcggcc

SEQ ID NO: 182981 - DNA, 430 bp, Zea mays
  unsure (1)..(430): unsure at all n locations
  Clone ID: MRT4577_98463C.1
ttttaaattttttataatctttttataattttattttttttatttttttggaaaaaaagaaagtgtttattattaaataggattaatgatgtatacaattgaaagcaaacattgtgcataatcttnaataattgtggtattgtagggtgtgaaaaggataaaatttttttatgaatgatgcatgtttaaataataataactattgtgataaaaacatttttgctaagtattttaatgttgaaacataattttataaatattttgaactagttgtagataaaaatgataatttggtaggctttttttttaacccaaaaataattgtttggtagataaacataatttttaaaagatttaatatttgaaaggattgagagagattttttttaaaaaactaaaaaacagattttccactataaactaggaaaaa

SEQ ID NO: 182982 - DNA, 2602 bp, Zea mays
  Clone ID: MRT4577_98464C.1
ccggccggacaagagagaagtcggcccgcacgagcggcgcgcagaagctactcccgaagagtcgctctcctgcgtccacgcctcgcttgcggcgactagggcgactgccgccgccgcccttcgcccagctgcccaggtcttcgtcgggcgctttaccggtgaagagcgcccaccataccagattggccaccagaggattgctacatttgggaaggatgagcaaaggccctgttccattcgccaacattgggaagagagcaaaagatctcttgtacaaggactacaactttgaccaaaagttttctttgtcgacatgttctaactctggtttgaatctcacagccactggtgtgaagatcaatgaagacttcattggtgatatacggacacagcataaaagcagcagaaccactgttgatgtcataatcgatagtgattctaaagtgtcaaccacagtcactgttgatgaagcactaactggtttgaagacttcatttgccttcaaggttccagatcacaagtctgggaagcttgatctgcaatatgcccacaatcgtttttcaatgaattcgaccattggtttgacatcaacacctttggttgagctcgctgcaactgtcggcacaagtgaacttgccattggtgctgagtttgggtttgatagtacttcagctgctgttaccaaatacaactcaggggttggatacaacaagtctgatttctctgcttccttgctacttgctgataaaggggagactttgaaggcatcttacgttcatttattcaatccgaccaacggggctacagttgcagctgaggtaacacacaagctgaaaaccaaggagaactatttcacacttgggagctcccatgcacttgatccttcaacattgctaaagacgagattcagcaactcggggaaggtcggtctgctctgtcagcatgagtggaggccaaagtccctcgtgactctttcagctgagtatgatccaaaggtggtaagtgcgccttcaaggatcggcgtggccatatcgctcaagccttgagatatgggtcaagtcaccttctgtaaaacagtacaagcgttacgtactgatactcgtgtccaagaacataaacttttggagcgatacctagaacaaccctctccattttagccttgtttttggtaagagccttgggcaaagaagtgttgtcagggagttggacttgttttgtggaatgtttccattaagagccaaccccacaccgaggattgcaaacacagaggtttgtattagtgcagaagtttcactctgcgatattttttccccatgttttcctagtcgacgcaaaatgattttggaggtgattgaacacctaacgtcttgagttgacggcagctttaacagctctgattataaaggggccacttgtacccagcaacagaagaatttgctcccaattcgtcgaattggctattctggtggaacattttttgttgtcgttggattggttcttttgaaattcatgtattcagagcagtctaccaggccccgcaccttttaacaagttccagtcgtggcgccgagccctactcctcctcccgccgccgccgccgccgccgcagactcttcctcgcgactcgccgctcgcccgactttccgagctccgacaccaaggaacaccatgggagagtcgagcaaggagctcctggacctgccctccgaccccaggcctcccgcctccttcatcgagtcgcttctcgctggcagggagcagcagcagcaggataaggagggaaagcgtaagttgggggcgtccactgatcccctgcccaaaagccaagttatcgggaaagtgaaggatttcttgggggagattgcaagggccaaccagaagttgcagcttgatgcacagaacaagcctcctgtggagtacgatattgaagcccttactgggaacgaggaggaatacattgagatggatctgcttctaggtgtcgctgatcttcattcagagcaggctgtggaggcagctgaagcaacaataaacggacgccagacttcagaaatgtcatttgcttgcagctcatctgacttcgaagatgatagtgatgacagcgatgaagatgctgatgacaaacctctcacgtctgacaaagataataaatgtaaaagtcctgatgatgcggagatgggtccagcgaaaggaaagaagcccaataaaagacagaaaattgttgttctcaactagtacccttgtcttctgtacacctaagaacaagggctggagcgcaagtggtgaatgtgttggcctggtattatcagaagttacggagggactctctctgttcttttttatttgtcacggtttagtttaaaaatgaacaggggacaaatattcgagaagggaggttgtatttttttcagtgttgtgcaatgttcaggccagctagggcaacgtgcacgggggctaaaagaagtaatgcatattccagtttatacaatgcgttccaaaaaaaaaaaagggcggccgccaccgcggtggacgaaaaaaaaaaaaaaaaaaaaaaaaaaaatggagaaaactataaaaaaaaaggtgggtggggatgaaaggg

SEQ ID NO: 182983 - DNA, 433 bp, Zea mays
  Clone ID: MRT4577_98465C.1
gtacaacgaacaaccaaacgcgagcagaccaatttgcgcttatgggtatatttttgaaaacacagaggacatgctcatcttgaagcagccatttgatcatgtctatagacaaagagctcactgtggacggttctgtatcaagaatatttggccaccgatttattgacatggaactgtttacgcatacatattacatacggtagcctcatgcgtaaatagcacattggcctacaaactcatgccaatctcctgaagaagccctgatgttgcccatatacaacacggtaaggtgcagcatgaataaggagatcctcacgaatccagagaagaacacgagggcgaggaaggacatacgccatgaactcagtcaattagacggttgggccttcgtgttccaggtctacaattgactgctctgctggcaggagcaatg

SEQ ID NO: 182984 - DNA, 377 bp, Zea mays
  Clone ID: MRT4577_98466C.1
gggtttttgacaagctcaaggcccagcgcgagaggggcatcaccattgccattgccctgcggaagtttgatacaaccaaaaactactgaaccgtgattgatgcccctgggtaccgtgacttcatcaagaacatgatcacccggacctcccacgctgatcgtgcggtgctcagcattgactccaccactgctggctgtgaggctggtatctccaaggacggccagacccgtgagcatgctctccttgcttatactgttgatgtgaggcagatgatctgctgctgcaacacgatggatgccactacccccatgctctccagagctcggtaccaccagagcgtcaaggaagagtgttcctacctgaataaggtggcgtac

SEQ ID NO: 182985 - DNA, 293 bp, Zea mays
  Clone ID: MRT4577_98467C.1
tacattgactatatcatattgatacagcaaggagcacttactcgccaacattaatcaaacctcttgctatattatacccatctcctcatgaaagggctttatccccaaagaaataacagacattaacacctcacttaaataatcatcgaggacgcattctctaatccagagatgaccaccctacaaagaaaattcgattgcatgcatcgctaaccgcaccacacattaccatgtaaatactccgacacctaactcagactaatgccattcaaaatcgaagaaaggacgaatga

SEQ ID NO: 182986 - DNA, 1863 bp, Zea mays
  unsure (1)..(1863): unsure at all n locations
  Clone ID: MRT4577_98468C.1
gcacgaggtcagtgcagtgagatttgtggaactaatcatgcctttatgcctatcgtcgtagaagcagtgactttgaaagattatgcggattgggtatccaatcaattaatcctccaaaccaactaaaccggggaagctgaagcggaaatgcaattctcgggtgagggaaggcttcgctcgctcgctcaaaaagctctaacgctcgtttacgagtggagtgcataagcccttattgaagtagggcgaggccttactacacgagctcgtaagtaaagcacggaacgagccttgtctacgaagcttcgcttcatcatcttgcttgcttctgccgaagcttaacgcactataacataggcatgcatgatggtatggtaggaagactccttttaaggccgaccactacataggagcgataggaagccaagccgtcaaaaggaaaggcgagcagcccttattgcaatagcaaacggcctacttatagccctatttataccctttatcggggacgggccttacaagctcaataaattgcaattcttcaccttttcctcagacagtgggaatgaattttcttacttgattgacattgacagatatgtgtaccacaccgaacaagcaatatgtcatatgcttgatgtaccagccaagccagctctttttttctccgttcccttatccttagcgctaaagtcaaaataaaatgcaagagagtttgtatttgcaaatgaaaatgaatatggatctaaaaaaaattatataatcaatcaataaataataattggaataatataaaaaatatccttcgcgtattcgtttagaatcttgttgaccctactcgcttactcctattttcctgctttctttttcgacagaattcattctattctaactttcttgaaagaatggggttctgggctcaccctctcttcctttttgagaaagatgggctgccctgggagtctcgccttggtgattctttctctcttgggggtcttcttcggtagcgaatccgctctcataaattggatgaattcttctgggtcggcttcgggatccgcctctgagagttggcaaaagtacctcaacttatcggagtcggaggaaaatgccgcgtccgaaccatccacaagccacaccccgccgaaccctgaacctgaagcaccatccatttcgttcttgcgagaacgaatcaaaaatgttattcgctcatgccagcgtatacgaaaataaaaaatcctaaaaaggattaacgaagatcttcaccttgaaacggcgagcgccgagaagcgggtaaaaatcgcccaggtcctcgataacatgaactggaaaagggttttcttttatacctatacgggggaacctaagataaagcccatatcgacttaacggtccacgattgggatcgcgcacgaaaaggctaaacacagcctttttcttgtcctcgggacagcgggctagtcccgtgcctgtttttttgagttggggtacacaatcttccttgtgactgccaaaccagatttccgtttttagggagaaggtgtagtctttttgaacggtggtatcgtcaagaagaacgaggcccgccccatttctggggcggggggaaggagaagtgggactgtgggtctcctttcaacgcttcccgttccttctcccagacagacagactccccacacacaccaccaccaccattccccnnngnnnnngngnnttgntgatgatcnagatagttcaagaaaacacgcctgagggggatgtctatcaaagtagggaagaagacgctgtctataaatctattccacaacgacactacgggtggatttctcgctgacctcagccatgacgcaaccagctttccctcc

SEQ ID NO: 182987 - DNA, 2601 bp, Zea mays
  Clone ID: MRT4577_98469C.1
tctgccgggaaactgtcccttacccgcgtcccgacccaacccagtgaagacccctccgcccgccggaaccaccaccgttccagaatcccagcgacggccgctgggcgctggctaatcttttcccatccccgaaccaaacccacctaccgttattaagccgcccccttctcctcccactcccgcgcctccctcctttcacacccatctcgatcctcccaacccaaaccctagcggacgcaccgctgccatggccgaatccggcgagtcgtccccgaactcagccgcggccacggacgacacgcagcacgagatgccggaggccggagcggctgcggcggcggtgcatgcgcagccgcgcccgccgccgccgccgtccaaggtgcggctgatggtcagctacgggggccgcatccagccgcggccgaacgacaaccagctcgcgtacgtcaacggcgagaccaagatcctgtcgctcgagaggccgctctgcttcccggacttcgccgcgcgcctcgccgcgcttgtggggaacgccgcggacgtccgcgtcaagtaccagctgcccggggaggacctggacgcgctcgtctccgtcaccaacgacgaggatctggagcacctcgtccacgagtacgaccgcctccacgtccatcgccacgccacggcctcctccgccggctccagccgcggcggatccgcgcccaggctcagggtcttcctcttccccgtccagtcgcccccgcctccgccgcagccggccgggatcctcgagcctaaggttgagcagcgccaatggttcgtcgatgcgctcaacaccgtcctgctgccctcgtccaagcaggacccgccgcccgtgcccccgcagcagcagaagcaggagcaggagtcggtcttcgcgcagcagtcgccaccgccgcaggccaagcacgaggcggtgttcgtccagcagtccccgcctcagccgcagacggtggtgcagatgcagatgccgccgccgcagcacgtggtgctcgcggcggcgagccccgactacctgttcggcctcgacaatggcttcgtccatccccccgcggtgaaggtcaaggacccggcgggcgatcctcctgcggtcagggagagcgtgcccgtggagttaccagccaaaaacgaggaccgccatcccattcccaaccccgcgggcgacaacgtggctgtctcccctgcggagtaccagcgccagatcccggggctcgagaagctgcaggtcgccgacaacgccgcccaccaaccacctcctcctgcgccagcgcctgcgccggcaccttccctcgccccgactcccgtccccgccgcgctcccgagaaacggcagcgacgactccctgacccgtggctaccctctcgcgacccccaccccgaactccagcgcggagtactaccttccaaagttcccggagaagccccccgtgccgccgccgccgcagtcatccgctccgcccccaccgacctatctgcaggtgcagggcaggtacacatccgtggcccctggctccggcgcagaccgtggccccgtgttcttcatcccggcgccccacggctacttcgccgccacggcctcgccaggtgcgacctcctaccccgccgtgtacgccgtcgcgccacccagtaccgccgccaacggctccgccgcgtcgcccgcggcgtcgaatgccacggcctactcccccgcccccacgcaggtcgcgtacgacagcaacggccgcgccatctactacaccagcatgctcccccagtacccgtcggctgtcaatggcatgtcctcggcgggcgccgttctcgggacagagcccgtgaatccggtggccgtgaagccgaccgtgtcgtgaccaccccagcttacacctcgcctcatcacaaacaccaatggatcaaaattttctttcatcctcaccagtggtcaatggactgtctagagttgtttttttgtgcctgttggtgttctgggttcatgatatgatgacgatgcaagtatgagtagttgtttgttgtgcttagctgtacatacagagcctgtggctgtggacataatgtataagtattatattgtattggcctgcctgttgtagagttgagtggagttgggagttgtttaacaatcttgtgctacaatcttgtgctagtaaaatttgctgtatctcgattaactatagaaattcaatttggcatgtgatatctcggtgctcaatgctcttgcactccactctttgatgagcgtgttacgttatttctctgcccccttgtaggcaaaactactgctagtagtgtggttttgcgctgatcacgggacatcagcgtggggcatttatgcatctactggtaatggtacgtatgtgggtggggtgttaaacaaataagtcaggttgtggcgaaacggtttttgtccgtgaagtctgttaaaagttgtttggcaaaggtgtgtgttaaacaacccctgtgtcaggttgtcaaccatgtgtactgctcccgtcaatcgttttttaaatgccatttttttaaaaaaaaaaaaaaaaaaaaaaaaaaaaaaaaaaaaaaaagggccgcccgtttaaaagaacaaaagctt

SEQ ID NO: 182988 - DNA, 1892 bp, Zea mays
  unsure (1)..(1892): unsure at all n locations
  Clone ID: MRT4577_9846C.1
aaaattttaaaaaataatttactccgcgccggccgtcgtacgattgagtgggattggaggtttgaatccttctcttaattttttgtattgggaatcgaacaagccctaaatctcgcaggagcgatacagccgcactccaatcccaacacagcaaccagcgcaaaccagcacgatgcgtcgcgagggccgccagcacgggtgggtgtttaccgtcgaccccagcctggtcgacgcggagggcaagtgccggtcccgcgcggtgcaggtggagggcgcggcncggcgnactcccttgccggccctgtcgggtctctcctttttttttggtttcctcgcgtttaaagcatcgaggccgaatcgacctccagttctcgagacgactcgtctccctctttcaataagttcggcagggtaggacggcttcttcctctgcgccttcaccttcgcctgcgctgccggggctcgtcgcatggtttttaaatcgggtttgtaagttttagatctttatgtcaactaccaatctgaggcggcgactccatcatggagacgttgatggaaggaaaaacgagcatgttgacatatccagtgctgattccctcaatgaacctctattagggaagtccaatgatgacaactttggatcagaggtgtatgatcctagaaaacaggatctgtgggatgatgatatgaagaaagaacaactacactggtcatttcttttctcaaacttgattacacaatgggcacaatggttagcaagcattattgtgagctcaggatctatctttggtagattatcccccttctcttcagagaaccaaataaatccagtatatcttagccctttacaggaacaaaggttggatactttaagacacagattgcaaatctcttttgatggctcccgtattgaacatcaagatgccttgaggcaactctggcgtttagcttatcccgctcgtgagattccaccactcaaatctgaattatggaaggagatgggttggcaaggcaacgatccatctactgatttcaggggtggtggactcatatcgttggagaacctcatcttttttgctaggaactaccctaattcatttcagatgcttctgaacaaagtacaagggcagagatcagattgggagtacccttttgcagttgctggtatcaacgtttcattcatgctggtccagatgttggatctgaagtcaagtgttccatcttctaagtatggaattcgtttccttgaattgcttggacgtgatgagaacgcctttgaccacctgtactgtgtggcctttcggttgcttgatgctcagtggcttgtgaaacgtgcctcctatatggaattcaatgaggtcttgaaatcaacaagaactcagctggagcgggaactggttctagatgatgtgctggaggtgaaggacctgccgtcctacactatgctggatgagtaagctaaagccgagctgttgaacttggacgctggagaattgactaagctggtctgatggctaatagttatctagcgtatgctgatgtctgtcggcggccaacggcggcttcgtcagggcgtcgaggaagcctatcaaccactccaagcccgctgtatgtcgatcgtccaaatgcctgatttgataatgagacgccggctcgaccattctaaatatgcacattattattcttgaccatttcatgttgtactccctgtacctaaaaatgccccacctcgactacatgtattatatgctttagttccaattaaaggtctgattatgtcattcacagtataaaatattgtgtgtcttggaacagaccttcctattgaatgcacagtgtgctgattatggtacaacttatgaatatccatccaaccgtgatctgcaattttt

SEQ ID NO: 182989 - DNA, 466 bp, Zea mays
  Clone ID: MRT4577_98470C.1
ggcagaagcaagctgaagcggagccgacgtttacgacttcgggcgcagggagcatctcgatggggacacacttttactgattattaatctaggacaaagcatgcaccggacgcggctgccaagaagggcagacggtgcggacccataggacaggcatagatggaatggccgagcaaccttctaatagggatagatggccaagacaaaataccagcataaatacaatgccacactgtacacagtttacagccgtatacatgtccacattgtctatcgatcaattgagttataccaggacttccatttacggccacccccttgcgaaacaacatttaagatttcggccccatagattggacatgttttactagggcttcaccaaacctgtggggacaatgatattcatatccttggaaggccttgcaaaaaactccgctcgggcaagttggcgaatgagagacatacc

SEQ ID NO: 182990 - DNA, 571 bp, Zea mays
  Clone ID: MRT4577_98471C.1
gggtacctcgaggccggccgggccgggctccacccttccgttccgttccgatttgattacctggtggcttggtgctataggttcactccaccggtccacccctttccatttctgataagtatccagctaccagtgtatgcaccaggcagcagcagcatggcggagtgcaaggacgacgacagcggccggtggtctccgtcgtcttctatgtaatcaccccccacccccctttgctctccccccccccctcgcgcccccgccgccccccccccccgcccgacccccctccccccctctctcctgcttcccctcctcccccgccccatgtttattctcccccccccccactatcaccccccccctttcttttttttcccctcccctccgccccccccccccttctcttcccctccccccctccccccctttttttttctcccctccccttccgttccccgctccccccttctctccccctcttttttctccccctcctcccccccccttcctctcccttcttagatccttcctcacccccctttctccccttctgcctcccccactttttttt

SEQ ID NO: 182991 - DNA, 343 bp, Zea mays
  Clone ID: MRT4577_98472C.1
gggttcaaaacaagagctgggacctgtttcttgcatgtagatggagtcgttttgctggttatgtacacccacacagggatagagacaaaccgacccccaaatggtctaaacttaagacaggcctgggaaagaatacaccaaaaaaaagcaaagagggtctaggggtgctactattgtacaggctaggaaggtgccctcaaaaggaatgtaatatggggtatttttaggcgccgacctgcttcagagggcaactgaactgaggcctgagagccatacgcgcgctccaagggcggctactgtttgccctgggagatgatcaaggtccctagggtggtcaaggttg

SEQ ID NO: 182992 - DNA, 422 bp, Zea mays
  unsure (1)..(422): unsure at all n locations
  Clone ID: MRT4577_98474C.1
ctgtcgtcgcgctcgcctgccatctccttccgcgctccatccgccaccatccgcgctcgcgtcccttcgcgcatcctacaaccgcgtgctccttccttcgatggtgcggatcccccgtgactaccatctccctccgccctcccgcgctccatccggcaccatccgcgcttcctacagccgcgcgctccttcgacggcgcggatcccgcaccctcgaatcacgccagcagatcccacaatcaagcagcggcgacaggaataggggcgggctacgcgggcgctactacgacgagggggagggcgagcgctccggcgccgcggcgccattcatcataatcggtcgagctcctggagggaacggctgcagagcggacgaaatcgaggagcgggtttcgggtaaattcaccanctattgacatatgg

SEQ ID NO: 182993 - DNA, 275 bp, Zea mays
  Clone ID: MRT4577_98475C.1
cgggcagcatcttcgagggtctcctgtcgaatgacatgaatgtctatgcgtacatcgagtcgtgtgctcatgcccttatctgttggatggtctgttctggctattgctcgatcctcgcagcgtagtatgattcttgcttgggtgatctgtagagtgccctgtcgactcttgagagtggtttccatgctctgcgctgtctatcgctcatgcagctatcagactttggcacggctgtgactctggttcaggatgcattcagctctggctcctcggtg

SEQ ID NO: 182994 - DNA, 308 bp, Zea mays
  Clone ID: MRT4577_98476C.1
ggttgaggacaaaccaaaggtggccattggtgaaccaaaaatggtataaagaaaaaaccctcaagccacaaaagggggggaagatttttaagacaaatttactttggtttttcaagaactgggggaatttggtcggggtttaaaaaaagggccaccgaaaagaaaatatggggaacccctaaacctttaaaaaaaacttaactttacagatttaagaaagcctgggaggtaaccgggaagtctccgggcaaaaaaagggtgaggaggggggttgccacaaaaagaaacccgggtaaaaaagggccccc

SEQ ID NO: 182995 - DNA, 775 bp, Zea mays
  unsure (1)..(775): unsure at all n locations
  Clone ID: MRT4577_98477C.1
gcgccgcccctgccctcatcccatatcaccgtcgagcatgtcgttctgtccccggcatcgcccgtgctaggccagctccaccagccttccttcccatgccgtccaccacacacgcgtccttggacggccttctcttcctcagcagatggcgcgtgctggatgccctccacggttgcgccctactgcgccagaacaacggcctctgcgcgtccacccactgcgagtgtgaacccagtgatcctcgtccgtgcttccacattccccatctcagacacatccccaaggaaaccctcttccccctccttccgtgccgccggccagtagatctccggccatggacgacgatggaggggccttcccgttgccgtccccgtcgcgctctccgtcccggtccccaaaggcgtagctgaccccgcaacgccgcgcagggggtcttgggagtagatgctggtcaaggactccggccaaggatcacacagngcgctgcgacgtctgccagagtatgcgggctgcggcgatgcttggtagggagcggaggccagagagccggctccgcctcttgctgttctgctcgccaccctcgccgtntcgagaggggggtccccggtcgccgttcttgctgaaacaaatctgtaatcagctatgcacccagcaacacaagcaaaggtggataatgcatgagatattctccctagattgttctggacaggncttagaaaatgtcatctttcacctgagtagtctttggtcattcaagcacaccttggcattcagt

SEQ ID NO: 182996 - DNA, 271 bp, Zea mays
  Clone ID: MRT4577_98478C.1
attggcaacagatacaaggagtgcaggacacaaagaactaccagctgtcaaacaaaaatacttgttggaaaggatgtattaaacgaaatagagcaaaggcgttcatcaccaagtgtgattgcaaaactgatgggaattgaggtgttgccaccttctaaagtggtcaatagtcggcatcaagaatttaaggatgtttttgaagtgtcagaggaaccaccagaggctgtcgcaaaagagaagtcccaaggcttgccgagcttgaaacgaagag

SEQ ID NO: 182997 - DNA, 185 bp, Zea mays
  Clone ID: MRT4577_98479C.1
ggcctcgcgtcatcaagcacctatgacatctcatgcacacgtacctccacttctattctctacaccgtcaggcctacattactgttcattttatcacccggggagcggaggcacgcagggcatggatatttttttatttattcattcacggaaaaactattttgcatctaattgccttatttaca

SEQ ID NO: 182998 - DNA, 230 bp, Zea mays
  Clone ID: MRT4577_9847C.1
tttatgcttaccgacccacgcatgcgacggggtaggtctgctatagcggtacctaaattcaatacattgggcgacgttaaacaacctcttgactgtgagaaccacagcataacgcatcttaaaccccatgcattacctacctatttcgtcagatggcgtattacccaccaggcccgttcctaactcactatccgacagttgcccaaccttaatgtgcaatggatcgcacc

SEQ ID NO: 182999 - DNA, 488 bp, Zea mays
  Clone ID: MRT4577_98480C.1
caaaattattttagaaaacttgcatcgaaaaagctggccgacatgagaccgggggaaggcgcgggggaagggcacaaaaagggccccaacaaaggcacagcaaggggaggggcaaccgaccggggcccccacccggccaaaaccagcaagagtcaccccaaaggcaaacgctaccgcaactcaaactcaaatccaacaaacaaccaacaaccaatcgccagaacattgcccctgccctttgcccttgacccacggcacatacagcgccagcctttcaataaacggaaaccacactgaaacaaactcagaagaaactctgaaggacccccgcctcaaagacgaagcaaaccaaaattgatcgacccttggtaaaccctaagataacgctggaaccacatgggacaagcatggaccctgaagttcacacaaactaccaaaacggggacaaaagggggagcacggggtcaccagggcctgtacccaaacgg

SEQ ID NO: 183000 - DNA, 335 bp, Zea mays
  Clone ID: MRT4577_98481C.1
aaggggaaaaaaaaggggtttcaaaagattttccatccaaatcattgcaaaccatcttccaatccggttccggacagaatttttttaaaaccatattacatcctttcatggagccatacactactacttgttgagctcaggctaggccttggggaccacaacaaagggggacagaagggccctggggttgaaccccaacagttcttccgggggggaaaaaaataccaccgacccaagcagggaataaagctccttgccgctgaggtcggccctcttcttgggcggtgtgttgttttcttgggtcagtacacgctttctggaagggcgtcagcccc

SEQ ID NO: 183001 - DNA, 231 bp, Zea mays
  Clone ID: MRT4577_98482C.1
cacgcgtcccaatagctcaactctgccaaataagcttgttaaaatgttggcttctcttcactggcgggattattagaagcattatcggaagcttgatcattttttggctagtcctgcacagctgtgtttgatttagggagacattatttacctttttgaaaggacacacaccatactttttctgtcacctaatttaattaaaaaaaaattttttgttacaatataatggcc

SEQ ID NO: 183002 - DNA, 479 bp, Zea mays
  Clone ID: MRT4577_98483C.1
aaaagggaaaaaatgccgttagagccccatccgccgttgttactgttagaataaggggggggggtacagtatatatatatataggggagctacatatttttactactttataacactccgggctaaccgccacggtcgaaataggggcacaaggaggcatgaccataaaagtttccgaaaaattcggaagtgggtcagggtaaactaaaacccaataatacccaaatgaaaacgggcagggacagcatacccgtgctgaaaattgcgcggttttcaattcctttttaaaaaactagacaaaactcaaaaggaaatgctccaaggctgttgagttgggcggttcggcctcccggaaataaatttccagccgggggggccttccaagccccgtcccgccgccgggggggtacccaggaaactggggtaaacacccggggcaaaatttccgaacgcgcctccgggcgccgtgggcccaccct

SEQ ID NO: 183003 - DNA, 326 bp, Zea mays
  Clone ID: MRT4577_98484C.1
gtctcttatactgtattttgtcttatcaaacaccattttttacacataaaaacacctcaattgacagatcgttacacaactgtcgtgcagaatgcacaccgttcctaccggtccgctacggagcatctaggcacacttgaccgctacaggagcgagaaagccaacggggcacctttcaagcgccgtaccacaaagccggtcgaccggcataccttgaggaaagggtgcaggtgcaactggccacttggggacagaaccgccacacctccttggctttcagaggaccgggacggctctgccaccccgcgcaaccaatcgggcatgtt

SEQ ID NO: 183004 - DNA, 364 bp, Zea mays
  Clone ID: MRT4577_98485C.1
ctatctatctccctttgtttattcttttatcggttgcagaactacctgacatcctatggcggggtctgaagcatataacggagggcctcccctctgcatatgtgttctgaacaagtgcgctcatgaacaaggagctccctgtcacaagaaactatggatcttaatgaccgaccgggaaaaaaaaaaccgtacagtaccaagcaagtggtattacccgaagacgggcactatcagaatggggcccaaggagggctacacaaattctctggggatcactcatgcccacgtttattattcgcggcggtagcagttttccacacgatatttttcagctctgatgaaaacccataggagaagatgcgga

SEQ ID NO: 183005 - DNA, 427 bp, Zea mays
  unsure (1)..(427): unsure at all n locations
  Clone ID: MRT4577_98486C.1
ctatgggggcacctaaatcccaaaccagcacaaactttaaccagttcatatcaaggtatactaacatcaacctcaacctgctccataaaggccagaatctgttacttactgaagacacaaggccatacaaatacttttgaaagacagtaccactccatgggctattgggggggggggctggntanacccatatccagccgcnngcttcttcgactgttggcttaataaccaccgcgaagacggagcaccaggtggagggtgctctccttctggatattggcgtctgcacgggtgctaccctcctccagctgcttgccggctgttatcatacgctgctgttctgtgggaatcctctccttgtcctggatcttagccttcgcgttggtcgtggtgtctggtctctcaacctccagggttttggtcttgc

SEQ ID NO: 183006 - DNA, 266 bp, Zea mays
  Clone ID: MRT4577_98487C.1
aattcaaatcccccaaacctaaatcctctcactgcactccctccgccgccgcccgctagctagcagcccgcacgccgccgaccacccgccgtctccagcacgccgtcacctgtctccaccctcctgcaaccccactgcttaggccccgaacacttctaaccctagcttgtgcgctggagttcggggagaggccaaggcgcggtggtggacgccgccatccctctcagatccggtgctgagagagggagggagggagggagggagag

SEQ ID NO: 183007 - DNA, 296 bp, Zea mays
  Clone ID: MRT4577_98488C.1
gatgcgcttcagtctatccaagggtcgtaccgacgttatgcggtcataaccagtgagcccaggccaacggtgaatatactgacatacaccccacttaatcacctgattctgtgcgccatagtaatagaccgagatagacctctcttttttgtaacactgggtgttgggggaaacactgatgctagcgatggtctggtagcacttgagaccgcaccaggtgaggatagacatctcgcgaagccgactacacaacttacccatgaggagttaagctctagtgaattgctacctaacgg

SEQ ID NO: 183008 - DNA, 587 bp, Zea mays
  Clone ID: MRT4577_98489C.1
accaacctcgtgctgttcggatcgcacaccacacgaccagatctccctcatatcctcccgctagcacctccgcttcatgatgtggatctttgtgaaaaccctgactggcaaagctatcacctctcgtaggcgcagtcgtctgacaccattgactaacgttaaggccaagatccactacaacgacgccatccccccaaactcagaagcgcttcatctttgctggaaaacagatagaggacgggcccacgattgctgactacaacatccagaacgtagagcaccgctccaccacttgcgcatccgccctcaggaagaagcatgtcatatctcttgctgaaaacacctgagccggctacagactactcacccctcacacggtgacagactcgtctgcacaccatgtgacgacgtcaaggcctggatcctctacaaggagggcatccctccacaccagcagcgaatcatctttgctagaaagcaccttgatgacggacgcactcttgacgactaccacctccagaatgagagtaccctccacttgctgctgcgactcatacgaggcatgcttatcttcgcgcagaccctga

SEQ ID NO: 183009 - DNA, 523 bp, Zea mays
  Clone ID: MRT4577_9848C.1
cagtgaattccgttgctgtcgagaagaggggcctcagcatgtacccaatgagagtgttatgtcccccaaacttggattagctgccgaggatgaacgagaaaataaatagagagagaggatgcttgcaatcgtagagttgatggaaataatatagatcaacttggtggcgatggttccgcagctttgtcttatgttgattttttgcagtaggagactagaattgtctatgactctaatgatccagtgatggaggttggcagcttgtatgcatctatgactgaatttaggctggcaatgagacaatatgccatagacaaagagttcgagttaggtattaaggcaagtacaacaaagaaatatagaggctattgtcgtggaggcggctgtctttggagcataaatgcaagaattgagagggatggttcgccgaccataattgtatgttttttgtttatatcaagaacttatcttatttaaaaaaaaaaaaaaccgacagcaacggcgacagcaacggaattcgagc

SEQ ID NO: 183010 - DNA, 545 bp, Zea mays
  Clone ID: MRT4577_98490C.1
cagggacagggggccacttttttttaacaagaacaatagggtcccaaacctggggtaccttttaaatagcccttggtggcaacaaaaccgtttttttcctgggacaaaaacctaatatggggggcacaaaccaaaaataccttacccttggccctcttaaaaaaacggtaaccaccccttgggggtttgggggtacccttgccccctcatgaataaagcacaccatgattttttgcgcagcttgaaaaaaaaatacgaaagaacctatcaacttttggactgggggggggcactgcttgggatgccccccgcaagccacgctctcaaggccttcctaaaaatattgccggagggattcttttggttagaatacccgaagaaaatattttgttcctttttttgaaaacaacctcctttgcaacaaacaggttgatctcgttctcactggtctcagagccttcactgcgtctaatgaatgacaccgggactttcccggggacttcattttttttttttacaacgcggcagccttggtttcaggattt

SEQ ID NO: 183011 - DNA, 378 bp, Zea mays
  Clone ID: MRT4577_98491C.1
caacaagaaggtggaggcaggaaactgggatatccaaaatgaactcatagggatttaagtgacactgctgacactgaggggagcattagtcctccaggttactcttgtcgtgcaatatctatgccattttttttttgccaaagctgatttctggcctttatcattcatataagttgagacatatcttccacttccatcacctggctgtctgtctggacaggcaggcagaggcagccagaacattaggggcctacagtataccattgccacacagattcgtttaagctgcagtgatggtctgaaatctgccatttttttcagagatctatgagaggtatgattggtccttactcctgatgtgaactgtgtgttctgact

SEQ ID NO: 183012 - DNA, 473 bp, Zea mays
  Clone ID: MRT4577_98492C.1
gccggccggtctctggattcaccacgcaccccaacctgccttgtgccctccctccgtccatatcttccggcggcgccggcggccgtcgatcgactttacaagcagcagcaaagagatgtcggacggcacggccacctgcatcgacatcatcctcgccatcatcctgccgccgctcggggtcttcttcaagttcggctgcggggctgagttctggatctgcctcatcctcaccttcttcggctacctcccaggcatcatctacgctgtctgggtcatcaccatgtagccggccggccgagaggaaccacggttccctgccactgccaggcagacatgcagctggccgtgctgtcttcttaattgcttctgtttccgctgaagaatcatcaggacgcatgtacttgcatcgatcgatggatcattaatgaatctttgtttaaccgatcgaaaaaaaaaaaaaaaaaaggccccta

SEQ ID NO: 183013 - DNA, 166 bp, Zea mays
  unsure (1)..(166): unsure at all n locations
  Clone ID: MRT4577_98493C.1
tgggnngtgattatcggcaccaatggataggtgcgaaaccagtgtcctnanaggnaaccactgcnnaaagctggnannnctcgcaatnngtcgtcattaacctggtnaagcacaagnaggnngttaggnnnaaaagctgcttgcttcgtgnaggttnnncttcttt

SEQ ID NO: 183014 - DNA, 282 bp, Zea mays
  Clone ID: MRT4577_98494C.1
gactccgcccccattaaacttttaaattttgggggccaggccaaaaatttaaacaattttcttaagcccaaagcacaatcccaacaggggggtggggggggaacctttgggccaaaaagtttggcacgggcaaattgtttttctctgattaaaaaaacctcccccgacctttgggcggaccccttggcgaccccttgttttaccccgaaaattccggcccggtccctgggggggccaaatttttccttataggggggcgtattaaagctgggggaaaaattg

SEQ ID NO: 183015 - DNA, 315 bp, Zea mays
  Clone ID: MRT4577_98495C.1
tcgggccaagaacgcccgtgaggctttcagcacttcggcttcggtccccactctggcaagaagccttacgtcgagagcaagggccgcaagttcgagcgtgcccgtgggcgcagaaggtctcgtggtttcaaggtctaagcgtgtgctacaagtggttcggtttctctggtttggcgtggtcaaggtcatgggaattcacttatgaggcgtgcatcatgactaggaatggctctttgaaggcctataaaaagatactcgatgctcaacataaaatgaaagcatacgaacgggctcttcgagctcatggtcaaccct

SEQ ID NO: 183016 - DNA, 358 bp, Zea mays
  Clone ID: MRT4577_98496C.1
aaatcccccaaaaattttttccccctggggaggggttttaaccaagggggggaaaaaacaggttcgttttaaacctccccctgcccgggaggaggaattgaataaatttattatggggacaagcagtttctatttgggggcctccaaaaatttgggcccgggttgttgtccctgtacccctggggggggcataaaaagggcaccaaaaaaaggcctttattttggggggccaccatttgggggccctttttattttttaaccttccccaaggggtggaggtggagcccttgctactaggcttcatgggggggacactcaaaaactgaacttggtcgggcaaccccttgggggaaatta

SEQ ID NO: 183017 - DNA, 620 bp, Zea mays
  Clone ID: MRT4577_98497C.1
ctgcccctttccatcggtacttcacatgcgatgcgcccctgtagctgtcatgactcgccggatttaatcgttgtttctggtgtcaccggagggatggttggggctgtatgatgacccatccagtttgtgtatcgtctacagggtaaggtaggaggacaactaacgacccaccggtcacacagtattgagtatgttcgcaatgcgcgggtggttgtggccttacgggatactcctgcactccttgcgttcgtacggcggacatactccagatagaacatcagcgtgctgacattcgagttgagccatgcgaatcaattcatcagattatttgtataagatttcacctagacatactatttgcagactgtgaggctgagtactttgacgagccgtgcacaagccagtgacagactggtgttgttgctagtgctctgcaggtgcattcctctggcgctccaacgcatgatttgattattcagagcagtgcaggatggaggttgctggtacaggctgagtctacggagatcatagctaaggatgaaagtgaagatgatgtatcatgtcttgtagctccagactgtgtgaacgattctgttgaagagtacactgcagagaaggat

SEQ ID NO: 183018 - DNA, 504 bp, Zea mays
  Clone ID: MRT4577_98498C.1
acggacgcatcctctttttgccatttatctttgcgctcgagaaattacatgagctggctaaaaattgacgcgctccatgatgggcttaagctgtaacactggcctgctttattggatgacctcggaatactttttgggttgtgcaccaacgttgacaatgtttttatgagcacagcaattaagcaatctcacactttctaagtggtgactacactcagggccaattactttcataagcataagactggagtgcggaacaccctgcctgtttagggaccattaggctatacgttaaatccaacaacgctaaaataggcccacactaaacaaacagttgactgagaaaaacatgggactaatcaaatgagtgaatttattgaatgcacgctttagttatagtggggtatttctctataaggccaactcatatgaacttccaaacagattggcaggctccatgtccaatggaccctttgtgtattgatcacaccaagccctgcccgg

SEQ ID NO: 183019 - DNA, 218 bp, Zea mays
  Clone ID: MRT4577_98499C.1
acgcgcgttcatgagggagggcgacgtcaaggacagggtcgttggcgcaggacaaggaagagctagcaaggaagcttgaactacacatggcatcgtagatcagtgatgccgtaatgtatattcgcctaataagaggacgctcgcctcactctggaaactatgctctgtatggaatcgtataacgatgcctttgtggtatctcgagtatatatctgctt

SEQ ID NO: 183020 - DNA, 673 bp, Zea mays
  Clone ID: MRT4577_9849C.1
tcctagctgaatcacagaaaccgaagaggaaacgtctgcttttagccttggtgtggtggccgacattttccggggccccttcctccctctggatctcgtacgtcgcccactcctccgctgtcgtcccgtgatgtgcagtgccgttagctcttcatgaggcaaagtgacaagttgaagcatcaagctcaaccttctgttgccgagcgtctattcataccctcgagttttattcgatttcagttttattagtgcaggcggtatataatacgtcttgccgtggctttaaaaatggcagctatgctgagatagcagtaacgtacgagacatagtttgggcataacaatttaaaagcccaaaacattgcacgttttccctatattcaaattccctgtcggtaatttttatccatgcacacgagtttagaaggacgacgctgtttggagcggaaggatgaaagcgcgcagcaatgggcttcttggcggatgcgccggccgatcgacggtttcccaggcacgcgtcgtcgtcgtcgtcgtcgtcgatcagctgcttggctcgccgcagccagcctcgaactacagagaaaatccgagtacggccctccgccagcggccgcgcgcccagctacctggtccggcgagtcggcggcggccggcggcgccgccggagctcgtgc

SEQ ID NO: 183021 - DNA, 270 bp, Zea mays
  Clone ID: MRT4577_984C.1
gttctagatcgcgagcggccgcccttttttcttgattccgtccaaaaacagggcgcttctacaattcatgcttcatggaaacatccggctccgctaaaggtttcctcagcaacaggtttaaccagaagcattaggcgcatcggcaatcccctgttaaaccggagttttctgaaccgggtattaacggtattcaagctccccgaatcatccccagaaagcttcttcaaaccatcggggccaacgtggtaaacactatcacaaccaccactt

SEQ ID NO: 183022 - DNA, 1678 bp, Zea mays
  Clone ID: MRT4577_98500C.1
cctcgaggccggccgggccgggagtcacccacaaccaattagccattggccagcacagcagtgtataggcatagctacgtacgtgggaagtgggaacgatggcactcatcatgcaggagagtagtagccatgatttgctccaagctcacgacgagctcttgcaccattccctgtgcttcgccaaatcgctcgcgctcgccgtggcgctggacctccgcatccccgacgcgatccaccaccacggcgccggcggcgccacccttctccagatcctcgccgagactgcgctccacccaagcaagcttcgcgcccttcgccgcctcatgcgcgtgctcaccgtcacgggcatcttcagcgtcgagcaaccaccagcaggtggtggtgataattcaaccgtccacacgtcggacgacgaagctgtcgtcgtctacaggttgacggcagcctcccgcttcctcgtcagcgacgaggtgagcacggcgaccttggctccctttgtgagtctggcgctccagcctatcgctgcctgtccgcacgccctgggtatctccgcgtggttccggcaggagcagcacgagccgtccccgtatggcctggcgttccggcagaccccaacgatctgggaacatgctgacgacgtaaacgccttgctgaacaaaggcatggccgcggacagccgcttcctcatgccaattgtgctgagggagtgcggcgagacgtttcgtgggatcgactcgttggttgacgtcggtggtggccatggtggcgccgccgccgccatcgccgccgccttcccccacctcaagtgcagcgtgcttgacctcccgcacgttgtcgccggtgctccgtctgatggcaacgtgcacttcgtcgcaggcaatatgtttgagagtattccacctgcaaccgctgttttcctcaagaaaactctacatgactggggtgacgatgagtgtgtcaagatattgaagaattgcaagcaagccatatctccacgggatgcaggtgggaaggtaataatcttggacgtggtagttggatataaacagtcaaacataaagcatcaagagacacaagttatgtttgatttgtatatgatggcggttaacggagttgagcgtgatgagcaagagtggaagaagatcttcattgaagctggattcaaagactacaaaattctacccgtcatcggtgacgtatcagtcatcatcgaggtctatccttgaatgctttgtgaacaaagacctccataataaactgaagaccatgaaggtgttgatagtatattatgattttttatttgtattgtacacttgattctttgagtatttgtaatgacaagctgagtaattgtgtttttttgttaatgtggtcttatagtgcacattacacatgatgtatgatatgttacttgccctcattttggtgtagatgtgtgttggtcaagtagtcgataggcaactctattatgcttggcatcaataagacaacatggaagcctatgatttgttgtgtcatggcaacaaggaaaattgtggtcttggtgaaaaatgcatatgttttcagaatgtaacagaaaaggcaaaatcacatcgacttgtgcacaaatgacttctgcaagacaactctaataagtatgtgttggagattattgagcttggcccatttaatttacaat

SEQ ID NO: 183023 - DNA, 1627 bp, Zea mays
  Clone ID: MRT4577_98501C.1
gcacgagggaaaccctagcttctcaccataactcagcctcacctagcctccacacttcccccgccgcctccttccgagacctccttaccgccggcttcccttccctccggacctccaccgcgtgcgcgtgaaggatagcggccgcggcgatggggaaggcgtccaagggctcacggaaggggaagaaggcgtggcgcgccaacatcggcaccgacgacattgacgattttttcgagaagcagacgcgcgatgcccacgcgggcaccgccgccatcccttctcttccttcggactcgctcttctttgtcgacaagcccgccacctccgcatctacttccgccgccggcgcctcggacacaaccaccaaagatattcctgtcaaaaggaagatcgagaagaagagggagaaggttctttatcatgagagtgtactgaagcggaatccgtttgtgcagccaatcccatcttctgtgccgggcaagaaggataagaagataaagaagaagaaattgcaggagacacagggagagaaaagtgttcctatggaaaatgattctgtagttaagaactttgacatctgggctgtggatggtaaaggtgattccaaggccaaaaagagatctactatatcagttattcctgctgttgaagttgagcctgcaggatgttcatttaatcccccattcgaagcgcatcaagattctcttgctcaagctgtagcagatgaaaaacgcaaagagtacatgaaagagctggggccaacacctgtaccactcatagttcctggtgaagctatagccgaagaagataaattttttcttgatgctggtgaaggagatgaagatgaagatgctgcagaaaatggagatcaggatgctgatacttccattggacaaaggaagaacacaacaaaaagagttacaagagtagaaatgaacagaagagctcgccggaaggagaggttaagagcagaagcgaaagcaaagaaaatggaaaatattttgaaagaaattgacagcttgccaaatataatggatgagatagctaaagaggacaaggaaaaggagaagaggcacaaacgtcgaactgtggttaaagaggagagacgtaaatcaggcccacctcgtctgggcagacacaaatttgagccagctcctgttcaagttctattgacagaagagattagtggctcacttagaaagctaaaggggtgttgtaatcttgcaagggatcgctacaagagcattgagaaacgtggaatacttgcaccaagcaagagaataagcaaacgtcggtagagaaggcaagttccaatctgagggatgatatggtgaagctggattgaagaggatttactagatttgagaagaccctttggatgttcactgtcggaatgttcccctctttcagtgtcttgcgaaagtacctaacgattggttctgtcgttgtgggctcgttgttgacgctagtttcataggatctgggatgcactcatatacctgggctggtcttgatgcatgatggcgtatcgcttggtatgtatgttatccacacatgcgtattccaatccaaccccaataaaaattcggcaaaaaaaaaacaaacgaataggaaagtcgcgtcgatt

SEQ ID NO: 183024 - DNA, 525 bp, Zea mays
  unsure (1)..(525): unsure at all n locations
  Clone ID: MRT4577_98502C.1
cggccgcgtgggcggncgcgtgggcaaacctagcgcaacaagcaatcgaaaaagaatttggctacaaccaattaaccattggccagcagtgtacgtgggaacgatggccctcatgcaggagagtagtagccaggatttgctccaagctcacgacgagctcttgcaccattccctgtgcttcgccgcctcatgcgcgtgctcaccgtcacaaatcgctcgcgctcgccgtggcgctggacctccgcatccccgacgcgatccaccaccacggggccggcggcgccacccttctccagatcctcgccgagactgcgctccacccaagcaagcttcgcgcccttcgcccgggcatcttcagcgtcgtcgagcaaccaccagcaggtggtggtgatgattcaaccgtccacacgtcggacgacgaagctgtcgtcgtctacaggttgacggcagcctcccgcttcctcgtcagcgacgacgtgagcacggcgaccttggcttcctttgtgagtctggcgctccagccta

SEQ ID NO: 183025 - DNA, 505 bp, Zea mays
  Clone ID: MRT4577_98503C.1
gccggccgtttcgagagagtgtgtcaagatattgaagaattcgcaagcaagccatatctccacgggatgcaggtggaaaggtaataatcttggacgtggtagttggatataaacagtcaaacataaagcatcaagagacacaagttatgtttgatttgtatatgatggcggttaacggagttgaacgtgatgagcaagagtggaagaagatcttctttgaagctggattcaaagactacaaaattctacccgtcatcggtgacgtatcagtcatcatcgaggtctatccttgaatgctttgtgaacaaagacctccataataaactgaagaccatgaaggtgttgatagtatattatgaatttttatttgtattgtacacttgattctttgagtatttgtagtaacgacaagctgagtaattgtgtttttttgttaatggggtcttatagtgcgcattccacatgatgtatgatatgttattttctctcattttggtgtacatgt

SEQ ID NO: 183026 - DNA, 431 bp, Zea mays
  Clone ID: MRT4577_98504C.1
cttttattttttttttttttttttttttttttttttttttttttttttttttttaagacccgaggggggatccagggggaacgcgggggccaacccggaaaaaaccaccgggtccccccaggaggcccaccttttcctatgggggggaaaaggaaaactcggggaaaaaaagaaaaaaaatgttccctgagcaaaaaagttaacccctcacaagaacacaaaaaaaaccacccggaagcaaaaaaagtaaagcccggggggcctaaaaaggaaacaaacccacacaaatggcgtggagcaaaataccccccttccaaaggggaaaaacgccgtgccaaaagaaaaaaaaaataggccaccccccggggagagacgggtggttttttgggagcccggggggttttttttctcaccaaggagaaggacaacat

SEQ ID NO: 183027 - DNA, 564 bp, Zea mays
  Clone ID: MRT4577_98505C.1
gtgaactatagaatagctatgacgtagcatgcacgcggtcgtaagccttgggaatccttaaaaccggccggcccttttgctttttgttacgcttttctattgtttttttattgtttttatttttttttattgttattgtttcaaggataattttttttacgttttttgtactatcttttttgttttttgccccgaaaagggcccccccggcggggaaaaggggtattctttttttctccctcaagcaccaataaaatctggaacacccacattttataggagcgttttttgtaaaaaccccccttttgggaaggggaaaaaaaaattttcttggcggaccaaaaaaaaaaccggaatttaccagggcgacaaaggattttagcggccaaagttgttttggccttgaaaaaaaattggggaaaaagcccccccaaaaaaaaaaaaaaaccccttgtggggggaaaaaaaacccctcaggggggaacaccaaaaaggggaacccttttttttggaaaaaaaaaacttgggaggagagtattttcccccccgggtttttgcctaggg

SEQ ID NO: 183028 - DNA, 378 bp, Zea mays
  Clone ID: MRT4577_98506C.1
acgcatacgactagggtgcggtgcataacgcggacatgaaagatacaagttgaagatctcgttgatggcataagccgtacacggctagggaataaagtgaatgccacatcccatagccggttgaagaggcgagttatactgaaggaataggtggcaagaacagataacttaatgaaaagctatgacgctctaaatataaagatgcatgcccttgtgcagacgctgaacctggtcttaaatgctaaaaaataaattctaaggcgtaacatgcatgcttcattgagtgctgcaatgcctccatcatcataaacacgcaacaaatggaagttgtgtttctaggtgacactctaaaatgacatgagatgtcaattctggtga

SEQ ID NO: 183029 - DNA, 427 bp, Zea mays
  Clone ID: MRT4577_98507C.1
cctcgaggccggccggggacatggtattcgcagcaaggaatctcctgcagacagaattgatacctgagctgcagccagtagtgccacctgtcatacagcctagagagatagacatctctgacttgccgccgctgctaccagtaccatcaccaccaattacccttcccatcccctaagcacttggatttggattcataaataatcactcatctccactctccattttcattcagttccctgttgttattgttgctttcaataagtggtcttttttcacatctgtcttgttcaatttcttctgttacacatgcttgttttcttttcaatcttcctttgcactttttcatgtacctggactagtggagaccagttgttgttataatatatacaatctattctatctaaaaaaaaaaaaaaaaaagcggcc

SEQ ID NO: 183030 - DNA, 311 bp, Zea mays
  unsure (1)..(311): unsure at all n locations
  Clone ID: MRT4577_98508C.1
atggaagggagcgtcgttttttcccaaggggggganagaaaaaacttagttttaccagtgtttgttttttccccccacccgagaggaacgcccataaaattttcttggggggcactgggggaaaaaagaacccgttgagaaaattttactcgcccgggcttttgggttaaaatttcccggtggttaaaatattggggccagggggggtttttaaaaggtaaatgctgaatcggggaatccgggggaaattttaaaaaccccccaaaattttaaaaaaaggggggaaaaccatttttttttttagggtccaa

SEQ ID NO: 183031 - DNA, 453 bp, Zea mays
  Clone ID: MRT4577_98509C.1
ctttcttagaggtgggttggcttctcctccccctccggataggcttcgggttcagtgaggttctacggacttcggcttcactggtgacgcggatcgagatgacgaaggcagatgtcgagtaccggtgcttcgtcggcggcgcatcgacactgggccacgaagcgaccactacacgtccacaatgcactttaccacgctacggcggatgggccctgcgtagcccaaagaacaggcctggtaccgggcagacgcgataggtagccggtgcctctcgtctacctcaccgttctccactggaggacgctgatgcggtaacgccactggaggtcatgaagcggcagctgagcatggacagcacagaacatgcaccatcaacgcagggccacgtcccgtggtggccacgccgaagcgacgaggagtctctacaaggcttgtgccgtggaagtcaccatc

SEQ ID NO: 183032 - DNA, 331 bp, Zea mays
  Clone ID: MRT4577_9850C.1
tctaagcttgcctgttcatttattactgagagcaagtgtaatagtgatatagttaatgctaaggtagaggtgagaagagagttatgctgttgtagtggttagaagagaagagtgcaatcaacgagctcagcatttttgtgtgtgtgtagctttctgaactagataacaaagactatgtatgtttttttgtttagctttctgaactaggttcgctctaaaaatctacaatctgaaccaagtacaatggcaggatagattgtatagaaaatctatagatttttatagttcaattcagaatcactttctactaaaaaaaaaaaaaattttaaaa

SEQ ID NO: 183033 - DNA, 342 bp, Zea mays
  Clone ID: MRT4577_98510C.1
cctctaaattctaacaatatatttagatctaaagaaggggtgcagtggcattgggaggataagataaccttacaatggggacgagctacgaaggtatattaccaggttaaaaaaccgataggcgaccggcagccctaacagagtcagggccggagagcacacttgaatttacagagcacactggcttgtagcagacgagcccccactgatgcttaaaacacacgactggggatgatagatcacccacactgacacgcagctacatgactgccactgtacacactgatgtaccggggcaaagacaacacatctcgtacgtcgcatgggcatggatcagaacgg

SEQ ID NO: 183034 - DNA, 308 bp, Zea mays
  Clone ID: MRT4577_98511C.1
ccttccatttttgttcttctttttctattgtttgctttgttcctttgttttattttcttttcattgcctgttttccattttgggaacaaaggacagctcccccgatcaattgtgatgtcgtgtgtttgtgggtatgtcctctggggggggggggctgtggttatcttttcgtgttggttgatcgtgtttgaaatgcttccttcgggactgcgccctggggggttgtccctcctgccctctattttcccttccctgggggtgcgcttggttgttgccccttttggtggcctggtgctgcgccggttttg

SEQ ID NO: 183035 - DNA, 335 bp, Zea mays
  Clone ID: MRT4577_98512C.1
ttcagtttcatatgattttgacgtcctatttaaatgtgattgaaacattctgttctattaaaatgtaaaatataatttggtttactacactggtgatatatgactttatcttgtggctactgctctaaaaatacacaatgccatattcatgcctcttagatgcactgttatgtgctatttaccaggcaaggctggttgccggaaggaggttgcgctacaaagtaaacacagtataatgcgtcgtgcaacctagtcgaggaggagcatttcctgttcacttgtttgaataagttaccgtattcatatgttgacagaggatccgtgcttctaaactg

SEQ ID NO: 183036 - DNA, 568 bp, Zea mays
  unsure (1)..(568): unsure at all n locations
  Clone ID: MRT4577_98513C.1
ggccgctcgaggcncggcccggtctccgnaaaaaacctacacaaaaaaaaaaataattaaatcaaaatgaacgcaccagatcgtttcgaattattcgtgattcctgaaggaaaaaagaaagtagagatggaagtagataccaaaattcctaatgctgctacttttattgtagaaagagaagacacactcttggtaatatgttaagaggtcaactattaaaggatcctagagtactatttgcaggatataaagtacctcacccattagaacataactttatcattaaagttcaatcagtacctggaacttcacccggaaaagcactgaaggacgctacttctgaactcatatccgaaatcaatgcattgaaaaataaatttgatatggaagtaattcgtcatcgtacctttgaagatgcaaaagcttcacaaagcaattatggtgctgttgaatccatgaaccctatggaaactcaccatgctggcatggatgttgacttttaaagatagtcaaataataaaaaatatcatccttcactcttcaaaaaaaaaaaaaaaaaaggccccta

SEQ ID NO: 183037 - DNA, 347 bp, Zea mays
  Clone ID: MRT4577_98514C.1
gggggggaatcatgcaggaattttgtaaagagctgttcaattttccagaaaaaaacaaagggggagcaggaatgggaaaaataaaaactcccgcattccaaacaggccctgaaatcatgacagactgagaactgactgttttattttttcgccacagggggattacttagcagcccacttagtttgccgaaacgataaaccacagtgctgcaagaaaaaaaaagcatattcgccttggttactttagcagcacatgcttatagcttcacagattgaccaaatagcccttatgctccatttgtttcccagccatggctccttggcatggccttgctcttggcattttg

SEQ ID NO: 183038 - DNA, 187 bp, Zea mays
  unsure (1)..(187): unsure at all n locations
  Clone ID: MRT4577_98515C.1
cttctcggatcgagactgcgttagggggcgtcactcccgccccgatcgaacaatccgcctaggccctttgtcgcccatgaacggcgcctccattgcgcagatttccccgtccgtgcacgggggggccccggtcntcctcttttccttcttcttntttgttttttttttttttttttnttttttttta

SEQ ID NO: 183039 - DNA, 284 bp, Zea mays
  Clone ID: MRT4577_98516C.1
aaaaggcaccaataattcctttttggttttccttttttcctttttttttatcacaaacaagttaaagaacacggttttttttgatcctttgtattgaagctcctagttggctccgaaaatggaaaagctttttttagccttgtttgcttgcgacctttaggtccatatgaatgcacccttattaatcccaaacgaatggcctcaccattccccccccccccgggggcaaccagccaaactttttttgcagcactttgggcgacctggaacgataatcccggaat

SEQ ID NO: 183040 - DNA, 356 bp, Zea mays
  Clone ID: MRT4577_98517C.1
ttttttttttttttttttttttggttggggttctttttgggtgcggtattttttttttttttttatctcattttttctttttcattcttgtttcatatttttttttttattttggggaaacaaaaaaacaaaccgggtttgatttacaacagagaaatcccccaccgtttaacccacatgtgggggggtcggcttgtattataggcgggtgcattataaataacccctaaaaaaccccctgggtaaacaggggtgaccagttgtaatctctacgaacccggggggggcgggcccctttttccccagacctttatttccccgcaagggattttcccaaaaacagggcccccaggggg

SEQ ID NO: 183041 - DNA, 368 bp, Zea mays
  Clone ID: MRT4577_98518C.1
ttttactttccttttcattcgatccaaaaaaaacataggggcaaggactatcactcatatcctcatccatatctatcctatttccaaaaccaatattccatttttaccttcttaatccacatatatcccttattagatggctcacaaaactcttataaacacaaaaaccctatctttccaatataccattcctccttaccattttcttctttcaccatactcttgcaatcatttcattttgctaccttcttctacctgtcctaaaaaatacagctatcacctgatcttttcattttttggtttctctttctttactacatcattctcttctgcagccaccccatttattgaagcccctcccccttttt

SEQ ID NO: 183042 - DNA, 436 bp, Zea mays
  Clone ID: MRT4577_98519C.1
gggcaaccccaaaaacatctggggaaccggtttttaacaaaagggcgggtcattcaataatgggggggcctcagcagccctgatctgggaaccttttacaagccccaaccccccatggggggaaaagaaaccctaaacgggggcctaggaattcatcatccaaacaaacttgggcccaaagggtacccggggacaaaaccctccttccgcccctcaaacccagggggcaaaaggtttttctcacccctttcaatcttgcgcatttttttttggggggccccaccccggagggtccctggcctttttttctggggggccccccccggcgtaacaacagggttttggctttccttccactgggcagaatggttttgggggcgtttttcctcctttttaaaaccctccttaatcaggggggggtgataaggggcctttt

SEQ ID NO: 183043 - DNA, 112 bp, Zea mays
  Clone ID: MRT4577_9851C.1
cctacacctacacactgatattgactcttcttattcccttacatcatactaccacgggccggggcttattcatcaataccaccatctcctacaacaatttcaaccctataaa

SEQ ID NO: 183044 - DNA, 318 bp, Zea mays
  unsure (1)..(318): unsure at all n locations
  Clone ID: MRT4577_98520C.1
ccgcccctnngnnnctcttcccgcttcccgcccgnacccnncgcgcgccgcggnacnncagcagccatnngtcgtgctcccaacctctccacnncgcctggtcctnncctcggcgctcgccccagccgcnngcctccacccacgcctgtcggcgnnctcccccccgcgccctcgggtctcgctggtggcggnnngttccctccgtggagggctccgcacccgcnnatcgactccgncagggaacacggcagnaagatcacggnagggccanntgaagctggtggggccgccgccaaggggccggnngcgnncgcagga

SEQ ID NO: 183045 - DNA, 313 bp, Zea mays
  unsure (1)..(313): unsure at all n locations
  Clone ID: MRT4577_98521C.1
attattcgatcgagaaaaacggggcggaggacaacataattaggcggagaaccnaagacagaagggaatgctccaatgacattccatacggcaactagcatacataaaggctactgacccggcacttcttaccgcagttaccaaagataatggaaaacactaaggtcccaacctctacgccatccaaaatagcttacacagccaattaatccccaacttcagcacaagaggcaatgaaaagcctgcaagctgtaccactaggccatgctacagcgcatccacgtaggagcccttgacccagacatccatgaga

SEQ ID NO: 183046 - DNA, 646 bp, Zea mays
  Clone ID: MRT4577_98522C.1
gatctggggggggggggggggggatcaggttggccgcgggacgcccgtcgcagagacgcattctgcctcacacccctaccactaggtaggcgctgcacccgctgcccggctaagtaaactcaccgttactgtgacacccaccagtccgtcgacaacctgcattttatggaaaaaaggcatatgctgccggacctagttcaggaggagggtaagtacaggttcgtcgaaaagatggtcccgaagatgtttgccaagagtgctacgagattatgctctatctacgtaactaagagcatacccactaagggctagtctataacggtcccgacgattggtccatataaccagaggaccctggtcacgagttcggacacggacggggaagatctgttcgagtacttcggagctagaggtaggaagagtcgttcgtctttccagaccgaggcattgaactcatcaactcgagacgactctacttcgacctccgcgactacatcgggtggtactagcgacaagggcgaagagacgatagtagcccgaacgacctagtcggactaccggaaccacggtgaagggtacaggagagcgataacagccaggacagtgaccccatagggtggaaccgttacgaccgggacgaccgccc

SEQ ID NO: 183047 - DNA, 932 bp, Zea mays
  Clone ID: MRT4577_98523C.1
ttttttttttttttttttttttttttttaattaaattttagattaattaattcatagagaaaatagaaatactcttttatgagtacatattaacgcacgcaacgggatcaatacgcaccggatacacgcaagaagaaacacaagcatgactgtctgaatgcatcgtcacgcccaaaagtgagatcacattcacatctcagccttggacgccatgacctccgccgcgtccacgccgcccatatcgccgccggcgatgctgatgacgcgcggctcccggccgcggtgcccggccaccttaggcacggtgacggtgagcacaccgttctccaatctggcggacacgcggtcgacgtcggcgccggcgggcatccggaaccggcgccagaaccgtccggccgcgcgctcggcgcgatgccaccgatcgccttccttctcttcgtcggcccgccgctcgcctgagacccgcaggacgcggctgttctcctccacctccaccttcacgtcctcccgccgcaccccaggcacgtccaccgagatgacgtgcgcatcgggggtctccttccagtcgcaccgtgccagcgccaccccggccgccgacgtagagtcgaggctggctctgggcaccgatgacgccgccagcggcgactgctccagcacccggaatgggtcgtcgaggagcatcaggtcccacagcccgccaccagcgcgtccgtacggtaccagcgcggcgaccggagccgcaaggcacgccattgtcaccaccgctaccgcgaggacgacgacggccgctgaagccgacgccttcctgctgaacaaaactgcatctgccatttgctacgtgatgctgttttggaggaaagtattcgatgtagcacgtgttctgctgatcgttagcttatatgtcgaggtccacgcgtccgtgatccggccgg

SEQ ID NO: 183048 - DNA, 452 bp, Zea mays
  Clone ID: MRT4577_98524C.1
aacggaaaaaaaagaaagcatagagagagagagagagaggcatatgctactgtgatggatgcttgagaggtagcagacttaaagctccttgttgatcagtgcaaatcaaacccttcaattatccacactccctctctttccttcttcaagtcctatctcctaagtctgggagctcaaattccaaccgacccacggacggatagaggtggtgttaaaatggaagagcctgagcaacactctgatgacaagaaaccctatttttcaaatgaagaagatgatgatattattgagtccgatgtcgagttagataataacggtgttgtggaacctgacaacaatcctccacaaaaaatgggagactcttcggttgaagttacggaggaaaagcgggatgctgctcaatcggaaaaattaaaagccatggatgcgatatctggaggtaagctggatga

SEQ ID NO: 183049 - DNA, 450 bp, Zea mays
  Clone ID: MRT4577_98525C.1
gatcaccttgcatgtttctggctttttttatttaaagcctgccctcctgaattttttgaactggggggcccaaaagaaaacattcacatcccttaaaatccccccaggaaataatacattccaagaggggtgatccaacatggaaaaaaaaatgcattgggcctgtcaattgcagcccctttaatatgattattatggaacaaccccccgtcgaccacgggctgttgttaaccaaccaacctgatattaagcttgccattgtcaccatccttttgataacttgaaaccaaatttgtttttatttgaaccacccaacaccttccttgcaggtttcaatatttggaaggagcacattaatgtctcatttacactcataatgggaccagcgttataaaattctccacagtagttaggggctgaaaaattgttacaagttggcgggtagcgaaa

SEQ ID NO: 183050 - DNA, 479 bp, Zea mays
  Clone ID: MRT4577_98526C.1
atcacaggcccaaaccaggaaccgcaaggacttgtataacgctgataacgaccccgggacataaaaggcccacacatttcctggttggtcttattacaggcccgagcatgacgttgccaggactttccctcccggccgccgcccttgtataaaaagggggggctggcaacgtcccgtcgggggggcgtggcgcggttaaagcaaagggggggggtttttcgacgtcctcgagggggcggaaccacaccttttgggccaaaaccgggcctcctggtgaaaccgaattcggggggggagggtcagggggaacccccaactggttggggtccaccgccgccgggccaaacaccccggtcttggggggggggctccagtacttgggggggctccccgcgccggccgatcacattgtccggaacaaacgccgggcgcacctgctcctccgggtttttggcgaacaacaaggggggcacggccct

SEQ ID NO: 183051 - DNA, 301 bp, Zea mays
  Clone ID: MRT4577_98527C.1
tgtacgcgtgcgcacatgcggtcccccacgagttagttctcgagtgggggcagccctctcaacgagtacctcgagcaagccctggatgctcttatggtactacaccaaggacgccattgcaacaggagctttggggaatttaatggcagcgacaatggggatgaactcttggactatgtctggataaacgatgcgatcgaatctggagtacataaacatgctgcaaacgtgggatgcagaggacttcggtctgcgagggcatgggcagatcctgatcaagatctggatggaactgaattgg

SEQ ID NO: 183052 - DNA, 385 bp, Zea mays
  Clone ID: MRT4577_98528C.1
tgttatactccctcttttcatataaatatatgacaccgtttattttttttaaataaaactgtgatcacctgtcttattaaaaaaataataaattatcatttattttttgatttgttttatcactaagttagtttgtgtttgacttaaaatttttgattttgaataaatgctttgaataaaacgagtggttaaagtttctgaaaaaaaatcaacggtgacatgtatttataattttgaaaaaattcgaaataaatcaacggtaacatatttatgaacggagttagtataaaattagtggggccggctgttacttccacgagtggacaaaaggcagtttctatcactaatttgcccccctttgagtactcttctggtctatttgcaa

SEQ ID NO: 183053 - DNA, 411 bp, Zea mays
  Clone ID: MRT4577_98529C.1
atctctattggtggtacctgttgagctattcttttttgccctgactactagtttcgtcttgcctttcgtatgttccgggccaccttttaggccgtgtgcgaggagctgggcgccttcgcccccaaggaggggaccatgctgcgccccgcccggcgggaaagaaagcgcgtgaacgagtgcatggggggcctcgccacccgggagccgctccaactcgcgtgcaagcacttaaggctcggtatgtgcagcggcacaaactcgtcctcgaggaatacacctccaacaaggacgtgctgatgcaccaagaaatgcagggccccgaggcgcccggagcccactttgccgaatccgggaggttcgaggacgcgggggggatcccggacatcgtgggcgccatggacaacacgcaca

SEQ ID NO: 183054 - DNA, 247 bp, Zea mays
  Clone ID: MRT4577_9852C.1
cagaggagcgagccatcggcgccccccgagccgtgccagccaagagccatccggccaccagcaccaccccggccgcttccttgtccctgcccctccgttggtctcctttgcccatctcatcctctctctctctctccctctctgtctctctctggcggtcggcgtggctccgggggcgcgaacggggctcggcggggcgactcccggcgggacctgcaggtttgggtatgataggggtccccacgcg

SEQ ID NO: 183055 - DNA, 107 bp, Zea mays
  Clone ID: MRT4577_98530C.1
tggacccacgcgtgcgggcatatagagctcgtcagtgagcagggagtgcgctatcatttaatgcgaccgtgaaggactgtactggagtgagacaactgaggggatag

SEQ ID NO: 183056 - DNA, 781 bp, Zea mays
  unsure (1)..(781): unsure at all n locations
  Clone ID: MRT4577_98531C.1
tgggaccctcgaggccggccgggccgggctcgccggccgccaacttcaaccctagctagctcgacccgttctgcagcctccctggccgtggccgtggccgcggcggcggcggcgccttcctcctccttcatcgtttggatctcgatgttttctttgaaagaaaaacgtttcttctgtgtttcctggtccgtgcttgatgttttcgttttcgtttcattttccgtgccgatgtgcgaattggttttcgatcgttccaaggttggagaaaccgtcgcctttgagagaaccggttggcagcccattgctctcgtgccatctcggttccgttgcgggcgtagagagggccggcatcggctctggatctctgtctgctccgtcctatccttcgcacaccatgtaccctagcgagatggcagacgggttcccgaacagatcttatcgttttcggatttcagattcgtctcttcgagtgtgagcactggacagtttgatctgctgattcgcgtctcttttggagcctccgtcgatccgcctctcttggatcggctttgagtttggtctgctgatttgcgtccatgatgacctccataatcccggatttactcgcttagctgntcttccgattcatgggaggccgagatcgatgttccctgggagtttcgctgatagcgccttcttccccgtgnaggtgcttcattagtaactcaccacacatcacaactgtttcctgctggtatcctacgtactgtcctgaattacatcctacggaaacctttttttt

SEQ ID NO: 183057 - DNA, 722 bp, Zea mays
  Clone ID: MRT4577_98532C.1
ccgccggccggggacctcgccggccgccaacttcaaccctagctagctcgacccgttctgcagcctccctggccgtggcggcggcggcggcgcctcccccctcatcgtctagatctcgatgttttttttttgagagaaaaagtttcttctgtgtttcctgatccgtgcttaatgttttcgtttccttttctgtgcggatgtgcgaattggttgtcgattttaggaaatttctggatcgttcccaaggttggagaaaccgtcgcctttgagagaaccggttggcagctcattgctctcgtgccatctcggttccgttgcgggcgtagagagagccggcatcggctctggatctctgtctgctccgtcccatccttcgcacaccatgtaccctagcgagatggcagacgggtttcccgaacagatctttatcgttttcggatttcagattcgtctcttccgagtgagaactgggcagggccacgcagttttctttcgtgttcacggtggtcatcggcaatcccagacgagttttcgctcggatctgtgagtctcttttggaagcccccgtcgatccgcctctcttggatcggcttttagtttgatctgctgattcgcgtccatggcctccataatcccggatttacttgcttagctgttcttccgattcatgggaggccgagatcgatgttccctgggagtttcgctgatagcgccttcttccc

SEQ ID NO: 183058 - DNA, 1761 bp, Zea mays
  Clone ID: MRT4577_98533C.1
gccggccggggagaggggagagagagagagagagagggagagagagagaccggccgagagagggagagaacctctctgcaggtgcagccatggcgaagcccgtctccatccaggtgtggaaccccagcggcaagtaccgcgtggtgagcaccaagtccatgccgggcacacgatggatccgcctgctcaccgacaacgactgccgccttgagatatgcaccgagcacaagaccatcctctccgtggacgacatcctggcgctcatcggcgatcgctgcgacggcgtcattggacagctcaccgaggactggggggacgtgctcttctctgcgctcaagcgcgccggaggcacggtcttcagcaacatggccgtcggctacaacaacgtcgatgtcgaggctgccaacaggaatggcatcgcaatcggcaacacgccgggcgttctgacggagacgacggctgagctcgccgcctccctctcgctggcggcagccaggaggatcgtcgaggctgaccagttcatgagggctggcctctatgacggatggctcccacacctgttcgttggcaacctgctcaagggccaaactgttggagtcattggagctggtcgcattggctccgcctatgcacgcatgatgattgagggtttcaagatgaacctcatctactacgacctgtatcaggccacacgtcttgagaatttcgtcacaggcaagcaagaatgctacgtacctataccatgcatgtcactggcacagatatatactaatctgcttgctcgatctgtgcattgcactcctacctccagcatatgggcagttcctcaaagcaaacggtgaggagcctgtcacctggaagagggccgccaccatggaggatgtcctcagggaggctgacgtgataagtctgcatccggtgctggacaagaccacctaccatctgataaaccccgagaggctggccatcatgaagaaggaggctgttcttgtgaacgcaagccgagggcccgtgatcgatgaggccgcgctggtggagcacctcaaggctaaccccatgttccgcgttggcctcgatgtctttgaggtactccgatccatccatagaatcgaataattgatgttgatgatgatcagtattagttaatttgatcgacaagaagctcttgggctagcatgcatatgctcaatccatcgtcatcatcaacaggatgagccttacatgaaacctggactcgctgacatgaagaacgccgtcgtggtaccgcacatcgcatcagcctccaagtggacacgcgagggaatggcaaccctgtctgctctcaacgttcttgtatgtaagcatgattaggcacgcatatatggttattattactagtagttactgatgtggatcgagaattggcaactcttggtgcagggtaagatcaaggggtaccctgtgtgggggaaccccaatcaggtggagcccttcttgcaggagaatttgacgccaccgcctgcctgcccaagcatcgttaatgccaaacaaattggcctgccatcggcaaagctttaggagcgaacactgacaggctggtatctacatgttgaagatgtgtcgtcgtcgtctccaccacgcgcacatatatgtacatgcatgtggattgaggtcatgcatctgcagagcaggtagcacatattaatttggatcatatatattgaccaatacacactgtatgctagattgctaggttgctgtgcatggatcatattgatcaat

SEQ ID NO: 183059 - DNA, 142 bp, Zea mays
  Clone ID: MRT4577_98534C.1
tatggttcagttccgctctggcagggcaggtgacctagaacataggtaacatcagaagtgctaggggtgaagacacagtgacacaacaacacacgtgttaattatcatgatgaagatccccagcgtttaaactgaaccattc

SEQ ID NO: 183060 - DNA, 890 bp, Zea mays
  Clone ID: MRT4577_98535C.1
catcccaaattgatgaattggaagattttttctgacaaagcctgcaaattctgccattggtcatccacaagttctaaagcatgaaggaaatgggcattatccatctgcagctactgcaagtttcatggactggactgagatgggacactgtaaaagggggaaccaaggggcatttgattctatgttcactagcagtcaatatcgacagccagaaatagatgagaaagcagaggtatgtgctcatgaaacagaaagtacagatgaagaaaagagattagagaatgaacaaatacaaaaagaacataaagaagagcaaataagagcagaaagggagatggaagaagagcttgagagggaaagagaaaatgtgagacaaagggaacaagaggagcagaggaggcgtgaaaaagaaagagtggccaggcaggctgtagataaggctatacgggaggcacgcgaaagagcagctgctgaagcacgcatgcaagctgagaaggaggctcgtcaaagagcagagcgagctgcagtatggaaagcagcaaaagaagctcgtgagagagctgcagtggaggcaaaggaaagagctgcgaagtctgctgcagaagctaaggaaagagaagcagcagaggctagagaaagggctgcaacagaatcaagggaaagggatgccaaagttgcccgcagatgcaagggaaagagctgctagggctgctgctgaagctagggaaaaggaaacagcagaatttcaggagaaagctactgcagaagctcgggcaaaggctgagcgagctgctgttgagaaagctgcagcaaaagcacggtgggaggctgaaagagcagctttcgagagggttgctactgaagttaagcaaaagggcttttaatgatgc

SEQ ID NO: 183061 - DNA, 348 bp, Zea mays
  Clone ID: MRT4577_98536C.1
gtgttatggacccgtgaaggccaagccaactgacggtggcattgccaaggttcataggatctgccagcacgtctaattgcctgtgcggccgctgggctggtgtgcttatatgaggcaatttctctacaccaagcactacacagggaaaatagagctctttgacatgacgatctgtcaatccctcgacaggtaaaccgagttatccacacgatgtccgccatggggacggtcaagagacacatgctgactataagctccacgagtgacttatacgtcgaccaaatatacaaccacggaaaccatacggacgactcaaatggcgccggctccaaagagatacgcaagggg

SEQ ID NO: 183062 - DNA, 872 bp, Zea mays
  Clone ID: MRT4577_98537C.1
ggttggggcctcgatagggccgggaatcccgagccgcgccaccggcagcagagagaaacgccgccgcccgctcgccccgtgcactgctcctccgccttagcccgtagccaccagatccttggcgcaccagccctccatcgcagtcctggttaggctaggggatgtcaaatctcgattccgcgacgccggcggctgcagtggcggagatagggacggcggagcgggactctaccaccgcttctgtttcagctttaaatgggacacatagatgcaagaagaagaagataaagaagaatacgactcgggagcagcaagagttacaacttgatttggattcaacattgacagcagaggcggagggacaagtagaggcaaagggaaacgaggtggaggagcaggatgccactgatgctgttgcttctggtattttgatggaggggacaccaaaatattatgaggaggactccaaggtgaaggtcagtctgatgcccgagaaggaagccaacaccactgttgtttcagtttctgagagtacaccaaaacacaagaagaggaggaaaaagaagaacaagattcaggggcaactagattctgcaaaggcatcatctagtgttgtttccatggatataattgcagctgataaatctgaaaattgttgcacagatgtggtaggggcatcaggacatgctgatatcaatatggatcccataaatggtgatgatctaagtagtgctcagtcaaaggcaaatgatgctgatgttttactgaagaataaggatggaaacaagggggataagaattgcgctgagaacagcgtcttgttgcaggagagctctgcaagaagaaaaagacggaggggaaaaggaagtggg

SEQ ID NO: 183063 - DNA, 492 bp, Zea mays
  Clone ID: MRT4577_98538C.1
tcttgatttcgctgaccggtttctctgcgctgccgccctgcgagagagggacgcgcgcccgccgaccttgtctttgactcattgcttgctgtgcctgcgaacttgatccctccttgatggacatgcgccccaggaccgccgccgaactcctgagacccaagggctcgaaatgagagattgcagtggcgcggctacaccgtgatacatgctcagagctcgcaacctcttcttcgaacacacccagtaggatcttgctttcgatgataccctgatctgcaacattgactatactctgtaccttgagcataaccctagggcgttcgtcaccgaggcctttgctttctgggaccatacatgccatttggaacatgaggactccacacaattgctcagcgctgatgctattcctcgagcgagatagattgttgcttctatttctggacacgcaatatgagcgtctagtcgcatgttacgggctcaaagggatgattg

SEQ ID NO: 183064 - DNA, 329 bp, Zea mays
  Clone ID: MRT4577_98539C.1
ggggttggaaccatcatgggttcattatttataaaaaaccaaatggtttttattgggaaaaaaaaaattttggggaagattttaagggggtttggggcaaacggttaaagggaaaaaacgggggggggaggggcacattggaaatagaaaattttttttggggggccttggggttggaaagggaaaaaaaaaaaggggtgaaacggggggggggccttttggggggaaacccttaaaagggtttgaagggttgggttccaccccgggggaagaatttttggaggaattctttcttaaccgggggatggttatgcggacaattgtttggg

SEQ ID NO: 183065 - DNA, 218 bp, Zea mays
  unsure (1)..(218): unsure at all n locations
  Clone ID: MRT4577_9853C.1
gacaaccatagnaggcactgggggaagcactcaagcagcaaacaggcctttaccctccattaataaccaaataactctacaaaaccccaacgcaagtcccatcccaaacaagagcgcaacgacagcctgacaccccatgaaagcccacatccaaaacaaacgaagcttctacaactgccaactccacttggccaccgaccactggcaacccaaaaacc

SEQ ID NO: 183066 - DNA, 522 bp, Zea mays
  Clone ID: MRT4577_98540C.1
gggggtgggttggttttttttttttttttttttttttttttttttttttttttttttttttttttttttttttttttttttttttttttttttttttttaggaaagacaggaaacaaagggggggcaaacaaaacggggacattgccccccagggggggggggggcccccccaccctgggggaaaggggccggggtttcccggggcgaacggggggaattgacagacgggaaaaaggctttcgaaagggttacctgcccaaaaatatccaaggttatcagcccacaatctattccacccttaaaaaggggggggacctaattaggggccccaaggaaaaaaggggggagccctgacccgacccaaaacatgcccatgagggggaagaaaacccccctttttacttttttaaggaaaaaaaaggggggccccccaaggggggggaggccttttatttccgggaacaaaaacaaacggaaaccggggtcaatggggggatgccaaaaaaccaaaactttggggg

SEQ ID NO: 183067 - DNA, 669 bp, Zea mays
  Clone ID: MRT4577_98541C.1
gggtacctcgaggccggccgggaactcgctcctatctcgccgtcgtcaccatcgccgtctcgcgtacggacccgccgttcctccgaggtgagaaaccttgcggatttcatctgacgacgatccagttcccgccatggacggcgatgaccacgatcgggtttcgtgtttcattgttgcctgctacacaaagtgacaaagccctgacaccgacgcggacacacatgccgccgcctctcgcccgcacaatgaccgaccggctacgcaagacgaaagagggtaggtgccccgacgatcatggggaatgatcctccaccgctgacaatcccgtgattaggttccgacctctgccgccgcgcatacgatgtgtgccgtccaccgcggtcgttccctcgcccgcgatactagacagaagccaactcaaagcgaatccggggaccccaagggtgatgaccccctctcctattctcgatccactatattcgctcagctataacaaaattatgtgtgcaatctcatcgcactcggatgaatgaatcccttccatactactgattatagtatagaaagggaagaaattgcctctgaatagcgtgaaagcggttagcacatggaaggatgagagatgaggtaaagttcacagctacagtgacagaatcatgcctgttggtc

SEQ ID NO: 183068 - DNA, 361 bp, Zea mays
  Clone ID: MRT4577_98542C.1
cgaaactcgagggcttacatgttgaccatgaaatgactatcaatgatccaaaactccttatggagatgatggatatacaggacgctgtcaatgatcccagtgatgctcaaaccctggagaccatccaatctcaggttaacgcaaagctctgaaacatgatgccgattccttccaggaggcatactacaagaaggatcttgaccgcgcataagaaaccacacaaagaatgacgtactatgaacgagcactagaagaaacagtctagaagctctgagcctgtcatctactgttacacctgccataagtggtaaggcatgtatcttttcctacgttcctagtacatcctgctgtagctgacgca

SEQ ID NO: 183069 - DNA, 606 bp, Zea mays
  Clone ID: MRT4577_98543C.1
aattaaaaaatactagacgcatcctttcataaatccaataattaagctaacaaaatttgaatcagtttacccataactaaatttggcgcgctttacgggaacacgggaggggttccggttgggcccttgggtcgagcacttgggaacataacacttttagcttcgttttcacctgacttttggaattttttggggacccccggaacgacaacaatggggtcgagcacaacagggggttttgaaaatcgacgtaggcagcccccaattggaaaacaaatcattggagtcgacgagcacgttggggatacaacgggggtcgacaacaaggttaatgacaagggtcgttttcggacttaattttttttttaaaccatagctccaattccacaccagatgaacgcaagaaccacacgggcttcgtttttttttccatggactccatttttccacacacatacaaacatgatggagttccggggtcaaaatgtcgaggaaaacacacttaaaaaccgagctgccagcgacgtggacagacccttacaagcattacaaagcccacacgggtgtcgttggcggaccaagggggactcgcaaggaccaaaagcg

SEQ ID NO: 183070 - DNA, 378 bp, Zea mays
  Clone ID: MRT4577_98544C.1
aaaaaaaaaaaaaaaaaaaaaaaaaaaaaaaaaaaaaaaaaaaaaaaaaaaaaaaaaaaaaaaaaaaaaaataacgccaccacccttaagggggaaaatataaaaaaaaaaaaaaaaatttttggccttctgcccggagcccccctttaggggcgcatttttgccattttttctcccccttgggcggcctttttggccctccttttaaagggcgcccatttcgcccttaaaaccggcggtgttttccacctttattggcctttgttttacaacccccttttttgggaaacccttgtgtttcccaaatttaatccctttgccctccttcccctttttcccacttggttaataagaaaagggccccccccgaggcgcctt

SEQ ID NO: 183071 - DNA, 704 bp, Zea mays
  Clone ID: MRT4577_98545C.1
atttcggcacgagggtcacgcgcgtcttcctccttcctccccgcatcccgcacgccccacgccgcgaactgctcctcccgcacgccccgtccgtgatgcccgccgccgctcgcgtcttcctccttcctccccgccagctccgcgcttccttccccggtagcccgcacccgccaagtcccccaccaacgccgcccttccttccccagcagcccgcacccgccagctccgcgctccgcgctccgcgtgccccaccaggctcgcgccgggatacctgcttccctcgtgcccccaccaaaccggaaggcgagatccgccgccagttccgcgctccgcgtgtcaagagtaggcgtcacagtgatgccgcgcgagggagaggaaggaaggtcgcgcgggggagacgccgggaaagccgccaggcatcaccgtaaggcgagatccggttgctcgcgagggagaggaaggaaggccgcacgacggagacgtcgggaaagcctccacctccgcgcccccgctccctctcccgacgccgcagacactatcctgggcccactcgcgcgtcaccagacacctccgtcatccttgccccagtttgcgacgcgcccgtcatggtcaccccgtcggtggcgcagggccctctgtgcttcgtttctcgacagggcgattccatgtcccgctcgcgatgcccctcgcactaccgcttccga

SEQ ID NO: 183072 - DNA, 393 bp, Zea mays
  unsure (1)..(393): unsure at all n locations
  Clone ID: MRT4577_98546C.1
gggggggggggggcacaaaaaanaacggcggggccaggccgacgncaacagcccnggggcggggaggaccacacgccgcaccagccacaagngccccgnccgcaaccccgnacagaagagcgcggngcgggnagacccgnaccangacggggggggggggggcgnncnnnaacnncaacncccacagcgccangnacggcancaggggcagngcaaggggccaggncgccagcgacaacgggaccacgggggncgacgacgngccccgggcggggcagcggcgcagcggaccccagggcgaccgcgncgccaccaaggcgcagggagaaggcgnccagngcagcgcccgcgagacgaacccggcccccangggcagccacggccccggggaag

SEQ ID NO: 183073 - DNA, 380 bp, Zea mays
  Clone ID: MRT4577_98548C.1
gcgttctgtatcttaaagctcctgtgtgcatgtcggggaatttacacgcgcaaattggagacctgatgacgttatttaattaatattgtactgcttgtgactggagataacatctgctgacattgattataatatcatagggtgattatatagatctggatcgggatagctaacaaactataaatgttattctagcatagaaggatgaatatcctcaaaatgtacatttgattcgatgaaactacaaggctcgtgatatcaatgctaaggactatctccgaatagagtgtatagaatgaattgacgaaatagaacgtatctggacatggcatagaatgaattggctatataataggcttgctttggatggactaatacaa

SEQ ID NO: 183074 - DNA, 403 bp, Zea mays
  Clone ID: MRT4577_98549C.1
agcttttgtagttccttcctagacctgaccaagagaaagttttaacagctcatctgaagattgtttgttgccgtacccatttgtgttggtcctcctcagctgagggaaggtggatgagtctaggtagagggatgcaagagccgtagaaagggcgcgctgccacgtgctgaaaaggcagtgcttatcagaaaggcacaaagcatagctcaacatgttgtttttcccagccatgtgcacatggctggcatgtgctctcaggaagccaagaagtcagtaggttgagttacgtttgcgcttgtgagagcttgcagccaaaactaggttcgtaatgagaagctctcgaatttgacaccgtggtttggttagttggttgcctttgttgtatagtatgcggtatgcagca

SEQ ID NO: 183075 - DNA, 232 bp, Zea mays
  unsure (1)..(232): unsure at all n locations
  Clone ID: MRT4577_9854C.1
tagctaccttctcctttgttggcatcgcgagagaaagagaaaaagaaagagagagagagatgagcaacgccaaaaccgccagatttgggcctgcggccaactgggaaggataccggcgccacganactacacggaggcaatgaaggagggcatggactgcaggcccgtgtcgggacactacgctgacggtgacggcagatcttggagctggcatcagacttacgaaagcgga

SEQ ID NO: 183076 - DNA, 277 bp, Zea mays
  Clone ID: MRT4577_98550C.1
gcactcatccgcccacgcgtgcgtccacacgtactaaaaggtcaagctcttgcttatgagtactgaatcagggtatgtgaaaccattgcacagacttacctgaacatttatcaggtaggtacctccatgcaacttaacactgaatagaaggttaatcttacttattgaatatccataaccagcgctccatatattaactagccaaacaagtgctgcatggactatggttcacatatatctgacttcaacggttaccaatcatgttcacacatgtcat

SEQ ID NO: 183077 - DNA, 412 bp, Zea mays
  unsure (1)..(412): unsure at all n locations
  Clone ID: MRT4577_98551C.1
ctcacncttgtcgcccacaaggacacctacacgcttttctgcacaggcatcctaacaaacgtgtcggcggctcatgctgcgaaacggtgcatacctcaagtcctcctggcgctagaatacctgcacatgctcggtctcatataccgtgatctcaagccagaaaacggccttgtccgggcggacgggcacattattctctgggacttggacctctcccttcgctgtgcagttagcccgactctgatcaaatcctcgaaccattacgcagaaccgctcaggaagaacaaccatggctactgtgctcaaccaggttgcgaagagccgtcctgcatcaatcaaccgtgatgcgcatacccgaccaccttctatgggcctggcctgatcttctgcaaggacaagaaagaacaggagc

SEQ ID NO: 183078 - DNA, 246 bp, Zea mays
  Clone ID: MRT4577_98552C.1
catcagcccaaggtctatttaatgcctttatcctgtagcacatcttgtgctccatgcaggatgatgacataattgatctgatgttactgccttgatgatctctttattattgggacagttagatttataatttgaagctattctgtaattaaaatataacctgaattcagcttgcagaatggaagctgaatctgttcattgtattctattgattgtcaatttaattagctgttgcagaataagtaa

SEQ ID NO: 183079 - DNA, 281 bp, Zea mays
  Clone ID: MRT4577_98553C.1
cggacgcgtgggctcaaacgcgggccatgattgagttttctccatcaaccacaatgggggtattcttctcgtcagattacgagcatgactatgcgctgcctgcacctatctcactaactcactctctccacccgtcgcatgctgctgatggctgccgccaccatacataaaaccggggaccccaatgccttgtagacaatcaaattgcctgaaggaacagtgcttggtagcttaaaatggattctgcgctaccgagcaccaaacgccaagggggcggctta

SEQ ID NO: 183080 - DNA, 332 bp, Zea mays
  Clone ID: MRT4577_98554C.1
tatgggccatgcggagaagggcaatacgctgttgcccgactaactggaccccacaaaactacgcttgggacagcatgctccagatgagaatgcgagcaccaacccattgttcaaccagtccggtgcctcttacacgataactatggcttagcgctcccccagcatacgaacgcaatgatacgcactggtaaaggtcaccggaagcaggatcagaagaacgcggtatgtaagaatgcgctgcggacgaatcggggagcaggtctttctaccgttgcactagaactacagcttgagctggatgtgctctgtggcctcctggtctttctggggcc

SEQ ID NO: 183081 - DNA, 149 bp, Zea mays
  unsure (1)..(149): unsure at all n locations
  Clone ID: MRT4577_98555C.1
gtgtggtttctttnttgaggaactagctacattgtcgttacgtcggtatatccaaccaccaggaggcggaaagatggcaatgaaagtaataaagtattacattgaaacctgaaacaaaatgggaatactgacaccttttcaaaccaaaa

SEQ ID NO: 183082 - DNA, 125 bp, Zea mays
  Clone ID: MRT4577_98556C.1
cccacgcgtccgcctgcatggacaccttctctatcaggtcgcctcggcattgggagcttggtgatctcacaggagggtgtgcgaggacaacccccttggactgcgaactgctaacagaagcagca

SEQ ID NO: 183083 - DNA, 280 bp, Zea mays
  unsure (1)..(280): unsure at all n locations
  Clone ID: MRT4577_98557C.1
gctcgactctatcaagaacatgaaccncaaggggcggcgcggccataacaatgccgtgtcaccanncccaaacccgtnccgcagacaccggctgctgtcactactgaagacttcgccaccacagcaactaatctacctggccccgtaacatcaactatcactaataattcatctacagcaccacgcactagaatcgtcgcaacgccaacacaatcacactctaaaacagccctcggataaaaaaaaaatactacaactacatgaggagcaaggctctatc

SEQ ID NO: 183084 - DNA, 738 bp, Zea mays
  Clone ID: MRT4577_98558C.1
gggacactaccaagaaaagtggaaatgaactggagaagttttggcagagttcagccaaaccagcaccagcctgtggtgcaccggagaccggactgtcaggtgcctaggttggcccggtgacgaactcgtcgctctcgggaaaaagcaaaggcaccgcagctaaaattcaccggactgtccggtgagccaacggcgcccgcggccaacggtcggcagcgcaatctgcgggagacgtgtggcccgcggcaacgatcagttggtcacactggactgtccggtgtgccaacggaactgaaggtccaacggtcgggtgcgcccggtaaggaaggagatcgggcaccggacaactactgttcatgtctggtggtgcaccggactatccagtgcgccacccgacagaaggcaagaattgccttccgattggatctccaacagctcttagctgccatggggctataaaagggaccctgggcgcatggagcaggacaccaagcattctctgaacattctaagacgcctagacttcgccaccacgcactcggatcatcgtgttagagatttgagcaccgtttgagttgtaaactccttgcaccgtgttttgtgctcacgtcttgacttgtgtgcgtgtgtatctttctctcccttactctagtgcttttgttgtgaacaactttgtaagggtgagaggctccaacttgtggagattcctcacaaacggggaaacaagtataaggaagg

SEQ ID NO: 183085 - DNA, 410 bp, Zea mays
  Clone ID: MRT4577_98559C.1
ccggccgggaaaaaaagctaaggcgaggaaaattcctggcaccccaatgcgccacatcgccgtcgaagaccggtgacgacgccgccgccacctcggctcgcgtagtcgtgtgagcgtggtgccatgataccctttctcttttctcgcatggaccggaaggttcaccggatcctgggcgtcgacgccgtgggccaccgcccgtgctcgcttttccgttctgcttctgggacgggtactaggcgggggcccacgatccgtggcgggcgcgtgggcacgcgcgtggggggttgtgcggcggattgctcacgctgacttttggcctacttattttttttcttcatgtcttttcgggtttacgtggatcaaattgaatatatcttctgaaaaaaaaaaaaaaaaaatttgcggcc

SEQ ID NO: 183086 - DNA, 188 bp, Zea mays
  Clone ID: MRT4577_9855C.1
gaattcggcagacccacgcgttcggggtaatataacgcgacgcgttattttaaaactccgcagaacattgctacgcgagaccttatcgtcgccatgccttctaagggacagggctggtaccctatcaccaacgtgtggcacaggggttaacctgccatagatgaccactatgcccatggaccgaaggg

SEQ ID NO: 183087 - DNA, 302 bp, Zea mays
  Clone ID: MRT4577_98560C.1
cttctaagtgttttttcaggttttcgggcaataaaaacaaacacccaaaaaaaaggcagaattaaatttcacacataaagacagcaaccggaactaaataataccctttctgacacaaaactaaataatcctaaaggggggccgggggaccctctacctcccctaaacgcccctataataaggctaccaaaaaaaaaaccccacaaaacggaagaaagccccccctccgaaaaaccccccgcctggaaaccaaaatagcctgaaaaaaaaacccctccttgaaactggcgaaacggtcaaaa

SEQ ID NO: 183088 - DNA, 224 bp, Zea mays
  Clone ID: MRT4577_98561C.1
agaccccatggcgtctctccgcaccccaaaaggcccggcagcgcaacgcctgcgcgccgtggaccaagtcgtcgataccctcagtgctgctcttgctcgtcaaggcaagactaccaaggctgttgagcggtggtacgccgagatgccgcgtgaggaggagatgctgcccaaggacaagtacaccatcttcgacaagaaggagaagacctaccggaagagcatcc

SEQ ID NO: 183089 - DNA, 647 bp, Zea mays
  Clone ID: MRT4577_98562C.1
ctcgaggccggccgggaaaaaaatatgccaagtgtagtaacagaagatcatgttagattttgctttgaagtattagtcaatcatttgaagaagaagcattatccacaaccacactttcctaatgatacctatcctctgtttgtcacttggcatattgaatcttatggccattcaaaattaagaggttgtattggcaacttctctccactcaaattacatgaaggacttttaaaatatgcattgataagtgctttaaaggacactcgattcaaacctattacattagaagaattacctagactgtcctgcgcagtatcattattgactgattttgaacaagcagatgattatttagactgggaaatcggtgttcacggcatttggattgaatttattcagcaagatggagaaaaggaaactgctacctatttgcccgaagttataaaggaacaaggctggactaaagaagaggctattcgatctttgctaagaaaaggaggctactatgggaacattaccaaagagtattgtgaatcatctattatcttgacaagatatcagtctcaaaagaaagagttttcctataaatctttatttcattaaaactcctccatcctcacaaaaaaaaaaaaaaaaaacccgcggcc

SEQ ID NO: 183090 - DNA, 615 bp, Zea mays
  Clone ID: MRT4577_98563C.1
taaacaaaaatcagagcacgtcgtcgcacgactatgttcatgcactgctgctgatgcaaccgcgataggaggaacacgacattgcgacaaagctacgcaagaggaagctcttccattggatgcagcttcctgtatcgtgcgcgctggtgtgagtagcaggacgctaatcgctcatcgcccgtctcaccaagccctccagtcgcgacgacgcacagcaactcgcgtagaacgatcaacacgcatatagctgaatacgggggccaaggggatagggctggtaaagataggcctgcgccaaaacgaataatgtaggccgatactggaagcactggagcacctcgatgacgcactgtagcaatgaaacgccagcaagtgcaaagacatctgcatccaccttaagtgtgactcgtatagcctcataactcatactcgacagttggaggatagatatgaccaaaagactttaattgtcccaagtaaactgagctgaatatggagataaaaccaacatccaaggaatgtaccctattaaagcctgatctcgagaatccgaatgtcactggatcctcatcattgggtaacaattatcatattcaagtatgaataagaaacatt

SEQ ID NO: 183091 - DNA, 924 bp, Zea mays
  Clone ID: MRT4577_98564C.1
ctgacgcgtgggcggacgcgtgggtggggatagcaggtgcttagcattggaaaaagtagcagagtcacttgagcttccctgtaagtactgctctttagggtgcccagagatcttcccatactacagcaagataaagcacgaagcacagtgcagcttcaggccatatacctgcccctatgctggttctgaatgtgctgtggctggtgatattccattccttgttgcacatttgagggatgatcacaaagtcgatatgcacagcggctgcacgttcaaccatagatatgtcaagtccaacccgcgagaggttgaaaacgccacctggatgcttacggtattccattgttttgggcagtacttctgcctgcacttcgaggcattccagctcggaatggctccagtctacatggctttcctccggttcatgggtgatgagaatgatgcgaggaactacacatatagcctagaggttggtggtaacgggaggaaaatggtgtgggaaggtactcctagaagcatccgtgacagccaccgcaaggtccgtgacagccatgatggcctcatcatccagaggaacatggcgctgttcttctcgggcggtgacaggaaggagctgaagctgagggtgactgggcggatctggaaggagcagaccaacccggacggggcctgcattcctaacctttgcagctgagcaagggagacgtttggaaagcaaaaaagaaagaaaatacggtgctgtttggctggcttgtctcaaaattgccacgttatgctttcatcatagtgtctgccgttgaaatgttgtagtagtaaaatcgtagggtgtaaaatgttttcttgtaaagtcattgtgtataccaaccaaattcaagaaagcttacaagttggcccataaatgcatgtgctacgttcttgtgtaaa

SEQ ID NO: 183092 - DNA, 467 bp, Zea mays
  Clone ID: MRT4577_98565C.1
ctacaatgaaaaccagactaaatatttttcattaagtgcaatagcaggatagggctcagatcatggtgacgggggtaaacagtgatgtggacaaagcctagcgcgcgtgccctgcttactaacatacattcacattgggtccattacgatcttctttctcacacaggatcatcgaaaggctgatacatatcgactatgtttagaacccctaaatagaacggtcgaaagcttacaagctggtctatctctgaacgcgatatggacaacatggcacgcaccaacttcctaatttactgcagacataactgttacccaacatgccgctgcccgagatgacactccgggaggatcgataccctacattcaaatacactgacagcaaagttggggccacatgtttaataaatacaacaccgagacactctgaacccaacaactcccaggatttgtgggggtagctcgcgtgc

SEQ ID NO: 183093 - DNA, 689 bp, Zea mays
  Clone ID: MRT4577_98566C.1
gcacgagttgatatgcacagtggctgcacgttcaaccatagatacgtcaaatccaacccgcgagaggttgaaaatgccacctggatgctaacagtattccattgttttgggcagtacttctgcctgcacttcgaggcattccagctcggaatggctccagtctatatggctttcctccgattcatgggtgatgagaatgaagcaaggaactatacatatagcctagaggttggtggtaacgggaggaaaatggtgtgggaaggtactcctagaagcatccgtgacagccaccgcaaggtccgtgacagccatgatggcctcatcatccagaggaatatggcgctgttcttctctggtggtgacaggaaggagctgaagctgagggtgactgggcggatctggaaagagcagacgaaccccgatggagcctgcattcctaacctttgcagctgagcaagggagacgattgaaaagaagaagaaaaaaaagaaagaaaatattgtgttatttggctggcttttttaaaaaattgtcatgctatgttttcattatagcctgctgttaaaatattgtaccagtatgtagggtgtaaaatgctcttgtaaagtaattgtgtatatcgaattcatttacaagttgtaccaccaatccctgtgttatgttgatgtgttgtttgagttccgttgtgg

SEQ ID NO: 183094 - DNA, 1342 bp, Zea mays
  Clone ID: MRT4577_98567C.1
ctcgtccccggccaggcccccccacgcgtccggttcctattcccgggaggagacggtgtcgtctgtctctcgccgttctcgttcgtgccaatccaggcgaaacaaacggcgtgacgagagcggcagagcgtcagcgtccccccgcggccaccgtaccgcatcgtcgtcgtccccagccaacccaacccagcgcaccccaaacgaatccagccccacctcagccgctgcgcggacctccgaatcccagcgccggtgcgcgcagggcaccgcagggcgcggcgcggccatggacatggacagcgtggagtgcctctccctcccggacgctgccatggacgtggacaacgtcgaaggccgcccgcaccacggccatctcggcctcccgctccaccccgcccacctcccatcctcaggtgccggccgcgcgttccccaaggtgaatgccgggggcgccgtggcgggcccggcgggagcggcgggcacagcaggagcaggcgtggggccgccggcgaccagcgtgcacgagctgctcgagtgccccgtctgcaccaactccatgttcccgcccatccatcagtgtcaaaatggacatactttgtgttcgacatgcaaggccagggtgcacaaccggtgccctacatgcagacaagagcttggtgatatcaggtgcttagcattggaaaaagtagcagagtcacttgagcttccatgtaagtactgctctttaggttgcccagagatcttcccgtactacagcaagataaagcatgaagcacagtgcagcttcaggccatataactgcccctatgctggctctgaatgtgctgtggctggtgatattccattccttgttgcacatttgagggatgatcacaaagttgatatgcacagtggctgcacgttcaaccatagatacgtcaaatccaacccgcgagaggttgaaaatgccacctggatgctaacagtaagattaaactagctctgaattattctttatctgctgctccatctattttcatatgtgtggtgtatgaactaattactggtcctaaacatcatatatttaaaagtggagggattatctatttcctattgctgatcttgtgatccatgtttacaagtaaaatatgtgtattgtcaagtaatttgactggttgaatgttgcttttcggttcacgtattccattgttttgggcagtacttctgcctgcacttcgaggcattccagctcggaatggctccagtctatatggctttcctccgattcatgggtgatgagaatgaagcaaggaactatacatatagcctagaggttggtggtaatgggaggaaaatgtatggg

SEQ ID NO: 183095 - DNA, 430 bp, Zea mays
  Clone ID: MRT4577_98568C.1
ggggcaaccttggcggcctagtgccccactggggggcgggacaaatggcctccccaaaaagcccttgtttttaaccccccagtcccacccaagggaaaccctggccccaaggctggtcccggtttcatagcccccccgggttttcgggggtcatgcctgacttaccggccaatacctttaatttccaatttctggattttccaaccttcctcccccctgaaaccggggggccggtttctgggcccttttttcagggtttaagcaattaaaaaatcctccctccctgaaggggccggatggccccaccccaggcctttggttccctcaaaaccaaattggcccttaatgggggccaaaggggggcccgcccaacccctttatgggggtttgggccaaaatttgggccccggttaggcctggttcaaggtta

SEQ ID NO: 183096 - DNA, 605 bp, Zea mays
  Clone ID: MRT4577_98569C.1
tctgagtgtctctgatagaatgaagtcctctggttgtaagcctgataccttgttctacaacgccctgatcaaccttctcggtagagcaggtcacttgtttgaagccaaccaagtgtttcgcgtggagatgccaaggaatggcgtgctccgcaacgtggccacctataacacgatgatatcaattctctgccaatatgggcgagatgatgacgctctcggtgtactgaaagagatggaagcacaatcctgcaaacctgatcttaagacatatcagccacttcttagactgctgcttggtagaagagggcaagctgctgccgttcaccgtttgttgagtgagattcgtgataggaatggtctagggttagatcttgatacatatacccttctgatccatggtctctgcaaggtcggtgagaccgattgggcttatctactctatgatgagatggtaggcagtgaaattgtacctaggcctagaacatgcgagttacttttgagtgagatgcagagacaaaacatggaagcgtgcgtggaaagaattcggaatgatgtaagtttctttggccttactcagtaacttcgatagcattgccttctcccat

SEQ ID NO: 183097 - DNA, 381 bp, Zea mays
  Clone ID: MRT4577_9856C.1
gggggaacgtgctggaaaattatgttttagggggtatggaacatatgaaccggaaggtcttgtttaaggggtagagggaaaccgggacattaaagggaaaaaaattttctggttggttttattaaagggacgagcatgaagttgccaggaattttctttccgggcgggggccttgtattaaaaggggggggtgggaaggtcccgttccgggggggtggggcggttaaaggaaagggggggggttttttaaagtttttgagggggcggaaaaaaactttttggggtaaaaaacgggccttttgttggtggaaggttaggggggaaccccaagtgggggggggccaacggcggggggcaaaaaaccccgggtttggggggggg

SEQ ID NO: 183098 - DNA, 389 bp, Zea mays
  Clone ID: MRT4577_98570C.1
ccaccggtgtcttcggcatgtgcaaaacccaattcttcaaccctacaggatccaacaggcaatcacaggtggcatcttacctatatcacccttgttcctccaacaatcatcagccctattacagcagttacctttggggcgttgattggcacaaaacatcagggcacaacaactacaacaacttgtgctagcaaaccatgctgcctactgtcagtaacaacagttgctttcattcaaccaactaggtgcattggactctgcttgttatttgctacagcatcgactacggttcagggctgatagctggtggatacccgcagtaattgcttgcatggaaccaattggctggatggaactgttctggttatgtgcctcggccgtgagcacgc

SEQ ID NO: 183099 - DNA, 1048 bp, Zea mays
  Clone ID: MRT4577_98571C.1
cggacgcgtgggcggacgcgtacgcggacgcgtgggccgagatgcccggccgggctcctcgaaatttgacgacaaggtaagatatatattttttggtgtcagcagtcagcaagtgtggcacatccggggccatgttcgtttaggctgttcccggccgggaacagcgaccaaacctcgtggatcccttcccatggaaataaacccggcccacagaaaaacaagcgttcggttaagtccgatgtgggctgtatccagatcgttcctcgtcgttccagcccgggaaacacgcccggtcgaccgggggtggaaaatatcccagcctggactgcacgcgaacgcgaagggcacgcgacttctcgtcggtgtcgatctgctccggcgaccgcttgtcatcgattatccctacatcggtttgacttggagaagacgagcttccaccatcttgggaccctataccctctcctttagagagctgcacctgaagaaaccaatgaacattaggtattacaaataagggctgtattgtattaatgtggttcttgtaaactaatttttcctttgaattttgtaattgaatcatccacaggtgtgcgacttgcttttgtttatgtggatctattaattatgttcaaacagttgcttcataattggcattggcaaaaaaaaaaaaaaaaaagcggccaaaaaaaaggcccctagggcctaaatgacatataatcagttgatgtgtggtgctttgccagtgttaaaattatttagtgtttagttcagagtacatattttttacttgtaattgtctagacgtattttgtactcaattttacataccttgcattatttcatattttagatcagcaaacagtatgttgctacaattatttcgtattttgtaattcttggaaggcaaacagtatgttgctacaattttacataccagcaatatgtatgctatgtgtgtaataagcttctgaatagtggtaccacatacattttcactaatgaatacattttcagtaatgaccattagctttctcattcttgcattttc

SEQ ID NO: 183100 - DNA, 295 bp, Zea mays
  Clone ID: MRT4577_98572C.1
atgagcatggcgtaatcatgcgcggacgcgttcctacacggtcgcacaggcgtcggcggcgccaaatgccgccccggcgcggatctgctcggacagcggagcacctgcttcacgacgaccgactggaggtggagcaccgacaggggaatccgagctgaccttgcaccaccagcgcgggcgagcgcggatagcgccgccaaccccggtccggacgtaactgttcgccaaaccgatgacgctcctgaacatgccgacgatgatgcccaacctgatgccccccatgacaagcatgccg

SEQ ID NO: 183101 - DNA, 719 bp, Zea mays
  unsure (1)..(719): unsure at all n locations
  Clone ID: MRT4577_98573C.1
attttatatattggttggtgtagaccggactctacaagcagtgcaagcgagggcctaatattgctagtagatctaaagcaggcactttcaacataaagcacccacttaaaacctatttactcacatgatttgcatttgtaggagatagcggtcataatccgtttcaatatgaaaattcatacgctgacgaactagacagcagtcaatgcacagataggagaagaagagcaacagctgcacgacacggatctaaaccttaagtttcaatagaaagagctgcatttccaaacaatttgcagagtcaattaaccgaaacatcccctcctggctcctgaaacacaactaagtcacttccgattgtgccgccagaaccctataaataattcgtaggagcactgaaagtttcaaaaactgaaaactgtgagaaatgctttgattcgcgcggtggaccaccaaaatgcaaggcaatgtcccacatgaccacatacatcagtggaagggaaaacactagttctgagaccggagactgcagaagcatggaaaaaattctatgcagtcatcaagtcatgcaaaccgtttacatgacaatgcatgcatcaatcgcggttcatcctaaaccctacctnccccataaagacgaagcccaaaactcgaaccgatgaacccagcgaaattggccattacagacaacatggaggtaccngggaagacgagctaac

SEQ ID NO: 183102 - DNA, 1439 bp, Zea mays
  Clone ID: MRT4577_98574C.1
gcccgggaaacacgcccggtcgaccgggggtggaaaatatcctagcctggaccgcaagcgaacgcgaagggcacgcgacttctcgtcggcgtcgatctgctccggcgaccgcttgtcatcggtatgtttcttcctccctgggctttcccttcccaccacctcagcggacggcttgaagtttcctctaaggggtgggcgctcgttacacgcagctcccatggtctgcttgaagtttcctcgccctaaaccctaaccctaaacgcggctcccatggtttcctgatctccttttagctgctgtagtgatggcgccatggccagggtctgcttagtttcctcgccctatccaacacgcaagctgccgccgaagcacggtcggtcacgtcgttcctgctgacatggtcttcttgagtttggggacaaagaaacaagaagaattagactagaaggttcagactttagcctctcctacaccggtggtcatggaaacagagggtttgactacctgacagttagctgccctagcgttcttgaaagaactgttctccaaatttgttcccagttgaactgaaaagaggcggcttgtaacagcaaatcttcccaaagtactaactatatttagttttaatatagtcaagccaagaggatgcatgataccccagccgttgtatccttaatatatgtagggctattttgacggctagctgcgaagaagcttgtatcagtgagtttagttgtgtgcactgaactgaaactgctaatagattgcttgctgcatgtcccataaagttctggcgagcattgcatggatatagaataatctgtggggctagaatgtgtgtgtgttttggcctttgaggggcgagcaagtaggattgggcactttttttttgtttttaatattcagttttggtttccaatatttgtctgtatcggtactcagttgcagtttcagttttagatggaaaccgaaccaaacactggttcaaacccaaacacgaagcattagataagaatgcggcaattagcaactgaaaaggacatataatcagttgatttgtcgtgctttgccagtgtaaaaactgtttggtgtttagttcagagtacatattttttacttgtaattgtctagacgtatttctaacaaaaacctattatatttctagattatccctacatcggtttgacttggagaagacgagcttccaccatcttgggaccctataccctctcctttagagagctgcacctgaagaaaccaatgaacattaggtattacaaataagggctgtattgtattaatgtggttcttgtaaactaatttttcctttgaattttgtaattgaatcatccacaggtgtgcgacttgcttttgtttatgtggatctattaattatgttcaaacagttgcttcataattggcattggcattggctgctc

SEQ ID NO: 183103 - DNA, 1015 bp, Zea mays
  Clone ID: MRT4577_98575C.1
gatccccgtgggctgggccgggtcggtgcggccatgcgccgtgacggcgtcgttctcgcccttctccggccgcagctgccgcggcagcacgacgaggacggtgtcgtggagcaccgcggcggagttgccgaagacgaagtcgacggtgcccgccacgcggcaccgggtgtagaactggcgcatggcgtgcgcgtacagcgtgtcctggtgccccagcagctccacgccgtccagcaccgtgcggtcgcccgtggaccggaacgccacggcctggtgcgcgtcggggcccgccgtgttcgcgatcgtcaggtcacgcgccatgaacccgtccgccagcacgcctacggtggcggtgttgaaggtggacacgccggacgtgtcagcgttgagatcgccagtgatgaccgtcttccccatgccgttcacggtgatggtgtcgtcgaggtaggccatggcgtcggagatggtgcgggagaagttgacgtacttgtacgcggaccagcagtcgtagaggtggagcagcgccgtggaggcggagagcagcggcggcgccgagggggacggcgagaggcggcgggaggagagcgcgaggaacgtgaggcagttggtggcggcgttggagaggttcacgttggaggaggcatcgggcgcggcgccggagagcgtggagacgcaggccggatggaaccgggtggcgttgcaggccaggagcaccgctagcggcgcggaggagggtgctggggacggggacggggacggagaagcgggtggggtgctgtgatggtggtggtgggagcagagggagacggggagatggaagaggaggaggaggggaaggagtccaactgcaggaggcattgctgatggttggacggtgttgtgtgggcggcgcgcgaccgagctctgctcctctctactgactcttactcagcggcggccgaggttaaatcgcggatggagaagtccacccacgcgtccgcccacgcgtccgcccacgcgtccgcccacgcgtccg

SEQ ID NO: 183104 - DNA, 1603 bp, Zea mays
  unsure (1)..(1603): unsure at all n locations
  Clone ID: MRT4577_98576C.1
ggtacccgggcccccccctcgagtttttttttcctttcttttttctcttctttttttttttttttttgcccgttgcgatcgttatcgcggtaggtttattatttccatgtctttgacttgctctctccgtattattaggagtaactgcaatgctcaagctcaacaccagggacaccgtgtcaattgtgggacacgattgctggtaaatacattctctacagttgttacgcggtactgcactacactctgggtatccactcgtgcccctgtatgaagctggcgacgctgtacgcgtcgacgtggaccttgggaacctggctgctccacgccaccctccggcccgcggcgctgccggggccggcgctgtcgtactcgccgtagtagagcgtctggagcgcgaagtccccgttccacggcatccacccctgcggctgcacgatctccgcgagcgtgcacccgacgtacacggtgcgggagtactccttccacgggcggcccaggtagacgtggtgcacgccgggcctctcgcggtacagcgccatgtactcctcgctgccgttgacggagcagcggctgagcacgatccccgtgggctgggccgggtcggtgcggccctgcgccgtgacggcgtcgttctcgcccttctccggccgcagctgccgcggcagcacgacgaggacggtgtcgtggagcaccgcggcggagttgccgaagacgaagtcgacggtgcccgccacgcggcaccgggtgtagaactggcgcaaggcgtgcgcgtacagcgtgtcctggtgccccaacaggttcaagccgtcagccgtcgccggcaggccggaaccccgagcgcgtcggtcggcccccgagctcgcggcgggcgggggccagtacccgtcgcgctccgtctgcgggggccgccagagggacgtctcgtcgccgtaccgctgccgcgcggcgagcatggagatgtagttgctgttcacggtgatggtgtcgtcgaggtaggccatggcgtcggagatggtgcgggagaagttgacgtacttgtacgcggaccagcagtcgtagaggtggagcagcgccgtggaggcggagagcagcggcggcgccgagggggacggcgagaggcggcgggaggagagcgcgaggaacgtgaggcagttggtggcggcgttggagaggttcacgttggaggaggacgccagcacggacttggccgtggagacggcgggcgggaggcgggcgcggagcgccgagagcgtcgcggcgaggaggtcggcggtggaggcatcgggcgcggcgccggagagcgtggagacgcaggccggctggaaccgggtggcgttgcaggccaggagcaccgctagcggcgcggaggagggtgctggggacggggacggggacggagaagcgggtggggtgctgtgatggtggtggtgggagcagagggagacggggagatggaagaggaggaggaggaggaggaggggaaggagtccaactgcaggaggcattgctgatggttggacggcgttgtgtgggcggcgcgcgaccgagaggagcagagccgcctcgtgctcgtgtctacttactcttttgaccggccgnc

SEQ ID NO: 183105 - DNA, 319 bp, Zea mays
  unsure (1)..(319): unsure at all n locations
  Clone ID: MRT4577_98577C.1
ccgggtcgacacacactcgtgctgccaggaagcgctcctgcacctgttctgcatacgcccaacggcctaatatttaggtancctggtacaacctacatggtcctcgatccgtcacccatccgttccggatcttgattcttgccaatgcgtgcaagatttctgcttcgccgaggttaaattttattcttctgtcgaccttctgcggacaacccgcacgtttgcttggtgccctctatttgcctgctactcattgcgctccaatcctatgctaatggaacgatcctactcaacattgccatcgtcacttctaccatattcc

SEQ ID NO: 183106 - DNA, 1966 bp, Zea mays
  Clone ID: MRT4577_98578C.1
ctccatagggccattgggtacctcgaggccggccgggaaaacagcgcggcgagcagatatcccacgagaaagccctcgaccccttcaattctccagcaaactagtcaccggcgtgtgcactggtgcagtgcacgcacgccgccggcagcatggcgggcagggccagggcacggcggctcgtgctcgccggcgctctgatgatcgcctggctcctcctctgtcttctcccacgggccacggcggcggccgtccgcaggagcgacttcccgccgtcgttcctcttcggcaccgccacctcctcgtaccagatcgaaggcgcgtacctcgagggcaacaagagcttgagcaactgggatgtcttcagccatactccaggaagaatcgaagacggaagcaccggagatgtcgcggatgatcactatcatcgttacgaggatgacattgagctcatgcactctctcggcaccaacgcctacagattttctatatcatgggccagaattcttccgagagggagattcggcgaggtcaacccagcaggcatcgcgttctacaacagactcatcgactcgctcctgctcaaagggatagagccgttcgtgacgctgtcccactacgacatcccgcaagagctggaggacaggtacggggcgtggctcggcggcgccgaggcgcggcgcgacttcggccacctggcggacgtgtgcttcgcggcgttcggcgaccgcgtcaggcactgggccaccttcaacgagcccaacgtcgcggtcaccaggggctacatgctcggcacctacccgccggggcgatgctcgcgctcctgcgcccggggcaactccgacgccgagccctacgtcgccgcgcacaacgtcgtcctggcccacgccgccgccgtccagatctacaagaccaagtaccagaagggcttgatcggcatcgtgatgtccactgtctggttcgtgccgctgacggacgcgccggcggaccggctggcgactgagcgggcgctggccttcgacgttccatggtttcttgacccgataatctacggagactaccctccggagatgcgccggctcctgggctccaggctgccgaccttctcgccggaggataggaggacgctgggctacgggctggacttcatcggcatcaaccactacacgacgctgtacgccagggattgcatgttctcgccaggttattgcccgtcggggcaggagttccaccaatcgctggcggcctacacgggagaaagagacgggattcccatcgggcctccgacagcgatgccgacgttctacgtggttcctgacgggatagagaagatggtcacctacatcatgaacagatacagcaatctccccatgttcataaccgaaaatggctacgcacaaggtggggatggttatactacccgtgccgaggactggcttgacgaccagggcaggatacagtacctcgagggctacctcgccaaactcgccaaagtcatcagtgacggcgccgatgtccgtggctacttcatctggtctctcattgacaatttcgagtggctatatgggtacaccctccgcttcggccttcactacgttgactaccaaacgcaggagagaaagccgaagtcgtcggcgctgtggtacaaacggttcctccagagttcacttgaagctcaatagagagagggtgccttgttcgaagtacaggcacgcagcatgagcttgcgagtgtgtgacgactgagcatgccgcttcttcaattcagaaaatgaagggcgtgatctttgtatgaatttattgatccttaataaagggggccactacagttgccaaaaaaaaaaatctccgacgtccagccacagtgaaaacttgggggtggagcattttcttcccccctaagcgaagtgtgacatgcagcttcagattttaaccattattatagagaccaaatagctcatttattatgc

SEQ ID NO: 183107 - DNA, 258 bp, Zea mays
  Clone ID: MRT4577_98579C.1
ggctcggcggcctatcatcggtcacatgcctggccaacacggcgcgggaggcgtgggagtgcacatcggactacgttgagaaggtgcgccgaatgatggcaaaagcacaatagcacgcggcccacaagatcgcgcagggctggcacggtattcatagcatggtgcatgatgacggtgctgacacttgaacatgcagcgtgagaacttcctcctagatatacagatcaatgatggttgcgtgcgtatcaatcttagcag

SEQ ID NO: 183108 - DNA, 313 bp, Zea mays
  Clone ID: MRT4577_9857C.1
ctgggtgggtttaaaatatttagggggggtaaataaaaaaatttcccaaaaaaaggaacaaccgaacccgacggaagaaaggggcaccagccccaccaattccttaaaaaaacaaccgggaaaggcacaagggtccccccctcagcccccggccccaaccaaaactggagggaacaaaaccccccccccaaaaaggaacaagggaaaaaaaaaaataagaaaagcgtaaacccccccaatatggaaaaaggggcccggggacaccaaaaaggaaaaccggaccggccccccgggccccaaggggccccccgga

SEQ ID NO: 183109 - DNA, 455 bp, Zea mays
  Clone ID: MRT4577_98580C.1
cgcgtgcgcgacagagaagcttcaaggggatattaattaagacgttttaaacatcttgcacaaagactcaggcctggggtgttaaatcaaaagaagaattctttagtcacttttacgactgctttcaaattttaaggggcgtctgcatctcatttttttcttgtaaaaaaaatttttctctttgtttacctttaccatcctgttctttttttggaaccaacaaccttgaaaaattacatggttttatccattttattttttattccctaccacctttattattcccccttttgtttaatgtttcttaaaaaattcatttgtaatccttgctttttttccccctatttgtggctcggaaacttccaattctttacaccttttgttccccccctctcatttttacattgttaaatttacaatatttctccttcttaaagctttttttcaaatttttt

SEQ ID NO: 183110 - DNA, 494 bp, Zea mays
  Clone ID: MRT4577_98581C.1
gtggggggggtgttttttttttttttttttttttttttttttttttttttttttttttttttttttttttttttttttttttgggggggcaaactgaagcaccaccaaaccaaaactgggatacaccccccccccacaaaaaaataaaccgtggggggggggagcgggaaaacaagcccctttattataaaccttgagaataaacccttttttcacaaacctcaagtaaaccggcggtgcatttttcttctccatggcggccccaaaaggggctttcactttgcacccaaaattccccaaatcaattggccaggccatgcattactgccaaaaaacaacctaattttgggcttgaaccaaaattctctaacaacaacccctgtgggtgtaaaaaaaaactctttgtttggcggaaaaaccaaaaaccccaaaacataagatttgcccaccactgtaaaaccatccatttcttttaaataaacccgacacctgct

SEQ ID NO: 183111 - DNA, 611 bp, Zea mays
  Clone ID: MRT4577_98582C.1
ctcttcttgtgcaggcatctaccaactccaatgctctcttcttgatagcggctgcacataacctattgtgtttgaagttaggaaaggagattggtgttagtatcggaaacccatgattacttggttcgaggttgctagcgtgccagcactttttgggcttttagtgactccttatttaatttactcctgaagccccaaaattagctgttgagaagctaaagaacatgggtccaataacaagaaatgaatgcatcatgattggaacgatgctttttgcactctcactacggatttttggaagcgaatggaggaggttgttcatgctttggctaccagccatgcttcaaccgatgccatgacgaagcagcctgtgaaggtgtacggggagcttttcaacattttactagatataccaaatcatacgaatgaatgcagattgatgggaagttgcattcacaaagtaacttattcagttcggcagctctgctaacactcttcacgaatatcacaacttggttgaaatcaagagcgtccaagagatcattcagtttccggttcttctctgcctcgctaagtgttatatagtgttgcaaaaattacgattccaatta

SEQ ID NO: 183112 - DNA, 225 bp, Zea mays
  Clone ID: MRT4577_98583C.1
gatcttatcacatcaagtgagctactcctgacactttggtcaggctaatgatgccgtgcacaaggaccagcgatggcgaccaagggcatatgcttcctggcgctcgcatccgtgctacttgccgtaacttttgccgaatctgctctgaagccgcaagtgaagaagggcagctgcagttaaggtagcagcacatgcagccatcgctgaagctgacgctggaacctg

SEQ ID NO: 183113 - DNA, 523 bp, Zea mays
  Clone ID: MRT4577_98584C.1
gtggcttcgtcaaagaagtgggaatcaaatgtgcacatagaaagtgtacaagaaccatatgaaggccacacgactaaaaaggtaaaatctgatgctaagaaaaagaagctgatagatgcaaaaaattcaaagaacagaaatgatattagtgcagttatgaaaaaggagattgatatagaaacagttgctggtcaaaagatcgtatccgaagctctcaacatatcattgctgtctgatcccagagccatggatgcaaaaggtgagaatcgacttgaagtggaaccagcagaaaacaacttggcgggaactagagatgcccgattgaaagagcggtccactaagaccaactgcatgccaatcatagttgaacctgccaaagcagaggcgacggaatgcttagagaacagtagttttggtagttcagaaatggatttttcagcagtaaaagcggaatcaaaatccaaggcagaaaagggagaggcatctttagaagagaggaataccactaatggctaagacctaa

SEQ ID NO: 183114 - DNA, 177 bp, Zea mays
  Clone ID: MRT4577_98585C.1
atgctgtggaggtctttaagtcctagattaatagagaggctttcatgtcaacaatgaaccacaatgttcgaagaatgtggctaaagcgcaaaattaggtgtgtccatagttaagcatgtaacaaaacatagctttatgattttggtttcagcttagcatgagcacatattgtgtggc

SEQ ID NO: 183115 - DNA, 342 bp, Zea mays
  Clone ID: MRT4577_98586C.1
cccacgcgtacgtccatgtgtatgatcaactttttgatgagagacatctttgaggagctgtgcgcttataaagaagtggggctgtaatcaaataccaaatctaatctaccctaacactggattccaatctggcgaccataagaagatactagcttacttattacagcagtacccagctaggacaccctagcagaaaaagcatacgtccacaaattgaactgttgtatggattatgtgatcttacatatggatctattgtaaaccttaaccctacactacggggtgagcctctatattaatagactgagttgtgcatgactcattacaaacaaaaaataataa

SEQ ID NO: 183116 - DNA, 542 bp, Zea mays
  unsure (1)..(542): unsure at all n locations
  Clone ID: MRT4577_98587C.1
gcccgncttacgcctgcgcaggcgcaggtaagtacaaggagacatattccaccagctgagaatggctcctatagctgggactgccaaaacgggtgatgccaagacccaggccttgatggtcgacaatgttgacgcaagcactgctgcagccagtaagaagcaccaactacatccacacgtatgagacatttgaccgccctactaccctgaagaagctaaagacccaaagtaccctaggaatataaactaccgggaatgaacaagcttgatcagcaccaaattctcaagttcccaataacaacacaatcagtgattaagaaaatcgaagataacaacactctgtactttattgttgacctcaacgcaaacaacatgaagatcaaggctggcgtcaaaaatatgtatgacatacaggcaaataatgtcaacaccttgatcaggcctgatgggaagaagaggattacgtgaagctgactcccgactatgatgctcttgatgtggtacaacaaaatctgaatcatataaatgctgcattaggcata

SEQ ID NO: 183117 - DNA, 484 bp, Zea mays
  Clone ID: MRT4577_98588C.1
ggtacacgggccccccttctacgagttttttttttttttttttttttttttttttttttttttttttttttttttttttttttttttttccccagaaatctaaaccctttaaaaaaaaacttaaggtaacaaaccccaacctaacccataaatcttttttggaaaggaaaccaaagtttgtagggcctcccctatccggccggttagggatccagaccccagaaccgggaaaacctatagggctataggattggaagggaaaacaaggcggggggggggggacaacccatttttaacaccagttttttttgtttgggccaaaaagagcataaccaaataaaccattgccccgggggggcccaacacaaagaaacaaacaaaaagggtccccccaaacatcaaaaaaagtttgggggggaaaaaaataaaacccgcccctgggttaaggctaaggctcacgcggaaagaggggggggggcttttt

SEQ ID NO: 183118 - DNA, 459 bp, Zea mays
  Clone ID: MRT4577_98589C.1
gccaaacagggcgactcacaactgttacaacgccaaaactgccatgtttctcacgaggcagacagggatcctactaaaggcattttttgtcacaaaaacatgctacgttcaaggaatgcactcctgctgagctagcggcctatgccttcaaaccagcaactgaaaccggaatatcatatgacaactaagcatcatgcatgctgctcagcaccatacctagacagacgctgcacgtttagcccaatctgcaaatcagaacctacagattctgcctgaattatgaacttctttccctactgcacttctcgatatggtgctcatcatgtgagtgaatcagatcttacttattgtcgattcgctagaagtgtgactggtaattggagtctataaacccgtgttaggcttcttacatacaactgttactacacccaagttagtagaacccttggactacttgcc

SEQ ID NO: 183119 - DNA, 506 bp, Zea mays
  Clone ID: MRT4577_9858C.1
gcggggtttagtgtttaatccattataatctataaagcatccatggccaccaagattttttcacctccttatgcttccttgctcctttctacatgaggtggtaacgcgacaattttacctgaatgctcacaagcttctaaaagagacgtactttccccatacgtggcgtcgaggatagcttaaggatgagaaaacccatttgtgtaaccatataggctccaacaagcaaggggcgggcgccacatacctttctcgcccttggtgttgcaacaatcaccaaacatatgtttggtgcaaccactgttacataccatctggggacaacagctgcggttactcgcgctacctgtgataaaccaagcatctctaggctgcctttctaactactgtcagcgacaactattttttctattcaaccaactgtctacactgaaccctgaaacctatccgcagcaacaactattaccatgtatccagctagatactgcctactctgagaaacaaca

SEQ ID NO: 183120 - DNA, 654 bp, Zea mays
  Clone ID: MRT4577_98590C.1
cctcgaggccggccgggccgtgaactcagactcgagaccccgctcgctttctatctctagagatgacagtgccgctgctgactaacaagatcgtgaataagcgagtcaaagaagatcaagaggccccacctcgactgctactttgccttaggccgaacttccgcacgaccaaagagggattcgatctcccgtgtcaggataaatctcacgggatgcgaccttggatcgtccatacattgggtatgttgtctcgaccagtcgacaaggatactacctccccaacaactgcgacaacctagcgtgccataacgtttctgagctgtagctgttcatgatgcacaacaggatctactgatatgaaaatgatcactacgtgtacactaagaagcgcaaagagatagtgcagcacgctgcggatctacacattgcgtgcacgaacaaacttgataagctccgcatactagagagacgatatagtctgatgttcttgtcttaacaacaaaatgggatgctgccattcccttaccgcaggaaactactttgcttagggcgtgttaatactgaaaatcagagacactcctacctttttgcaatcaggagctaataaaatgtggcagattacactatttccttgcatctatctaaattatatgc

SEQ ID NO: 183121 - DNA, 110 bp, Zea mays
  Clone ID: MRT4577_98591C.1
cattaagacctagtggtgcgctagaaaggcaaaggtgtttcctttacctttgagggtatgctctatgtctattggactacttcgtaccatgggagtgactggcgggaagt

SEQ ID NO: 183122 - DNA, 422 bp, Zea mays
  Clone ID: MRT4577_98592C.1
gaggggcaaagggactttttaataaaccccccatgggcgggataaaaaaattctggggggaaaggcaaaaaaaacccaggcctttgttaaaaaaaaaaagggggaaatttgtaaagctttaaagggcttgggttttatttatttaaggaaaaaaagttggacccaaaaacgtttcgggtttaaaccgaataatgagggcggggtttgttggggttttgcccaaaaaaaaaaaagtaaccggcaaataggggccttgggaaatttttaatccccggccccagcgttagaaacctttaggccattgccgtaggggtaaaaaaaaaaaaaccgggggggggcccccatcgggggggaatttttaaaaaaaatgggggccgggccccttaacccgggaaaaaaacccgttttattcagcaacggaa

SEQ ID NO: 183123 - DNA, 293 bp, Zea mays
  Clone ID: MRT4577_98593C.1
ccttcgtggacgtgctggggctggaagaggagtctctgggctcggtgccagcgcctgcctgcgcgctgctgcagctgtttcccctcacggcccagcatgagaacttcaggaaaaagcagattgaagagctgaagggacaagaagttagtcctaaagtgtacttcatgaagcagaccattgggaattcctgtggcacaatcggacttattcacgcatggccaataatcaagacaaactgggatttgaggatggatcagttctgaaacagtttctttctgaaacagagaaaatgt

SEQ ID NO: 183124 - DNA, 526 bp, Zea mays
  Clone ID: MRT4577_98594C.1
atgcgttcgtggtgagcgtcttataaatccattggtcctttttcggaacacatgccggtacatagtgaccatatcaataccattgcatcgcatatgtaacatgcactatgccacctaaacgatgggttgcctgtaggatactggcagcatcatcagatagaattcaacccattggatttgtcgatcgtagttgcatacaaacaacaacaacaggtgagacaccgtttaccagatgatgaaactactagccatggtgaacgctctcacctaactacaacacaaacagctggtttaatgtaaccagctcgctataggcagtgcacctacatacctgaaatagctgatgttgaaccaacacaatgctgcagcaaatcgtgccagctctcactcagctagctgtggctaaccgtgctttctacttacaacaactacttacataaaacaactgactgtgtcgaactctgctatatacctacaacagggtcaacagctactcaatgcactaaacgggggtaacccattgggc

SEQ ID NO: 183125 - DNA, 173 bp, Zea mays
  Clone ID: MRT4577_98595C.1
aaccaaaccccctccattattttgtaaggtaaatccaatccaacaaaacctttccttaaaaaaaaagggggaaccttttccggtattttggccctttgacccaaaatgccttgggatttgggatgacattgacttggtctcctccaggccccaggtgtgggggacccaacggg

SEQ ID NO: 183126 - DNA, 1279 bp, Zea mays
  Clone ID: MRT4577_98596C.1
cctcgaggccggccgggagtcacggatcatggtgtgtttggttggatctcgtcccggtctaaataatcgactcgcgaccccgtttcccggagagccgcgacggtgcgacgccgaactccctaaccctaagtccctaagcgtaggcggcggggggcggcggtgcgaggcaagctgcacagcaacacgggccacgggcgcggcctccgcctccgcctccacgcttctgctgctaggctgcaagggcggcggcgcggcgcggtgggcggcggacagctggccaggtccagcccagtagtccaggtgacgaggtccgcactccgcaacggttctggcgttctgcagctgaggatagacgagagaggaagtgaggatttatattagtgatttacaaggcaacttgaaagacagcagggttgcatcccacaatgtcagctcccaacagtgatagcaacatgcagcagctagtccctatagcaccaccaggaaaggcttctggtggtgacagtgggaaggagctggttgtggcagatcctgcaggtaagagatcaggaggtgtaaaactgcgagaggatgaggaagacctggaggtgaagctcaggcgcatcatggagaatgtccctgtgcgtgtcagtaacacatcagggtcatctgctggctctggctctggtgatttccaccagtatcggcaaatgaggaggagagagcaggaccgtctagcacgaatggatgcggactaccagaagagaaaagagatagctgagttcgaactgcggagggaggagaggatgaaagcagctgaggagcggacagccaagaagcgcctgaaacggcaaaagaagaaacagcgtaagaaagagaagcgagctaaaactggtgataatggtggtgaagaacctaacagagtggagtcgtctgacgatgacgaaggctcagatgacgatgacaagtccaagcaatgacacgtcaatttcgcacctgaagatgatttcggactctctggttgtctgggcaatgaaacaaacgtctgtacggttgttgtaacaggttacagggcgaatctggtgctgtttctgtaagaggatatgatattctgagcagagatggatagcactagataatttgctgttagtgttcatcattcagagaagtgacctgcgtcagtaccttttgttcaggtctatattatatcagctgccttttttggctccattttaccatgggctcaagagaaaatcaagcctcatttcttatgctgaaagaaaaaaactcgagggggggc

SEQ ID NO: 183127 - DNA, 554 bp, Zea mays
  Clone ID: MRT4577_98597C.1
gggggggggtttttttttttttttttttttttttttttttttttttttttttttttttttttttttttttttttttttttttttttttttttttttttttttttttttttttttaagcgggaagggcaaacccaacactcagggatcaaaggggggggggggggggttaattttccggttaaaaaactcatggaaccccgtttgttaatgtgccattgggagcccccatgaacgtcagttaaaaaaaaccagttgggccttgttcgtttttatcggattggggggttggaacaattcctaaccggattacttttttaattaaaaaaaactttgattagctggaaagattccgggtgcaatccgacgaaaacaaacaaggccttaattatccccaacatacataataagctacagttttaaaaaaaaacctggtttccgggggggctgtcacttggggttcctcaacacaaagatgaccgagtcccccctgaggaacattttggtgaaaaaattatccttgttaaaagggcaaagccttttttttgcccttgcca

SEQ ID NO: 183128 - DNA, 253 bp, Zea mays
  Clone ID: MRT4577_98598C.1
gactttagcctagcaattagcttagctactccagattggagaactcgacgccgtgaatgttctgatcgttgcccttgctctcctggcgctcgctgcgagcgccgtcttcagtacaagcggcggctgtggctgtcagacaccaccgtttcatctaccgccttcgttctatatgccgtcttctttctatctgccgccgcatcatcatccgtagcctatttatttccccactcaaccaccgtatttaatccctttt

SEQ ID NO: 183129 - DNA, 282 bp, Zea mays
  unsure (1)..(282): unsure at all n locations
  Clone ID: MRT4577_98599C.1
ggttttgggggggttgaaacgggaatttcagttctcatagcattatcatgaatctcagaacataacaggtgaaacacgaatcaagcagaggcgccatggggttcacagatccacacctaaaccgctaaattaaactgcgagcgatacatgtgggggttaggacagggggtcanatcaccaccatcttattcanatccaanagaaccgacccanggggagtcgncnatgacggggggggggcggccgttctgccctttcagnggggtctaggggagctgttcg

SEQ ID NO: 183130 - DNA, 620 bp, Zea mays
  Clone ID: MRT4577_9859C.1
ttttatttcttttttttttttttttttttttttttttttttttttttttttttttttttttttttttttttgggggggccacacaagcaaacccccttttattccttttttttttttttggaacggacagcacgcccttttttattcagcaacgaaacaaaaaaaggggcggcccaaaaaggaaggggggggcattattcttacctttggggggggaaagggcccctcaaacgggggagggaacccaaagggggtgggaaaacgggcccaaggggccccccccggggggggggcccaggggcagggactccagcccgagcccggggttggggggcccccacaccggggggccgtttttgaaggggttgaagggggggggggccaggtccaacccgggggggggggacacgtacagggccccggacggggggaacggatggggccccgaaaggggccccgccacaacgctgcccagggggggcgggaacagaagccacggggaggccgggctgaaacacacgggggggacccgctcctgggccgcctccggggggccctccgcccggggcaagaacacggggggaaacccggagccgtggggccgcaccaggtaaatgctg

SEQ ID NO: 183131 - DNA, 439 bp, Zea mays
  Clone ID: MRT4577_985C.1
ccggctcgttcgcccacgcgtccgttcactcttccgcccacgcgtgcactgtccggtcagattctttcaccctatacagtgactctatgaacatcttccgtaagaaggaattcacctgatctcatatttcaaaagtagtcagtgcttgatgaataatggtcttgcaatgcacgactcgatggtactaatgaaaacaatgcgcttgtattccttgaaggaactatctctttgtcagcacctcataatttgtccacttcaaacaatctgatgcttgaatatacctgcttctgaattcacatctaggcttactgacatcaattgaacctcttgaaatatatttaattatattctatcctgagagtttgtattttaaacaaccttttcctcaattaattacaaatatttaacccatttcttaattcaaattaatttatttaaa

SEQ ID NO: 183132 - DNA, 412 bp, Zea mays
  unsure (1)..(412): unsure at all n locations
  Clone ID: MRT4577_98600C.1
caagagnnaaacaacgcacgcactcacacgtcaacgactagtaatccgcctccacttctttatccatccattaaactgcaaaacccaatcgtatacaccaacaaattttcagcgcaccacaacncaaacaccccaccaaaccaaccaatattcacattcgtcaagcacacagcagccttcctagataacatcatgaactcttccatagtagacacccttcacacaactctctgatagctgacatcgtcgagactccgcagaactgatgccaagacttattggctcacagaagtgccggcaaaaccttcccggtgcaccttccaaaaccaatgttgtaaccttcacccttgcaacatcctctcaagatcacttcatctccatcttctatgaacttgcggaacaaattccccac

SEQ ID NO: 183133 - DNA, 448 bp, Zea mays
  Clone ID: MRT4577_98601C.1
aaaaacaaaaaggcgggggttatacaaaatgcaaacttactagcgcgaagcgaaacttccatgcttttttttgggggaccctaaatcaagagtagtaaccggccgtcaaaaaccacaggggaaaaaactcccgggtagtcaaatggacacttggccggggacctgaacccacacccgccggaggaaataggactccggggggcccatcgggggcacctaaaaaagaccggccgaggaactccggctgaggggcccccccatggacaccagcacgaacacggggttccggaagatgccctgcctgggtgaggccacggggtgcccacccccccaacgagcggtcgtggcctgtgctgcccttaaacacgggccacatggggggcttttacccgggaacgaccctggaggagacccccttggagaaaaagggttaccggatcacctttcc

SEQ ID NO: 183134 - DNA, 1015 bp, Zea mays
  unsure (1)..(1015): unsure at all n locations
  Clone ID: MRT4577_98602C.1
gcgatccccaggtcagtcgggactacccgcntgagtttaagcatataaataagcggaggagaagaaacttacgaggattcccctagtaacggcgagcgaaccgggagcagcccagcttgagagcaccagaagctcactcgctgctcgttgccggctgcccccgcccactccaccgctgatatttgtcatcgtctcgttcctgccctcggccctccccaactccagcaggcagatcagatacatccattcgcggaccggaaggaaaggaaagggttgaaccatgagcgccgtggctgtttcgtcgtcgctgaacccggacgcgccgctcttcatcccggcggcgctgctgcaggtggaggacttctcgccgcagtggtgggacctcatcaccaccactgcctggttccgcgaccactggtcccgcgagcgcgcccacctggacgagatggccgagcagatcgacgcggccggcctcctcccgacgacgaagacctcttctacgacgaccagcccgagcagggccccgccgccgccgcccttaagacagattcggtgctcaaggcgctgaacatgacctccccgaagggcggcggcgacgccccgcgggggttccgggagaaacccaggaacgccgagaagccgaccaagtacgccggcagccccaagagcagcgccccccgcgtgatccaccagcctcgctaggttcgctgggggaactcatcaggaaggctgctgcccctcttgcagccttgctcctggctgccgcctctgtcgtggtctgctctttcaagtcgaagtaacggtggttcgagttagtgaatagtgtggctcaactgtagaagttccttttgtatagcaagcaagtaaaaaaaatgaccaaaaaatataacaaaatgcagctgttagtttactgctgctctctaagtcgtgtttgttaagtaaccctagttaggggtatatgggcaaataccggccttgcccctgaggggtctcacatctctatataaggaacatg

SEQ ID NO: 183135 - DNA, 254 bp, Zea mays
  Clone ID: MRT4577_98603C.1
tttttcttttttttttttttttttttttttttttttttttttttttttgttaaattgttatagtaccacaaatttttttttaaacgccgatggctacactttaccatttttaggggttttgccctacactacccctaggctcccaccgggagggagcccattccctttttttcccacacttgcttggccaaaaccgtgtgggggctcacccctgtttttttcacccccaggcaaaaacagggcccggaagatta

SEQ ID NO: 183136 - DNA, 285 bp, Zea mays
  Clone ID: MRT4577_98604C.1
cccacgcgtccgatcacgcgtacgcatgaatctatccttgcacccatcatcttcgtgactctaggacatcgcaccagacgaactaagcatgtcactcgccacagctgctggtctcttctacatcctcgatgtcgatgcgctaagcgcggccgaggcaccggcagagataccgaaggcacgcactcctgacaaggcaccggacgagtcactgaaggcaggcaatcctgcagctgctggcaaggcacccgagtctgctgccactagaactgcccccgctaaggcacc

SEQ ID NO: 183137 - DNA, 1281 bp, Zea mays
  Clone ID: MRT4577_98605C.1
tcccgctcgctgctcgttgccggctgcccccgcccaccccaccgctctcgttgccgccggtccccgcggcccccgcccgcctccccccccgctccctccccacctccaccaggcagatcagagacagacatcaactcgcgcgaagctcactcactgctcgttgccggctgcccccgcggccccggccagtccatcccctcgctcgctccccaactccagcaggcagatcagatacatccatccattcgcggaccggaaggaaaggaaagggttgaactatgagcgccgtggcggtttcgtcgtcgctgaacccggacgcgccgctcttcatcccggcggcgctgctgcaggtggaggacttctcgccgcagtggtgggacctcatcaccaccactgcctggttccgcgaccactggtcccgcgagcgcgcccacctggacgagatggccgagcagatcgacgcggccggcctcctccccgacgacgaggacctcttctacgacgaccagctcgagcagggccccgtcgccgccgcccttaagacagattcggtgctcaaggcgctgaacatgacctccccgaagggcggcggcgacgccccgcgggggttccgggagaaacccaggaacgccgagaagccgaccaagtacgccggcagccccaagagcaacgctccccgcgtgatccaccagcctcgctaggttcgctgggggaactcatcaggaaggctgctgcccctcttgcagccttgctcctggctgccgccgctgtcgtggtctgctctttcaagtcgaagtaacggtggttcgagctagtggatagtgtggctcaactgtagaagttccttttgtatagcaagcaagtaaaaaaaaaaatgaccaaaaaatataacaaaatgcagctgtaagtttactgctgctctctaagtcgtgttcagtcatccagtgtgtctagtctagggaaaccccataaaaatggtgaaggtggaatcccatcccagtgtcataattaaggatgcacttcttctgtaagcaaatgtatgatgtacaatgggccggccggcagtctaaatgttacaactagctcttcttggtgaattcaccggtccaaaaaggcccctaaaaaaaaaaaaagaaaaaaaaaaaaaaaaaggcccctaaccctagttaggggtatatggtcaaatacccccctcgcccctgaggggtctcacatctctatatagggaacatgtcccccatcatattacagagatcagaaagaggccagaggccccaccct

SEQ ID NO: 183138 - DNA, 363 bp, Zea mays
  Clone ID: MRT4577_98606C.1
gtcgttatcttcgtcgtcgtcgtcgtcgtcatagtcctcctcgtcgtcgtccatgttgtcgctgtccgcgccgtcgattctgttatagccactgaccaccgcctgcgtctgctgctgctgctgctgcggcgcctgcctctgctccatcatctccttcataatgtcctctggctttaaatgtgcagcgttatgcaatcagcattggatcaccaaaacgaatagcaggtaccacatgtacggtgcagtttagctatggccacaccgacggcgcacatgcatgcgcctatgaggctgactggcttaccttcttcgccgccgaggccgcgccgccgccttcgccgacgaacctgctggctccaacgc

SEQ ID NO: 183139 - DNA, 2146 bp, Zea mays
  Clone ID: MRT4577_98607C.1
agagtcgtaaacttgatgaaaaaagacaagctgaaaaggagaaagcattatgtcatgcacgagccttaaaaccaactcatatgaaatcttctggaaacaccattattggccgcggaaaagatgagagaggctcaatctcgtaataatacgccacacgtcattttgtgcttcatggccttgataaggttttggaaggtggtgcagttgtcatgactctcaaagacagaggaacctgggagcctggggccaatgcttgggacgctgacatgcttgagaacattgagattggtgagcagaaacaaagagatgaagcttataaggcttcaaagaagaaaggaacttatgatgacaagttcaacaatgattcatcgtcaaaaaagccgatactgtcacattatgatgaccaaatggaagacaagcgcccgcggctcaaccccgggccgccgttctgtggtgaagatgacctctgtatgtattataatctgatcacactaacattgtggcatggttgagaaggttttgtaattcagtaatttacgtgtgcatccttgatctgccttgaacaccccagtgatggtacttaaaattaaaataacgacaccgtttccgtttcaataaaatgtagtgatgatgtgatctggatgcacttgaggcagaagcaattgcttctggattgggggccgctgatcgtgggtcgaggaatgatggaaagagacagtctgctagggaggaagaacaagcggctgatgctgaaaagagaagcagtggttatcaaactgccattgcaaaggctgaagaggcatcaagagcattgcgcggggagaaaactgcacctgctaaaccagctgaagaacttgttttcggtgatgattatgaagatctgcagaaatctctagagcaagcaagaaagttggccctaaggaagcaggaagaggcttcagcttctggtcctcgttccatagtcgaactggctactgcaaccaagagccaagaggaaacagaagccacagaaggagattcagaacagaataaggttgttatcacagagatggaggaatttgtgtggggactgcaattgaatcaaggaacacgcaagccagaagacgatgtgtttatggatgaagatgatgatgccatgccttcagataatgttgcaaaagatgacactaatgggttggcagagatggaagaggatgctctgacagaaataccagccaaggtcgaagaggatgaagtcaaaccagatgaggttatacatgaagttgcagtaggaaagggtttagctggtgctttaaagattcttaaggagcgaggaagcctcaacgagggaacagattggggaggcagaacaacagacaagaaaaagagcaagcttataggtgtcgaggatggacctaaagacattcgcattgaaagaatagatgaatttggcagagtgatgacacctaaggaggcattccgtcatctttcgcacaagtttcatggcaaggggcctggtaaaatgaaacaagaaaaacgccagaagaaatatcatgatgagctgaaaaccaagcatatgaaatcttctgacacaccattattggccgcggaaaagatgagagaggctcaatctcgtaatcaaacaccatacctcattttaagtggcaatgcaaaaacaggtcaaacaagtgatagcggcggctatgctaccttggagacagagcaacctgggagcctaacgcccatgcttggggacaaaaaggtcgagcattttttgggcatcaaacgaagtgccaagcctggaagcttacctcctccagtcccaaagaaaccgaagaactgaacctggtggtagcactcagccaacgaagcaggctacaacgcatttactgtgagcagcaatcagcccacaagcttccacggctcaaccccccgccgccgcactagaaatgcaatatcctctgtatttcttctaagctgattacactaacattctggcatgttcgatggggttttgtaattcagtgatatacgtgtgcatccttgatctgccttgaacatgtaagtgatggaactaaatattgttctaacgacacaccgtttccgtttgaataaagtgtagttatgatgtgacggtttaaggttaaaaaaaaaaaaaaaaaaaaaa

SEQ ID NO: 183140 - DNA, 354 bp, Zea mays
  Clone ID: MRT4577_98608C.1
cttccgggaaaaaaagggtttttttggcggcgttcactaaaggggaaccgttacacattacccccaaagttaccggcgcgatggtttaccaaccttccacaaacacggcgcaactggagtgaaaccccagggcgtcctttgtgcaagaattttatttaccagggctttggaaccttggggggccccaacggactttttgttgcccccggggcaaaggactttcctaaaacgatcaccttttatttcgcacccaccttgggcgtttcccgctttaccttaacccttgcgaggttttttttgaaggacgggttgaacccttcggtggtgaccttttcattccttttcccccaggcc

SEQ ID NO: 183141 - DNA, 340 bp, Zea mays
  Clone ID: MRT4577_98609C.1
aagatgcgtacggactgttgtatggaacctatggctaattggcatgctatctgagagcgaggttctacactggatagctagagctcatgcgaccgaatagatggtggatgcattgatggtagagaggacatgtcccaatatgtgaggctgagcatcactgagacaactcgatcactcataccagttatcaaggagaatgttaagagtattacaaattgacgagccaccataaatctcagctgtgacctacttgttcatgattgatgctaacctgaccaagcattccatgcgttggatgaagttgatttagctaactgattcttgatatgaggtctatgct

SEQ ID NO: 183142 - DNA, 309 bp, Zea mays
  Clone ID: MRT4577_9860C.1
gccggccggttcgggacataatttgttagggtttttatatagattattgagctggtggtggaaggatttaagtgttaaatatgacatacggttggatcacgatctaatggatcagatggtttgcttacacacttacacagaaggactgcttgcataacagtcgttgcctgattgtttgcgattgatggctctgttacaaatagtatatatgtgcaattgttctgtcacttgtgcaattgacttgcacgcccacaatcaatttaagctaaaaatttgagttgacaaaaaaaaaaaaaaaaaaggccccta

SEQ ID NO: 183143 - DNA, 685 bp, Zea mays
  Clone ID: MRT4577_98610C.1
ctttctcatacttccgctctcagggttcgtttcccctcggagccgaaaccctagccgccgccgccgaccaccgcgagcaagctcagatgggaggcaagtgcccacaccgcaaggtgaagaagcgccgtctcaactgcaagcaggtgcgccgcggcaagttcctcgtcaaagccgacgacgccgtctacgacgagctcgtcaagctggccgaccagggcaaggattccgagggcaaggcgctacccgtcgacgaggacctccccggcatgggccagttctactgcctccactgcgatcggtacttcgcggatgagaccgtaaaggaggatcactaccgctcaaagcgccacaagaaaagggtcaagcagttgtctgggccagccccacacacgcaaatagatgccgatctcgctggtggaatgggaatgccggacaatggcttgaagctcatgtcttcctgaacttcgtgatcgttgtttgatgttttattgctgctgctatacatctgtaccaactttgcttgatttgtaacttgcaaatagtctctttggtcgaagaggttaggattttatatttctgtgtctgcctcatgcttgccagcttttatctacattgagaacgagtgacttatctgcgtctgggacaaaatgtcaatgatttagcagcagatgatgcactatgaatt

SEQ ID NO: 183144 - DNA, 273 bp, Zea mays
  Clone ID: MRT4577_98611C.1
gtcactcgcaggtcccggaacaaataaatataagcccaaagatgatactggcaagcttgccaaagctgctgataatactggcggttatcgagcaacaaatactgcgaaaggaccacaaagtagtgtttcaaattacactcccactgttgatattggtaaacaagctcctgctggaaattctgatgatggatacagaagacttggtgctgctgctggaccacaaagtagtgtttcagaatacacccccactgttgatattggtaacaagctcct

SEQ ID NO: 183145 - DNA, 202 bp, Zea mays
  Clone ID: MRT4577_98612C.1
gtgacaagcacagtggacagcctcgacagccatgacctggaaggggtactagattgacgttcgatgccatcatagacgatggggaccactccagcctgatgtcgggcgccctgagcccaagtatcattcagaacctttcccatagctcctcccgcctcaccacgcctcggacgcccctcccattcccagcgctgtccatgag

SEQ ID NO: 183146 - DNA, 525 bp, Zea mays
  unsure (1)..(525): unsure at all n locations
  Clone ID: MRT4577_98613C.1
cggntagaagaaagagccaggggagaagaaggacggcgagaagaaggacggggacggcaagaaagacggcgagggggacaagaagaaggacggcgagggggagaagaaggaaggcggcgagggggacaagaagaaggacggcgacgagaaggacaaggacggcgacggcaagaaggcggcggcgccgccgacggagcagcagatcatggcggagctgatgaaccagtaccgggcgtactactacccgtacccgcacatgacctaccccacacactactacgtgcagagcatggaggagaaccccaactcctgcaccatctgctaaaaccatgcattctctgcaggttctggctgctgccatgcacgaggtaattaaaagttaaacccgattattagttactagtagctgtgtgcatgtatatatgcgtactagtacacaccttatggcacggacgatcgatctaagaaggtcaaggtgatgttgaaccgtgcattttgtgacgtgtaagaagaaaaagtttaccg

SEQ ID NO: 183147 - DNA, 432 bp, Zea mays
  Clone ID: MRT4577_98614C.1
ccctcgaggtctttccgggccgggcatcaccaccactgggtcttcagaccttagctttatctactccagagcgcggaggaacccgatcgacaccatgagggtggtgctcgttgccctcgctctcctggctctcgctgcgagcgccacctccacgcatacaagcgggagctgcggatgccaaccaccggcgccgggtcatctaccgccggcggtgcatctaccacctccggaggacctgccacctcctgtgcatctgccaccgccggtccacctgccgccgccggtgcacctgccaccggcgatccatgagccggcgacggttgatctgacggcgacagcatgccactaccctactcaaccgaccaggccttaggctcatgcccagccacacccatgcccgagcgaacagccgcattcaagaccgtaccagat

SEQ ID NO: 183148 - DNA, 348 bp, Zea mays
  Clone ID: MRT4577_98615C.1
gttgcctacattattggttatggtttttttatttttttggtggttttgcagcaacacaacctttgaacaatatgcagccgcgatgggaaccaaattttggggaaacaagatcacacacagggtactttagcctgccgcgatgtgcattaatggcatttgcatggggcttttgctaaaactggaaattggtggaggggctctctccgttttggcgttatgaaactaggaagggctggggggaaacaacttgttctgttaaacaactcgggagggttgggttaccatacactgggagcaaaggcggttttttttcccatgaaaaaactttgggggggaaaattccctttt

SEQ ID NO: 183149 - DNA, 284 bp, Zea mays
  Clone ID: MRT4577_98616C.1
agccaatgcgtactgaactcggtatagggcctcacaaagttccaggccctattcgagcatctcgttctgtgaacgatctactgatagtcatcggactatgccttttatgcggcccatcaggtcaggtatccccacggccacttcgatgagacctgcgatggcaactgctgaaccatcaacatccagtcttgttcacgctgcctgaacatcagtgacatgagattcggcagcgtcaccagtgtcaacaatagcaagggcgccggtatccgatgctgacacgaaag

SEQ ID NO: 183150 - DNA, 320 bp, Zea mays
  Clone ID: MRT4577_98617C.1
cacaaccgaataaatggttatgaaaaaaaaaaaaaaaaaaaaaaaaaaaaaaaaaaaaaaaaaaaaaaaaaaaaaaaaaaaaaaaaaggggcgggcggtctatataaaccaaccaaacttacgcacgcatgcaagcgaataaatattttttagatagagctaaataaaattaattggccggccgttgacaaacaacggactgagaaaaaaaagccgggacccaactaaattaattggcaggaaatacatctttctttagctggctgaataaataagaaagaggcacggatcgaccttcctaacaaatagtcagcctgaat

SEQ ID NO: 183151 - DNA, 389 bp, Zea mays
  unsure (1)..(389): unsure at all n locations
  Clone ID: MRT4577_98618C.1
cgctgattagtgtgcaattctacgcagatttatgcattgtacactctcctgatgatgtgcactgattttcatggttgcagctgcccagcaatgcttgttataccatttcttgcacgccatctctgcggtggtgctccttcctcctatgcgtctttttaccaggcgcctattgccccgctgaaccgacccagtgcctacgcgacccagctctcaccctagcttatccccatcttcttccccatcttccctgcactccgcacactcaccctgaccaacatgttcgatctcntccacactccacatctccctatcacaatacttcctattccccggctttccacttcttgtcaaacatactgaatttgccgccctacttgcacatgtttttt

SEQ ID NO: 183152 - DNA, 159 bp, Zea mays
  Clone ID: MRT4577_98619C.1
atttttgggttttaaaagacgtgtaccgcgatatcacctctaaatggaaccgacaggaagcagacctcacgagctattaactgcccggcccgctagtcatacatatatacacacactacgcagtcaccgtattccataagcaccattcgaacaaaccat

SEQ ID NO: 183153 - DNA, 174 bp, Zea mays
  Clone ID: MRT4577_9861C.1
tataataacaattatatacccataccctttacatcaaacatgataaatatcaccatacagaacagttatttatcaaaggtcctaacatattccactttgacatacgtcaactatactacactcataactaaaaatgaatcttaatatcctaaaaaacacaaatatatttctaac

SEQ ID NO: 183154 - DNA, 695 bp, Zea mays
  unsure (1)..(695): unsure at all n locations
  Clone ID: MRT4577_98620C.1
ataaaaactccactgaatgcaagtgatgatttgaatgcacatatgcaagacatagtgttaaatcatggtacggattgtagtcctggtactgtgacatcccaaggaaaggaaggctcaagcttgctggaacctggtaatggtatctgcactggggttacatgcggatccccttcagtgattagttgcgctgaatcgtttccccaaggtggtggaaatggcagcaatgatttacttgatcacacactatgtgggcaatctgaggatcctaaagaccgtggggcctcagctgatgctactcagagatcaaaacaatgctgtaccagaaacatgaaatctgctcctggttctgaggagactagtgcagcaggaggtgatagaagcttttcatttgaggtgggagctccacccaatgttgctgagaaagcacatagctctgtttggagtccttttcatttgaagagtactgagacggtcacagaaaatcttcaagctggaagttctttgaaggatactagtgatgatagtaagaaaacatctactataggtgcttgtaaagaacaactatcagaaaggaaagtggctgatagttctggnggcagccccccagacaactctaatataggcggcagcattaagagcagaagttcgccaccgcagcagcatccaatccctgaagtgtctgatttagtgaattt

SEQ ID NO: 183155 - DNA, 302 bp, Zea mays
  Clone ID: MRT4577_98622C.1
ccacgcgtccggacacgcgtccgcccacgcgtacgctgcaattggaggcggcaccccgcgggataaggcatcgcagctcggtgtgactctctcacctctcccaacggtcacttttgggcatccgcattgtctccactgggggctacctcgttgccgccctcgtctgtgctgcgccgcacgtcatgccagggccgtcgccgtcagggcttgctcatcctttccatcaccggactcttcatcctgtgcgcggatggaggaggccgtctagaagacgggggccgacaacatcgttgtcatctact

SEQ ID NO: 183156 - DNA, 387 bp, Zea mays
  Clone ID: MRT4577_98623C.1
agttcatctttctttggatatcgaggaattcaagcacaagggatcccacaaatcttttgttagatgtcttcctagttcacagagaaatgtaacagaaattagtcacatgcaacctgttgcaaggggacttcaagtagataagaccttcagtgataaagggtcgtgtcatgccagcagaactgtttcaggaatgcccattcgacctaagtattatctcagcagtcccaacaacaatttgaagagtcctcccactgtaaagagttgtagtcagatgagtgatttcagttatcgactggtcagaagtgctaaaaggtcagcttctccaagaatgggtttaaccagcacaaactactccctttatgagaaaatgtctttgctacgtcaacg

SEQ ID NO: 183157 - DNA, 385 bp, Zea mays
  Clone ID: MRT4577_98624C.1
ggcaacttcttagctacacacaatctcatagagactatgagagaacggatgtttaaacctgctttgtcaaccattatcacagagaacacagaagtcgcaactgtttccctttcagatccagtttgtgtagcagcacggaaaatgcgtgagttacaagttaattcagtcattattactgctggaaatttgcttgatgggatctttaccccaagggatgtgctgatgcgtgttgtggcccaaaatctttctcctgagttaactctagtagaaaaggtaatgactgcacaccctgactgtgctacattggacacaacaatccttgatgcactacatatgatgcatgatggcaaattctggcatattcctgttcttgatggagatgggc

SEQ ID NO: 183158 - DNA, 364 bp, Zea mays
  Clone ID: MRT4577_98625C.1
gagcacaacctcaggaccaacttcgggaacgacggcgggggcacctcaagtactacaacatcactgacctggaggccaaccatattttcctaaagggagggtaaaaaaagctggcggaaagaaagaacaaacctctcacctggaaaaaaaagttacccgccaaaacctcaaaaaaaaaaaccggagggacccaaagagggtcctgccgggcgtgactagggaggcacccaccgcccattttttggggggcaaacccggcccgctaaccagaaaaaaaacccgcccatccccctgaaaaaaggaatcggccaacggggggagagagggggtttgtttttcgccagccagggggttttttttttac

SEQ ID NO: 183159 - DNA, 228 bp, Zea mays
  Clone ID: MRT4577_98626C.1
attcaaaaccactttttttctttaaacaaaagggccttccaacctccaaggaaaaaataaataacgcacggtgttagacttttaaggtttatgggtttttgggggatcaaacgaccttcgtggtgttgcttttgtactacaaaaagggttgtttggcacactcattcccaaatttgcccgaactcagtaagattgctctattcttcgttgggccagggccgaaattag

SEQ ID NO: 183160 - DNA, 495 bp, Zea mays
  Clone ID: MRT4577_98627C.1
ccatccggtggtcttgcattattgccctcctcacgcaacgtgccatcaccgcgcagctgcgggaggtgtcctgagcgaagcacgaacacgccgggagagcctgggagatcagacgacctcaatatgaatgacgccagtgtattcaagcagatccagtagatggtgcggcacatccgatatgtagtcagctaaaaagccagccagatctccttacacgtcctggaggagatccaacattactagctgtctgatagatatagctgtaaaaaagataaacatgcaagagtatgaacccaaagagaagcggggtgcagttctcaagaaaattgagtacactatgcagatgaaagctttgccatgaaagagctatatgctcatgatgaactagcctgcaagatgaaagacgatcccgtgaaagaacttttacttgtcagccacaaccaccatgaatacatgaaccttgtgacatgacctaatcattcagggtattgctcc

SEQ ID NO: 183161 - DNA, 779 bp, Zea mays
  Clone ID: MRT4577_98628C.1
agcatgaatctggaacgagaacagttgatcagaatgtttggggggagatccgcaacttcaagaagtgtctgctgaagatgtttgcacagcaggacaaggatgtgttgtttatggagactgtcataagcctggccagacaacggagacactgcatgattgagtgcattcctgtcccttgtgaagtgtcaagcaatgccccaatgtacttcaaaaaggctattgatgaagctgaagaagaatggacccaacatgagatgaagaaggttatcccgacaagtgcaagccgcaacttgaggcaagtcatcccggagaactttgcctacttccatgtggagttcgggctggaccgtggctttgttcatgtaatagatgacgagagcaagttcagtgctggatttggattgaatgtcattagagggatgctccagttgccagaggaggacatgcaccgtcgacgaaggcacgagtccatggataaccagaggcaggctgttgctagcttcatgaaagactgggagcccttcgattggacgaagcaacttgattgaatgtgaatacagttttgagaacgctcgaagaaaaacttgcacgacttgtactaaaagattttgtaggaaacttgtattgatgttatgctatcactttattttgtttcccaacatatatgtttatttccccagaaactaacaggcgcatgttctagctgtaaaatgatatcgactgagcaatgactgtcatttaaacttgcataaaaaaaaaaaaaaaaaactcgagcccgg

SEQ ID NO: 183162 - DNA, 1988 bp, Zea mays
  unsure (1)..(1988): unsure at all n locations
  Clone ID: MRT4577_98629C.1
gaccctcgggctttccgggagtacaccacctatatatcctcctcctcctccatgactactctctgctgtgctgcgcaggtgcaagtgcgacccaacccagccgggaaaggaaagaggaaagggagggagggaggggaccgttgcagttgcagccattgatgcgccagcagtagcgccagcagagcggagcggagcggcaccggcctgcagctcagcgccaggctcaagagaccgatagggcaagggggttaagcatggagcctgcggcgggacggagagcgagatgtctgctgttgcctctacttgtgggggctctcgccctcgcattggccggcgctgcgactgcgaccgcgtggcctcaccctcacggcggcgccgccggtcttggacatggcgctggcgccgcagccgcgggtgcgggcaggccgggcggcgccgagcgctggtacagggatctcgcgctcaggaggatggagagcgtcagatcctccttcggggccagaagagatttggcgacggcttccgcgagcgcgcgggtgtaccacgtgacggactacggcgcggacccgaccggcgccgccgacgccacggcggcgatcagcaaggccatagctgacgcgttccgcccgcccaccaacgccaccatgaccggcggcatccccgacctcggcggcgccgaggtgcacctcgacggcggcacgtacctcatcaaggggcccctcacgctgccggcatccggcggcggcaacttcaagatccacagcgggtcgctgcgcgcgtccgacgacttcccgacggaccggtacctgatcgagctgtcggcggccaagagcggccggagctacgactacgagtacgccacgctgcgggacctgatgctggactgcagctaccgcggcggcggcgtggcggtggtggactcgctccgcgtcgccgtcgacaactgctacgtggcgcacttcgcgtccgacggcgtcgcggtgcgcggcggccacgagacgctcatccgcaacacctaccttggccagcacatgacggccgggggcgacccgggggagcgcggcttcacgggcacggccatccgcctcgacggcaacgacaactccgtgtccgacgtcgtcatcttctccgcggccacggggatcatggtcaccgcgccggccaactccatctccggcgtgcactgctacaacaaggccacgggcttcggcggcaccggcatccacctcaagatcccgggcctcacgcaggcgtggatcagcaactgctacatggactacaccagcatcgtcgccgaggaccccgtgctgctccacgtctccggatcattcttcctcggcgacgccaacgtcgtgctcaaggccgtcagcggcgtcgccaggggcgtccaggtcgtcggcaacatcttcagcggccgggacaagggcgtcgacatcgtgcagctggacggcgccttcgccaccgttggacaggtgtacgtgcagcagaactccgccacggggatgaccgtcaggtccacctccgcgcgcgcatcgctccagggcaacgggacctcctggacgctcgacttctcgccggtgctgctgttcccggaccgcatcggccacgtgcagtactcgctcgtcgccggcgacgagttcccgggccacacgctccggaacgtgtccgggaaccaggtcgtggtcgccaccgacaaggccgtctcggccacggtccacgtcttggtggaccagaacagcgactgagataagataagagacactcgagagtgcctgcgtgcacgcagtatgcgtgctgctgcctgctcgcgcggctgctgcggagcaaggcgttattccttcgtttctttcttcttctcggaaatttcagccattcatgtcgtcgggaagatgacaattgtttgatgcgacaaaatgctccagaatgtatcattcttttgctgtatgaaatgaaatgattcagaagctccaaaaaaaaaaaaaanaaaa

SEQ ID NO: 183163 - DNA, 519 bp, Zea mays
  Clone ID: MRT4577_9862C.1
ctcccttcctcctctattgtacaggttgctgcctgtcggccctggggtactatgaaccatccagccatggctgccaagctgactcgcctaacagtcttagcgctcgccttgtagcaccttctcctcccatcccaatgaactgatcgcactcttttccaggtatgttcaccagcagcaacgggaatgctttatcgccatgacctgctcgcggagtttgctgccctgtttgatattgacgaggagaactctgctccctttgaagacattcttcgggctgctcactaagcctccccctccccccatgggtatgccctggtatcatgccaaggcctggagtgtgagatacacataccctagaatgtaagtgatctgactgcgtaggagctgagtgtgtctgaatacatgacattgaaggaatagctgctggctggacaatccaccatatctctgcgctggagcttgagtctgagcccttcaatgcctcctttcctcgcacttgcatgatcgacactccatctg

SEQ ID NO: 183164 - DNA, 2628 bp, Zea mays
  Clone ID: MRT4577_98630C.1
cccacgcgtccggacctcccttccacttaaaccacgccaaaaaccagctcgcgattcctcccactggcctgaatctgacccgccccgccatccccaccgccgcgcctcttccgggcagccatggacgaggccttcgcgcgcgcggtggaggacggcctcaagctcaccaagcgcctcgtcctgcccagcgggggcgggatgccgccgccgccgcgcccgcacctggcgatggaccgcgacgaccccgccgcggcgctgcagcagctcatgccggcggcgcccatggcgtacgccgtcgtcgtcgacccggccgccgtcgacagccccgacgtacccagctaccagccccacgtctacggccgcctcgacccgcccgcgctcatcccgctccagatgcgggaggtcgagctccgcgtcgactgcgccgccggctgcgccaccgccgaggtcgccctgcgcgcgcgctggtggctgcactgcatcacgcgcagccgcgcgtgccactgccgcatcgtcgtgcccatggctcaccagggttcaattctaggcgctgaggttactgttgggaaaagatcatacaatactcatgtaattgatacagaggataactgttcagtgaagattgcaatgcccgagagtgggggtcttttaaaacaggaatttttttccttgacaataccacaggttggaggtggagaagatatatttgccacaatcagatggtcacaaaaattgctatatgacaacggacaattttctgtcgaagtaccatttcgtttcccgcagtttgtgaaccctttgccaaaggttttcatgaaaaaggagaaaatacagttgattgtgaatagtggtgtgactaaggagattttattgcagggaacaagccatcccttgaaggaaaaaagtagacaaggtgagaagttgtctttcctgcatgaagcagttgttgagaattggtcaaccaaagattttaccttcgcatatactgtttattctggtgatttgtctggtggagttcttgtgcagccctcaaccttgcgtgactatgatgacagagatatgttctgtctttttcttttacctggaaataacgagaacagaaaggtcttcagaaaggctgttgtttatatcattgatacaagtggaagcatgcaaggaaagcctcttgagagtgttaagaatgccctgtccactactctctctgatcttattccaggagattacttcaacataataacatttaatgatgagcttcactcattctcatcgcgtttggagcaagtaaatgaaaaaacaattggaaacgctattgaatggatgaacttaaactttgtcgctcagggtggcactaacatcatgcatcctttgagtgaggcaatgactttgctgtcaacttctcacgatgcgcttccacaaatctattttgttactgatgggtcagttgatgatgaacggaatatctgccatacattgaaaactcaacttattaaaagtggatctaagtctcctcggatttctacttttgggctaggttcatattgcaaccactatttcttgaggatgttggcatcaattggtaagggtcactatgctgctgcatttgatacaggatcaattgagggtcgaatgcttcaatggttccagaaagcttcaagcacaatagtgtcaaatgtttccattgatgccataaagcatattcaagattttgaagtggattctgtatatattccagacatttcagcaaaatatccattgtgtgtttctggaaggtacaatggcaagcttccggagacacttatcgccaagggtcacttggctgacatgagtgaaatatctattgaattgaaagtccaacatataaaggatatacctcttgataaagtattggcaaagcaacagatggatcttctcacagcaaaagcatggcttatggagaacaaggagcttgagcgaaaggttgtgaaattaagcatacaaaatagccttccttctgagtacacacgcatggtactacttcaaaccagtctggacaaaatagatccagcacaacaggcgaagaataaaccaacgaaacagagcagtagcccagatgagctgccagcgatgccgctaggtggcctagcggtcggatttggcgacgtagcggcaacaacagagaacctgacaacaggattcggagacatgaaagcagccgagaagtttgtgatgttggagaaggccgctggctgctgcagccgcatggcggactgctgctgctgcatgtgcttcatcaaggcgtgcagcaagatgaacgaccagtgcgccatcgtcatggcgcaggcctgcgccgccctcgcgtgcctgggatgcttcgagtgctgctcagagctgtgctgcggcgggcccaactgagtgaggccacagcaaccgagcaagttggtgagaatgtgttgttgtatagtgatgtaaatgctcccagtaatgtatagaatttggcatcacgtacgtgtttatctaacttggcttgatcagtaaaagcgtcacgtgtgttaatcactgtattaagggacagaacagaagcgcacacgttccgttagctttgtgcaaatccttcagatcaatgctgcaaaaaaaaaactcgaggggggg

SEQ ID NO: 183165 - DNA, 178 bp, Zea mays
  Clone ID: MRT4577_98631C.1
ctctccataccgtcgtcgccgccgccagccagacacctcgcgctgcggaggggaacaaaatcctgctcttgacagcacgctgaaaaccatgcccttcgacggcgggggagggccctccagcatccgaagcaccatcaacccggcgctggagccgggggaccctaacgccaaccaacac

SEQ ID NO: 183166 - DNA, 630 bp, Zea mays
  unsure (1)..(630): unsure at all n locations
  Clone ID: MRT4577_98632C.1
caggcgctgaggttacatgttgaggaaaagatcatacaatactcatgtaattgatacagaggataactgttcagtgaagattgcaatgcccgagagtgggggtcttttaaaacaggattttttttccttgacgataccacaggttggaggtggagaagatatatttgccacaatcagatggtcacaaaaattgctatatgacaacggacaattttctgtcgaagtaccatttcgtttcccgcactttgtgaaccctttgccaaaggttttcatgaaaaaggagaaaatacagttgattgtgaatagtggtgtgagtaaggagattttattgcagggaacaagccatcccttgaaggtattaaagtatttatttttttacttcacaagtcacaacatatgattaccactcaatcttctgttgtggttttaggaaaaaagtagacaaggtgagaagttgtctttcctgcacgaagcagttgttgagaattggtcaaccaaagattttaccttcgcatatactgtttattctggtgatttatctggtggagttcttgtgcagccctcacncttgcgtgactatgatgacagagatatgnttctgtcntttntcttttacctgggaaataacga

SEQ ID NO: 183167 - DNA, 291 bp, Zea mays
  unsure (1)..(291): unsure at all n locations
  Clone ID: MRT4577_98633C.1
gggcataccttttttctttgcttgcggtaaagctgatacatgtcatccttgaaagagtttccatgaatctgtttcaaggaaactcttttgagaagaaactttcagttcttttcggaatgcgttcagaggcaagtccacttttgctattcaacttacaaagcgtgatacatgttatttttccttcttattccttttaactgcttgcagggtggcaataagggctcaggtgatggtgggccngtgggncccggnnnacggcgtggggtncgnacccgggaaaattnccggacc

SEQ ID NO: 183168 - DNA, 661 bp, Zea mays
  unsure (1)..(661): unsure at all n locations
  Clone ID: MRT4577_98634C.1
ccacgcgtccgatcatgaaaaacgatgctcctgctagaataatccccatacctgctctaaatccttatcagggccgctgggctatcaaggctcgagtaactgccaaaggagagatccgccggtaccataatgcaaaaggtgatggcaaagtgttctcttttgacctgcttgataatgatggtggtgagattcgggctacatgtttcaatgctcttgttgatcgcttctatgaagttgtggaagttggtaaggtctatgtggtatctagaggaaacttgaaacccgcaaagaaggactacaaccatctgaataatgagtgggagattttcttggaacctcagtcaactattgaactttgtcttgatgagaacagctctattcctgcccagcggtttagcttctcatcgattgataaaattgaaaattcagagaacaatgcaattgttgatgtcattggtgttgttacatctgtcaaccctagtactacaatacagaggaaaaatggtatggaagctcagaaaaggaccatcaccctgaatgatatgtctggncgaagtgttgagcttaccatgtggggtgacttctgcaacagagaaagctcgcagctgcaagaaatggntgaatgtggggcgtttcctgtgctcgcttgcaaagctggaaa

SEQ ID NO: 183169 - DNA, 281 bp, Zea mays
  Clone ID: MRT4577_98635C.1
tgctcgagacgagagccagctctcccatcacacgagcacatggcgttcaccaccctgggagctgtcttcctggtcgtggctgcgtccggaacgcccgctccggcttggttaacctgggaaccggaaggcccttttaaccttgaaccaggccctggggaacccggaaccgctgccaactttggacccaagcgttgcccgactgctgttcgtgggaccacctccggtgtaacgaccccggacccgtgaccaacgggttcatggacggtgcggacaacttgcgc

SEQ ID NO: 183170 - DNA, 265 bp, Zea mays
  Clone ID: MRT4577_98636C.1
ggttgatggccttgtacacccttcagaagccttgggcatgaggtttgatgggcatctgtatcaagtggagctcgtgctacatctttaggacgtgtttgttcccttgtatatccgagaaattccataggtttgatgtttagcgtctggtgtagtaccatgtcacccaggttttcaacattgtaaggatactccagatggtgcctaacggtcgtttgcgcatggatgcttgcgcacagctgtcgctgatctgtgaaaggaacagtga

SEQ ID NO: 183171 - DNA, 185 bp, Zea mays
  Clone ID: MRT4577_98637C.1
gtgaataggaaaggggtggcatgtgtgccaacaggatgtatccatgtatcgtgatggtgggtgccatgtgggcttgtattataaggagtgcggtcactagttaaaccctgagagttgtggataaagacatcaagaaataaaaggaaaagaaatatctgagcgctctgctcaacttggctcgcaca

SEQ ID NO: 183172 - DNA, 752 bp, Zea mays
  Clone ID: MRT4577_98638C.1
ccggccgggaaaacgcttccccgacgcctgactccaaaccctttcgcctccgccgccgcctgatagctccagcgccctcgccgtcggctgcccggctgccgtcctcccgctacgagctaggcatctccttcgccgatccagcatgggtaagacacgtggtatgggagctgggcgcaagctcaagacccacaggaggaaccagaggtgggctgacaaagcctacaagaagagccatcttggcaacgagtggaagaaaccctttgctggatcatctcacgcaaaggggatcgtcctcgaaaagatcggcatcgaggccaagcagcctaactctgctattcgtaagtgtgctcgtgttcagctggtgaagaacggtaagaagattgccgcctttgtgccgaacgacggctgcttgaactacatcgaggaaaacgatgaggtgctgatcgcggggttcggtcgtaagggccacgctgtgggagatattcccggtgtccgtttcaaggttgtgaaggtctcgggcgtttccctgctcgccctcttcaaggagaagaaggagaagccgagatcttaaaaaccctatccccctcgccacaaatgaatcatgtaatgcttttggagttctgggacctcatgttgagaacctagcgattgttttgccatagttttgtttagaagattctgaattgaattctatatccgtaaccgcttgccagtgcgtgatctgtgttaaaaaaaaaaaaaaaaaagcggcc

SEQ ID NO: 183173 - DNA, 923 bp, Zea mays
  Clone ID: MRT4577_98639C.1
agtatttcgtgtgggccgtgtactgagaacagcacgaaactaggcctcactcagctgacccaaaggccttggcccatttactccaaacaatagccctaggccctatttcagagcagaagccagaagggatacaaaacgcttccccgacgcctgactccaaccctttcgcctccgccgccgccgccgccgcctgatagctccagcgccctcgccgtcggctgcccggctgccgtcctcccgctacgagctaggcatctccttcgccgatccagcatgggtaagacacgtggtatgggagctgggcgcaagctcaagacccacaggaggaaccagaggtgggctgacaaagcctacaagaagagccatcttggcaacgagtggaagaaaccctttgctggatcatctcacgcaaaggggatcgtcctcgaaaagatcggcatcgaggccaagcagcctaactctgctatccgtaagtgtgctcgtgttcagctggtgaagaacggtaagaagattgccgcctttgtgccgaacgacggctgcttgaactacatcgaggaaaacgatgaggtgctgatcgcggggttcggtcgtaagggtcacgccgtgggagatattcccggtgtccgtttcaaggttgtgaaggtctcgggcgtttccctgctcgccctcttcaaggagaagaaggagaagccgagatcttaaaaaccctattcccctcgccacaaatgaatcatgtaatgcttttggagttctgggacctcatgttgagaacctagcgattgttttgccatagttttgtttagaagattctgaattgaattctatatccgtaaccgcttgccagtgcgtgatctgtgttaatattatctttccgtggtatcttggtaaaaagaaaaaaaaaaaaaaaaaaggcccctagggcc

SEQ ID NO: 183174 - DNA, 247 bp, Zea mays
  Clone ID: MRT4577_9863C.1
tcggaaccgattcaggttctaagcatgatcaagctgggctatgaaggtgttgtggcactggtgggtgacgatatatcactttcaatcggtcctgaccagattgaagctctgtatgagttggccaaattttagtacgagtgtcgtaactacttacgggctgttgatttcttttaccagtatggagcctttggcacaaaccgtgatcgatatttgaggcccctttgctgaatactgcgtaaacaaatgc

SEQ ID NO: 183175 - DNA, 649 bp, Zea mays
  Clone ID: MRT4577_98640C.1
gcacccgccccttcgggcgccttatccctgaggtaaaaaggatgaatatttggtcatgccatattaaaattcagtacaggatttgataaatcattcagcataattagcgcttgaaggattcaatctctcacaaaacaacaaaacagcagagcaacaaagcaatgatcgggcgaagcaatggagtttgattgtagtaaggtactaaggtggctacctcatcctcggactaagaatcagaactgccactggattcttcctatttttacgaacaaattatgttgagaaagaacagctatcaaaggtgcatgaatgaagaaacaagtgcaacatatgaatccccaaataaattacatcttctggttcatcctcgtcagaaccactgtcagaactgcttctcgctgtcttggtcagtcagaataatgagccttccactgtcaccttctagattaaagatttggtggttctcaccgataacactatatgtatatcctgttcaaacttttggaaaacttaaagcgttcagtatttagtagtttcataatttaagaatttaaaaagactaacattgatgtatcaaaaagactatgtacacttatttctgggtgtactccatatgaaccgccaaaagcaggaagggccaagaaagggg

SEQ ID NO: 183176 - DNA, 417 bp, Zea mays
  Clone ID: MRT4577_98641C.1
aattttgtattttcaattttattattttttttttatgtttttttttttattatttttgatttgtttacttctttatttttcatttttttattatttttaaaagaactaaacaccgtccccaataattttcaccacaagggagaatacatcatacacaacagcggggtgaaggttcaattaaaaaggacttcttcatcaaatttctctaattgtaacagtccagttccaatccttccgcctaaaccaaaagccaggtttcccacgtacgaagactggcacaatccccatcgaggatttgcaatcaaccgtgcatcagccaatagaacccgaggtccttgtcatcgacgacaaagtcacccttcaaaaccccacagtaagccgcaacgggccaaaaaaaaaccccggggaagaggcggc

SEQ ID NO: 183177 - DNA, 250 bp, Zea mays
  unsure (1)..(250): unsure at all n locations
  Clone ID: MRT4577_98642C.1
aaatttttggtttngcaaccaaattatattattctttgacatnaaaccaaacaaacanctnggcggagccactttaacagaagaccaggcaaatctaaatcattctaaacaacaacgctgcaacaagggcaggtctttttttcccaggaagaagcagcaggcttggaacacgaaaaccagcatccatccatcattaaacaactagagaatcgaaacatatcatgcgggcataacatctagagtatgtgct

SEQ ID NO: 183178 - DNA, 467 bp, Zea mays
  Clone ID: MRT4577_98643C.1
tttttttttttttttttttttttttttttttttttttttgggttttggggtttttttacccggggggaaagggggtaaaattttttcggaattgacatacacaaccctttttttggggaaaaaaacaagcagctcctggcctaaaaaatcgggcagaggcccaaaacacatccttttaaggggggatacaaatgctttccctggttatcgggggcatggactttggaataccatagattccctaccaaaacaccaaacgggggaaggaaggaaaccttacaaaacgtacatggggatacaacactaaaacaaggggtccaaacaattagcacgggacttatcactgggcctgaaccccgggagggaaacggggaacggtcccccccacaagacaactgaactgaactgaactgcccagggggggggggcaaaacaaaagaactggggaaaaaaaggccggcgggttc

SEQ ID NO: 183179 - DNA, 134 bp, Zea mays
  Clone ID: MRT4577_98644C.1
atgcgtccactacaaaacgattcctttccatcaccatcgttgctgatcgagcccgacttctacaggcgggactagtattttactttggatgtaacaaaagtatacagaaaccttatatactacaaatttcatga

SEQ ID NO: 183180 - DNA, 716 bp, Zea mays
  Clone ID: MRT4577_98645C.1
gcccttcacacatcgtccgcggaaatctcacctcgctctcccctatcccgctccactcctccataatgccgctccgcgacggctgccggcggcggctccagcgcgcccgcggcctctgtctcgccgcggcgctgtgcgtgctcgcgctcgcgctcgcgtcggacgcctcgccggcgccggtgtcgctgctgggcatcaactacggccgcgtgggaaacaacctgccgccgccgcgggccgcgctgcccctgctccagggcctcggcattgcccgcgtgcggctctacgaccccgagcccggcgtgctgcgcgccttcgccaagaccgggatcgagctctacgtcggcgccccgaccagtgcctcgccgaggtcgccgagccggccggcgccacgtcctggctcaaggacagcatcctgccctacctgccggacaccaagatcgtcgcgctcaccgtgggcaacgaggtgctcacgggcaacgacaccgcgctcacccgcaacctgctcccggccatggagtccctccacggcgcgctcgccgcggcaaacctcgacaagcagatcgccgtcacgaccgcgcacaacctcggcgtcctcgggacgtcctacccgccctcggcgggggccttccggaaagacctgctccagaacctctgccccatcctcgacttccagccaagaccggttcgacgttcctggtgaacgcctaacccta

SEQ ID NO: 183181 - DNA, 297 bp, Zea mays
  Clone ID: MRT4577_98646C.1
agaaaagcacaatagtggtcccaacaatggcagcccaaaaaatttggcttcctaatgctcctgggcttttttgaggtctgttaccgaaccattttccacatgctcacagctctatacttcctttttcccatactttacagggggtttcagttggaaaccaattttaacctcagatcacaggcatgagcaggatttaccttataccctgtcctcacaccgcagcctatacagagtaccttgggatttgtgcacaaacataagccaacactacacaactggctaggaacctgtgctact

SEQ ID NO: 183182 - DNA, 361 bp, Zea mays
  Clone ID: MRT4577_98647C.1
cccacgcgtccgggagccaggacccgtgtaggagatggttctcgccatgctgggggctctgcacccccgggctgggctcagcctcttcctccacctcatcctggcagtggcactgcttcgctcccagcctctgaggtctcagcggtctgttcctgaggcattttccgcccccctggaactctcgcagccactttccggcctggtggatgactatggcatcctccccaagcacccaaggccgcgagggcctcgacccctcctgtctagggcccagcagcgcaagcgggacgggcccgaccttgccgagtattactatgatgcacacctatgacccaaggccctcataaagataccatgtgtg

SEQ ID NO: 183183 - DNA, 374 bp, Zea mays
  Clone ID: MRT4577_98648C.1
gattatgaaagaattgattgtcagtttattccatttcttcttctccctcaccctcagcagtctcaataccgacttcttcgtagtccttctcgagagcggctaagtcctctctggcctctgagaactctccttcctccataccctcaccgacgtaccagtggacgaaggctctcttggcgtacatcatgtcgaatttatggtcaattcttgagaagacctcagcaattgcagttgagttggaaatcatgcagactgctctcatgaccttggctaagtcaccacctggaacgacagttggtggttggtagttaataccgcacttgaagccagttgggctccagtcgacgaattgaatggttcgtcgacgcggccgc

SEQ ID NO: 183184 - DNA, 439 bp, Zea mays
  Clone ID: MRT4577_98649C.1
gaacaatgcatgaggacaaccatggtaccagtggatggacgctcaaacaaaacagtcccatgcctaatagacgggtacacaggtacagcaatcagggagaactacaccgcccctaacctttagcacctcagctccaggttgtcaaccctctaatattggctacatagcactctgttaatgcctactacaacacattgggagctggcattgccgaaccataagatacatcacctcagggtgcaaaaaaaatacagcaggacctgtcaaatgaagaagatgccactttttttaaacggcaaaacataattctttatgtgaagacatcttcccttgccacctcaaggaccatgcacttttaacagattgaactgactctctacattacaataaggtactatctaacgtcatacctgtggctaatgcattcttaacatctagc

SEQ ID NO: 183185 - DNA, 328 bp, Zea mays
  Clone ID: MRT4577_9864C.1
agggcggggcgttaattatattgactttaaataaaaaaacacgcgtatacatttatttgcccctttatgcccgggccccctttcaggattattacgggacccagttttttcatttcccccggtccgagggttttaaggcgtaaaacgggctaatgcaaggaaaaattttccaccatgttatgcctgttttaagggaaacctctttggggctccgaaaagaacatgcggtaaaaatcggtcccccccgtttggaaacacctctgtttccttttcatggaaaactaacccctgggaagagcccctccccggggcccctttaacggggggg

SEQ ID NO: 183186 - DNA, 304 bp, Zea mays
  Clone ID: MRT4577_98650C.1
catccactagacaaatgttccccacatcagatctggaaagaacaaatggagctgatacattgtggaaatgttaaagtagccgaagaagaaattgacaggtgaagtgtaggggaattgtcatggtgtggcagtagaggtctagaagtggcggtaagagagattgatactaatgatttgtttattgtagactacttgcattagctttttttctacgggtcaattatgttatgttttatttgtgtacatgtttgagatatgctaccaaatagctctagcaataaaaaaactacctacattttggttg

SEQ ID NO: 183187 - DNA, 505 bp, Zea mays
  unsure (1)..(505): unsure at all n locations
  Clone ID: MRT4577_98651C.1
tgctggctccctcctctgtgcggccgcgcggcacctcctccctcctcctgtgcggcgtgctggagcggttctggtatgtgtctcatgcatcatttcatcatcagtcgtggcggtgggtgcagcagccggcgaggcggccgtggacgctcactacaacgactgcatctatccgcaacatctatctgcaagctctgctccnttgcttgatcagctagctagctggttattagcctaaaactgaattggacccccccaccttggctgattaaattaatccgctgcacaattgcttgcgtgcgcggtgatctcaatagctcgctccctgatcctttcattcccaaggtgaggctcgggccagcacgggctactaaatgggccgtgctattcgggccggcccggcacgatcggacctccaccgtgccgtgctcgggaagaggtataagcccgtcgggcgggccccnccggtaaaggggcgagcccaaaccggcccgaccgagtcgggccc

SEQ ID NO: 183188 - DNA, 519 bp, Zea mays
  Clone ID: MRT4577_98652C.1
tttgaactcttgatccaccgtataaagctaactgaaatatgacattattatgctaaatatgtctagaatcaccattaagggaagtgcatccaaaagtaacacacaccagaatcaaatacaatgtaagaactaattgtacaacaataaatagtgaaaatgtggacgcggatcaagaaagggaactgaactgaaagaatcatcaaataagcaatgtgctaatgtggaacgagaaatttagctgaatggaaagaaccatcaaatgagaaatgtgcctgttccaatcagcctaaaataaatgtgaatagcaagaagtctgggaccataaagcatggtaaaactcgagattccttagaaaaatcgctaggccttcaaatgtccaatgagaatgcaataaacattcaactttgacccaataaatcaatgtaagggcaaagtaagcaacagtgtgacttgaaatgggagcataagacacaacaatgatatgaaggcttgaattcaaattactaaaccaaatgccgg

SEQ ID NO: 183189 - DNA, 237 bp, Zea mays
  Clone ID: MRT4577_98653C.1
tccttgcttgcgtcggcaacagcgaatatgcgtgggtttagcatccaaacatgactgataagccaacatgaggggcagcgaacaaggatttgctagtgaatatgcggagcatagaccatgaagctctgctgaggccaatgattgggcatgttagtcacatgcgtgaggctgacaattacccgtacagagatgagcccgggagcggcaaagctgcagcccaagtaagatgggtggaaa

SEQ ID NO: 183190 - DNA, 503 bp, Zea mays
  Clone ID: MRT4577_98654C.1
aaaaaagcgttaaaggaagacttaaaaatttatacctcaaaaagaagagcattgacttctatctgtcacgttcgtgagaacgagattctgattgcaggacacacggcgtctgacttaccacagtatctctaaaaatctcatgatggcactacaaccagttgtcgcaaatggtatagatcctcaatcgaacaggaacaccaaattagcgactctaacgattgggcagtacaaacatgtgccatagttggaatgatctaacactggcagctctgtacaatcacatggtttcattggatacatgaccggttcgtgtcaaggtctctctcagcgaacaggttttacacctcaatctggaggcttcatcgggccactctactgttcaacctggagttaatctgaaccgtgtagctagtggtagtgcatctgcccgacatgatactcagaaagcttgctacaaccatcatggccgacgtggtcaacactaacacaactcaccatttgct

SEQ ID NO: 183191 - DNA, 529 bp, Zea mays
  Clone ID: MRT4577_98655C.1
ggccgcaaattttttttttttttttttagaaatgaatgtcacatcatcaatatataacagaattctatacaaaatagtaaaataattacatcatatgaagacaatgatccagcaaccatagttgactgggagacaacggccgagaccactcacgaactcgtcacaacatccttcatgcacctcatcctgcggtactagttcttgaccttagacttgagatccacaggtaccaacttggtcttcaagtgactcgtaacctcgctgcgacgattgaacaacgtagaggtccagcgacgccacccgacggctccgcggtggtgaggaaagacagcgagaaattggaatgactcgtgtaccatggggaccccgtgagtcatcccggccaagagaccgaccgcagcaatggtcgtgtagcatgggcggtggctcgcatgcccacgcacggacacaacacaacggtgaggcccacggcggtttcaatagatgaggtgaatcgaggagggcgaggacttgtagcggccccggccgg

SEQ ID NO: 183192 - DNA, 363 bp, Zea mays
  Clone ID: MRT4577_98656C.1
ataccattagctttatatactccagagcggagaaaaacccgatcgacgccatgagggtgttgctcgttgacctagatctactggctctcgctgcgagcgccacctccacacatacaagcggcggatgcagctgacaaccaccgacgtcggttcatgtaccgtcgacggtgcatttgccacctacgggtcacctgccacctccagagcatcttccaccgcccttccacctgccgacgtcagtgcacctaacgccgtcggtccatgtgccgtcaccggttcatttgacgacgccaccatgacactaccctactcaaccgtcccggcctcagtctcatccatagacacacccatgcccgtgccaac

SEQ ID NO: 183193 - DNA, 932 bp, Zea mays
  Clone ID: MRT4577_98657C.1
cccacgcgtccttccacgcgtccgcaaggaagccagaggtcttgctgttggaccaagattagtacaaaggttatctggttttggggaccatcgatctgcagacaatgtggaaagagtggcagaggaagagcttgcacatgcctctgtaggtttgtattggtttctcaaagaatgccaagtgatgggtcgtgaaccaagcaatactttccaagacttgataaaggagtacgacgttgtactggagggtccattcaactacacagcgatggcctcccccgacctgctcttcaatctgcggaacctcttctacctgggcgcctaccgggcagccattaacaacatcgacgtcccgggccttgacgccgacgctgagcgcgacgccatcgtcttccgctcctacatcgccctcggctcttaccaggataagcagttgaagtctcatcctccaaagaacgttgaatcgaaaatcttgcgtgagcatatcaagaaagagagggaggcagcaaaggctggaaaacgaccatactatctgaagaaatctgaacttcgcgaaaggaagctgatgaacaagtacaacgagctcaaggaggcaggaaagcttgaagcgctttctgcatataaatcaacttcagttagttgagatgttctaatgaacgaacacgcaccaacttcatctccacagtgaaagctatttaatttccaaaaggaaaagctcacagatcgacatagattcttttgtgtacagtaacatcatgctaatcatttcacatgtctcaaagatagttcaagaaaaacatgtcttgaagataagttagcataaaaagttgtgtccttatataaatcaactgcatctggttgatagcttgtaaatagcagtatctgttgtgtaaactcaacaatttggcaacaaaatctggcacatatgtatcagc

SEQ ID NO: 183194 - DNA, 222 bp, Zea mays
  Clone ID: MRT4577_98658C.1
acaggggccaaaaatatcattaatgggaaccacgtagatcattttggtcgacaattagaggccacgacgcacccgtttattattttttttttccgacgttggaaaaaagaaaaaaaatggggggaaaattattattttaaaatggaagggcacttggtttgaaatccagattcaggatcaacccacttttggatgtattttgccaaatcctccggtagccca

SEQ ID NO: 183195 - DNA, 367 bp, Zea mays
  Clone ID: MRT4577_98659C.1
aaaacgctagcccaaaccgggcgctttccaaggagggttaacatttacgtccgtccagacttttatttaattgtaaaaccaagccaagagcttttaacacatgtttcccccacaccagttttcctttttttgccaaaaaaaattttaagcgtggccccatgggtccttttttatttttgggtacttttaacttccccccattagcctttgaaggcagtttttttggtaacttgtccaagggggttgttttaaaaaggaaaagtcggccacccccctcttgtaaagttccaccacattttaatccgggggattgcagttctttttttagtttctccaaaccaagcaccttcaattttgaaaatgaact

SEQ ID NO: 183196 - DNA, 115 bp, Zea mays
  Clone ID: MRT4577_9865C.1
tctgccccaaattctgtacagaattcagaaactgcattgtttgcttaagtctaatcttagaatcagtccttgtcaattataagaaagttgtagaggcttttcttatcttgcttgt

SEQ ID NO: 183197 - DNA, 342 bp, Zea mays
  Clone ID: MRT4577_98660C.1
gactgcatagctatagttttgtgataccgaaatctaattcaatggcactggccttacaactacaacactgggaaagccaaaaccttgcccatctcaatctgattggactagatccacatttcgctatctgcagttgtagcaataaggaccaggccgatacgcgattgccattagtaacacatgctcaatgtcaaaggggactggcactgtccctgtacattaacatcaaccgctgtggttgttacgctcacgctcaccgttacagttgccattgccatagccctagctcctgttcctttcgttccttcctttctcgtcatgttcaccggctttgcctttcaa

SEQ ID NO: 183198 - DNA, 401 bp, Zea mays
  unsure (1)..(401): unsure at all n locations
  Clone ID: MRT4577_98661C.1
ccggtttcgacccacgcgttctcggtggtgccgcagcgaggcgctcgacgatatgtgcttcggggccaccgaggcgtggcgcctcccacgccaggtcttctcctgcgatccgccctccggcgccggcgccggcgccgcgcacgcccgctagaagtgatgcggtgatgccgccgctgcgcccgccttgttcttcggggggggggggcgtcttctgaccttaatttgctttcgccaggcctccgttgtttctcctcttgtctttgccggatctgagactttattaggatggcgtggcccgttttgctgtgtgattctttcgtgggattgtgtactgggnaatgtggtgagaatgcaatgggtgcgcgggggatgttgggggtctgtttgtttgttgtggtggg

SEQ ID NO: 183199 - DNA, 2097 bp, Zea mays
  Clone ID: MRT4577_98662C.1
acccacgcgtccggttaaaaaagaacatacacaatcatatcaccaggccagggcacgcacaagcgagctgatctgcagcattatttggctgattttttaatcgttgacggtgggcgaacatatggcggatgactcgttcgacctccccagcgctagcgaggaggatgtgatgggaggcctggatgaggacgaggccatgaaggacctcgagaccgggatggacgatgaggactatttgccaccgacgatgaaggttggggaggagaaggagatcgggaacgaggggctcaagaagaagcttgtcaaggagggcgaggggtgggatcgccccgagtttggagacgaggtggaagtgcattacactggtacccttttggacggaacgaagtttgattcgagccgtgaccgtggaaccccattcagattcaaacttgggcaagggcaagtgattaagggatgggacctggccatcaagaccatgaagaagggtgagaacgcaatcttcactattccgccgggtcttgcctacggcgagatgggttcaccgcctaccatcccgcccaatgccacactccagttccatgttgagctcctttcttgggccagcgtcaaagacatatgcaaggacggtgggatttttaagaagatcatcgttgaaggggagaagtgggagaaccccaaggaccttgatgaagtttttgtcaagtacgaggtaaggctcgaggatggaactgttgtgtccaagtctgatggtgttgagtttgctgtcagagatggttatttctgcccggcactttcaaaggctgtgaagacaatgaagaagggcgaaaaggttctcctcaatgtcaagccacaatatggcttcagggaagaaggaaaaccagcgtctggagatgaagctgcagtgcgtccaaatgctgtgctgcatatagatcttgagctggtctcttggaagactgtgatgcttatcggagatcacaagaggatcttgaagaaagttcttaaggaaggcgaaggctatgagggtcctaatgatggagcagtagtgaaagtgagatttattggcaaattggaggatggtactgtgtttgtaaagaaagggcatgatggtgaagagccttttgagttcaagacagatgaggagcaggttattgaagggcttgacataacggtagttaatatgaagaaaggagaggttgcgttggctagagtaccacctgaacaagcatttggatctgtagaaacaaatcaagatcttgctactgttcctcctaattctaccgtcttgtatgaagtggagcttgtttcctttgagaaggagaaagaatcttgggacttgaagaccaatattgagaagattgaagcagctgccaagaagaaagatgaagggaatgtgtggttcaagatgggcaagtacgccaaggcctccaagagatacgagaaggctgcaaaatacatcgagtatgacagctctttcaatgaggatgagaagaagcaatctaaagctctgaaagtcagttccaagctcaacaatgcagcctgcaagctgaaaatgaaagaatacagagaagcagagaaactttgcacaaaggttctggaacttgagagcacaaatgttaaggccttgtacagaagggcgcaagcatacattgagcttgttgacctagagctagcagagttggatgtgaagaaagcactggaaattgatcctgataacagggatgtgaagctggtgtacaagaccctgaaggagagaatgagggagtacaacagacgggatgccatgttctacggcaacatgttcgcgaaatggaggaagcttgaacagctgcagaaggtgcccgggaagcaggaaccgcaacctatggccatcgacagtgccgcataagagatttgcgcccctttgacatgccccttagttagtgtgggaccagaggagaatctccttagtaaaatgtttatcatatgttaatgtctgtcatcttgcatttttctttttcctgctaccatatgtattctgcctcatgcgtgtaatgtttcgtcgtctactcatgtaattttattgcggtgtcattgtataatggacctctgtgtgct

SEQ ID NO: 183200 - DNA, 529 bp, Zea mays
  Clone ID: MRT4577_98663C.1
cattgctgtttactgcttatgcgagtagttatacacacatgcatatacatgtcattacatatatcgcactgattatctggattaaattaaaactaaaaatgcctaactttctaacagatcgggcctcctctcctattatgtatgtaggggtacaccgtaaagcggacggaagagggcaacaacaaaaaaaaaaagttgcacccacatatatcatcgtgcggcggttatttgcagcgtgatgcgccgatctgatgcctgcattttgggcgccgccgccgccgcgtgccgcctgtggaacgcgtcgcggcgcttcctgagcagaatttccatttcccgccgttcctccttggttatgtggcggcaccggcactcggcgctgcaaaagccttgctctcctttgtacacaaaaacgtccatgtgtggcgtccaggctccctgtggcagcaggagcagcgcttgaggaactcgagccccgcaaacacccgccggccgttgtcgttcgtcgtcgtggcacttgaccgcgctcgcc

SEQ ID NO: 183201 - DNA, 420 bp, Zea mays
  Clone ID: MRT4577_98664C.1
gaacgattcttctctccgtttactcttttccctgttcgtagctttgagttttaatttttgttttttggtggacggattgttccggggaggtcgaggttgggatctaaatttattttcaatcggtggagatccatctatctatcagcagcagcagcaggagcaaccatgttttctctccaacaatacattggaattgaattcctaacgggcagattggatccttagaattgaattttattctaataatattaatttagacaaaggtcttttaaactaacatggttttatctataatatatttaggtactattattattggagatatttatgtgatacatttttactgtagagaaataggcttagggcatgtttgtttaccccaatggattatataatctggattatttttggaaggatata

SEQ ID NO: 183202 - DNA, 1197 bp, Zea mays
  Clone ID: MRT4577_98665C.1
gctgccacagggacctggacgcccaccatggacgtctttgtgtacaaaggaaagcaaggcttttgcagcgccgagtgccggtgcccccacataaccaaggaggaacggcgggaaatgaaaattctgctcaggaagcgccgcgacgcgttccacaggcggcacgcggcggcggcggcgcccaagatgcaggcatcagatgggcgcatcacgctgcaaataacccccgaacgatgatatatgtgggtgcaactttttttttttgttgttgccctcttccgtccgctttacggtgtacccctacatacataataggagaggaggcacgatctcgtcagtagcaagttcgggtccgtccatggttgcataggcccgtaggactaccgagcgccaaagtttttccaatatattccccaacttggttgaacagcagagattttgccgtgtgcgcttgttcttacgccgcctggggttcaaggccgccgctgttgaagatttttctacgcgcccgctcctatcctcagtcgccgctcaagccgccgccctctacaaattccgtcggagttccgctcggtgttcccctccccggtcgtgagctcgcgaggttccctggcgtgcaggcttcttctccaccgcgctcctctgctgcctgctcgcccctttgctcgccggccggatctccagcgtcggtcaccctccaggctcagcgcccggggtcttctccctcccactcgcccggcttcaagtttcctgcgcgcaacctctgctccaccacgttgtcgccctgctcgagttatttctgatggacgttgattgggcgcaggctcgactatgccctgcatctcccatgggcgagcacccgaggtccatccatggttgagcgctcccttcttgcgtcttcatcctctgctcacctctctcaagcacgcgcgctcggccatcttccctggttagaaagttaggcatttttagttttaatttaatccagaaaatcagtgcgatatatgtaatgacatgtatgtgcatgtgtgtataactactcgcataagcagtaaacagcaatgaaacatgcacgaaaaaaaaaagaaaaaaaaaaaaaaaaaaggcccctagcagcttgcataggggagtttatggttatttaatgaaaccccaaaccttttttaggtcagatatataaaaaagagtatgattttttat

SEQ ID NO: 183203 - DNA, 240 bp, Zea mays
  Clone ID: MRT4577_98666C.1
agcgtggtcgcggccgaggtactccgagcatgagtccacccaatcgaagccacgcatgcgttgcgcacgacatggtgaggcatactagcccgcttccgaggaccccacactgcccaacacatgaaccaattgcggcggcatcactcatccttttctcccttgcggcaatggtggccctcggtaacgacactatctactaggatggggcatccccgcgtacctgcccgggcggccgctcga

SEQ ID NO: 183204 - DNA, 354 bp, Zea mays
  Clone ID: MRT4577_98667C.1
acgcgacccactgacagcacattagcagacttagatggagagcatgtgcatcatggacatagaacagctacccagcttgctaatgatgctgatgcgaaatggatagacttacaattaagcactgcacatatctatttcaatcatccctaatgcactcaagcagttataaccaaaatggtttcaagtggcccgtaacctgggcgcaatcaagtgcggacccctaatgtgtattagcatctgacgcgggggctgtgccctaatacagatggaagatgaacctaccagtcacttacagaatagctcataacgtggcattctaaaatggagtatcatttgtgattagttagacgtgaa

SEQ ID NO: 183205 - DNA, 360 bp, Zea mays
  Clone ID: MRT4577_98668C.1
gtgccggagaacagatggacgtgtacactctgccgggccaagtgctacactgaattgaactactacagccatctcgggggcttgtggcaccgggagaaggcacaggccaggcgcgaggagcacttgaggttctactgctcggtgtgcgacctgcaatgcaacagcgagaaaatgctggagtcacacctcggcggtaggaggcatcgggagactctggaggcgcgcgactaggatgccgaggcacggctgcaggctgacccgtccttgttcacggggaagctgttgtggctgggttccggcgggtcgatctgccattttgaggggcactacggtggtgcacgaagctgctatcgctggtct

SEQ ID NO: 183206 - DNA, 256 bp, Zea mays
  Clone ID: MRT4577_98669C.1
gtttgtttttccttgtgcgtgcacacatggactatgcattaggttcttcagattgtaggtatacaggcttggatagtttcctagtggatatgggacccatcttaaaaagttgcatctatgttgattgggaggccaagacattgttagtctaggtgatgataataatggataactgatggccgtactatccagcctgatgctatcaatctcataaggatctattgccaatttagagctacaatccccagctcatctc

SEQ ID NO: 183207 - DNA, 1427 bp, Zea mays
  unsure (1)..(1427): unsure at all n locations
  Clone ID: MRT4577_9866C.1
gggtacctcgaggccggccgccgccccagctacgacgcctggccgtacctgtatttctcatcccgcggtacaggccccagccaagacgcttgtaccgtccccaagcagtcggtcccagactgcaagtgccaaatgctttctcgtctcctcccgcgccaccatcaccgccgcctcctccaaaccctgtccagggccgccgtcgccgccccagatgttgacctccaccagaggctgtgctcttcgtctgcagcgtcaagcccgagcctgtcgatatggcggcggaagaaggagatgggcaaggagggcctcatggcagtggcgcagctcaagcggctcgcggctctacccccggcggggggtcacccgcgcctggagcagttcatgtgttcgcacgtgtcgcggctcctccgcaccgacctcctcgccgtcctcgccgagctcctccgccaggaccatgtcagcctctcaatgaagatatatggtgttgtgcggaaagaaatctggtaccgccctgacatgtacttctaccgtgacatgctatacatgctagcgaggaacaagaaaattaatgaaacaaggcaggtatgggcggatctcaagtctgaagacgtgctatttgatcagcacacttatggcgacattgtgagggccttctgtgatgctgatttgattgaccttgcaatggaaatctatgatgacatgaggagctcccccgaccctcctctatcattgccgttccgtgttatcctgaaagggttggttccataccctgaactgagggagaagataaagcaggattttctggagcttttcccagatatgattgtgtatgatccaccagataccttatctgatatagatgaagaattcaagttttgatgaatgtacgccttcatccggattcagtgcttctgagttacattccctgcactgcaggcaaacctccatttctcgttcttttggtgggctagatcaattgtaaatgtagctgtctcgatctgcccagtagctgtggtaccaccaattttaacctcttgatgaaccatttttgttaatctatgctttggagaattgtctgcttccgtctgtgtctcgtcctactttgaatcaccctgttctgaagtttggtactgctgctgtgcactgagatttgtgttccgttgatccctgctatataatcatttgtacaaaaaaaaaaaaaaaaaaaaaaaaaaaaaaaaaaaaaaaaaaaaaaaaaaaaaaaaaaaaaaaaaaaaaaaaaaaaaaaaaaaanaaaaaaaaaaaaaaaaaaaaaaaaaaaaaaattgggggggggggcccggcccccattccccctttaaggggggaaaaaacccccccccccggggccggtttttaaaaaggggggggggggaaaacccggggggtaacaaaattaaaggggttgg

SEQ ID NO: 183208 - DNA, 352 bp, Zea mays
  Clone ID: MRT4577_98670C.1
gcgcgtctataaactattgtgatatccccgcgctgtaggaattctgcacgaggggcaccagctagcactctgcttacgcataacagccgaactagcgctctgcgggcgaggctacgaagtatgtgagattgcaaacggtagcagcaagaggatcattggaggtgcccagagtgtaaggcaggtgcactaagctcttcatcgacggaagatatcattgtactccctctccggcaaagatgttcaagacccggaacccttgcaccggacaggtgatcgccagcatcgaggagggagacaatgcctacatctaccttcgacgtcaaggccaggccgggaggccttcgacaacggg

SEQ ID NO: 183209 - DNA, 389 bp, Zea mays
  Clone ID: MRT4577_98671C.1
ggattggagatttgaaaaggatattaaaagaaaacaatwgcttaattatagtattgatttcggagtttgtatatttgcggtaactgtgttgaatactgtcccacaaattgtcatatcaatgactgaagaatatgaactttctacttatgatcgycatgaattgaattacaatcaaattgctttgagtcggttaccaatctccataatgggagatkacacaattcaracaattaggaattcgcctcaaagtaaratagagcgaagaaaaatcttggaattcaagaacgattacagattactaggtattaggatttttttattagaaaaatccatttttactaactctaacgaaaaaagaataactactgcttaacaacttatatgtatat

SEQ ID NO: 183210 - DNA, 1342 bp, Zea mays
  Clone ID: MRT4577_98672C.1
aatatcggttccgttccgtcgcagaaatagaaaaaaaaggctttcttgtcccacagggcagggagaccgggagagcagtctagtgattagttgatcaccagacgtcgagacaccatgagctcccgcatggctggagcagcgcttctgcgccacctaggcccgcgcctgttcgcggccgggcctgcggtgtccgggctcaccgcgaggggcggcatgcccgcggccgcgaggcttctccccgcgcggatggccagcaccgccgcggaggctgccagagaggacgccggtgcaaataaacggcacggcggcaccgagaagcatgaggaggaggcagcaggcgggcagagcaagaaggccgtcgtcagctactggggcatcgacacgcccaagctcgtgaaggaagacggcacggagtggaagtggaccagcttccggccgtgggacgcgtacacgtcggacacgtccatcgacatagggaagcaccacgcgccgacgacgctgcccgacaaggcggcgtacctgatcgtcaagtcgctgcgcgtgcccatggacctcttcttccagcgccggcacgccagccacgcgctgctgctcgagacggtggcggccgtgccgggcatggtgggcggcatgctcctccacctgcgctcgctccgccgcttcgagcacagcggcggctggatccgcgcgctgctcgaggaggccgagaacgagcgcatgcacctcatgacgttcctcgaggtcacgcagccgcgctggtgggagcgcgcgctcgtgctcaccgcgcagggcgtcttcttcaacgcctacttcgtcggctacctcctctcccccaagttcgcgcaccgcgtcgtcggctacctcgaggaggaggcagtgcactcgtacaccgagtacctcaaggacctcgaggccggcatcatcgacaacaccccggcgccggccatcgccatcgactactggcgcctccccgccgacgccaagctcaaggacgtcgtcaccgtcgtgcgcgccgacgaggcgcaccaccgcgacgtcaaccacttcgcgtcggacatccattaccaggggatgaagctcaaggacacgcccgcaccgctcagttatcactgacaagtaggcgttgcctgcctgctgctcaattcagagttcttacacgttagactgtcattggtcttaatatgttgttgtgctagccaaagttgcttagcagatcaagactggtttgctactcggaggtgaactagttgcctatatggtttgtactttgtacgtaccagtatattgtagatatttgaaataacaaatataagaatcccagtgtgatgttactaattaacag

SEQ ID NO: 183211 - DNA, 561 bp, Zea mays
  Clone ID: MRT4577_98673C.1
gactgacatgtgccaccgtgccagccatgcgatcttcggttggcagagaactcgtgacggccgaacacctatacccgatgccgccgagatgaaggtaccgagggaggtgggaaacagatgggggacagagctccgcggcactactctgctttcggtgcagcagcgatcggctcctccgccgccgacaggcgctccctcaacacagttaacaaatccctccagcttctcaaactgggactccacacaggtgcggggacctggctcatcgccgcttcatcggacctgataggcttggtacggtctgctcagaggacgtaagaacggaatgaaattaggatgaactgaactacactgtcgcagagctacagctatattgtgaatatcttaaattacgaaaggctctatggaagcttcattgaataggaatcgaacgtgagatgccgaaccgtgataaggcaggagtatacaagcatatacatcctgatttttgtataaaactttctatatcatgcagatcatgcctaatgggttcagatttagctatgtgtatacttcacatag

SEQ ID NO: 183212 - DNA, 566 bp, Zea mays
  Clone ID: MRT4577_98674C.1
gaaccctaaaccgagagcaaattgcagacgagaactagacattagacaagcatcacagttccagactagttcacgataatagtttcaacgaattaggactccttatacagactacgttcgacgctacatgaattttttgtaatagaaatggctcgaatctaaagtaactccacttaacataggacagcacaacatagcaagttcaacagagagtgttcccaactttccagcaagcagaaagaatctcctaaccatggttgaaagattggtacagaggaacctgagatatcattggaccaacattatcatagcaatggggatacatcattgctggcgttggccaatgtgggtagacagtagctccagaagaagaccccattgctagatcaggctggccaaagtacacagtaagctggtttgtggacatgccaggagattgcatataaccaacaccgtactgcataaactggggcacaacaaagttgaaggcacctgggctcaagttgaagtcaggcactgggttcctaacataccttgtgtagtttcgatcgtagtctgggtcacta

SEQ ID NO: 183213 - DNA, 555 bp, Zea mays
  Clone ID: MRT4577_98675C.1
gaataatcgaacaagcctctagcgagaatcactggttgtcgcacatatacgtcttatttttggggcgccagcgcaagaatatgttactaacaattttgtttaaggtagattataaaagggtgtctggtggaatatcatgatagaaatgtgtgtgaaagggcaaacattggatgatctgttctggaagagttacttttgctctcatcaaggggctgcggacatatgatggctgctgtttctggtttctcattatcgtcagcgtcacatggatctacacttagagatggcagatggcaaaggggcccgattccccttttttttgcggggaattcctcttgtttggttaggtatgaattggtgggaatttaagtggaatccactcaaattctcattaatccacccgtaaccgaacaagcctagaggtgatgaaaaatgttcttcctccacagaggggtaatccacccataactgaacaagcctaaaagtgatgaaaaatgttcttcctccacagagatgtaaacggagaaaaaattatctccgcggataaagagagat

SEQ ID NO: 183214 - DNA, 285 bp, Zea mays
  Clone ID: MRT4577_98676C.1
cttcatcaacacctggaggaaggtggactggctctccgagaagatcgcatgctcgagatttcactgtatccgccatgcatggagatatggaccaaaaggaacgagacgtgattatgagggagtttcgttctggctctagcagagttttgattaccactgacctgctggccagagggatctatgtgcagcaggtttctttagtcatcaactatgaccttcccaccaacagggaaaactatatccacagaatcggtcgatgtggacggctcggccgtaaaggtgtgg

SEQ ID NO: 183215 - DNA, 623 bp, Zea mays
  Clone ID: MRT4577_98677C.1
ccccctcggattttccttttttttttttttttttttttttttttttttttttttcatcaggcaatacagggatacgctcataaaaactgccccagaatcacgggcaaatacatattcgtttggtattttacgactcctatacgtatatgatacaaacccgacctgaaatctatttacatgaccagtaggcagtagctaaataaaaaacatgatggggctcgaaaagggatgtctagggtctagtccgtactagaggtaacccacatatatatatgatatcggcatcgacaattcacagggcatccttggacacaaaaaaaacggcaaccgcagggggggacaaagccgggaacaagcccgcgcgcggaaacccacggaacaccccgttgaaagggttgagcgtgccgttggccccaaacgacccggggccattgaaggagcccgggggggggccaaatcccggtccaaggccgcctccagccggggggggggggccggccgttgggggcccaaactccgacaacaacggggggctggacccgactggaggcgtaaaccccgtcggaggggaaaggctggtcgggggtctcgttcccaccggcacgctcgagtgggagcttccc

SEQ ID NO: 183216 - DNA, 617 bp, Zea mays
  Clone ID: MRT4577_98678C.1
cggaagcgtgggcggacgcgtgggcggacgcgtggggtcgccggctgatttttttttccttcagcagccgcaagctctagcttcattcttcctctgtgcgctgatcgatccttatcccgccgcccttccctgagatttttcaggcgccaccgcccttgggctcctacaaatctcctctgccggtgctccaattcacgaaatcgcgttcctgttcttcccagctgagttctagccatggtgccggtcgagttcctccccagcttcttcttctagctcgcccagccgaagttccatggcgctcctctctgccggcgttctccccagccgcgctctggcgtccacctccgctcggccgcgcgctccctccctgcccagattgcagacctccctctgctcgcgcgcatggccgtggagggccaaatccacactgcgctcgccgaatctcacctctctctgctcacctgtgccgttgcccagctcgcggcgctctctccctggcgcgctcgtccgcccctgctccactgcgccgagcagttcccagccgagctcctatccagccatgccgcgccctccctactccctcctgcaactcggtgcctctcccagctcgctggtcg

SEQ ID NO: 183217 - DNA, 380 bp, Zea mays
  Clone ID: MRT4577_98679C.1
gctgggggttttttttttttttttttttttttttttttttttttttttttttttttttttttttttttttttttttttttttttttttgggggacaagaaacaatacaagagactttcttgggggggggggggcccgaaacaatttatggccttgggggggggcaaagaaactttgcagccaaattggtacaaaagggcactgaacacgggaaaccaaaataacatgggtataaatagggggcccaatacagggggggtttttaacttaaaagaaattggggaccaaaaccaggaggggggggaataaaatccagaggtggggggaccggggcccctacaaaaatctcaaaagggatttcagggttggtggctagggggg

SEQ ID NO: 183218 - DNA, 601 bp, Zea mays
  Clone ID: MRT4577_9867C.1
caaaagcaggccttttttgtttccatataatgggctcacataattttaggcaaataggacacctggccgataaaaaccctaacccttttttacatataattaattcgacggctaatcaaatatttgcctacccatccccttatttaaaatgggatttggcaatccaaacttcgccctttacccccccttaaaattaacctggggccaataccagggccctgggcccaattgatgaaacataaccaaacgatggcccagggccctgaaaggacggggggacaacggttttcccccaaccctcctatttggaaagctgccccggggaggttgacaaccgatgctccttcgataaaaatgcggggaaacccggaccaaaaaggacaacgttgggcttggaaaatccgacggacccctaaagagggtggttggagcttcgtttacttaataagctccaaaacctgaaaccttcttttccaacggaatttaagggcccgatagcgaaaatgtaaaccatccccaaccttggggggcccgccccccacagaagggccaaaaaggaggtaggcccccctttttgtcagcccccagggggggcagggac

SEQ ID NO: 183219 - DNA, 546 bp, Zea mays
  Clone ID: MRT4577_98680C.1
ccgggaaaaaaaaaaaactaaagaacaaacaaatgacgagtacaaatcatttgcacttcatacttttaaaaaaaaaaaaaaaaaaaaaaaaaaaaaaaaaaaaaaaaaaaaaaaaaaaaaaaaaaaaaaaaaaaaaaaaaaaaaaaaaatttgcccttttaaaaaaacaaggggagaaaagggctactttttgtgggaaaaaggggaaaccagtttgacccatccccggaaaagctttaaacggtttccttaaatttagcgggggttaaaagggcctttattgttaaaccagccttggaaaaataaaaagggaaaacttgcaggaaacctgtaaatcctattggggggaatggcaaaaaatcggggctgcttttttataagaaccttatccagttgggcctccgttttggggggtcaaggggaaatccaaatgcagggttcccagggccttaaactaaatacagaatggatgctctaaagcttcaaacaataactccatggcttgctgggaccaacaataacggtaaggccgggggttggccccaa

SEQ ID NO: 183220 - DNA, 500 bp, Zea mays
  unsure (1)..(500): unsure at all n locations
  Clone ID: MRT4577_98681C.1
tttcttatttctgggaagccacaaacatcggacaaaaaactttattattgaactatatctcataagatatctaaaagaggacaccaccaatgatgggttgttggtagaacactgctgggtttgtcaaagcaagttggttgaatggcagcggtgtggtgcagttgnttgagggtgccagcgttaggcgcatcgtgctggtngaacggcttccgctgtggttgtgttctgaaggtagctgggctcacaccagctngctggctgattggttgtngttgttgctgctgtctttgctggagagttcattgctgcttgttggtctgttggaagatcttgctgggggtaggctgcaggttgctggctgtctggctgttgctgttgttgctnttttgaagctgagtgtattgcgcctagttggttgtgtggtcgattctgctgttgctgttagtttgctgctcggttgcgctagctcctgttgttgcttttgttgtggcctgttgctt

SEQ ID NO: 183221 - DNA, 339 bp, Zea mays
  Clone ID: MRT4577_98682C.1
gctctctatttgtcgaggggacggcacccactggacgaccgatgctggccgcctagtcctcacgcgcccatgtattgtacggggcccattgccgaactcgagtgtcatctggtctttacgctgcccagcgcactgcaaagccgatcgatcttggcccaagccgggcctcacgacctgactcccaagactgcagggctggaccgtgttcgttgcattgcgcgtgctaggatttcagctgtctgcgctataaaggaccgaggcttctctttgttgatcgaatcattcacactgtgggcgacatgaggcctgttcacaaccgtgtccatgcatgtaacggct

SEQ ID NO: 183222 - DNA, 438 bp, Zea mays
  unsure (1)..(438): unsure at all n locations
  Clone ID: MRT4577_98683C.1
tcgagaacgaatacgagacaaaaaaagctggcagatactctccccggaactcgccacttcttactaaccttctgacaagacaccgatcacaataaggactncatcgcaaatgttccggtttacgaacttaaatatttaaattaaaaaatattttgttgggcaacacaaccccaaaaggaaaaccccctttttggatgataaacccgattataattgcacaaatgaagaaaaaatancacgcctttcgcaaaatgaaaggtccttttaagttggggaaaaaaggaaggggggtgaagttttaaaagtttaaaaattgggccttgaaataaaagtaggcttaaaaatttttttcccaaaattccaaaatttttggggggaaaacagtatttttggcttaaatttggaccctttcccaaattaaaaaaaaaaaaaggaaga

SEQ ID NO: 183223 - DNA, 594 bp, Zea mays
  Clone ID: MRT4577_98684C.1
gagatggagcgcctcgtcgccgccacggccaagctctgctccgagatggaggcgctcgacgaactggagtccgccgagcggaagatgagcgtccagggctggagccgcctcagcggccccatcccgcagcagccacaggcggcggcccagcagcagcaactgttggccaaggattcacccggcgcggagtcgcttcggcaggagctcaagacgcagcaactcaaggtgaagcgcctcaaggaggagtccctgtggaacgagagctacaagaaggccgtggggctcatggcgcgcgccgcctgcgcggtgttcgtacgcatctgctccatcttcggcccattcgtccccggcctcccgccgccgctgccgtcggccaccacggacagcgtccagacccggctgtcgaagctgctgcacccgcgattggggaagacgaaggcgtcgtccgggccgatcacgcgtcgggacggcccctcccaccgcgtgcacccgccgatgagcagcaactcgtgcccgatcatcgggcgccacctgcctggccacaacccccacaccaactggcgcaagctcctggacgcaccgcccagcaccgtc

SEQ ID NO: 183224 - DNA, 178 bp, Zea mays
  Clone ID: MRT4577_98686C.1
ccggccgagttctataggatttacgcatagtatagcaggatttataattatacatactataatagtgctattgtattccacatagcatctacacttcttttcagtaacagataagactagagaagggatatatatactgagtgatataaagaaaaaaaaaaaaaaaaaacccgtggcc

SEQ ID NO: 183225 - DNA, 198 bp, Zea mays
  Clone ID: MRT4577_98687C.1
caaacctcaacagtgagtcgtactaccccgccgggcaccacctcagccaccgcaggaacgatatcagacatcgacgccgacgcagctgcgacgaagaccctgatgggcacgtacgatgtcaggacgaccatccgacagggcaggttccccaaggtgaaacacgcgcccgactctcacatccggctcatccgcaccatc

SEQ ID NO: 183226 - DNA, 258 bp, Zea mays
  Clone ID: MRT4577_98688C.1
cacacgcgtccgaactcatcacagcttcttgcaagacataccagtgcactgagcagatggctaactacaccggtagggcgctacacgtaattcatgacagttatcggcggatccagctgatgtattcagacatcccaataccagttgctcaggctcagaggcattaccaaccgattaagagccaccggatggtgacctgcgatcatccaccgatagaaggaaccgctgtactgtacaccaggcacactgatgctgttg

SEQ ID NO: 183227 - DNA, 258 bp, Zea mays
  unsure (1)..(258): unsure at all n locations
  Clone ID: MRT4577_98689C.1
tntttttttttttattcctttatctttttctttttgtttttttttaaagttatttttcaaccggttcatatggagcgttctttaatagaggctggtgggcacacaaaaccccccaggggaccatcgttggcgtgccaacacaccctaaaaaaagtgtgggcaaccccggcgggggcgaaaaagcccgcctttgcccacccgacacccaagaacaagcccccacacaaattcgcgaggaaaaaatggggggcaccgccc

SEQ ID NO: 183228 - DNA, 420 bp, Zea mays
  Clone ID: MRT4577_9868C.1
cgccggtttctaccggttttgtaaaccttgcttgccaccctatatgagggtaaaaatggaaaaattactccaattaatgactccttggtagactaaatctgggcttaaacgacttctaaacctgcacagtagattcctacctcgcatgtgggcctcctagtaggatgttggtttgtaataattctcgctgcatgcgatctaatcttgtgtgcacggggcaaaacgacatgctagctactagctagcagtagcagaggctgcaaatggcaagtggcccaatggcgcctagctagcatgacgaatctatcttgtctggcctgagagagaagcagttttctgtaaatatcggatagaggtagatggggtcaggtgtccatgtgttgcgcgtcgtggagcaattagtagtaggtagagtaatat

SEQ ID NO: 183229 - DNA, 236 bp, Zea mays
  Clone ID: MRT4577_98690C.1
accgctgactatcgatcacatggacgctgtttacagcgccttgatcgagcccgatgactccgtgaaccgcagaggtttgacctacgccaaggacaagctggacgaccacatcacggtgtacgagtggctctacacgcacggtaccaacgaccagacggctctgcatgggctcaagggtgaccccacgtacctgctggtggagcacgacaagacgctgtgtcactacaggatcaacg

SEQ ID NO: 183230 - DNA, 759 bp, Zea mays
  unsure (1)..(759): unsure at all n locations
  Clone ID: MRT4577_98691C.1
ccgcgatccagtccgattggagccctttcaatgttcgaaattaatcgaaagattgacagtattctcaaccgcaaacgaaggtctgcacctctgaatctaaatgcgtctgcatcccatgtattggccctatcgtcacaagaatacatgatgcactcacatcaaatagctgacgagaacatggatatgtgcagacctgcagaaggctttgcatctcacttagaagatcctgctggcctcaattcagatccttcagggccaaagttaaaaggacagttattggatacggtgtcatgttcttgcagcaaggacgacaccaattcagcagattgtctaatagacgagcagcatacaagccactattttgcaaactcaaagcatgaactgccctctgtatctaacgaaaagaagttcaagtttgcaggaaacaaccacaatcgaattgttgcaagtgcctcccataaacatgaaagtgttgcagaggcaatgttctgtgcaccagtacttggtagtgagcttcagaatgaacctataactatttccaacatcggcaagaaggatggtgaaaacttccatgagatgtataattgtaatagcaaggctgttccttgttctttgttagctcatgagcaccatcgtcatctgaaaacacagagaacggaatctgcaggaaatttgaaagtctgcacgttacctgatcaacanactgcaaatgaattggcagacaagagtaatggtgacctgctgacatatggaccaaag

SEQ ID NO: 183231 - DNA, 732 bp, Zea mays
  Clone ID: MRT4577_98692C.1
ggaccctcggtccggccggacctatccacatcataacgcaggtaacagaaagggacaccgccaccactgtagccgaagatcgtgagggcctagccacgaagtttggtcgacttaaggaacaggcgaagagacatggcctccagacaccccgtgagtggagccgcagcgcaggagtccatgacacgcgccgagggcgcctactctttgcgggccgtgagaggcccggccgaggccactgatgagacgctcctgtacacggggtcgagcttgcactcgcgtgctgccgtttattgatagatgaacagagctggactttaagctcttgccacgcgacgcgtggcgggggctgtaccggtgagggtaccctgcgagagggtagtggtcaggcagcttcccgagcgagctctgcatgggcaacgccaggtccgaacaccaacggatctgaattattcatttgcaccgcggagaccccctggctggatggtaagcacgggagtatttggccagaaacgtatagggcatggaggtagcaaagggcatagagaaggtgggctctcgcagcggcgccacctccaaggaggtgaaggtcgctgactgaggccaggtctagatctctgagctgtacgggtgccctccctccgaaattggcgactccgtctgcgctcgtcccttttcatttccttcgatctgaataagatgatggcgatctgagtggtggtcttagatgagtct

SEQ ID NO: 183232 - DNA, 203 bp, Zea mays
  Clone ID: MRT4577_98693C.1
ttcgtagttttatatcgcgagcggccacccttggtatttttttttacaagagaagaaagactttataatttcatacaatatgcttctcacgaaagtactactacataccatataacttgagctaatacaacaagcaaaccataatcaatccccggtatgaaaggtaacaaggttacaaatgtggcaataaccaaaccaccctt

SEQ ID NO: 183233 - DNA, 228 bp, Zea mays
  Clone ID: MRT4577_98694C.1
cggctcgagctggcgtcttatgccgactacctgcgctcagcgcattcacggacacttacggcccactctcacgttcccgcgtctgctgcacgcgcgaagtctgcctgccttcgcttcctgctggacatcagtgttcgccttcgccaatcgccgtctcctttgctgcgccgctccacttgtggtggccaaaggtggattttcaggagtgtctccagattctagccaagg

SEQ ID NO: 183234 - DNA, 209 bp, Zea mays
  Clone ID: MRT4577_98695C.1
attcgtttcttttattttaccatgatttcatttcatacctttttattttgttggccaaaactgaggacttcttttacatgcgaacaatctcctaaccattccttaaaaggcccaagccttaaagggaattttttttacaaaaaaaaacatctctttttaaacctcctctggaacaatgacctaaactcccgctgtggaaaaaacccttt

SEQ ID NO: 183235 - DNA, 596 bp, Zea mays
  Clone ID: MRT4577_98696C.1
gagttcctatttttcttctcccccgcctctcattatcgacgcagactttcttggctctcggcccctgaccaacggcgcttctccatgcacgcgctatgcacctctctctttggttctctttagcagcgctcttcactggccgactttggccgccgcctctattgctcttgttgcctcttactccatgttctgcacggtggccggatccatggtcgaccatggatcggtgaggaaaacgggcccacgacccttgcctccggcgagtgcatcccctagggtgggtgcattgacatcagcaaggagcctgccagtggtccatcggaccggccagacaaaaccaggcatgttggcggttcctttgaacttctgcccagatctgacctcatttatctcgattccttttgtgatgaatgtgtgtatgagatgtatcctatgtaacgattttgggaccgagtttgaggtttcaagcacgaatctgggttcccgagcaatcttatctttatgatgttacctgaaccttaaaacgatctgtgcattttggacagtgcactagtgcacttcgactaaaaaaaaaaaaaaaaaaggcccctagggcc

SEQ ID NO: 183236 - DNA, 267 bp, Zea mays
  unsure (1)..(267): unsure at all n locations
  Clone ID: MRT4577_98697C.1
ggcgagggacaaggcttttttttcatatttttttttttgttttttcgattccttataagccaaacccttatttatcgacctatgcatattattattgggtggtacgcacaacatgataatgaagcaggagggttactgtttttttttcatattatggatggcggggggggggggggggngatttttttttattttcgtgaatcantagtgggggggggggggagctgagacgccgcgggggttggtgcggtagctgggcagctggtt

SEQ ID NO: 183237 - DNA, 1181 bp, Zea mays
  unsure (1)..(1181): unsure at all n locations
  Clone ID: MRT4577_98698C.1
cattgggacctcgagccggccgggccgtgaaaaacccaacgcggcaaacggcttcctcatccccctcccctcgccatggccgtccccacctccacctcctccccgctccccctcctcttcctccatcgctgcaccgcaaactctagcccctcggttctctccttcccgtcctccctccgcggcgcgtccctccgctcccgggccgcggccgcaccgcccgcagagaccctctctgacgacggcatccccgacgcgccaccggaaggggcgggaacgggaattccgttgccatcgtcgattggggatgatggggagcagcttgcacccaagcagaagatcagaatcaagctgcggtcctactgggtgccgttgatagaggactcgtgcaagaagataatcgaagctgccaaaacaaccaacgcaaagaccatgggtcccgttcctctgcccactaagaggagagtctattgtgtgcttaactctcctcacgtgcacaaggactcacggttccatttcgagatccggacgcatcagcggctgattgatatcatgtatccaactgcccaaacaattgattcgttgatgcaactccagctccctgccggtgtggatgttgaggttaagctatgattctgttggagctgaacttttcgaagtttgatgtaatgaggtattcattttctgcagcttttctctgggactgaaagaaatgtagtgcctgtactaggaaagaagatgttcagaattgaatgtacttgatttgaagtatatcagatgatatggttcatgctagctgtatacttgtattactgtattggtggcactaaaatttcttctagcaagtctgaagcagacgaaggattggccaaatttgtaagcttctgaaggatcgtttgagtcgtctggataagcaaaatactctttcttgctggttgcactgattctgctcaaaaaaaataaaatgctttgcaaaaaaaaaaaaaaaaaaaaaaaaaaaaaaaaaaaaaaaaaaaaaaaaaaaaaaaaaaaaaaaaaaaaaaaaaaaaaaaaaaaaantccccctcctggaccaaaaatgcccgccaaaataagaagatttaaacgggccccacccctgccaaaattttttttgggggcctctccagggttccacccttggttcctttcaaaaaacttttggg

SEQ ID NO: 183238 - DNA, 912 bp, Zea mays
  Clone ID: MRT4577_98699C.1
cattgggtacgtcggggccggccgggacacgcggcaaacggctaatgctccttcctgtcaccatgggccgtccacaccaccacctcctcctcacatcccctcctcttcctctatcgcggcaccgcaaaccctagccccgcggttctctccttgccttcttctctccgtggcgtgtctctccgctcccgggccaccgccgcaccgcccgcagagaccctctctgacgacggcatccctgacgcgccaccggaaggggagggaacgggaattccgttgccatcgtcgattggggatgatggggagcagctcgcacccaagcagaagatcagaatcaagctgcggtcctactgggtgccgttgatagaggactcatgcaagaagataattgaagctgccaaaacaaccaacgcaaagaccatgggtcctgttcctctgcccactaagcggagagtctattgtgtgctcaactctcctcacgtgcacaaggattcacggttccattttgagatccggacgcatcagcggctgattgatatcatgtatccaactgcccaaacaattgattcattgatgcaactccagctccctgccggtgtggatgttgaggttaagctatgattctgttggagctaaacttttccaagtttgatgtaatgtggtactcattttctgcagcttttcttcttgatccttttgttgtctggatgggcaaaacactttttcatgctggttgcactgattctgggacaagactaacgaagctttctaacttgcagactactttcataaaaacttttaaaaaaatttggactgagctcaactggtcatatcaaactattatttggtcaattttatatgtatccaagtaaacaacatttgggtaatcattattagggatactacatagccaaa

SEQ ID NO: 183239 - DNA, 1194 bp, Zea mays
  Clone ID: MRT4577_9869C.1
cctgtgttgatagggccatagcggagcggctggcgggtggcggctgctgcataccggtttagggtttggctttggggccttgggggcggcggctgtgtggcggctacgggctgctcgcctagtcgactgctcctctgctcgcgcggaccaggagcctgctcgcctgctcctctactgtgtggtggctgcgggcttctcgcgcggaccaggagctgaggcaccgagcaggggcagccggccgtcacttctgccggcgcaggggccacatgcgggcggccgggcaagcaggcgcagggggccgggcaagcaagcagtgcagcaagcaggcaagcaggcgcagcgcaggcggccgggcaagcaagcagcgcaacaagcaggcgcatggggccaggggccacacgtgaccagcagccagcaagcagcgcagtcgcagcccggcagtctatgattgcagattgcagctgcagaagcgaacagatctgccaacctcggctctaatccacgacatctctgcttcgcgccgccgtccagcttcgtcctgccagccgacctcatccccgccggccgtcgccccagccacgacgcctggccgtacctgtatttctcatcccgcggtacaagccccagccgagacgcttgtagccttgtaccgtccccgagcagtttcaccaaatcccggtcggtcccagactgcaagtgccaaatgctttcccgtctcctcccgcgccaccatcaccgccgcctcctccaacccctgtccagggccgccgccgccgccccagatgttgacctccaccagaggctgtgctcttcgtctgcagcgtcaagcccgagcctgtcgatatggcggcggaagaaggagatgggcaaggagggcctcatggtggtggcgcagctcaagcggctcgcggctctgcccccggcggggggtcacccgcgcctggagcagttcatgcgttcgcacgtgtcgcggctcctccgcaccgacctcctcgccgtcctcgccgagctcctccgccaggaccatgtcagcctctcaatgaagatatatgggtgttgtgcggaaagaaatctggtaccgccctgacatgtacttctaccgtgacatgctatacatgctagcgaggaacaagaaaataatgaaacaaggcaggtatgggccgatctcaagtctgaagacgtgctatttgatca

SEQ ID NO: 183240 - DNA, 873 bp, Zea mays
  Clone ID: MRT4577_986C.1
gaagcgatggccgcgctctacgccctcgtcgcggtctcgctgctgcccgttctcgtcacggcggagtgcgactgctcggacgacgacgccacgggccgcgacaaggcgggagcgctgcggctaaagatcatcgccatcttcttcatcctggcggggggcgcggccggcgcggcggtgccggcgctggggcgcaggctccccgcgctgcgcccgggcgcgggcccgttcctcgccgtcagggccttcgcgggcggcgtcatcctcgccacggggctggttcacatcctgcccgcggccttcgacgcgctgggctcgccgtgcctcgcggcggccggcgggccgtgggccaggttcccattcgccggaacggtcgccatgctcgccgcggtcgccacgctcgtggtggacacggtcgccacggggtacctgcgccggaaggccgcggcggtcggcgacgagccaccgcagctcggcggggacgaccccgaggaggcctccggcggcgggcgccacggccacgcgcacggtgtcgacgacgacgacgacgacctcgtacgccaccgcgtcgtctctcaggtgctggagctgggcgtggtggtgcactcgctgatcatcggcatgtccctgggcgcctcggatttccccagcacggtgcgcccgctcgtcccggcgttgacgttccaccagctcttcgagggcatcggcctcggcgggtgcatcgtccaggccaaatttcgcctcaggtcaatggtggcgatggcagtcttcttctccctgacgaccccgatcggcgtggccatcggcatcgggatatcgtcggcgtacgacgagacgagccagacggcgctggtcgtgcagggcctgttcgaggcc

SEQ ID NO: 183241 - DNA, 354 bp, Zea mays
  Clone ID: MRT4577_98700C.1
aaccaaacatcccctttatattactgttgctcaaaaccaaggtttttcacaagaatgtagtgtttgcctaaaactcccaaacaatattttccatacaatcagggccttagcaagattatcacgccgcgtgtcgaaaccatcgggaagttgataaatggccttcgatactggaaacactgcaacatatatcgcctaacggaattaagcacaccatagcagatctacaaagactagctcggttggcgtctggggcccggccaatgagccagcactttatgaatactgcaggtaccttgctgccagagagcgaaaactgaggacgaaatactgaacggtctgtacaccaatcaggcg

SEQ ID NO: 183242 - DNA, 351 bp, Zea mays
  Clone ID: MRT4577_98701C.1
gcgtggggttttttgagaaattccggaaggggacccaggggccccaaaatttacccctaaccgggaaggggagacatatgagcataaacgggaacaaggggaaactgggggaaaaagaaaaaagggcaaaaagtcccaaaaaaaaaaaaagggggcaacaaaaagcaaaacaaaggaggccggaagagaaaaaaaaatgacaaagctgggggggactttatggaacccatataaaatgggagacccccgggacccggtccccaaaaaaaaaacgcaaaccgcccggcgcaattgaaaaagcaattagcgcccggggggggataatgttttcacacgaaacggggggaattt

SEQ ID NO: 183243 - DNA, 151 bp, Zea mays
  Clone ID: MRT4577_98702C.1
tagggacagtaaagagggccttaatatccgacgtggtcgagagactcatcgcctgccctgacagcggaccagatacatggagcatctgtctcaagatcctgtacattgatacaacccccttactccaaacatagagacagattcttgatca

SEQ ID NO: 183244 - DNA, 379 bp, Zea mays
  unsure (1)..(379): unsure at all n locations
  Clone ID: MRT4577_98703C.1
acgcgtccgaactagcaacatagaaagcacaatagtgtaccaacaatgcagccaanatatttgcctcttatgctcttgtcttctgaaggctgtacgggacatttcgactgctaaactctatgctcctcttcccgccttacacgggttcggtggaaccatctcaccttagaccacagcatgagtgcattacttatcacctgtctcacaatatagctatcagagtacttgggcttatcgacaacataggccacacacacaactggttcaacctgtgcacctagacacagtctcatcacaatagtgatgacttgtctattgacacacacacatcagcagtactgtgctcncagattctcatcacactgcagttacttctgta

SEQ ID NO: 183245 - DNA, 183 bp, Zea mays
  Clone ID: MRT4577_98704C.1
actcgccgtatgcttgtgaagcgcagcattcggctcgagcggcgaagaaggtgctcatgctctacggcgactacatggaggactccgagggcatggtcccgttccgtgtgatagctacgccgtctgccctagcaagaaggccggtgctgtctgccgcaccgccgtccatgtgctgaccggtca

SEQ ID NO: 183246 - DNA, 333 bp, Zea mays
  Clone ID: MRT4577_98705C.1
atagtcctgcgacacaaaatgattctatcatgccttttctggggaaaaaaggcaaacggccacccgagcccaagcaaaagcggttgtcccacgaaaccagacgaattaccccattcacggcattttttagagcccccctatctatattcacccctatcaggagagggcactagtaaaccacccaaagcccggtttcactgaacacctcattggttcgaacaaacggcttttgagggggatccctaatgaaccctgccatcccccaccccatgtacaaaggtcttgaaactaacaatctggcaccgggcggataaataaaaaacaacaaggggc

SEQ ID NO: 183247 - DNA, 232 bp, Zea mays
  Clone ID: MRT4577_98706C.1
accgctccccccactcgatcgtcacgactcaagcatccaacacgctcagactctgagtccgcgctctcatcgacgatgcgagacatcgctctcgcactgcgcgagacaatgaatcctgtccatgtctaggttatctgtcaacagctgtatctgacatctgacatcgcacactgagcctatgtgtagatgatgtatctcgtcccccgagatgtctaactatttgactcatggc

SEQ ID NO: 183248 - DNA, 598 bp, Zea mays
  unsure (1)..(598): unsure at all n locations
  Clone ID: MRT4577_98707C.1
tcctgtttctatcgctaagccactgataagttctgccaagtcaaaactgaagtaggcttacaagtttaatccttgtaactcttcttgagatatttatttatgtggaaaaaaaacaggttttaggatgacctgaggatgcttttggtgtatatctgactttcaatactgtaacattcagttttctttattgtattaacaattcgcaaggtcacaccgtctgtaatgtttaccaaaaaaaatcttggttttctcccaatgtttctgctatctaggcaggtttaattcagtttcataatattgtatccaataagattgtagtctattttaccaatgtttcttctgtgtttggattttcatttgggggtcatggtatttagagttattaaagaaattgttcagaactgacagctgataaacatcaatcacacagattgaaatgagcaaaggacacatgcagtgatttcatcttttttccaagttgacaagggtggtccatcattgcagcaatattgctgtcctatgctcttagcatttgtgctgntgnattgtgcaacaacggcacggctgaatttgcaagtggctcttattgccctgcctc

SEQ ID NO: 183249 - DNA, 1421 bp, Zea mays
  unsure (1)..(1421): unsure at all n locations
  Clone ID: MRT4577_98708C.1
ttgggtacctcgaggctggtcacgactcacgaccatgatttggtaaagaaagcaggaggaagccggcggtgtaggcgacccatggctccacagacgaggagagagaggttggcgggggaggcgcggccgagctcgtcggggctaacaccggcgaagccgggggcggtcgaggtgcagcgccgacgggtgggcagcggttggacgagccgtcggatctccatctacgcctcccgagtctacttcctcctcatcatgctccagatcccgctcttcagggtcccttgtagagctggcacatgcacaactcctattcaagtaacatcatctcagttggtctcaaatgatatattcccagcagctgttgtgaaggccatgctctaccctggagctaccgtgagcagcctaactaaaagcaagacatttccgagttggaatgacctgtttgacatgtacaacctgacagaagcaaaaaatgcttctgcagtagttgatctccagcgtctagagatacttgccggaagctacttctgtgttgctggagcgctcattggcatcataaatcctgggaggatgactttgtttggtacccttttgattatctggggtatggtgaaagaagcactatttgggaagccagtgaacagtgatctgactcaatcaacttatgtctacccaaccattttgattgcacttatctgtgcattcatgtcaataacttacaatgtaaagaagacagcaagaagtagtactcctgtttctatcgctaagccactgataagttctgccaagtcaaaactgaagtagacttacaagtttaatccttgtaactcttttgagatatttatttatgtgaaaaaaaacaggtttgaggatgacctgaggatgcttttggtgtatatctgactctttcaatactgtaacattcagtttcctttattgtattaacaattcgcaaggtcacaccgtctgtaatgtttacaaaaaaaaccagctaaatcttggttttcccccaatgtttctgctatctaggcaggtttaattcagtttcatattgtatccaataagattgtagtctattttaccacaaggatggaaagttgtaattcctgacaggttctgggtcagttgttattcttctgtgtttggattttcatttggggggtcatggtatttggagttattaaagaaattgttcaaaaaaaaaaaaaaaaaaacggccatcacacagattgaaatgagcaaaggacacatgcagtgatttcgtccttttccagttgacaaggtggtccatcattgcagcaatattgctgtcctatgctcttagcattcgtgctgttgtattgtgcaacaacggcaaggctgaatatgcangtggctcttattgccctgcctcatggtctccatctgtgcctttttttttt

SEQ ID NO: 183250 - DNA, 278 bp, Zea mays
  unsure (1)..(278): unsure at all n locations
  Clone ID: MRT4577_98709C.1
ggggcgaaaggggaggggaaccancaaggagccggggcccncccaagaaaaccaaaagaaagcgggagcccacacaaganccaacgggaaaagccaangangagaggcancgggggcgcaacgcccgcgaccaaaacacaaacacnaaacaggnaggaccgcccggcngccncggagagcccggccacggaaccaggagccccaagggggccacaaaccggcaagcagaacaggcgaagcaggaagaaccggaagccggggnacggggccaaacagcg

SEQ ID NO: 183251 - DNA, 730 bp, Zea mays
  unsure (1)..(730): unsure at all n locations
  Clone ID: MRT4577_9870C.1
agggaacaaaggaaaggactagatgnccgacacatgcacgtgtattgtacactccaaagcaatgcaagtgattagtgagataaatcaagagatcaaaatctctacgttggatttgtgttttatgattcattcagcacccttatgttttcagatgcttgacatgtgatgtcttgttttgggtttttttcgatgattacttgtgtcgacatgatatgtggattaatgctgaagtgttatccaatattcagtgaaaacgaggtactgaaaaataggagttgcaatgcctttgatgccccattcatctgtttttgcatgtccttgtatttgctgcgagaacttccatctactaagacactctataggagacacttgcagcatcagatggcttaaatgccatagcagattaatatatgaaactttcctctcaagcagaagacatcaaagtaaacttcttagtacaacagttctagcaagaagcacaagaaaagtaagcagtcatttagcaatagtcatcattttgcatggtaaatcagttgaatcatcaattgaagtgtacatgcagtcagagtttgaacagcttaactcacttcattgctacaatgttgtggaagagttttctgtagtcaagactaaatggcctgcaactgtccttgttttttatattgaaactacaagcttctcacattgtgatgacagaattattgagttttcagttccgtgatcttatgaa

SEQ ID NO: 183252 - DNA, 267 bp, Zea mays
  Clone ID: MRT4577_98710C.1
aaccgggccgacccacacgtacctcattcccttcttaataaactccaccgctttttttttaccttcttatccacaccatcaacgtgctttatttaaccagtcacccacatctcttatttattcacttatgaccccataattaaatacatattcttccaatcctttgctccacacataaaacacatacccacatctattattcatgatcattttcttttcttataaaacttttcatcatacttaaatttacttctttttcttttaaac

SEQ ID NO: 183253 - DNA, 155 bp, Zea mays
  Clone ID: MRT4577_98711C.1
atggggaccgaaatccataatgatgtttaagaagaggaatttagttttccacaatgatacttgaaaccccaaactactaaaaaaacatgttgtacaaaacaaaacaagagaggttataccacatcgtttaaattctcttcacaactttaaaatgg

SEQ ID NO: 183254 - DNA, 665 bp, Zea mays
  unsure (1)..(665): unsure at all n locations
  Clone ID: MRT4577_98712C.1
gccggccgggccgtgaaaagtggggtgagagcggcacggttgatctgaagcatgagctggagcaggtgatcctactgatcacctgccgatgcttgctggggagggaggtgcgtcagaatctctccgacgacgttgccgccctcttccacgacctgtgcaacgggatgcagcccgtgagcgtcatctttccttacctcccgatccccgcgcaccggcggcgcgaccgggcgcgccgacggctgagagagatgttcgccaccatcatcagggcacggaaggcctccgggcggtccgaagaagacatgctgcagtgcttgatcgactacaggtataaggacgggcgcgccaccacggaggacgagatcgccgggctactcatcacggtgctcttcggcgggcagcagaccagctccataacctccacctggactggggcctacctgctccagttccggcgctacctggcagcagccgtggaggagcaggaggaggccatcaggcgttgcggagataggatcaaccatgacgtcttggcggagatggacgtcctgcaccggtgcatcaagggagctctccgtctccagccgccgctgcccatagtgttccgttggtcgcactccgacttcgccgtgacgacgagggaaggcgnaggagcttgtcgtccc

SEQ ID NO: 183255 - DNA, 220 bp, Zea mays
  Clone ID: MRT4577_98713C.1
tctagaggagaaggactacaaaaccaaaggccatctccataaacatatccaggccacgaggctagcactacgaagcaagcaaatagcctgaccggatgtgctactagatcccgatcaaacgaaccaaacacagattgacaacccaccacgagcttaattccacatgaaaactgcgttgtttccggcagacaccctaccgctgcccataggatgagagcca

SEQ ID NO: 183256 - DNA, 458 bp, Zea mays
  Clone ID: MRT4577_98714C.1
gaaactgattatttaatatagtagagatacacacacaacatttgtactactaaataaaacaagggctaaactaatttacaagcagatccatcttctcgttaattaacttggacatgcatgcagagacggatgcatggttctgattctgatccgacgacgacagatccttttgtgttatgttatcactctgccgccaccactgggcatcccttagcgacgactcctggcgccgtcgggcaagcggccaggtcgcagcggtcgtcggcgacgctgccccaccactgcggcccgtagacgtcgaagtaacccagcgcgacgaaggtgaggacgcccatgaacgcgacgccggcgtcgagtccggcggcgagcacgtagttgtgtcgcatccaccaggccttgtagcggcggtacacgacgtggttgaagatgaatccgaggagcccccacatgatgaagtt

SEQ ID NO: 183257 - DNA, 230 bp, Zea mays
  Clone ID: MRT4577_98715C.1
acaacggggaggtgaccgtggtgacgctgctcaactccaagctctttcacatgaacatgtaccggggcaaggacatgctgatcaaggacgtgaccgtgacggcgcccggggacagacccaacacggatggctttacttgtgcgactcattcgggatcacgatcaccaacaccgtcattggaagcggcgacgaatgcatcttcatcggccccgggacctacaaggtgaaca

SEQ ID NO: 183258 - DNA, 986 bp, Zea mays
  Clone ID: MRT4577_98716C.1
gtcttcccccctccctctgccctcgtgctcctcccgtcaccctcgtctccactccccgtgacgaccaggaaggaattcttcctccgtccccgttcgccccgtcgtctcgtcgttttctcacctgcgtgctgcgttcgcggacaaagtgtggaaaattgaaaacctgagcgcaaacaaacactctggtattgtactatatagattattataagacagagggaatggtctttgcctcgcagcttcttggttggtgactcggcggatcctgagcccgagcctcgcaggagggagaagggggagagcggaggagaaaccacctttctttccgtttcagacaagctcccagctttgaccgccgccgctgtgtgtgtgtgctccctgaatccctgtcgcgtcccaaatcggagctcccctccgtgcacgggacaccgacggtcccggcgtatacactcccccacagatcgatcagctccgcctccgtaagataggcaagcaatgaggtgccttctctcttgcacaggagacgccaatattatatatgaggaggtacctagaacatctattcagattcgtacactaattgatgctaaaggctatgttattccttggctaattacacatgtgaagcaagctagaagctcatcttgtacccgcaacaagttgatacttgcagcacgtggacaaagctagatggcgtggacaaagctagatgggaagcctagtataattgcaaagtgaatcagttagattctagtagttactaaaatttttaagtgatatttgtatgatattgccactttggctttgcttctttgtgaacacaattggcagttactgaacatgtttgctatcgagttagttagcttcttgatattttgccaaggccaaaagcaatattattgagggtttataatttgattttttaacattcatctcgatgcacatttatatatataaatatataaatgaaagcatctttttttggc

SEQ ID NO: 183259 - DNA, 511 bp, Zea mays
  Clone ID: MRT4577_98717C.1
tgttgcgttttggttcgttgttcgtacgaaaggaccccacgcctacggatccttttgccgtataaacgggcagcacacacccctccagaaaccgatcgatgtagaccgctgctagacagcgaacttcaagcaacacgcggagccgatagtagaggctacagcttggtcagaggcctaaccaaacgttgcatagagtagcgctgtatgcacaactaacgcacggagggagtgaaacaatgaacaacgcagctagactgcacatggccaacggacgatgcgctgttcccaggtcactttcggctgagttggtgcatgcaacaaacccttaaaaaaagaattttaaccctgacgagaacaaaaatctatgatctctagggcagaccacatgccgtggatcccccaactggtgtcaacaagcaactgtttgcctgaggattatctctcccctgctggtctttgattataacaacacttgactgactgacaaagttaattcacacagcgcatggac

SEQ ID NO: 183260 - DNA, 1538 bp, Zea mays
  Clone ID: MRT4577_98718C.1
gcgcgagtggacacaggccagttgaaccaatacgaacccgatcaactacatcgatgcatcaccaacccaagcatcccaatccaaacaacttgtaatttgaaactagagattgcgaactgaatttaaatcaaatacttcagtattggtctctagagaggaagctctgccaaccattactaataactgagaaggatttggcaatcgcttatctttgactcaataccttatgacctcggaaaggtttgaacccgtcagggactaaagatgccaaaggttgaagaagggtcacgagcaaagagggcatttactatcctttgcaatcttcaccgttggaaggattatgataactgcaatttcatttcttcttggatatgagctccacaagaggatgagacccctctcttcgccatatgtataggacctaccttcttgacatgacctatgcatccaaaagttctgagatgacccacttgtggtttactgccatgccatgcctcatatggagttttcccttgcacacttcttggcaatattatatatgaggaggtacctagaccatctaatcagattcgtacactaattgatgctattggctatgttattccttggctaattacacatgtgaagcaagctagaagctcatcttgtacccgcaacaagttgatacctgcagcacgtggacaaagctagatggcgtggacaaagctagatgggaagcctagtataattgcaaagtgaatcagttagattctagtagttactaaaatttttaagtgatatttgtatgatattgccactttggctttgcttctttgtgaacacaattggcagttactgaacatgtttgctatcgagttagttagcttcttgatattttgccaaggccaaaagcaatattattgagggtttataatttgatttttttaacagaaaaaaaaacaaaaaaaaaaaaaaaaaaaaaaaaacaacttgatggcaatgtagtcatagatttgccaaatgatcctatattgcacaacatgagaactcgaagggttcaagctgccagcatgggcatatcagaatcaagacaaaagcaagtctcccttatttccctgataaacaaaggcagagttgtggccaaagggaagttagtgactacaaatagccaaagagaaatattaggagcaaagcttggaccagaatattgtggggttcttgttgaaggccttgaaaatattgaacttggcaatattatagatgaggaggtacctagaccatctaatcagattcgtaccctaattgatgctattggctgtgttattccttggccaattacacatgtgaagcaagctagaagctaaacaagaaacgcaccccccccgcccctgcagcacatggacaaagctagatgggaagcctagtataattgcaaagtgaatcagttagattctagtagttactaaaatttttaagtgatatttgtatgatattgcccctttggctttgcttctttgtgaacacaattgcccgcccccccccccgtttgctatcgagtt

SEQ ID NO: 183261 - DNA, 261 bp, Zea mays
  Clone ID: MRT4577_98719C.1
tagggcatcttttctcgaacactctcacgaggcacatgggtcaatctggacggtgtagcgggccacggcccgctattgcctggcatactctctttgcgccacttcctgatcccgaacggcgtttcgcaaccgatgcgagtacatcaacacgctccatgtacatcttcccggcggatctcctgttcatcgagatcatcgagcagttcctgtcgtggagcgggccctgcaccactgcgctcacggtccactggattattcttg

SEQ ID NO: 183262 - DNA, 1438 bp, Zea mays
  Clone ID: MRT4577_9871C.1
ccggccggggcatccccaactccctcgcgctcgtccctgctcgcggacggcggcgcctatggaaggtgagccgccgccgcatacatggaaggccccgcggccgtttaccccgccgtctctctcgatccccaaatctctcgcgctctatggaagtcgctctatgggatccccaaatcgacggaatcactgctcgcggacggcggcctcgatccgcgctcgcgctctacatggaaggagctgacccggctctagatctggacctcaagttcgagtcctcgctcgaggccatggtgctactgcagcgctccgtcgcggcagtgggagctacccttcaaggacgacatctcctccatggaggacaaggtggatgagaggctcagcaaggccatggtggtggtggcgtggtcgacgtatcggcatgacagcatcggatgagtggcgccgacggggtgttaggcggaagagcgtcaccatcagcccgaagttgtcgcagagccagaactgcatctacctccacggcaccatcggtaaggacctcttcacacacaagtaggtcgtccagctctctatgaagatccggggccagagtcgacgatggagtccgagagggcgccatctctcctccctcgctcgttggccaatggaaccgcccacccccgccatccgcgccggtcatgaggaggaggaacatcgagcctgggcgacacaagcaacatgtggcctaggtgcgcgacgacgagggacctactctgctccaaccaggtcctcgcgtcatcccaggcgcgtccctcaggttgtggtgtgcggatccaatcctatcttccccggatctggtgtcctctcgcccgggagggggcaagtgcggcgggtgctgcgctgcccaccggcgcacgacacatggagccccacagacgcggacctagcggagcagctcctagagggcttcgtcgagaggacgagcggcagggaaccgaccggagttggcctcgccgacgtcctccgggtccacagggacgccaacatcgcctccacttgcgcgtgtctccccagatcggcaagcgcgggtctggaccagcatgttggctggggaagatgacgacttttttagtcatcggcacggcgccctgttacaattgcaatggctcgagcctccaccgccgcgatagatcggtcctaaactctatgcccggcccacaccttcaataaagcccactggcggtccagacaggagccggaagtggcaccggccaccgttgaacgtgtccagtcggctcgagtaacaacggcaatagaatgggcggcggcgggagcagcagcagcgaggatgacggagaccccacgtggaaggcagccattgactccatcgcctccgttgggttcagcttcgctttgtccaatggcgtggcgatagcaggctctagcggcagctgcgaggtga

SEQ ID NO: 183263 - DNA, 1792 bp, Zea mays
  Clone ID: MRT4577_98720C.1
cattgggtacctcgaggccggccggggtcttccccctccctctgccctcgtgctcctcccgtcaccctcgtctccactccccgtgacgaccaggaaggaattcttcctccgtccccgttcgccccgtcgtctcgtcgttttctcacctgcgtgctgcgttcgcggacaaagtgtgggaaaatgaaaacctgagcgcaaacaaacactctggtattgtactatatagattattataagaaagagggaatggtctttgcctcgcagcttcttggttggtgactcggcggatcctgagccagagcctcgcaggagggagaggggggagagcggaggagaaaccacctttctttccgttccagacaagctcccagctttgaccgccgccgccgccgccgctgtgtgtgtgtgctcccttagtagttagtccctgtcgcgtcccggatcggagctcccctccgtgcacgggacaccgccggtccgggcgtctccactcccccccggatcgatcagctccgcctccgcaagataggcaagcaatgaggtgcctgcctttcttgcatggagacaccaaagagaaggatccagtcactaagtcggcctctctacggtccatgagcacaacatcaacggagcgcgatgtccgctccggttcagacttcacctccttgaatgtttccgacatgagcgccgagtcgataaggaggacgcagtaccccagcttcactgaccgcccgtctaacctgagggtgttctcctttgctgaactgaagagcgccacccgccaacttcagccggtctcttatagttggccggcggtgcatgggcggaggggagagcggtttccgagtcgtcgcatcaggtccgatcccctcgattcgccggcggcgccaccaaccagcaagctgccagagttccagatcggtcttggaacaattgttgtccagtctagtaatcttctttcacctcaggaggcacaacttgatggcaatgtagtcacagatttgccaagtgatcctatattgcacaacatggtatgtctaagctaattgtattattgtttcaattaaaatataaagcataatttgattaagtgatgctatgatttgatgtttattatagagaactcgaagggttcaagctgccagcatgggcatatcagaatcagtatgtggttttatttgccttatttctttccaattatgacgttgttttaccaaaagatcatatgttcatgttttgtaatttgtagagacaaaagcaagtctaccttatttcactgataaacaaaggcagagttgtggccaaagggaagttagtgactacagatagccaaagagaaatattaggagcaaagcttggaccagaatattgtggggttcttgttgaaggccttgaaaatattgaacttggcaatattatagatgaggaggtacctagaccatctaatcagattcgtacactaattgatgctattggctatgttattccttggccaattacacatgtgaagcaagctagaagctcatcttgtacccgcaacaagttggtacctgcagcacgtggacaaagctagatggcgtggacaaagctagatgggaagcctagtataattgcaaagtgaatcagatagattctagtagctcctccaatttttaagtgatatttgtatgatattgccactttggctttgcttctttgtgaacacaattggcagttactgaacatgtttgctatcgagttagttagcttcttgatattttgtcaaggctaaaagcaaaaaaaaaaaaaacac

SEQ ID NO: 183264 - DNA, 887 bp, Zea mays
  Clone ID: MRT4577_98721C.1
ctctcacccccatatccctccccgtcttccttccccccatttctcccacagacttcggcctcccgaatctcgaaccctaacctcatcggcgacgaggggagccccgcctccgcctcctgcttctctgttatgaacaacttccatgtctacgaggccattggccgcggcaagcactcgacggtgtataaggggcggaagaagaagaccatcgagtacttcgctgttaagagcgttgacaagtcgcagcgctccaaggtcctcaacgaggttcgaatgctccattccttagaccatgccaatgtcctgaaattttactcttggtatgagacctccgcacatttctggttagtgttggagtattgcgttggtggagacctgaagggcttgcttgaacaggataagaagcttcctgaaaattctatacatgacctggcttacaatcttgtcaaagctcttcagttcttgcattcccaaggaattatatattgcgatctgaagccatcaaatattctgcttgatgaatttggatgcatgaagctgtgtgattttggattagcaaggcgcttaaaagacatcgagaaaactaatcctggagatgtgccacaacccatgaggggaacaccatgctatatggctcctgagttatttcgagatggaggagttcactcatatgcttctgatttctgggcacttggatgtgttttgtatgaatgctatacaggaaggcccccttttgtaggtagagaatttacgcagttggtcaaatctgtaatttctgatcctacaccacctttacctgataatccatcaaggtccttgcaaaatttgattgattgcttactcatgaaagatccggcagaaagatacagtggtctgaattgtgtgaa

SEQ ID NO: 183265 - DNA, 506 bp, Zea mays
  Clone ID: MRT4577_98722C.1
ctgggttttccttttttttttttttttttttttttttttttttccctggcaaattccatttcacagcacaccacagcacgggcatcacttgggtttatgaagcgtcagttccaaaaaaaaaaaaaaaaaaaaaaccccgacttcccggttgttgttccgggggggaaaaaaaaccaggcccaattcaaaccccccaacctagaagtggggatttttaacatacgagctgtaaaaggaacctacaaataaaagcagttgttctgatctccataaaaggaccaaagtattttgtttctgccctcactttgaacaatcctccgttgaaaactttgcacctgacaggagccaaagccggaaaaaaaaagggggggcgtgagctcaggaaatgccgacggttttcccgagcagccacatgacgagggaaacctcgttcatgaagagggcgggcagccccccccggtccccacaaagccgtacaccgggacccccgcccggttgttctccag

SEQ ID NO: 183266 - DNA, 713 bp, Zea mays
  Clone ID: MRT4577_98723C.1
gtctgccgacagtaggcttctactaagtggaagcaaggattccactctaaaggttgtccacttgacttaagctgtactgttgtgttgttcattggacagcacttactctgtcatatatatatgtataggccgcaaattttttttttttttttttgttcaccaaatgaatgcatttcagatctgggatattcgaacacacaagttgaaaatggacttgccgggccacgcggatgaggtgtacaccgtggattggagccctgacggtgaaaaggtggcgtctggtggcaaggatcgggtcctcaagctatggatgaactgattgattattatatatctatgcttgggcgaattatatattgtagtgatgataattttgaaggtatactgagatcaattacccggccgggatcaaaaaaaaaaaaaaaaaaaaaaaaaaaaaaaaaaaaaaaaaaaaaaaaaaaaaaaaaaaaaaaaaaaaaaaaaaaaaaaaaaaaaaaaaaaaaaaaaaaaaaaaaaaaaaaaaaaaagggggggggccctttttaaaagaaaaaaattttatttcggggggtttgaaaggtaaaattttttttatggggcccctaaaataaaattagggggccgggttttaaaaagtggggaaggggaaaaacctggggttacccaaattaaaaggcttggaaaaaaatccccttttgcgcagtgggggaaaa

SEQ ID NO: 183267 - DNA, 198 bp, Zea mays
  Clone ID: MRT4577_98724C.1
attcggctagagcatacacaaggaggatgtgtatgagaacctgcacactaagaacaagagggaggcgaaagtgaagaagcagcggtcagcagacaaggagaagagcaagggttccctcaagaggaagtgagcggtgctgtcctcagcccagccctgaccctgtggaagcatttcgcgatggacagatacacaacctga

SEQ ID NO: 183268 - DNA, 4594 bp, Zea mays
  Clone ID: MRT4577_98725C.1
gactttggctcaacataaggaggcagcatggttagtgccctgtccaggtctccttgtcctttttgcactggatatctgtcatggatggccgaaccctccctcgccgagatcatggcacagctgaagtccctcaccgcggagatgacgaccttgaagtcagacatggcggccatcaaggacacgtcttcatcctccggcggcaacattgctgcccgacgtacggaaggcctccgtgatcaagacttccaccacaaacatcgaaagtgggattttcctcacttcgacggtacgaccgatcccatgctcttcctccacaaatgcgacgcctatttccaccaccacagaactatggcggaggagcgcgtggcactggcgtcgtaccacctggacgacgtcgcccagatgtggtttacccaactgcaggatgacgacggcacaccaacatggggacgtttcaaggatctcctgaacttgcgattcggtcctcccctccgttctgccccaatgttcgaactctcggaatgccgccgcacgagcaccgtggaggagtactccaatcgtttccaagcccttcttccgcgtgccggacgcttggaggaggcccaacgcgttcagctctacacgggcgggcttttgcctcctttgagccacgcggttcgcatccataaccccgagaccctcgccgccgcgatgagtctcgcacgccaggtcgagctgatggagttggatcggatccagcaggctccgccccgggccacctcacgcgcgctgcttccaacatcggcgccccgagcgacggttccggcggccccagcatcattggcgctgcctgccccagcgccacccctgctagcacttcaggcgccgccacccaggggcgctcccaacccggttaggcgtctctcgacagaggaacaggcagaacgacgccgcctgggtctctgctacaactgcaacgagccgtattcgcggggccataaccgcgtttgtcgtcgcatcttcttcatcgacggcgttgaattggatgagggcgccatggacgaagaagccccggtgttttccctgcacgcggtcgctggtgtacccggcagcaaaacgatccagctgccggtccgggtgggcgcggccgacttcatcgcactcattgacaccggttccacgcacagcttcattggggaagaggctgcccatcgcgctggtgtccacatcgaacagcgtccacgtctgacggcaaccgtggcaaatggcgagcgtgtttcctgccctggggtgctccgtcacgcgccagtgctcatcgacggactccagttcaaggtggatttgttccttatgccccttgcaggctatgacgtggtgttaggaaccaactggatggcgccattgggggacatcatgtggaatttggcggctggcactatggcattccagtatgcaggcaggtctgtgtgctggcagggcctcgctcccaagacccctggtcgtctccactctgtcgaggctagggaaccattcctcgacgcactcctgggtgaattccaggacgtcttcgccgacccaagtggcctgcctccggagcggggccggacacaccgcatcgtcctcaagcccgacgcaactccagtggcggtccggccataccgctaccctgcagcgcacaaagatgagttggagaggcagtgccacgccatgatcgctcaaggcatcgtcaggcgcagcgactccgcgttttcctccccggtcctcctcgtcaagaagcaggatggatcgtggcggttctgcgtcgactaccgcgaactgaacgccatcacggtgaaggatgcgtaccccatccctgtcgtcgacgagttgctcgatgagctccatggtgcccggttcttcaccaagctcgatttacgctccgggtaccatcaagtgcgcatgaggaccgaggacatccacaagacggctttccgcactcacgatggcctctacgagttcttagtgatgccattcggcctgtgcaatgccccggcaacattccaggccctaatgaacgatgtactgcgtccttgccttcgtcgttttgtactcgttttctttgacgatatattgatctacagcaagtcatgggcggaccacctccgacacctccgcgcggtcctcagtgagctacgccgccatgtcctcttcgtcaagcgctccaagtgtgcgttcggggagccttcggtcgcctacctcggacacacaatttcggcggacggggtggctatggatgcgaccaaggtccaggccatccatgactggccggtgcctcggtcagcacgggcggtgcgcggcttcctcggcttggcagggtactaccgcaagttcatccacaattatggcaccttggcggcaccactcaccagtctgctcaagaaggaaggtttctcctggggtacggaggccgccaaggcattcgaggacctaaagaccgccgtgacggcagcaccggtcctggccatgcccgatttcgccaagtccttcgtggtcgagtgtgacgcttcctctcacggcttcggggcagtgctcatccaagatggtcacccagtcgctttcttcagtcggccggtggcacagcgacaccgcgcccttgcagcctatgaacgcgagctcatcggcttggttcaggcagtacggcactggcgcccgtatctatggggacgccgtttctgcgtcaagacggaccactacagtctcaaatacctgctggatcagcgccttgccaccattccgcaacaccattgggtgggcaagctgctggggttcgatttctccgtcgaatacaagccgggcgctgcaaactccgtggctgacgcactgtctcggcgagacactgaagacggggcgctacttgccctctcggccccccgctttgacttcatcgaccgtctacgccacgcccagctcgccgatccgaccctcgtcgccctccatgctgacatctcggcggggtctcgccaggcaccttgggcgctcgtcgacggcatggttcactttgccggtcggctgtacattccgcccacatcgccgctacttcaggagatcatgggggcggtccatgaagatggccacgagggcgtccagcgcacccttcaccggctccgtcgtgacttccattttcccaacatgaagcaacgggtgcaggatatggtgcgcgtgtgcacagtgtgtcagcaatacaaatccgagcaccttcaaccggcgggcttgctccttcctctaccagtgccacagggtgtctggacggacatcgcgatggattttgtggaggccctccctcgcgtccgcggcaagtcggtaatccttaccgtggtggatcggttcagcaagtactgccacttcatccccctggcgcacccatactccgctgaatccgtcgcccaggctttcttcaccgacatcgttcgtctacacggtgttccgcagtccatcgtctctgatcgggacacggtcttcacctccgcattttggcgcgaactcatgcgcctgttgggtacaaagctacacatgacgacggcgttccacccccagtccgacggccagtccgagtcggccaaccgcgtcatcgtcatgtacctgcggtgtttgacgggggatcgaccacgccaatgggtcaggtggctaccttgggctgagtacctcttcaacacggcgttccagtcctccctgcgcgacactccgttccgcgtggtgtacgggcgcgacccaccctcgatcagatcctatgagccgggcgacaccagggtgcaagcagtcgcgaagtccatggaggagagggcggagttcctggccgatgtacgctaccgcctcgagcaggcacaggcgacgcagaagctgcaatacgaccgcgaccaccgctcggtcagctaccaggtcggcgactgggctctacttcgtcttcggcaacgatcggcgtcctcattaccacaagatatgggtggtaagctcaagccacgcttcgtcgggccgtatcgcgtcgtggaactcatcaacgatgtcgctgtccgtcttgctcttccggagggcgctcgcatccacgacgtcttccacgtgggccttctaaagaagttccaaggcgctccacccgaggtgatactgccactgccaccacttcgtcatggcgccatcgaaccagaacctgagcacgcggtgcgctatcgtctcgcccgtggcgttccacaggttctcatcaagtggaaaaactgctctgccgcgtcgtctacttgggaagacaccgacacgttccgcactaggtttccctccttccagctcgaggacgagctgactctcgacggagagggagatgtcatggtcgggcgcacgtatgtgaggcgacatcgtgcccgtgacgtgcgccgcgccctagagcaagcagcggccaggcaggacagctaagggataggataggatagcctgctgttatccagttccttagattgtggagtgctgttattcagttccttagattagggagttccttagattatggagtttgttgctcctttcggttgggcctctggccatataaaactgtacccgcacaggagataagaaatcaagtattattagccta

SEQ ID NO: 183269 - DNA, 478 bp, Zea mays
  Clone ID: MRT4577_98726C.1
ctcctgccaggtcttatccgggaggcgagcgagcagatcactgccttgttgaggacgaacgctttcttgcactgcaacactgaccatggcatggaccacatggagtttaccgaggccgagcagcaacatgaacgacgtggagtcctgagtaccagaagccccagaacgctactgaccacgaggcatgagtacgaggaggaggaggacttgtttgcttatcacatgcgagggagagggctgttatggctttaagccttctagtgcatagggcaagcaaacctgaagagttcttgcatcctttgccgctgagacatatctctactggtatggtacccacccattgtggaccattcacaaacatgttgaagtctatatttatgttgggctctggaaccttggtttagaaaccgtgctaattaagccttgaggtgaagccatgggtaaagacagggcttacccctctatatgtgcaagctta

SEQ ID NO: 183270 - DNA, 225 bp, Zea mays
  Clone ID: MRT4577_98727C.1
ctgggggtccggcgcgggccgggtaaatttcccaaacgcaaaaccggatgctctcatcaggttgccttggcacattcggctgcgggatctcgccccgacgccatggacgcgatcgagagggtggtgggtccgctgcgggacttggccaaggagcagcatccgagttgagaaggcgctgtcacaagcccggccgtagggtgttcaccaaggggacaagacgggacg

SEQ ID NO: 183271 - DNA, 301 bp, Zea mays
  Clone ID: MRT4577_98728C.1
aacccttttgttgcgaaccgctaacaaactgcccagcccggggggccacttggaggcgcacagcgcccacatagggcacgagaccgaaaagaacaggcgcacaacagacaaagagagacaagggtgaccagccagacagcccgtcaaagcgcatgcaaaccgggcccaacaagaaagcgggcagaacacagccgcagaggatctactacagcttgcgtccaggcccgcacagagttcttggacagaaaaagccctatagacacggcagggagcgccaaaatggacagcaacgacgaacaaa

SEQ ID NO: 183272 - DNA, 729 bp, Zea mays
  Clone ID: MRT4577_98729C.1
gacccccgaggctggccgggttagtgtatgtatatcctctgctcctcgtccccacttggctggccgagcaggctccgggaaatgcgtctgtagatgcaaaagttatgaaggctgtcccagattggaagaatgccctgcctaaggtcattttaaacttgtttatcgagctttgcattgcagcctgggctgcttctgatttgctcagcatcacgttaatgatgtcgctttaacttgactgatatttgagttacatgactgatgtttgagttacaaacatgcagtattttaccctatgggcaaaattggcagatgatgagaatcaaagacaattgcgtctgctgtgctccttattcatcggggcacaatgtcatgatgaccatgtctaggggaatctctgatgctaatgtgaattttcttatatactccatctcttccaaatcgttagatgttttggcttttatatatatattgcttttgctatgtatctaaataatactccctccgttcataaatagttcataaatatatgacacctcataaacataaatatatgacacggcgaccacccctcttatttaaaaaatattttaaataatgagttatcatttacttactcttcttattcaaaaaaataatgaattatcattaacttttttgtgatttgttttatcacttaaggtagtttgtatttggcttaaaattttatatttttgaatacatattttgaat

SEQ ID NO: 183273 - DNA, 386 bp, Zea mays
  unsure (1)..(386): unsure at all n locations
  Clone ID: MRT4577_9872C.1
tctcctttttaatataaagcttgtgaaaaaaaaannatacaacataccacgatagtacattacacgcatacatacatacatacatattcatgaattatgaaatagaatggattataccataccaaacattttttcactgaacatacaaacccttcctacgaccactagaggggagggggaatattcagtgcaaaaacacactcacacacacacaggacaggtcggatacaaatgaaaacgtaccggaacgtgcaccgttcgttgttcgaacacaagactcggtcactctgaccatctaagctgatgcgagcgttcatgctcatttccaatagtgaaacaatctttcgaacgaactgtcgacctgtcatcctatttaacaatcccta

SEQ ID NO: 183274 - DNA, 1247 bp, Zea mays
  unsure (1)..(1247): unsure at all n locations
  Clone ID: MRT4577_98730C.1
agaaagaggacaatatccgccgtggccttttcgatttactacagaatattgtccttatcagagatccagaggactccacaaaattctatccccgtttcaacctggaagacacatcaagttttagggaccttgatgaacacagcaaaaatgtcctcagacgcgggtattataactattattttgttcgccaagaaaatctctggcgccaaaatgccctgaagactttgcctgtcctgctgaactcgtcagatatgttagcatgtggagaggaccttggccttatccctgcttgtgttcaccctgttatgcaagaactggggttgattggattgcgtatccaaagaatgcctagtgaaccaaacttggaatttggtattccttctcagtatagctatatgacggtttgtgctccctcatgtcatgactgctctacattacgtgcttggtgggaagaagatgaaggaagaagaagtcgtttctacaagactgtagttggcagtgatgaggagcccccatctcgttgcaccccggaagtagtgcacttcattgttcagcagcattttgacgctccatcaatgtgggcaatctttccacttcaggacctccttgcactgaaagacaagtacaccacaagaccagcgccagaggaaacaatcaatgaccccactaacccaaagcactattggagattccgtgtccacgtgacattggagtccctgctgaacgacaaggacatccaggcaaccatcaaggacctggtcacaagcagcgggaggtccttccccggaaagaaggcggaaggtgccgacgagagcggggagaagctgtccaaggtgcagctgaatggtaaagcttaggaaaggattgcgagagctgctggaagtgaccacggttacaagtaaataaatagaataaggcgacagattgcatcaccgtgttgatccaggtgatgctgtttctgctaggaaattcttacccatgtgatgttctttcaactctggaaataagaagcaccctctaccaagtcagaaagtgaaataatccatccagtgtcggttttcattaatagaattttctttgaccgcccagttatttcttgagagtatttttgcatgagcctgattcaagccattgaaatggcctccttctgtctgttgtttgtggtgtcctaaactcataagcaaccgaaatcggtgaataaacgctgctagttattttagttatttaatttatctgttnctgagaat

SEQ ID NO: 183275 - DNA, 252 bp, Zea mays
  Clone ID: MRT4577_98732C.1
gcgggccgcgagtgttttccttttccccaatctatccgacgccagagagagtggcgactggtgacgcgttccggtccccccaatttccatcgtccggctgtgcgactaccccgatccggatcctatcgcctgcccggagcctctattccggcggcggtgacgacgattcgaccgcgttattgaccactcagagatgcaatgaggggatgaatttccatgacttggaggcggcccatgatcgtggtgcgccgc

SEQ ID NO: 183276 - DNA, 436 bp, Zea mays
  Clone ID: MRT4577_98733C.1
cccacagccaaaaaggggccctggcatttccccggcgggggggaccccacggggttaaacgggtttttggggcccggcaaaaaaaaacccacctgggcattaaaacccgggcccataagaacaaaaatccggggccggagagggggaccccggcccaaccggggggccccaaaggggcaaaaaagggttattataaaacggcaaaacgaattttcttttagggggaaggggggggaataaaaccacgcaggggcttccttcggggccccaaggggaccagcacgttccgggggttttttaagcccagggaagaccatctggggcccgggaagggccttcttaggggaaagcggggggccaaacaggggggtccccccccaaaccacagcctggttttggttccccggggaaaaggggtagccggggggggaccccg

SEQ ID NO: 183277 - DNA, 341 bp, Zea mays
  unsure (1)..(341): unsure at all n locations
  Clone ID: MRT4577_98734C.1
ggaannacccgggctcgacgccagcgcgnntccggctanngcacctcatctnntgcagcaggcgtgagctcgttccgacccacgatccgtgcccgtgtgtgtggggtgggaggatgtgctacangnncagcttaccgcttcnnccatggcngnnagccaggtngnnatgaagaaagcagcncnncggtgcacctttcgagtgccgagnnngggccttgnntcaggcngctttngcgctcacngnncggcccnncggcccnncggttcaagcgnnntcgtcaagtgcccgcnccatccanngcctcgagaagtggcgaacgtacccccaggtggtgggcagc

SEQ ID NO: 183278 - DNA, 452 bp, Zea mays
  Clone ID: MRT4577_98735C.1
ctgcaggtaccggtccggaattaattcccgggtcgacgagctcactagtcggcggccgcccttttttttttttttttaaagaacaaagagaacatgtttcttgtttttgcaagcactgacgaacatgctgtccaacaacttgtaatgaactaaactgcaaatttaatcgacaatcaaaacaaaatatgctaggattgatctaaatattttgctatatgtgtctctatgatgtgtttgctatacccagccgcaagatctaatctttacatatgaccacgaagcacgggagaagagcactcgggttgagcaggtacagctcctcgatgcttgaatcgtcaccgacctggccggcgaccgagtcgaatcccggctgcacggcgaagtcctggctcagcttctccagcggggcggggatcctccccgcgataaccctgcacacgagcagcgcgtgc

SEQ ID NO: 183279 - DNA, 104 bp, Zea mays
  unsure (1)..(104): unsure at all n locations
  Clone ID: MRT4577_98736C.1
ggcgcagnagagtcgagaggacgacgaacgnacgaggcgtataaatataatagcagcgtctaaataagatcctggtcaactgcacccggccatttatcgatccc

SEQ ID NO: 183280 - DNA, 468 bp, Zea mays
  Clone ID: MRT4577_98737C.1
cggccaaaaggctacggggccaatcgcgatcaacccgcaaaccgtcgcacaaaacgaacataaaaggggttcgggccgaaaacaaaaactactacgggctgggcattccgaactcggggggggcttcccaggcccgacctgacatggaaaccaaaccaatcgttaataaagccgccccccctgggggttttttccgcaaagacccccacgcgacgacatccaccgggttgtccatctgtttactgggggggggggctgccaagctcttaagttttgtaaaaagctttttaagcacctacacccatccgttggctgatatatgggtttatctccaaggataagccatgggccctcttcgggtcaagaatcttggggcttttctaaaattctttccttgattccttccttgggccagattgccagaccctaccaaaattaggcagccaactagaataaaatgttgcggga

SEQ ID NO: 183281 - DNA, 698 bp, Zea mays
  Clone ID: MRT4577_98738C.1
gcagcgagaagagattggcacgggcgaggccaatggaggaggcgcggcgctgcgcggatctgcgggagaagttgacagttctgttgaggacaaggtgattgcagcagaacaattttctcctacctatattggagctcaagtcactgccaccgaattaagtgaaaaccacctgattaattgtggcagcagtgaaaatgttttacttgaagatactggacctcaaatggatgccagtgaattaagtgaaaacggccttgttgactgcaccagcaattctattgaaattgtaaacgaaagcagtgggactgaattactgattgctttgactaatggaagtcaaaatatcgtggaacgtccagctgagcgagaagacagcattgatgaataccaggatgcatctccgtttcttcatccatcagattctgaagatggcgctgcaccaagttctgcattttctacagaaatgagtaatttgaatgctattccatcagggtcaagtgtaactacagatgtaaattctctaggaacaaatggattactcaaagatcaaatttctggggaacccaatatgacagaaatatctgctgactctaaagctggacgtaatttggaggaaggagctcttagattggctaaacatgaagtaaacctgaagcttgggggtccatatgaacaatctgtgaatgttgactacactt

SEQ ID NO: 183282 - DNA, 2846 bp, Zea mays
  Clone ID: MRT4577_98739C.1
gattgaccgcctcgaatacgggcattcgaaaggattgactcctaacaaccgcaaccgctcgcttttcctcacctccccacctttcgctccctccctccctccaattgcaggatcggcaccgatgcgattcgaccgcggcctcgcatccggtgcggaggtctgtcattggagggaggctcctctccgctgcgcgcgcgcgtcgcggcctgggcgagtttcctgctggttcctcgtccctcggtacgcgcttcacgccctgtggagagattttgcgatccttggcgttactgttcgattgcaaacagtattgctgcttctctgaggaggcattaggatgggcagttgaactgaaccgccgcggcagaaatccattcgtgggagagagaaatcaaagaggagagtgagtgatcatggagcgcgtgattggagggaagtataagcttgggaggaagattgggagcggatcttttggggagctatatctcggtgttaatatacagaatggtgaggaagtgggaataaaattggagcctgtgaaaacaaaacatccacagctgcactatgaatctaaagtgtatatgctactgcagggtggaaatggtatcccacacctcaagtggtatggtgtcgagggggagtacaatgttatggtgatcgatcttcttggcccaagcttggaagatttgtttaattcctgccacaggaatttttctatgaaaacagtactcatgcttgctgatcaactgataaaccgagtggaatacatgcattccaagggatttattcatcgtgacatcaagccagacaacttccttatgggcttaggtcggaaagctaatcaggtctatatcattgattatggacttgctaagaaatacaaggaccttcatactcataaacacatcccgtacagggagaacaaaaatctgactggaacagcacgttatgctagtgtgaatactcatcttggaatagaacaaagtaggagagatgatctggagtctgctggctatcttctgctatattttttaagaggaagcctcccatggcagggtcttaaagctggcactaagaaacagaagtatgacaaaattagtgaaaagaaaatgcttacctcggcagagattctttgcaaatcttacccgccggagttcgtctcatatttccactattgtcgctccctgcgatttgaagacaggccagattactcttcaatgaagaagctctttcgtgatgtatttatacgggaaggataccaatttgattacgtatttgactggactgcactcaagtaccctcaaatgggctccaacaacaagcttgttcaacaaccaagtgcaagaatggctggagttggaccatcagttgagagaacagacaaagcttccatgggacaagagatccgggataggttcactggtgctgttgaggcattcgccagaagaaatccaggctctgggcgccctgcagatcattccagtcattccaggcacaaaagctttgcagattcctttggaacgtccaacgaagcagttgccgactcatcagagaaaacgcgcatcttgtcccggggagggagctcgtcgaaaatgcccgcagctccgtccacccggccgacctcttcgggggactgcagtgaccagaaccgccggtgggtctccggcagcagtggcggcagcgggcgcccgtcccccgcgcagaggctccaccactcgggaggcgccgagaacagcaggtcgtccccgcgctcccccgtggcccggaacgcggccgggaggggaggctccggctcgcgggacagcacgacgttccgcagcctcgagcgcctctccatcaccaccagcaggaggaagtgagctgccgaggaccacgccgacgaattctgagagtgaaaggcggttactaggccgaggaacttttgcgggatcgttgctctctgcagctgaagcaaatcggcaaatagatgatggatggatggttacaaggctgccatgaaaatgcaccctttccccaaaccccagcgtatagtataacgctctccccaaactccaagagggaagacaactccaaagtacaatgcaatcttgattcacggcaagctttctgttttgttttgccgttctggcactagttttaaagtcttattgcataatccttccatttgcctatacattttagtctcatatacaagattctgagttaattttgtttctagtcgccatggagatcattccaggcaccaaagccttgcagattcctttggcacatccaacgaagcagttgccgactcagagaaaacgcacatcttgtcctggggagggagctcgtcgaaaatgcccgcggcttcgtccagccggccgacctcctcgggggactgcagtgaccagaaccaccggtgggtttctggcagtagtggcggcagcgggcggccgtccacagtgcagaggcaccaccactcggcaggcgccgagaacagcaggtcgtccacgcgctcccccgtggcccggaacgcggccgagagaggaggctccggctcgcgggacagcacgacgttccggagcctcgagcgcctctccatcaccaccagcaggaggaagtgagctgccgaggaccacgccgacgatttctgtgagtgaaaggcggttactaggccgacatcttttgcgggatcgttgctctctgcagctgaagcaaatcggcaaatggatggacgggattgcagcgcaatgacctcgaggatggcctcctttacaagaactgccatgaaaatgctttctccaaaccgtaacgtataacgcttcccccaaccaaccagagggaagacaactccaaagtacaatgcaatc

SEQ ID NO: 183283 - DNA, 264 bp, Zea mays
  unsure (1)..(264): unsure at all n locations
  Clone ID: MRT4577_9873C.1
tatttaacacctntgtaggatggnncatgttgtgccttgtcgtaangggaananatntnccattattnataaagtatttattaagacngacatgatgatganncgcttggggcaaatattccggagatgcntaaagaatgaggaaaagattnaccgttgactactgccgtttggatttcaccgattacccctgtttcaaggggtaggtggatggntncaaacattatttcccggnaaaaaaantaaanannccnaagaaaaaaa

SEQ ID NO: 183284 - DNA, 409 bp, Zea mays
  Clone ID: MRT4577_98740C.1
cttttgtagtttttttgaccgatgatctctttcttccagacacatattacaccaattatgagaacgaagtatatgcaattttcagtactcctccgtgcttctgtttgtggttgtattggttacacgagtttgcttggtcagccatgtcatctcttggtcacaaggcatacctgattgcaatgtattacaccatgcattgttctgtgccctttggtttcttaggtactatatagtgtacatacatatgatgcttcggttcgttgtcaaatttggcctaacagcaatggtttctgctgaaggatggtggttccttgtcgcttgttccgtttctttgaagcatctttcttcacttctttcggtggttgtaattttgtgggaataaacacagttcaaatcttaagtttttcag

SEQ ID NO: 183285 - DNA, 549 bp, Zea mays
  unsure (1)..(549): unsure at all n locations
  Clone ID: MRT4577_98741C.1
agaaccgcaaccgctcgcttccccgcacctccccacctttcgctccctccctccaattgcaggatcggcaccgatgcgattcgaccgcggcctcgcatccggtgcggaggtctgccattggagggaggctcctctccgctgcgcgcgcgcgtcgcggcctgggcgagtttcctgctggttcctcgtccctcgggagagattttgcgatccttggcgttactgttcgattgcaaacagtattgctgcttctctgaggaggcattagggctatgggcagttgaactgaaccgccgcggcagaaatccattcgtgggagagagaaatcaaagaggagagtgagtgatcatggagcgcgtgattggagggaagtataagcttgggaggaagattgggagcggatcttttggggagctatatctcggtgttaatatacagaatggtgaggaagtgggaataaaattggagcctgtgaaaacaaaacatccacagctgcactatgaatctaaagtttatatgctactgcanggtggaaatggtatcccacacctc

SEQ ID NO: 183286 - DNA, 3525 bp, Zea mays
  Clone ID: MRT4577_98742C.1
ccgtcctgcaggatcggcaccgatgcgattcaaccgcggcctcgcatccggtgcggaggtctgcaattggggggaggctcctctccgccgttggaaccgctgcggcgtcgcagcctgtgcgactttcctgctggttcctcatccctcagggagagattttgcattctttggcattactgtttgatggcagacagtagtgctccttctctgtggaggcattggggcaaaaggcagttgaactgaacgggcacatcaatagtctctggcctccaagggaaattgggaaattcagattgaacgtggctgcatcatttttcctttcattggtcttttcagcaacagcgatccattctcgtgggagagagagagagagagagagggagagaaatcaaagaggagagtgatcatggagcatgtgatcggagggaagtataagcttgggaggaagattgggagcggatccttcggagagctatatctcggtgttaatatacagaatggagaggaagtgggaataaaattggagcctgtgaaaacaaaacatccacagctgcactatgaatctaaagtttatatgctgctgcagggtggaaacggtatcccacacctcaagtggtatggtgttgagggggagtacaatgttatggtgatcgatcttcttggcccaagcttggaagatttgtttaattcctgcaacaggaaattttctatgaaaacggtgcttatgcttgctgatcaactggtgagtttattcattccatattcaaccttacgctgccctgcaacagttaggaggcaagtcaactttctggaatttgataacagctattggttgggagttacatgttcagaagtttcatgagcattctgccataagtgttgccttcttttgtgggttttaattccaaagtattagatcattgatggtacaaatggatttcatgaacaccgtatgttgttctaagtgtatcgcaggcaagctttgcaagattgtacatattttaagtttgattctttttccttagtgggtgttggaaggagagcgagattttattattgtcctggacttacattattaaatcttccatttttagataaaccgagtggaatacatgcattccaagggatttattcatcgtgacatcaagccagacaacttccttataggcttaggtcggaaagctaatcaggttaaaccccaaatgtcatctgcttttgttattttcagtataaaaagagcatagtagttacttctctaatactaataatatctggtaataatccccgagattcttactcgtcaatgaacaatatgtgaagacatatcctttttattctgcaggtctatatcattgattatgggcttgctaagaaatacaaggaccttcagactcataaacacatcccatacaggtgaagcatattaatgaagttttcacttataactaaccctggactttgttgggccaaacaattattccattaaattgcaagttcataagcagaaactgggatgtgataattcgtgcaacctctatactgcacctatgtgataattcgtgcaacctctatactgcacctatgtcacaacttcctaggtgttgtttggtttatatatttgtaacgtaataggtaacagataatgttaaattatatttgtttaaatccaaccgtaatcatataccacactacaaattgataccggtctattcaagtgtgaatcgttatcattgtcatttacgttacatttcgtgaatcaaatggcaccctacattttgtcaagagacactggctaatggtacactgttgggcaatccaactgaggttttgtatattaaatatagtatcggatcatggtagagaggcaacctgagtggattgtttgatcttgcgatatttacatgtaaatttcagaaataaaatgacaaattactcaaaatgttcatgtccaatcgtgtcatgttgttgtgcattagtatcttcttgaaagcccaagaataagttttaacaccaaggttaaaagtagtgtcacatcacatgcaaatatttaatgcgttttctgtgatatttgcaaactaggacgctaggttcaaatttaatcgatagattagacataaagtgaaccttttcatttttgtgactacttgttttttatggtaaatgattaattttttttatgcacagggagaacaaaaatctgactggaacagcacgttatgctagtgtgaatactcatcttggaataggtgagctcaatgagcaaatcaaatatgttaccatgtgtctgcaattgcattaaaatcatacgctttttaattcttggatgcttggtcatgaaataaacttaacctgacgattgacgaaggagaagctacttaatctaatgctttcaaaaggagggaaacacaatgtatttgtttttcatgtacctgtacttgtttcatccagaacaaagcaggagagatgatctggagtctgttggctatcttctgctatattttttaagaggaaggtttgtcccgaaaatctgtatattttactgtatttcctcttttactaatactatacttgacatgcttttacgttatgcttagcctcccatggcagggccttaaagctggcactaagaaacaaaagtatgataaaattagtgaaaagaaaatgcttacctcggcagaggtacttctttttgccaacacgaacattgtaatcctgtcatggtagctgttgcagacactgtttgaactaacattgtcttaaacagattctgtgcaaatcttacccgccggagttcgtctcatatttccactattgtcgctccctttcttctgagtgaccccgctaatgtgaccattgttctcgccaggttgccgactcatcagagaaaacgcgcatcttgtcccggggagggagctcgtcgaaaatgcccgcagctccgtccacccggccgacctcttcgggggactgcagtgaccagaaccgccggtgggtctccggcagcagtggcggcagcgggcgcccgtcccccgcgcagaggctccaccactcgggaggcgccgagaacagcaggtcgtccccgcgctcccccgtggcccggaacgcggccgggaggggaggctccgcctcgcgggacaacacgacgttccgcagcctcgagcgcctcaccatcaccaccagcaggaggaagtgagctgccgaggaccacgccgacgaattctgagagtggaaggcggttactaggccgaggaacttttgcgggatccttgctctctgcagctaaagcaaatcggcaaatagatgatggatggatggttacaaggctgccatgaaaatgcaccctttccccaaaccccagcgtatagtataacgctctccccaaactccaagagggaagacaactccaaagtacaatgcaatcttgattctgtcgatctggcactagttttaaggtgttattgcagaatccctccatttgaccataaattttaaaaacgtatacaagaatctgagttaattttgtttaaa

SEQ ID NO: 183287 - DNA, 233 bp, Zea mays
  unsure (1)..(233): unsure at all n locations
  Clone ID: MRT4577_98743C.1
ccgggcggaaaacccggggcgacccacgcggccggacattgaaatatttagagcagggagggcgcgaacacggagagaaagagggggggatgttcatacgaccgcgcaacccgcccccacgggaggcggacgcaggaccgccgacagtcggaggcctgatccaccccaagacacgctcgcctcccgtgcttactaatgccctagtcgaggggggncgcactaagaggagccaa

SEQ ID NO: 183288 - DNA, 194 bp, Zea mays
  unsure (1)..(194): unsure at all n locations
  Clone ID: MRT4577_98744C.1
agggcacatttaggggggacaacgggaagagaggggacgcgaggcaccgcgacggaggaccaggggccggggacggcgagggcgaagaccggaacggaaccaagccccnccacagaggagcgcgcaccagggaagcagncgacgacgagcccaaggcaaacgggacggacacagcacaacaggccgggggggga

SEQ ID NO: 183289 - DNA, 406 bp, Zea mays
  Clone ID: MRT4577_98745C.1
cagcaccacatatgtggatgccacccccacccccaccctcatcacaacaaggtggaatgcccccgcctcccatgtctatgccgccaccgcctccaccaccatctggttaaacacacgcaaaggaaagtaccgtgtggtcaatgtgcaagctgtaactgtagaccaaggatgctggttcctttcatatatctccctgtaacttgtccacgctaggtgaagatgaaattttggagttcacctgacagatacaaacgcgagattaacatgtatttttcttctgttgaagatgaatgtatttttgtggttgcgtacccattttttgtgttccctaatgccccgatacgtttacaacgatcactatgcacatgttctgttgccactgaaaactattgaaggtggatatttc

SEQ ID NO: 183290 - DNA, 271 bp, Zea mays
  Clone ID: MRT4577_98746C.1
gaacataatactgacacgaaacaatttattaatagaaatatgtttattagcctataaaatatttcattacaaaacaataacatagcatgccatgatacataagcagttaggctggtatgcagcttgtgtttgtggggggggggggcttgtcttcctaggaagatcctcatgagtataccagagttgcgaggtaaccgcggaatctgaaatccaagatgaccatgccaatgcctatatttgcataggcctggctgcctgtggtgctgcctgc

SEQ ID NO: 183291 - DNA, 726 bp, Zea mays
  Clone ID: MRT4577_98747C.1
ctctccagaagataacgcctcaattgtaaagcagacatcaataaccttctgagagacactcggaagttcttcacgacaaagttcaattcggtgatgaattattgcagaactcaagtacataccaatctcaaatgcattcatttgccgatgaagttgaggtttccaacgttgatgtggactcagctgcaacgaactttcagcatctaagcttgcaaaaggaagatcaagcagcagctaattctgctgatgataatccagcggttataatccccgatcatctacaacttgaaaatacagactgcgcgcatctgagctttggtagttttgaatctggtgccttctctgggttgcttccatccaaggtccctaaatatagtatggaagaggtgcccaactcagatgaaactccagcagttgatcaaatagatatcaggaatcaagattactatgacaatggtgctctacagtcatcagcaaatgaggatgttgaaaccagaataggtaccaacattgagaatattgatgccccttcagtttcgcagcctgatatactgatgcaaggtgctctagatgtgtctggtcttcagtataacccaccatcagtttcagatcatgtgtatccgaacacaacacagccaagtataatggagagccaacaaggaaacgctcaagcacaacatctttctcatttttcaagcttgctggcacagcaagctaacactctgc

SEQ ID NO: 183292 - DNA, 541 bp, Zea mays
  unsure (1)..(541): unsure at all n locations
  Clone ID: MRT4577_98748C.1
tcctaagntcctccctcgcctccccaccctgccccacccatggactccgccgccagcactgccgccgacgccggggccccgactgcgccgtcctgctcatcgctctatccaacactgtatcgtccaacgccgcttcctgtccccgccacacagcgctctcaacgcttctcctgccaaccatcctcctatcctagcgccatcacaggcccagcatcgcggtgctcacgttccctcatccaccgcgaccgcgaacccgctgcgatatgtgaagagaagtaaatgaccaccgcgataagatacatgagcgcgctattctagtcaacgacgaacgctacatagaggatagaagaatatatgttgcactatgatttgcgactgacgtgcatgtattctgcaatatggagccacgacacatgggcaggactgaggatcccacatcgccgtagctatctcaagtttcagcatttcaactgtgatcttgcaataagatggcggatctcatggattaacaatgaaatacaccaagtatgcgttcttgagc

SEQ ID NO: 183293 - DNA, 791 bp, Zea mays
  Clone ID: MRT4577_98749C.1
aaccaactaacaaaggcagagctgaacgcgaaagggagggagctcggatcggatgcggcggcgcgcggaggtggccgtggtgggcgcgggcgcggcggggctggtggccgcgcgcgagctgctccgcgagggcctcaccgtgtccgtcttcgagaagtcaggccgcgtggggggcacctgggcgtacagcccgcgcgcggacgcggacccgctgggcagcgacccgggcggccccggcgccgtgcacagcagcctgtatgcgtcgctgcgcaccaacctgccgcgcgagctcatgggcttctcgggcttcccgctggccgggcgggcgttcgccggcgatccgcgcacgttcccgggccaccgggaggtcctcgcctacctcgacgccttcgccgcggattccggcgtcgccgcgcacgtcaggctccgagcccaagtgctgcgggtgaggccgctctgtcggggtcggggacagggggagaagtgggctgtggcgtggcgcggggaagacggcgacgtcacggaggaggcattcgacgccgtcgtcgtctgcaatggccactgctcggtgcctctagtgcccaagatccgaggaattaacaagtggcggggaaagcaaatgcacagccacaattaccgcaccccggaaccattccgagatcagagtgttgtagtcgtaggattgggagccagcggaatcgacatcgctagagaaatctcacacgtggccaagggaggtgcacatctcagctagatactcggaggggcaggctcggaaagattgaactcta

SEQ ID NO: 183294 - DNA, 135 bp, Zea mays
  Clone ID: MRT4577_9874C.1
caaggggcgcgcgaggcggacagcgctggagtggtgggtggagtcgaagaagctatggcacatcgtgggcacggccatcttccaacggatcacactgtacggagtcaacgtcgtcacgcaggccttcatcggcca

SEQ ID NO: 183295 - DNA, 333 bp, Zea mays
  Clone ID: MRT4577_98750C.1
acggctagtgacagatgctctagatccgctcatcctggcgggctagtgaggtcgtaagcggggatcgaatcaaaagatgctggacaagctgtgggacgacgtggtggccagtcctcaaccggagacgggcctcgagaagctccgcaaggccaccaccgcccgtccgctcgttatcaacatagacgcgaacggcggcagctacaagctggcgcagtcgatgccatcgaccccgacgactccgatgacgccttcatcgtcgtattcatcgacgacgccgcgcggcgcccgcaacatgtggcgcatagtcttgcacacggggatcaacctggccac

SEQ ID NO: 183296 - DNA, 2503 bp, Zea mays
  Clone ID: MRT4577_98751C.1
aggcgggtcctcccccgccaagcccggggaggggctccgcctcgatctcacctcgctcccgtcgctcggtcccaaaggatcttgcattgccaccaacggtgcggtctctagtattgccacccacggctccatcgagtgctcgcacgaccgcggatgcctcagaaaatagtacaaatgcggttaaacacctgacctctacgttttgctcagaataatccactggtactagattgagctcgtattctgaagcaagatcagttgagcgtacagaccgtcactcagaagtatccagtaatgctcaacttggagtgtatacttggcggaggacagggagcagagcggccgcgtgcttgtgcattgctgccagggggtgtcttgctccacgtcgctggttatcgcctacttgatgtggagggaaggccagagcttcgatgacgccttccagtttgtcaaggctgcccgggggatcgcaaatccaaacatgggctttgcgtgccagcttctccagtgccagaatcgtgtgcatgcgattccgttgtcaccaaattcagtgctcaggatgtaccgcatggctccgcactcccagtatgcccctctgcatttggttcccaaaatgctcaatgacccatcccctgccgcgctggactctagaggcgccttcattgtccatgttctctggtccctctatgtctgagttggaatgaagtgtgatccggtaatggagaaggatgcaaaggctgctgcgtttcaggtagtgaggtatgagaaggtgcaggggcacatcaaggttgtgagagaaggtctggagccgcaggagttctgggatgcattttcaagtatgccacctaattcagatagtaatacaaagattagcaaggaccagatcgattcagcatccaagagtgacccaggaagccggaaaaatgagtcctatgacgctgattttgagcttgtctacaaagcaatcactgggggagtggtccctgcattttcaacttctggggctggtgatgagacccatcttccagcatagggaatgatgctggagtttactgagacacacgctggtgattttgtttcatcgaaaaggcctcagcgatgctcttcctataaaggttttcaaggagcatgaaacagagaatcttttggaactactgaattttagttaacattaggcggtagctatcaggatattgtagttgcttaacaaactcacccaccccacaaattgtcattcaacgaaggcatgccctccagcatcagtcggtaccgatgattgtcagcgaggtataaagcctctaccatccccttcccttgaacataacaggccctacagacagattccattttagtagaagcggtggatcgacaactgcgcctcgttggtctatcttttgtccaaatggcaggatgctgccaatgggcgttgtaagcgcaatcagccaattgggtggtaatgtaagctttagctttagatactgggagatggtctgtcaacagttacttttagcctaaacattcttgtacatctttgaaagtgaacagatttgtaatccttgtggcatataaatggtaacattgttcataactttaaaaaaaaaaaagcggccaagtttgagatagcattcggaaactagattaattgagcgtactgacagtaactcagaagtctgcagtaatgcacaacttgtagtctaccagtggcccagcatgggaaagctaactacatttgcacgcaaggatcttgacccgaagtcggttttaatttttgttacttcgaatgccatcaggagaggagaagcagttaaaatggtgtatgtatgggtaggaggcgaaaatgagagcagcaagagtgttgactctgttgattggcaacaggtcactagtgattttcttcatctaaagggcctcagcaatgttcttcctgtcaaggttttcaaggagcatgaagctgagaatcttttggaactactgaatgttagttaacattaggcagtagctatcaggatattgtagttgcttaacaaactcaacgaaggcatgccctccagcatcagtcggtaccgatgattgtcagcgaggtataaagccacagccattcccttgaacataataagctacaaacagattccgttctgcaactgcgcctcatgatctatattttgtccagatggcaggaggctgccatgggcgttgtatccgttgcgaattagcattcgtggtgtaggcgcaatcggccgattcggtgtatattatccgctcccctgtaatgtaagctcagatactgggagctggtgtgtcgacagttactttttagcctaaacattcttgtacatctttgaaaggaacagagttgtaatccttttgactatgtaaatggctccattggtcataacttctaaaccatgtagaactcagttgctagctggtaataaacagttccatacaatttactaaatgagctaaactgcagtttctggtaaaaaaaaaaaaaaaaaaaaaa

SEQ ID NO: 183297 - DNA, 354 bp, Zea mays
  Clone ID: MRT4577_98752C.1
ttttttttttttttttttttttttttttttttttttttttttttttttttttttgtttttttttttttttttttttttttttttttttggggggcttttttttgtttttttttttgaacacccaaaaagggaaagcatacagggaaggggggttacacccatcacttgttcgggccctaaaaaaacccaaagcgcaattaaaaaaccccggggggggcaaattgaactacccccggccccggggattgtccgaaggcgacacaaaaaaatttttggaggggcccccaaaacccaaaaaagggggatcaaacatttgtgggggggccagggccccagcaaggctaccaccccccc

SEQ ID NO: 183298 - DNA, 663 bp, Zea mays
  unsure (1)..(663): unsure at all n locations
  Clone ID: MRT4577_98753C.1
gcccagcatggaaaagctaactacatttgcacgcaaggatcttgacccgaagtcggttntaatttttgttacttcgaatgccatcaggagaggagaagcagttaaaatggtgtatgtatgggtaggaggcgaaaatgagagcagcaagagagttgactctgtcgattggcaacaggtcactagtgattttcttcatctaaagggcctcagcaatgttcttcctgtcaaggttttcaaggagcatgaagctgagaatcttttggaactactgaatgttagttaacattaggcagtagctatcaggatattgtagttgcttaacaaactcaacgaaggcatgccctccagcatcagtcggtaccgatgattgtcagcgagatggcaggaggctgccatgggcgttgtatccgttgcaaattagcattcgtggtgtaggcgcaatcggccgattcggtgtatattatccgctcccctgtaatgtaagctcagatactgggagctggtgtgtcgacagttactttttagcctaaacattcttgtacatctttgaaaggaacagagttgtaatccttttgactatgtaaatggctccattggtcataacttctaaaccatgtagaactcagttgctagctggtaatctccagttccatacaatttact

SEQ ID NO: 183299 - DNA, 1602 bp, Zea mays
  Clone ID: MRT4577_98754C.1
ttactaattctcgttggattttaacgatgcgccacaggagttttgggatgcattttcaagcctaatactaatacaaagatagcaaggaccagatcgattcagcatccaagagtaacccaggaagccggataattgagtcttatgacgctgattttgagcttgtctataaagcaatcaccgggggagtggttccagcgttctcaacttctggggctggggatgagacccaccttccagccagagagagtagctggagtttactgaggcacaagttcatctccaggtcgctagctcgtgtttattcagattctgctctaatcagggattttgatccacgggtagaccgtgtacagcacctggctgctgaggcatcgacctcacctcctttcctttctccaagctccttctcatcggattcaagcgccagctcgaagtataattcagattcaccctccttatcacctacaactagctccccgccatcatttggcctctcgcctgcttcatctaatctgcctcaagctcttgtgccatcgtccaggtctcctctttctcaatcatctaatgcaggggcttcaaagccttctggcctggaatcaatacgctctccttccaagacctcttctatagcagaaagaagaggaggcttcacacttctaaagctaccatctctccaaaaggaccttgtattgccaccaagggtaccgtctagtattcgcagaactgacgaggccttggataagagttgtacaaatggtgtcaaaaggccgactggtgattttcgctcagaaaattgcactgataatagttcaagcttgcattccgaaaccagattaactgaacgtactgacagtaactcagaagcttgcagtaatgtgcaactgttggtttaccagtggcccagcatggaaaagctaactacgtttgcacgcaagaatcttgactcaaactcggttttgatttttgttacatcgaatgccatcagaagagaagcagttaaaatggtgtatgtgtgggtaggaggcgaaattgaaagcagcaagagtgttaatgctgttgattggcaacaggtcactggtgattttcttcatcgaaaaggcctcagcgatgctcttcctataaaggttttcaaggagcatgaaacagagaatcttttggaactactgaattttagttaacattaggcggtagctatcaggatattgtagttgcttaacaaactcacccaccccacaaattgtcattcaacgaaggcatgccctccagcatcagtcggtaccgatgattgtcagcgaggtataaagcctctaccatccccttcccttgaacataacaggccctacagacagattccattttagtagaagcggtggatcgacaactgcgcctcgttggtctatcttttgtccaaatggcaggatgctgccaatgggcgttgtaagcgcaatcagccaattgggtggtaatgtaagctttagctttagatactgggagatggtctgtcaacagttacttttagcctaaacattcttgtacatctttgaaagtgaacagatttgtaatccttgtggcatataaatggtaacattgttcataactttt

SEQ ID NO: 183300 - DNA, 667 bp, Zea mays
  Clone ID: MRT4577_98755C.1
gatacagctaaacctatctttatcgtcagtacaacgcctccgccgctacttctattagctgatatatggctctacgggatctacaccttcgccgatatatacaccaacggacaaccccgcctcaaggctgccgatgtctacgagttctacagcgtcgatcgcgttggcaaagacttgccctcgtctccccaaccagatgaaggcccctgtaagcctttacctcaccaccatgagggcgatttgtccccgagatggaggcgagggctacgttgggaaattcgataccatctctctccacgtcgtgattggtgatcccgaggagtatctatagccctgaatctacacacatatcgagacggaacttatttctgaagaagaatctgaagtgccagattctgaaaccaaggagaactctgagctgctcgaaagacatggaaatgcgtatcataccttcagatcctggtcaatagcatgaactctatgaagaattctgcaattgcgctgaacttaaccctgatgctattgctgagagtgatgaagaacatgtctgcgaacatgatgatgaactgtatgacaatacggcacatgtaagcgacactgagtctgcaaaagctgacccaattgtccagactgtcgagcactctattaaccatgatgaaatcgagct

SEQ ID NO: 183301 - DNA, 348 bp, Zea mays
  Clone ID: MRT4577_98756C.1
tggtcgccgccgacatcctcagggactgctccaaggccgtcgccaggatcatcggcaagcccgaatccggacacaacttcggcttcaacggatccacattctaagtcgactccagcagaaaccgaagatgatggtcgctgcgtccaaacatccagctcaatacataccaacaccactacatcaataaacgctgatcatgtgtcatccatcacccgcacgtccatggaaaatcccgctcgagcacgagacgcaccaccactagtttatgggctttgtactttcacctgaaagcatgcagtgcatgatggcatgtatctgattccaaattttattgaacttcattttttc

SEQ ID NO: 183302 - DNA, 281 bp, Zea mays
  Clone ID: MRT4577_98757C.1
acaaatccgggggaaccagccctttacccttaacaaacatgttttggttacaaaaaaaagttcatttttttcccggaaaatgactcgggggctcaaaaactttatagctttgtacctaaaaaaataatcaaacccccctttaaccctggccgagctttgtttaaatattacaggctaccaatacttattaaggcgcatcactttaagggggggcccactgtggggcgcctccatcttgacctttttgggatctgcccctgccaacgggaggaaccccaacc

SEQ ID NO: 183303 - DNA, 927 bp, Zea mays
  Clone ID: MRT4577_98758C.1
ccggccgggaaaaactcgccctttcccctatccacgagcaaggcacagcagcagcgcaggggagtcggagtgacagccgcccgcaggatgccgacactaaacctgagcaccaacgtgccggtggacgcggtggtcgccgccgacatcctcagggactgctccaaggccgtcgccaggatcatcggcaagcccgaatccgtacgtcacgccccccacccgttcggcgcaatgcctcggtcgcccgtcccttctctttaccaatgcgtgtaggctccctcccggtcgctggtcagcggcggcttggctcagtgtcctttctgatgaaacgaaacattccccacgtgctgcgctgcggcctgcggtgcagtatgtcatggtgtcggtcaacgggtcggtgcccatgtcgttcgcggccagcgaagagccggcggcgtacggcgagctcgtgtccatcggcggcatcggccccggcgtcaacggcaagctgagcgccgccgtcgccgaggtcctcgaggccaagctctccgtcagcaggtccagattctacatcaagttcgatgacgtgcggggacacaacttcggcttcaacggatccacattctaagtcgactccagcagaaaccgaagacgatggtcgctgcgtccaaacatccagctcaatacataccaacaccactacatcaataaacgctgatcatgtgtcatccatcacccgcacctccatggaaaatcccgctcgagcacgagacgcaccaccactagtttatgggctttgtactttcacctgaaagcatgcagtgcatgatggcatgtatctgattccaaattttattgaacttcattttttcagtaatgcaattctacagccctaaaaaaaaaaaaaaaaaacccgaggcgtaacaggaaattgcactgacacgtgtgtac

SEQ ID NO: 183304 - DNA, 475 bp, Zea mays
  unsure (1)..(475): unsure at all n locations
  Clone ID: MRT4577_98759C.1
gttctacagnacctgtacgactagaagatgcgccgcggcagctacagctacaaccccaacctcatgggctgctgcggggccgtcatcggcatgtacatgtacccagcaacaggcctgcagggcagcatgcctggcccgtacccgtgctctcaacccggcaggccggcttcatttggtacggcctccacatagacggacgccatgcttatgaagaacgcctacttctgggccagctgcgcctactggctccctgccatactcggggctacaattgctaccgggaccagtactaggtggatcactgggggctcactcacaccgtcaacttacgagagggcaatccgattaatggacaattatgtagatgaactccaaaccaacgacatgaccatcaacgtggacttgatctgaagtgaaataatcaatcatttaagaataactctatcacgctggggcccctggtgctgcccttctc

SEQ ID NO: 183305 - DNA, 611 bp, Zea mays
  Clone ID: MRT4577_9875C.1
cggcatgtgatgcgggaatatatgaggtcttggagttgagggatggaggatctgattattttggcaaggattacgaactgaacttaaatcaaatacttcagtattggtctctagagaggaagctctgccaaccattattaataactgagaagatgttcgcgtacagggagacggtgttggaggaggcacatcagggcatggagctacatgagccctgccgccatatagttgacaacgatgaccaaccctgtagattccattctctgtgtgtacaccaagcgatgcgcttttcacggttactgcgaccgtgatgggcatctaggtgctcaaaccatcagttgggctgaggaacactgagcagcaacaacaatatcgtaaggagagtgcatatgttggacaaatggtatgccatatcttcagttctcttatgatgcttcagcgccgcatcttcagttttctcggctaaaaagagatcatagtcaatagtatacctatgtgtgaaatactgtcaaacttggtatatggacctcagaaagtataggaaagcgctatgctatttgcatgtttgctgggagaaagaaaagatagatgaaggtaattatcccatttct

SEQ ID NO: 183306 - DNA, 480 bp, Zea mays
  Clone ID: MRT4577_98760C.1
cttggatcctctacagcggacgcccttcccttttttttttttctcttttttttttttttttttttttttttttgggtttggtttttttttttttttcctttctttcccctctctttttaaaaaaacggaaacccccttttatacaactcaaatttaacaagccccgaaccctgaaaacttcccccttaagtccttaacccccacaaccaaaaaatacctgtaggcctcaaaaaaactataccacaaaaaacccccccctaaaaaaagaaaaaaggggaaaccaaaaaccccgttaaaataaaaagtaatacagtttatttttttaaccccctcgggcgggaaagaacccacaaaaaccgtacccaaaactattaccggaatcaaaaacctaaacccaacccccaagggggaacccttgttcccattggggggaaaaaaaatcccaagcctttccccccgggccaaaaaaaaccccccctt

SEQ ID NO: 183307 - DNA, 611 bp, Zea mays
  Clone ID: MRT4577_98761C.1
gttgcaaatgaatcatcattgctgtacacgagaacaggtctataaagtgtgtaaatagctagttagttatacattacatatctacatcaccttacatcaaggtacttaataacaagagttaaatattgaacaaggaatgcaaatttcttgcttccttcactttctgatttagaaaaaattaatatggtttggtattatttccaaagtgttaagtgttggatttatgtgctgcggcaagttcaacagataagatgaaagatgatttgcctgcttcccttatgtaacgtacgtctcccttcatgagctttaacagctttctgctaatcagcatgctaataccctcctcagattcatgtccatcacgtccaaacatctggttcagcaatgtttccatcaatgatgctgtcaagatctgagttatccagaattttgctaagctggcgttgacactgcgtgctcgtttgcagaaattgtttttgttcagctcccaattcagtaccctctaacaattttcgggagaacataatcccatataaaggattccggatttgccttttcaaataatttaaatcttttagtcttttcaatgcagtttgctcagaaaggagctg

SEQ ID NO: 183308 - DNA, 233 bp, Zea mays
  unsure (1)..(233): unsure at all n locations
  Clone ID: MRT4577_98762C.1
gcgcgcctatttttttgtgtggaagaggggagaggggggggagggggaagggnagtgggcccagttttgaaccacgtcgatggtaaggctcccccaagtttccaacattactcccggtccccataaagcctttccccccccttcgggtttgagccacccccaatgaagcgaatcagtcttggaatgaaaaagagtctttcctcctccaaaaataaagtaaccccagaggcggg

SEQ ID NO: 183309 - DNA, 432 bp, Zea mays
  Clone ID: MRT4577_98763C.1
ggagaacacgatctagcactcacaatctcgaagactcgctttggagaaaccacagaccagcattcgctgcaagcatcatggactacggtcagcagagggcacgacgaccacagcgccactggccatgtcatccagtacagctacccagtctgcgaagttgagcacggctccggctgcatgaggcacggcacgagtaccgacagcaggatgggccagctgggtgagcaccgtggcgctatcatgggtggtgggcagatacagcctgcgagggaagagcacaagacctgcagcatactgcatcgctccgccagctgcaggtgcagctcatatgaagacgacagcctgggcggaaggaggtagtaggcaatcaaggtgaagatcaaggagatgctggccagatgccacaaggacgaccaacacgccacggtgaca

SEQ ID NO: 183310 - DNA, 1369 bp, Zea mays
  Clone ID: MRT4577_98764C.1
gccaacccagcaccacagcctccacgcccatccccgcacccaacccgccacctccgtccctctcctcctcccttcgctccctctccctctcctccccgcgcggccgcggccgcggcgcagtcggacgccacccgctcgcttctacaaagattttccgcgctgccggctgcatctcccgttggttccctctacctcccttctcccctgccggcgacggcgaggagtacatcctacgcctcgagcccttcccttgtccccccatcgagcacaggaccggtgccaaaccccttgcccttgtcgtcgcctccaccccaggacaaggctcttccggctccactgcggcggcagtcacctccatcgccgagcagtttcttcccgatctccttgccgccgcggagagggtcaaggcagaaggcgcgcctaaggatgagttggtgaaactgagtctcgttgcaagactgggaacggtgctcttcgagtgccagcccggtggatcgcccgtttcactggacgaactccgtcaggccgctaaagcaggggaagatggttccaggagccagttgcgtaaaacgttctacaccagtttgtctagtgagtgtctggatgatatggagcgaaccatggtaaagaggattgggctggattttgattcgtccaagaagcactatcatgtgaaggtttctgacaagaatcgaagtgattctacaatatcttgcaaatgcaccgtggaggaagatgggagtcttgctatccataaggttgaattgaatcaggtactgcacttggtggaagacatatcctgtctttcaaaggtcttgatctaaggttgatgttgagtaagaaaaggatcctgaaaaacctagattctgaagtggaaaatgcagtaaagagcttggtgtctactgctattattgatcctaatgtgaaagggggagttagatggccacttggaaaggaatcaattggcgagaggttcagcatagttggggtgtggcacacggactacaaagctttcagaaacgagaccatgaggctcaagctaaggcatgctgacagattcgatcaccgtacctcgactgggggagtttctgatgaagttacattcaaactaactgctatatcttgcaaactggaggaagatgatctggcggagagcgctgtgaaagagatgctggagtctgcggtccaaatgctatgggacaatgcgctcaactaccgggtcgtgccttgagctccggttatgcagacaatagttcttccttgaagatgcaaagcgacatgatttctttgagcccctcctgtcctgtatatacatctgcgatggtgagactcaagttgtacttcaagtgtggcaacaattactagtact

SEQ ID NO: 183311 - DNA, 276 bp, Zea mays
  Clone ID: MRT4577_98765C.1
tgccatttggctctggaatttactttctgtgcgcgtgagataaattagttggtgccttatgccatatggctctggaatttattttctgtatatttttgcctgtatggcgcttgtgatctgcttgaaatctcactcgtatggtgtttattcctatatcattctctttttgactgaagctgaatggtgaacccttcagcttgtaaaaatctctagttttttcattgtttctttacacatctttccatagagaagatacaactacctgattatctttgt

SEQ ID NO: 183312 - DNA, 202 bp, Zea mays
  Clone ID: MRT4577_98766C.1
aaggagggcattcccccataccagcatcgtctgatctttgcggccaagcagctggaggatggccgcactctcgcggactacaacatccataacgagaccacccttcacctcgatctccgcctcaaaggctctatcccaatctcctgaaagaccttgtctctaaaaaccttaacccatcatgacatacagctactacactcaa

SEQ ID NO: 183313 - DNA, 373 bp, Zea mays
  unsure (1)..(373): unsure at all n locations
  Clone ID: MRT4577_98767C.1
tgcttcggaggcgtaagatccgcaaaggtgtctcatgtttctccttgacgtttgctgcgttggctgggctaataggtgtcctggtggggctcctgatgagcctcatcttctcttcgccgccggttgatgcataagatgcgagaaaaaggttgcagcctatggaagcattaattgttcagaccgacatggggagaaagctcgctcgggaaaagaagaagatgaaacttttgtcgtagtagtctccattttcattcttttgttgcttgcaccgtagttatatgaaacgatgataacgggttgcagatctttgatctttccacccgtgcttggttcanaaaaaaaaaattaagataagaataataatatttaaacg

SEQ ID NO: 183314 - DNA, 256 bp, Zea mays
  Clone ID: MRT4577_98768C.1
tagagttgcaaatgactgtcttgcatacttataaaagcatcctttggcatatagatttgctactatttaggaactgagatcatggtttcctcggttcatccacaaaattgaatagttgagatcatggtttcctcggttcatccacaaaattgaatagttgtcaattgttattattctctggaactgtcttaaactttggcactatttttgttcattacctccttgtagatactgtataaacattggtctctacctc

SEQ ID NO: 183315 - DNA, 488 bp, Zea mays
  Clone ID: MRT4577_98769C.1
accggccggaattcccggtccgcccactccgcggggaagtgccctgcaagacagttaagtgggagctgaaacaagttctctagctgcctccacaccacacagacacaatgctgccttccctgggcctccccagactgtcctggatgctgctctcctgcctgatgctactgtctcaggtccaaggggaagattcccagcgctctgaaaggatcagctgtcccagaggttccatagcctatgggtcctcctgttatgtcttgtataaagtagccagaagctggatgagtgcaaatattgcctgccagaggagacactcgggacaccttgcgtctgtgctcagtgggactgagggatccttcctggcctccttggttaggaacaacttgaatacccaatcagatgtctggattgggctccatgaccccacagagggctctgagcctgatgctggtggatgggaatggagtagcactgctatgttcaattat

SEQ ID NO: 183316 - DNA, 272 bp, Zea mays
  Clone ID: MRT4577_9876C.1
gacgtctcatgcacgcgttcggaatcctggagagctgtacaaccttcgcccctttgcttgtttttttagggatcatgcttgcatggtacaaatttaaagtgggtatacgaggaagcagcgtacatggaaataaataaagaccgcatgaactcaaaaataaaccaaacagccaaaaggacatggccggctctccgtctcctctctctcttaacacacacacaaacacatcggcggacttgctcagatagggtttttcttaagccctgaaggac

SEQ ID NO: 183317 - DNA, 1028 bp, Zea mays
  Clone ID: MRT4577_98770C.1
ataaactccagccacttcggcatgcgccgggaatttgattcttctgcctaaaatagtcacgctaccttccacctccccctactactctgactctccctcgtcttcttcgctaccaagatgatggcggaggcgtggacgccggtgctgttgccggcgacggcgccctgcttctggcagcaggacacgcactcggttttgtggcggagaggagacgcgtggacggcggaggagaacaagctgttcgagaaggcactggcgcagatcgaccggaacgcgcccgacaggtgggagaaggtggcggcggtgctgccctggaagacggtcgacgacgtgaggagccagtaccacgccctcgagaaggacgtgggcgtcatcgaggccggcgggctcgtgccgttcccgcgctacagcggctcggtcccgccgccgtccgggttcgccctcgaggactggggcggcggcgaccgcgggttcaggcgcgcgcgcggctcggaggagatgcaggagcggaagaagggtgtcccctggacggaggaggagcacaagcttttcttgatggggctgaggaagtacgggagaggggactggaggaacatctcgcgcaagtacgtgacgacccggacgccgacgcaggtggccagccacgcgcagaagtacttcatccggctcagctccggcggcaaggacaagcggcggtccagcatccacgacatcaccaccgtcaacctcccaggcgacgccccgcgctcgtcgccgcccgcggccaccaccaacccctccgccggcgccctggtggtggacgtgaagcccttcgtgtgacgaggataaaaagtggcacagcctcgtcgtccagctgccagctcgcggcagctccgagcgactgcgttcatcgagaacaagacgccatgggcggcaatgcggcatccgtttcagttcagtgtacataattcggcaagtacagagcccaacaacttccacgtaaaaggtactgaataataaagcattcgaggaaaaaaaaaaaaaaaaaa

SEQ ID NO: 183318 - DNA, 1845 bp, Zea mays
  unsure (1)..(1845): unsure at all n locations
  Clone ID: MRT4577_98771C.1
gtaccctcggggccggccgggaaacacgtatctagcagtccaaacaagggcgtaatctcgccaaatgacacgttgccaagtcgcgcagcagattcattcatcgcgaggttcaactaggaagacgatgatgggctggtgatcctgacggtccaggcgcggacgcagtcgctgatgccaccgcagtgcgccaagccgggggctccgtgcgagcccgtgtcgggcgccaagaaggcgatgctgttcgcggggctgtacctcacggcgctgggcgtgggcgggatcaagggctccctcccctcccacggcgcggagcagttcgacgagcatgcggcgcgggggcgcaagggccgctccaccttcttcaactacttcgtcttctgcctctcctgcggcgccctcgtcgccgtcaccttcgccgtctgggtcgaggacaacaagggctggcagtgggggttcggcatctccaccatcgccatcctgctctccatcccgctcttcgtcgccggctccagccgctaccggaacaaggtgcccacggggagcccgctcaccaccatcgccaaggtcctcatcgccgccgcgctcgcgcgccgcggttgcgcgccgagctccagcaacggcgccgtcatcgaccgcgcgcccagccccacggggagcaccgacatgaaagagtactgcaagcccggggacatggaggagatcacgatctccgacgcggcgatcgccggccgccgagccgtcccgcgagctcgcgttactgaaccgcgcggtgcagtgccagccgccgcggcacggccgccgcctggcgtgcacggtgcaggaggtggaggacgtcaagatcgtgctcatggtgctgcccatcttcttgtccaccatcatgctcaactgctgcctggcgcagctgtccaccttctcggtcgagcaagcggccaccatggacacgcgcgtgggcagcctcaccgtgccgccggcgtcgctccccgtcttccctgtcacgttcatcatcatcctcgcgcccgtctacgatcacgtcatcgtcccgttcgcgcgccgcgtcacggggaccgagatgggcatcacacacctccagcgtatcggcaccgggctggtgctgtccatcgtcgcgatggccgtggccgccgtcgtcgaggtcaagcgcaagaacgtggcgtcccacaacgggatgctggaggactccgggaagccgctgcccatcaccttcttctggatcgcgttccagtacctgttcctggggtccgcggacctgttcacgctggcggggctgctcgagtttttcttcagcgaggcgccgccgcggatgagatccctggcgacgtcgctgtcgtgggcgtcgctggcgctgggatattacctcagctcggtgctggtgtccatcgtcaacagcgcgacagggcgcggcgaccaccggccgtggctgcagggtgccagcctgaaccactaccacctcgagaggttctactgggtcatgtgcgtgctcagcaccatcaactacctcttcttcctgttcttggccgtcaggtacaagtacagaaacgcgggggtcatcaaaggctaatgccatcttcatatggccagtcggcgttgccattaatccccgtggtcttgagcaatgctgggtgtaactaactgtttatataggtggaaagcagagggttgaagaaaatgtaggttaattttctgcaggatgtgaggaatgatggtggtttatgaagctgtaatggatttggttgattggttcaacaagtaaatcaacaagaggtttagtaacccnnnnnnnnnnnnnnnnnnnnnnnnnnnnnnnnnnnnnnnnnnnnnnnnnnnnnn

SEQ ID NO: 183319 - DNA, 830 bp, Zea mays
  Clone ID: MRT4577_98772C.1
ggccgcttttttttttttttttttgtgcagagtggtattggatttctactactggagccgtgaccggaggccgtctatcagtgaacagataaacagagaaagcggccatggttgagagttgagaggccacgaaccccaccaagattccacaaaactcaatcaccagaataaactccagccacttcggcatgcgccgggaatttgattcttctgcctaaaatagtcacgctaccttccacctccccctactactctccctcgtcttcttcgctaccaagatgatggcggaggcgtggacgccggtgctgttgccggcgacggcgccctgcttctggcagcaggacacgcactcggttttgtggcggagaggagacgcgtggacggtggaggagaacaagctgttcgagaaggcgctggcgcagatcgaccggaacgcgccggacaggtgggagaaggtggcggcggtgctgccctggaagacggtcgacgacgtgaggagccagtaccacgccctcgagaaggacgtgggcgtcatcgaggccggcgggctcgtgccgttcccgcgctacagcggctcggtcccgccgccgtccgggttcgccctcgaggactggggcggtggcgaccgcgggttcaggcgcgcgcgcggctcggaggagatgcaggagcggaagaagggtgtcccctggacggaggaggagcacaagtaagtaggcaacagtcccaccagcaccccgtcgccgccgtgctgggacgacgacggggtcgggtaggggtcgatggatgggtcgggtccgctcgccttttcccgatctgcaccaagcgacccg

SEQ ID NO: 183320 - DNA, 642 bp, Zea mays
  Clone ID: MRT4577_98773C.1
ggctgaggaagtacgggagaggggactggaggaacatctcgcgcaagtacgtgacgacccggacgccgacgcaggtggccagccacgcgcagaagtacttcatccggctcagctccggcggcaaggacaagcggcggtccagcatccacgacattaccaccgtcaacctccccggcgacgccccgcgctcgtcgccgcccgcggtcaccacggccaccaccaacccctccgccggcgccctggtggtggacgtgaagcccttcgtgccgcacccctacggccacgtgaagctggagcccaagagctcgctcgtcgtggccggcctgggcttcaacgactcatcagtccacctactgatgcgctgcggacagttgtgagtgacgggcctgttctcgcggggagaaccgctcccgctccagcaccaccaccgcggcaccgcccgtgtgacgagcatgaagagtggcgcagcctcgtcgtccagctgccagctcgcggcagctccgagcgactgcgttcatcgagaacaagacgccatgggcggcggtatccgtttcagttcagtgtacataattcggcaagtacagagcccaacaacttccacgtaaaaggtactgaataataataaagcattcgataaaagcc

SEQ ID NO: 183321 - DNA, 523 bp, Zea mays
  unsure (1)..(523): unsure at all n locations
  Clone ID: MRT4577_98774C.1
ctgctctcttctctccgacttttgttcgtgtgggctcccttggggacatcctcctggcccctcaccttgacgactgacatgaaagctgctgtccaggacaccggcagacaaaagctggcgaaacgtgtcagacttcccttaccggctatggatgctacaccgagcgggcactagtgggaaaatatggcatcacggcctgacaggatggggcgtgccgccgatgcatgccgttggtgacgactcgcctaaagttctacgctggtgtaccatgatgccctatcctgggtgcatagtggctgcttgcgggctgaggtttacactgctagaccaagctacaggagggtgctgaaggtctgaggtaaataaagatgctattatttatgtggatntgagagggctattgctttcgttttagtgacggacatttaagctgtgtatacgatcgattcaatgacagagatactatgcctgtatatgctggcgttgaagcgcggtgaaacgttgagacacatgatgatgatgc

SEQ ID NO: 183322 - DNA, 1793 bp, Zea mays
  Clone ID: MRT4577_98775C.1
agcgacggccgcccttttttttttttttttaatagaacatcatgtctaaacttctactagctagtaactggcaaagcaacaatggcggacaaaaaccttgcgagaccccactacaagcatcacacactacaagtgttaacaccatctggtgggagatgttgcacacaccaaaaatacattaacaattaagccggtacagaaatcttctgatcctggatcctaatccaagccgccggtgacgctggaagaggctttttatcgaatgctttattgttcggtaccgtggaagttgttggactctgtacttgtcgaattttgtacactgaaccgaaatggacgctggaacggcacgcgtacgcccatgggccatggcctcttgttctcgatgaacacaacacagccactcggagctgccgcgagctggcagctggacgacgagactgttccactcttcatcctcgtcacacgcggcgggacgtgccagccatctgatcggtaggagtacacctgaagcaactctgcatccaagcctagcacgacgacgtgcgacttgtgccgccggccctgatgcccgcccggggatagatgaggtggtggttggtggcgtacgttgcgacgggagcggttctcgccgcaagaacagcccgttacaactgtccgcagtgcatcaggaggacggagtcgttgaagcccaggccggccaccagcgagctcttaggctccagcttcacgttgccgtaggggtgcgacacgccgagcgcgtcttggagcggcgcaatgaagggcttcatgtccgggagggcgacggaggggttggtagtggtggtgaccgcggacggtggcgcgttgccgcggtcttcgtcggggaggttgacggtggtgatgtcgtggatgctggaccggcgcttgtccttgccgccggagttgaggcggatgaagtacttctgcgcgtggctagccacctgcgtcggcgtccgggtagtcacgtacttgcgcgagatgttcctccagtcccctctcccgtacttcttcagtcccatcaagaaaagcttgtgctcctcctccgtccaggggacgcccttcttccgctccgggtccgagccgcgcgcgcgcttaaggcagtagccgcgcctgaaccctccgtcccaatcctcgtggtgggtgaacccgaacgacggaaccgagccgctgtagtgcgggaacggcacgagcccggcctcgatgaagccgacgtcgttctccaggtcgtggtagtggttcctcacgtcgtcgaccgtcttcgtgcgcaccacctccgccaccttctcccacctgtcgggcgcgttacggtcgatctgcgccagcgccttctcgaacagtttgttctccgccgccgtccacgcgtctcctccccgccagaaaaccgagtgcgtgtcgtgcagccagaagcagggcgccgtcggcgggaacggcaccggcgtccacgcctccgccatcatcttggccgctgcctgcacacgtgagctgcccgtctggctggtagcgaagaagatgagggagagaagtagggggaggtggaaggtagcgtcagtatttaggggagaagaatcaaattcccggcggatgccgaagtggccggagtttattccggctccaccgttggaggccttaaagaaaaggcgagcaaggaagcggatgcttgtgattgggtcttggactcttggtggagttcgtggcctctcaactctcaaccaaaggccactttctcattgtagatccctggtaaatttgatcccggcccggccggcctcgag

SEQ ID NO: 183323 - DNA, 845 bp, Zea mays
  unsure (1)..(845): unsure at all n locations
  Clone ID: MRT4577_98776C.1
cggccgggccgggtttgctcgccttcgcttccctcctcttctcttttctagactagactagacttggcttgccttggattctcctctcgtctcttctttcttctcgctccaatcggcgcggacagagcccccgcgcacgctaccgcctaccggagagattccgccgcccgttgggtggattccagcgccgttgagcaacaggactctagcgccgcaccggacaccaaccactagacgctgctgcctccctccgccgtctcggggcaccgacggaggagcagagagatccatcggaccgctcggcggggtgcggccgccctcgctcctcatccaaattatccaatccactcgattccgattggcaactacccttcaccccgcgcgcgcaatcgctagctcctgccgccaagcgcaaccggacgaccgccgccctccctacgccaggaggtgcccaggtgtaggtccttcgccggcgacgaacacccacaagagcaaccgcaagggcatgtgacaagctgctgcctgcctttgccgcaggcaatgtgctccgacatgtcgggtcagcgccaccaccacgcaaccagcagggagaatgcaccggaagataatggttaccatcgcactccccatggtgcggatcatctcgagcagagtcaggctgcagatacagataataagcatataaatcatctgtccacaggtgacaatgttccctccagtgcttcaggccacaaacatggtgctatcagccgccatccatctacatcttctgttgatgattgctccatncagtccggtgatgattctgatggggccgagagtaccagtggcagaagcagtaatac

SEQ ID NO: 183324 - DNA, 484 bp, Zea mays
  Clone ID: MRT4577_98777C.1
atctgagttaaaggagtacttatgctggtgagactgcaacatcaaagaaaaagagaagaactcctgcgtggtgtgacagaatattgtggcgtggtgatgggattgtacagttatcctactaccgcggggagtctagattttctgatcaccgtcctgtttgtggaaccttcgctgttgaggttgaggtgcgaaacaagaagacaaacaggcgctcatcaaatgctgacatgagaattgatgctgaagagctcttacccacgggcaagggtaaaagagatgagaatcatgttgcacgcgaggaggagaggctagtattgcagccggactcgcagatgccgtacgttccctcctcattgatgttccaacggccagcgctcaagatggacggacgattcaccggctcggcccacaacagctcatcaccacccatgtttccctctcaccacccgtgccaaacagccaattcatcgcagccaccggtacc

SEQ ID NO: 183325 - DNA, 445 bp, Zea mays
  Clone ID: MRT4577_98778C.1
gggagagggggaacaaaaacgtggagtatttttgtttcgtcgggggtcatggggggggcacccaaagggaaccactggggaccccccccctcttctaaggggagaaccgccactaccacggggaccaaagccgaacggaaacccaagtctttaggttgaaaataaaactccgccgaagccgagaggggccccctaaattatttccttaacacgaccgggccggagctggaagccccaacaacaccctttggccaaccgcagtaaccggccccgtgttttgtagccggggtgactacccttgcggccaccgcggtagccgccaccgtggctataaccgccatgacggggcccgccaccatagccgcctccgccgtaaccgccagggtaatcaccggcggcaccggaaccggtaggggattgggcctggttaacagggatgttacgg

SEQ ID NO: 183326 - DNA, 2580 bp, Zea mays
  Clone ID: MRT4577_98779C.1
gcaagggttaatgtcaatgataagaagatactctagctctacttgtaggatcaagttcattggtgattggctgatcgctgggctgatcagaactgccgcatttcttgcagctcctataggtttcttgaagcacttctaaagactgcaatattgcatttaagttcctggtacatggagtcctacagaatagcaaccataaacacttgtgtcatgtggagatattgcggaccgagcagccgtgctaaaggctgaaaatactgagcttgagttgtgcagctgtacagcaaatctaaagccatgcagcaaccataaacagttgccggccgggtgctgttgtccccctgttgcccacgcgtccgcccacgcgtccgagaatattatagagcaaagtgtgtggccaattttactagctgagagcttaaaggcactgggcgggcttggcttactttcccttggtgggaaatacttcataagacgtgtctttgagtttgttgcagagtcaaggagttcagaggcatttgttgcgctctgtcttcttacagtcgcagggacatcacttatcacccagaagctgggatttagtgatacattgggtgcatttctggctggagccattcttgcagaaacaaatttccggacacaaattgaagctgacatgaggccattcaggggcttgttgcttgggctgttctttgtgactacagggacttccattgacatgcagcttctcatccgggagtggcctaatgttctgtcactgttggggggtcttattgtaatcaagacactgataattaccgcaattgggcctagagtcgggctaactcttaaagaaagtgtaaggatagggctgctactttctcaaggaggcgagtttggatttgtggtgttttctttggcaaacaggctcggtgtcctaccacttgagttaaataaactgcttataattgttgttgtgctgtcgatggcattaactcccttactcaatgaagttggaagaagagtagcagggatgattgatgaaagatctgaagaaaaagaaaagcctgctgagatggtgaattatggtgccactgaacctgttgtaattcttggttttggagagatgggacaggttcttgcatgatatttcttttcttgcgtcatttgagtgcataccataatttttcatgtttgtgcaggtgcttgctaaatttttatctgcaccattgtcatttggaattgagaaagacacggaaggatggccatatgttgcattcgatctgaatcctgttgttgtaaagtcagctagaaaatcaggatttcctgtgctattcggagatggttcacgccctgcagttctgcaatctgctggcataacgtttccaaaagctatcatggttatgtatactggaaaggaaaaaacaattgagtctgtaagcagattgcgtcaagctttcactgcggttccgatatacgctagagctcaagacctctcacatttgttagatcttaagaaagcaggcgcaacagacgttgtcctggaaaatgccgagaccagcttgcagctaggttcaatacttttgaaaggactgggcgtcatgtctgatgatgtatccttcttgagtaagcttgtgagggactcaatggagctacaagctcaggaagcactgaaagacattggggaccaagaagttgatattatgaagcctcttcaggtaagagtgtcagatttagtggagagcaatggtaatagttcaagaatggtagccccagagcagtcgttaagtctaagtagccgcccagacataaaggcaataaaaccaccagtggcgaatgggatacctgatatgaaggtggaaaatgacaagacaggatacgattttgacagggtggattctgaaaatggtgtgacatactgtctattggaatctgatgaccaaagcgatgaagcctccagtacaagcaaggaaatgatcgatcagtctgctgatacaagggttaatgtcaatgataagaagatactctagctctacttgtaggatcaagttcattggtgattggctgatcgctgggctgatcagaactgccgcatttcttgcagctcctataggtttcttgaagcacttctaaagactgcaatactgcatttaagttcctggtacatggagtcctacagaatagcaaccataaacacttgtgtcatgtggagatattgcggaaccgaccagccgtgcagcaaatctaaaggctgaaaatactgagcttgagttgtgcaggtgtacagcagatctaaagccatgcagcaaccataaacagttgaagattttcagctggcaaatttgccaacgcagctgagtgcatgcatggctttggcaggatccggttgtaactagcaacatttcagaatttagaatatcattttttcacagctcagattatatttgactgaagccacaacataataaagggacttccattgatagatacattcttgtacaatatctgtatctgattcctagtgtgtactagatggtacatacctgagcagtttattatgtatcatcatcatccaataaagtgccgaactaaatttgggtt

SEQ ID NO: 183327 - DNA, 265 bp, Zea mays
  Clone ID: MRT4577_9877C.1
ggtacaaatttaaagtgggtatacgaggaagcagcgtacatgggaaataaataaagaccgcatgaactcaaaaataaaccaaacagccaaaaggacatggccgggctctccgtctcctctctctctcaacacacacacaaacacaaggtcgacgtgcgcggagagggtttttatttaatactaatacacggtttagttgtatacatgcaagtttggacgatcatgcgtgggaaggtagatatggtcataacgggccaaaccatgg

SEQ ID NO: 183328 - DNA, 466 bp, Zea mays
  Clone ID: MRT4577_98780C.1
gacatacccatccatattgttcctgggatatactggatactgatccctgtgatcaatcaccttgggtgtcgaaccatcatattgtgaccttatagacttcaagtgatagggccaatgcctgtcattctcccccaccacagaccttgtgggagggatcgctgtgacagcggttgtgctgtagagctataaccttatccatgagatggtcaacacttgctgatttgcagagcttgcacggcaatgcccatgactgcaacgaggtgtcctcatgcctgtgaggtcaatcctgtcaacttacctccggagatgagccctgttctaacgctgaagacacactgtttctaggagccgtatttagtgaactagatacaaaattcctgaataaccatatcatgcttggtacagcgacagaacgctgcagcgcacttattgcgaagaagggagtaacagatgctcctctctagct

SEQ ID NO: 183329 - DNA, 286 bp, Zea mays
  unsure (1)..(286): unsure at all n locations
  Clone ID: MRT4577_98781C.1
cgctgaccggagcggaaccatggctcgatcggtgaccgggatctgtctgggtgttatctctctcgacgtcgagcctgacaatcacatggctcccccaatgccagtgtagtctcgtcagccaccggagaatccgatcaccatcttcctcaactgctacgcccctcagttccanccacctcagatagaaattgagctactgaagaatggaaagaagataccaaatatcgagatgtcagatctgtccttcagcaagnactgagtctttctacatcctggctcacactga

SEQ ID NO: 183330 - DNA, 749 bp, Zea mays
  Clone ID: MRT4577_98782C.1
ccggccgggaaaaatttcaaaaaaggaaaaaaaaaaaaaaaaaaaattaaaaaaaaaaaaaaaaaaaaaaaaaaaaaaaaaaaaaaaaaaaaaaaaaaaaaaaaaaaaaattcccccggtttaatcaacccttaaggggaaagtggcctccccctcgcctcccggccgggaaaagggaggggggcccggggaaaggttttcggggttggccccgcaaaaaaggaaacgtcaaggatttccagggcgggattccatttccccgtcggaaggttggccaggttcctcaggggggaaaagaaccgggagggggtcgggcccggcccccccgggaacctcgccgccgtcctcaagaacctcggggttggggttctcaaatttgccggaaaccccggggggaacaaaaaaaaaacccgttttgggccgcgccacttccattttgttgggcgcaacaacgaggagttgcccaaactgtgggggggggcccccttcgcgggggggggggttttgcctaacttccttcagatttggctccccaaaaaggttgcctcctccaaggccagggtcaacaacaacaacaattgaaattgtttcctgaaaaaaggatccaaccccccccttgttttgaagaaataggaggatgttgtcttcgggaaggatccggttttgttggaaaggaaatttaaattagtttcggtttttttaaagggaagggaaacggggttggaaatctcagggttgaatgctcgttg

SEQ ID NO: 183331 - DNA, 259 bp, Zea mays
  Clone ID: MRT4577_98783C.1
aatggagagtaaacaactttttcttaaagaaaaaccgaggtcaaactctatcaactgaaacgtacagctgcgtgcataagaatttaactcccgtcagggaatctacacctgcaagggtgctcactactgttcgagtggatgatacatagccggcctgctaggtagactctggctggcacttcaccagccgatgagaacgacccgctcccataaggccgtgtccgctcgtgtcggatagacaggcctggaccatgccaag

SEQ ID NO: 183332 - DNA, 271 bp, Zea mays
  Clone ID: MRT4577_98784C.1
ggtataggtcaggaagtcccgggtcgacccaagcgtacgcccatgcgtccgcccacgcgtccgcccatgcgtcagcggacgcgtgggaaaaaatatttgtgaaaaaattaaaaaatgtaattttgtcattaaaagtataaattataaaaagtgaaatgatgaaaattcaatggaatgtgaaaatgaaaaaaaaataaaaaggcatcatttggggggggatatttaaatggttcaatgctaatgtagtagtttgtaaaacataaaacgtttt

SEQ ID NO: 183333 - DNA, 676 bp, Zea mays
  Clone ID: MRT4577_98785C.1
ctgcttcccacttcgcccctccctctcaccctctcgtcgatctggaagaagcccgcgccgccaccgccatggccgacctcgtcctcgtgcccaccgagctccccggtgcctgagacctcgtccatcttctccgtcgccgtccactacttcgtctacgtccacgaatcgatccggaacgcgccgagtcgagcggaagatcttcttccacctccggccaccgcggcgccaccgtcgattctggcgccctctgctgctccgtgacctcgacgagcctttcttgagctccacgaccccgagaccgttgctgatgccattgtgaccgactacgtcgacgacgaccccttcttccctttcagcggagctttcaggttatcacaaccagatggtggatcccaggagccagatgccaccgccaacgtctgctactaccccgaggatgcctacttctacgtggggaccactaaagaccaggagtagttaggaggtcccaggcaggaggccttgcctcttcgatcgtgttgcttttgtgctagccttcttaaggcatccttgtttaacttatgtctgtactcagatattgttgcttccgctgactcttgtgtatcgagctatgtattcgagccctcgaggcccctggcttgtaatataaaagcttgtattatttcaatttgtgtcg

SEQ ID NO: 183334 - DNA, 812 bp, Zea mays
  unsure (1)..(812): unsure at all n locations
  Clone ID: MRT4577_98786C.1
cctcctatccactcgaccacagagcggcggcggcggcggcggcagcggaagaaagaggagagagctccagccatggtgcacgtcaacttctaccgcaactatggtaagacattcaagaaaccaaggcgtccttatgagaaggagcgtcttgatgcagaactaaagctggtcggtgaatatggactgaggtgcaagcgtgagctctggagggttcagtatgcactgagcaggattcgtaatgctgcaagacacttgctcacactggatgagaaaaatccccgccgtatctttgagggcgcggcccttctccgtcgcatgaaccgctatggtctccttgctgagggccaggataagcttgattacgtccttgccctgactgctgagaacttccttgcaaggcgccttcagactcttgtcttcaaggctggcatggcaaaatccatccaccatgcccgtgtcttgatcaggcaacgccacatcagggttggcaggcagatcgtcaatgtcccctcgttcatggtgagggttgaatctgagaagcacatcgacttctcactgacaagtccattcggtggaggccctgcaggcagggtgaagagaaagaaccagaagaaggcaagtggtggcggtgacgccggtggtgacgaggaagaggaatgaggaactagtagctatcaccttatatttatcaaatgttnggtgttatgagtactttagctgagaggcctgagactttcatgggttatcctcttgtcattttgtcactttatcactgttgttagcatgtatgcactggctttatgtttggagct

SEQ ID NO: 183335 - DNA, 351 bp, Zea mays
  Clone ID: MRT4577_98787C.1
atagtgagtcgtataaagcgctgacaagcaccggataaatgggcctatagctcggttgctgaatacttgcaccgctaacggggcaggcaatcgaacaaccagcatcaccgacactgatggacctagtgaggaggacgtctccactttgacatattctatacataaacagttgtgaacaatccacgcatctgttagatcatatagccggaccacctgtttgattagaatttcaccattgaagttcccaagcgcggcaaagggcgcggtcattgtggtagacggcatgggcgtggcaatcatcaatagaacaatcatcatcaacagaatcatcagcactagaacatccacccg

SEQ ID NO: 183336 - DNA, 783 bp, Zea mays
  Clone ID: MRT4577_98788C.1
cccacgcgtccgcccacgcgtccgcccacgcgtccgccctcgcggccggccgggaaagtcatccatcctttagttgccaatttaaaggaacagtagaaggaataccgatttgatggcccaaaataagcagatcattgttgtggtggctctcctttttcttgtggtggcaacatcatcatcagtgtgggttgcagaaggagccgatgacttaaaagtttcttgcgttaaagagtgcacccaaaattttaacactcccgagggcaagaagatctgtgaaacgatgtgtgccaaccctaaaggaaggcctatcgacagagttagagctgattgatcaatgctcatctttatttgtagctagctatcatgcatgcgatgatggccttcttgattattattatttcattcctcatgttgtttgttcttgcatgttttttccaccactaatattgtcctaattgatgcatacatgttgtcactcaaagcattttctatgctttacttattggttaaataaatacaaaggcttccttttacctatgagctatgtttagttcatcgtacatgtatttcattggaagaggtgatgtggagtcaacaaaatcctatatggtgggtaacacatgtcagttcaagtgatgagttacccaacaagtttcatgagtactagacgagtgctatccctagtcaaccgtccttgggaagtacagagatccgaaagaaaagatatacaatagtttctgctatactttgtagtatatgtaagtcttgttgtaactatttttt

SEQ ID NO: 183337 - DNA, 523 bp, Zea mays
  unsure (1)..(523): unsure at all n locations
  Clone ID: MRT4577_98789C.1
acnnnnttcctttttttttaaaagnaggaagaaaacaacggggggggggtttttttttgtttatgggccgcaacaaaacaccaatattcttttttttttaaaaattcagggtttgtatacaaacacaaactgcaagctaaacccgtttttcccaacaaagaaatggagattttttttatttgggtttgcgagagaactcccccccttcattttaaaggggagagggcccccactgttttaaagggctagcggggtttcaaaaattggcccaaggggttgggttggagaaaaagccctcccctttggccatcttggacaagggtttcggggaaaggggtttctcgtccccgggccacccccaaaactccttgttcgaaaccccccccactttgaacacctcacccggggcgcccaccccggtttcctttctcgggaaagaatttatggggtcctttaaaaaccgccccctttaaaaaaaaggcaaattttttttggcaccccccgggggggggcattccccccc

SEQ ID NO: 183338 - DNA, 360 bp, Zea mays
  Clone ID: MRT4577_9878C.1
gccggccgggccgggagcctcacctattctcgcatctagcctgcttcctcagctcaccaccacgatcttagtgagagggagtgcggatgaaagacgagctctcagcgctgcgataacccgccaggcctgaacccggcctgctgttaggccaaggccgtcgacagcatcggcgggctcaaggactacgttgccgtcctcgacgactcgaaggtcgacgttactcctctgtgccgacgtcttctgattcgaagcgcctcatcttgccgacctacccgacaaagttgcttccacaggcgaccttgctgtgccaccagatttctttcctgtcgatcctcatgtacctgagaatgctgagaagct

SEQ ID NO: 183339 - DNA, 1738 bp, Zea mays
  Clone ID: MRT4577_98790C.1
cggaagcagagcaagggatggatagcaagtcggtgggaatcgtcggcgcaggcgtgagcggcctagcagcctgcaagcacgccctcgacaaggggttcaggccggtggtgttcgaggccgacgggagcgttggcggagtgtgggcgcacaccctggagtccacgaggctccaggcgccgacgacggcgttccggttctcggacctggcgtggccgccggagagcgcgagggaggcgtacccaggccaccgcagggtcatggagtacataaggtcgtacgcgcgtgcgttcgacctcctcaagcacatcaggttccacagccaggtgctgggcgtcgagtacctcggtgcgaccgaggaagaggtcatgggctgggatcagtggtccggcgatgggacggcgttcggagccgtgaagggtggcggatggcgcctcaccgtccaggacttgaaagtcggtagcactgaggtttttgtggtggattttctcatcctgtgcattggaaggcacagtggaaccccaaacatcccagagttcccagcgaatgggcctgagctgttcaaggggaagatactgcactcgctggactactcctacatggacgacggcgacgctgctgagttcgtgagggggaagcgcgtgacggtgatcggctccggtaaatcggcgttcgacatcgccgcggaggtcgccaaggtgaacggtgccgcgcagccatgcaccatcgtgtacagaacaaggcactggctggtccacaagtccagcgtgtggggagtcgacctcagctacttctacctgaaccgcatctcgcagctcctggttcacaaacctggtgaaggattcttgcgctgcatgctggccgccgcactctctcccttgagatgggcgatctctaaagcgatcgaaacgtactacaagtggagcgttcctctgcggaagcacgggatggtcccggactacagcttctccttcgccatgtcctcgtgcctgatcgcgatgctgccggaaggcgtgggcgacagggtcgacgaaggcagcatcgttctcaggaaatccaaggcggtcggcttctctagcgacggagtcgtcctgcgagacagaaacgaaagcgtgagaagcgatatcgtgatcctggcgacggggttcagaggagaccagaagcttagggacatcttcactgcgaactggtgcagggagatagtggcagggtcaccggatacagcagctcctctgtacagagaatgcatccatccccggattcctcagctggctatagtgggttactccgagagcctcaccaacatatacgcctcggagaggatgagcaactgggtagctcaatttctggccggcggcttccagttgccaagcgtgagatgcatggaggagagcgtggcggagtgggcagagtacaagaaccgatacaacgggaggtatttccgcaggtcctgcgtaagcaccgctaacatctggcttaatgatctgctgtgccgagatatggggtgcaaccctagaaggaagaaagggttcctggccgaatggttccagccatatggacctgcggactatgcaggtctttgctgaagatggttgcattgcatgcctgtcagtgcatactcctaggaagagatgacagagttgctacctccatgggtgtaatactgcaatgtgaaacgtacaagcaaaatatgtctgatgtttgaactgtaaaaatcaggccctacggcccgcggcgctct

SEQ ID NO: 183340 - DNA, 225 bp, Zea mays
  Clone ID: MRT4577_98791C.1
attcggctcgagagaggccaaacaaggtctatctgcggaggaagcgcaactctgtgacaggcatggccagagcgcgacagggtcgccgctgcggccacaccctagcagcacggctgagcagctgcaaaccgtcaggaggtaacagactggccttatgcacactggaaggatgcgagataaaaacgatacgctcaatacagtgccagagcacaaaaagatcggcga

SEQ ID NO: 183341 - DNA, 321 bp, Zea mays
  Clone ID: MRT4577_98792C.1
accacgcgtgaggagacgcgtgagcaccagacacatttacatcctctgtggctacatcgctctttctgccgcaactgggcgtgtgacaacgatggacctgacctacgccaagagcactgatgatggtttagtggtctgaagagtgaccatcaaccggtactcttccggtcttatcaagcaaccagcacccaacgggttggcaatgataatgtcgagagtcagagggctatacagcaagatcgcatggataaaagactgcacagatgcccgctcctgctcaagtttgctctggcatacgtattaggcaggcgcgcttaaact

SEQ ID NO: 183342 - DNA, 755 bp, Zea mays
  Clone ID: MRT4577_98793C.1
gcatccatcttgatcagttctctcactaccttactaatgcttccttgcattggctttgccatgctgcttatggatctttccggaagaaggtttttgctgctaggcacaattccaatcttgatagcatctctagtgatttggattttgcaggaataattctgatttggatttgcccaataatatataagcgtgcattacacgtgcacgcatttgtatgtacgcgcgtatacgtcgtacctacgtagctggatttgtgtgcgtgcttcgtaccaaatattaataagaataaacaaatatgactcgaaaaaaaaaaagaaaaaaaaaaaaaaaaaaaaaaaaaaaaaaaaaaaaaaaaaaaaaaaaaaaaaaaaaaaaaaaaaaaaaaaaaaaaaaacccaaaaaaaaaaaagggggggggccttttaaaggaacaaagtttaactcccgggggttggaaagtaaaaattttttttttggggccccaaaattaaattaaggggccgggttttaaaaacgggggaaggggaaaaacccgggggttaccaaatttaaaggctttgaaaaaaaacccctttttccaaggtgggttaaaaaaaaaaaggccccaaccaatcccccttccaaaaatttgcccacccttaatggaaaaggggaccccccctttaggggcctattaagcggggggggtgggggggttaccccaaggggaacctttaaatttgcaaggccctttaacgcccgttttttggtttttt

SEQ ID NO: 183343 - DNA, 274 bp, Zea mays
  Clone ID: MRT4577_98794C.1
ggatccctgtagccggccgcctttttttttttttttttttggaacgggccttactaatttttaaggtggggtatggacccaatattaacactttacacaagacccctcctaaaactctttcctttattgtttccccggggtggttcaacattcccacacgaattgttacttccccacaaaggatcaccttaaaggagcgggggcgaacagaggccgcaaccaggaccttcttccaattgggcccattggattgtgactctccccccccccgggg

SEQ ID NO: 183344 - DNA, 321 bp, Zea mays
  unsure (1)..(321): unsure at all n locations
  Clone ID: MRT4577_98795C.1
cggaaaaaccggggngacccacgaggcgtccgatcttttaagttttacgcctgggccaacaccagttaaaactactccaaaaccaatacgtgcagaaccagtggtggtccttgttcctgataaacaggccagtcttcccaaggggaacattgttgagcttcagaagaaaacaatagctcttcttgaggagtattttgacatacgtattttagatgaagcctatcaatgtatcgtggatctgcagagttctgattactacccaaaaattgtaaaaaaagctgtaaattttgctttatataaaggcacaaattttgtagatcc

SEQ ID NO: 183345 - DNA, 314 bp, Zea mays
  Clone ID: MRT4577_98796C.1
tccgggacgaaaaaacaacacactcgaaggcagcgaagcccgagccttcccttccctccaatcgatcacccgctccgatccgctagctagctagcagcgcgatggcttccctcaccgtgtccacgaagaccgggtactgtgcgcggttgcagggcaccgttgcgcgacgcatctcgcgcgtaaccacgcgtgaagatgcacgtatctatcgtctttctctgtgactttgtgttgcttgtcctttttcctcctttttttttctttcaaaaaaatgtattattacctgtatctatcgatcgttgcatgtttaccgc

SEQ ID NO: 183346 - DNA, 299 bp, Zea mays
  Clone ID: MRT4577_98797C.1
ctcgatctaacgcctgcttcctccatcactcttatactcatggcgacaccatctctaatttgcgcgcaatatactcatcactttattctctacaacacaaacgtcaccgttctcaaattcatctccaaaatgaccacccactactcgtattttatcaatctgtctcatataaaatttactcaaagcaatgcttagcgatcggagctcaactcctagctaaatatcaactagagcaccaacgtatctatcctcatctatccttctatcatattatacttcacactataaaccttatttaa

SEQ ID NO: 183347 - DNA, 1035 bp, Zea mays
  Clone ID: MRT4577_98798C.1
gccggccaaaaaaaaaaaatacaaaaaaaaaaaaaaaaaaaaaccacgccctcgagccggcgggccacgaggccgcccggagcgggaaaaacaaacacactcgaaggcagcgaagcccgagccttcccttccctccaatcgatcacccgctccgatccgctagctagctagcagcgcgatggcttccctcaccgtgtccacgaagaccgcggcggccggcggcaacaagcagcgcgagggcgcggaggtcatcacgggcgcggaggcctgcttcgcgcactccaagcagatgctccaggcgctgggcttcccgggcggcgtgatgccgctgcgggggctggaggagtgcggctgggtgcgcgagaccgggttcgtgtggatgcggcagaaggccccctacgagcactacttccgcggcacgggcacgcgggtgcgctacgacgccgaggtcaccgcgtacgtggaggacggccggatgaagcgcatgaccggggtgcgcagcaagcaggtcatgctctgggtgcccatcgtcgagatgagcctcgacggagagaagcgcgacaagatctacttcaagtccaacgtcgggatcggccgctcgttccccgcctccgccttcgctgacgaggacgagcaagcggaggaggaggagaagaagaagaatgagaacaaggaggagaacggcgacaagccagccgccgccgccgccgatgccgccggcaagtgagacggagacgcgagcgcgcgcgtgttgtcgtcgtgccgggtactgtgcgcggttgcagggcaccgttgcgcgacgcatctcgcgcgtaaccacgcgtgaagatgcacgtatctatcgtctttctttgttactttgtgttgcttgtcctttttcctccttttttttctttcaaaaaatgtattattgcctgtatctatcgatcgttgcatgtttaccgcgtttgatacacacgtgaataatgtttgccatgcaaaaaaaaaaaaaaaaaaaaaaaaaaaagggcggccgccaccgcgactagtgagctc

SEQ ID NO: 183348 - DNA, 193 bp, Zea mays
  Clone ID: MRT4577_98799C.1
gtctttcctagggtttcgtctcttgcagccggcgtcgcgaccgactcgactagcgcatcagacgtcgcagcacatctctctctcgatctcagacatggcggaggaggagcagcaacaggacacgccgaagcatggtcaaccgctggatcttcgatgatgtccaggtgaacgacatctcgctgaacgactacct

SEQ ID NO: 183349 - DNA, 212 bp, Zea mays
  Clone ID: MRT4577_9879C.1
ggggcaaagcttccaaaaatgttaactgggttccacacaagacgagcaatggacaccgattaccgggggtgaaacatcacaagctggacccctacgggggggggggggcaacatccaatacaaggttgtccactttttaccacccccacataaagcataggggctcccatttatggataggtttatactttcccttacagcttactggccat

SEQ ID NO: 183350 - DNA, 414 bp, Zea mays
  unsure (1)..(414): unsure at all n locations
  Clone ID: MRT4577_987C.1
acccaagctgggaaccngtaaacacccaccccccttttccgccaccttttttaagttatgcaagcaccaccttcggaagaaaggggggccagggggccaacaaaccacggggcacactcacccaaggggaaacggcggacactttcggaaaccacagctccaaggaagggctaaaaaaaaaaaatgacaaccaacggacaagcacacacagcaaaggataccaaggacgccgcgatgacgggcctccttaggcggaacatccggagatgaaactaatcctgtatatcaacgaagcaaggcggaacaaacacacagatgcgctcgtgaggcaaagcggaaatactgcacaggcccccgcagagaaggttgaatcgacagaagacccttcagccccaactccagacgacgctgaag

SEQ ID NO: 183351 - DNA, 346 bp, Zea mays
  unsure (1)..(346): unsure at all n locations
  Clone ID: MRT4577_98800C.1
ttttcagaagacataaacattagcacataaataggtttaattacttaatggtgcatatttcacgtggtacaatcgaattcaatctgttgtacattggcaatattaacgagcattagtgatgtactatgttgaataaaaaaaaaaaaaaaaaaaaaaaaaaaaaaaaaaaaaaaaaaaaaaaaaaaaaaaaaaangggcggacccgggctgaataaaaataataaaaatttaagtggccggccgccaactagggacctgttcaacctggaatttattttgtgaccggtaccttgaggcgtaccaattttccttattgagagttgtattaaagttttggggaataatg

SEQ ID NO: 183352 - DNA, 469 bp, Zea mays
  Clone ID: MRT4577_98801C.1
ccggccgggacaccatcctgtctattcttaagaaataactattaattctccttgaccatactacaatggctgcacaacttcgccttcaagattccaaggagaaattccaagctgcgtataacgcagctgtcacccagaaggaaagttcggagaaagactggaaagacgaaaaggaagcgggtatgcacgatcaggaattcgatcaatggtttcctataaatgcacccgcctacgctgttgcttttcaacaataccgaggcgctagagctgcatacgaggccgcacttcacgcagttgatgagcaagctgctaggtcttggcaggaaaaggtcagacaagcggtgattgacaacaagctcgactacaacatattgatcggacctgatgaatgaggtttagacctagataatctacagcaatcatgccataacatgcactgatgaaaaaaaaaaaaaaaaaacccgcggcc

SEQ ID NO: 183353 - DNA, 247 bp, Zea mays
  Clone ID: MRT4577_98802C.1
cacacacaaagggggcgacttttaaaaaaagcgggggatcccaaactccgcgccaagatctatgccaaggcagtcaccttccacggatcgccatggcgtttaaggcgacccccgtgaaaaaggcacctaaagacacccctgccctcttctcacggaggacgattgccctaggggtggagccagccatagcgtccaccatcaacaaggttaaaactggcaaacaaccccataactctacacaagaggt

SEQ ID NO: 183354 - DNA, 315 bp, Zea mays
  Clone ID: MRT4577_98803C.1
cggacgcgtgggttttttttttttttttttttttttttttttttgcggccttttatttcttggttgggttttttttggcgcgcggggggttgaaacctacaaccgggtttgggttcatcatttttcaatcatgggagcaccaaacaaaaagcttttactttttctttgccaaacaaaaacccagcggcggtaaagcccgccctgggttacgcaaccagggggcctttcatgggttttgtttcacggtgcacaaaaattccttgttcgaaggagcgccgtactgcaagacccatttcgagcagctgttttaggaga

SEQ ID NO: 183355 - DNA, 625 bp, Zea mays
  Clone ID: MRT4577_98804C.1
aatgccttttttttttttttttttcacgtaaaaaaagttctcaatttttttatacggagggtaggcctatataaaatttaaactataaaaaaaattcactgaaactttcagaatttacaagtctggcagtcctgaaaacacataaagtccgatcgtcggtctatgtttgcctgaatcctgatccactcgcactggactgagagtgccggacactgtctcatgcccctgaaagaatatccactgacctttcatacagcaccagaggataaaaaaaaaaaactacggaaggcaaactagacgcgacaggactggctagctcgccattcatattaacatgagagaatagcaaaacagcgttgctgctttccagggaattgaatagtttgctaatgttcaggaactccagctcctgcagctctcctctctgttcttccgtgcaacttcctgacatctcggtcgtcctccgatcgctacaagtcctttttttttgtagcagcagggacgacttcttattgggatccctcgttatgtttgggcgtgcttttattgggctcgaggcttccaaatttctctctctccctctctcttaatggataggcagagctcctgccatttgcttttaaaa

SEQ ID NO: 183356 - DNA, 312 bp, Zea mays
  Clone ID: MRT4577_98805C.1
ccaccgcggagctgtgtttccatgcacgatgacatcaggcataacaccggaaaatccgaagtctgtagacattataaatcatgcgtatggaggcgacatcgattctagggcgccataggattacactgagctgagaggtctacgtcgacaatggtttcattgttatgttagtaactaaactgctctcaggggtgggagctactaggaagtggatagggaccccaatgatcatatattgattatctacagagaccatgggggtcctgctgtccttgcaatgactacgtatgcatatctctatagagatgacct

SEQ ID NO: 183357 - DNA, 853 bp, Zea mays
  Clone ID: MRT4577_98806C.1
gtggctgtgtgacctgactcttgaaagatacgaagtccgagagaagaaggtttccaagaagcgccccaggggattgaaagctatgcacgacttggacagtgactcggaataaaaaaacagagggagaagagatcactgaacatgagaagctgaacattagagagaaggccaggacagatgcagcagatggaggtcgaccataaagcttcctgatggaatgaggaccaacgggtcaccactcctcgcgattgatactggagatcgatttgtccaaaaggactaggtttttttaaaagcaaatggcaggagctctgcctatccattaagagagagggagagagagaaatttacaagaagtgagcacaataaaagcacgcccaaacataacgagggatcccaataagaagtcgtccctgctgctacaaaaaaaaaggacttgtagcgatcggaggacgaccgagatgtcaggaagttgcacggaagaacagagaggagagctgcaggagctggagttcctgaacattagcaaactattcaattccctggaaagcagcaacgctgttttgctattctctcatgttaatatgaatggcgagctagccagtcctggcgcgtctagtttgccttccgtagtttgttttttcccctctcttgtgctgtatgaaaggtcagtggatattctttcaggggcatgatgagactgtgtccggcactctcagtggatcaggattcaggcaaacatagaccgacgatcggactttatgtgtttcaggactggcagacttgtaaattcttgaaagtttcagtgaatttttttatagtttaaattttaaaaaaaaaaaaaaaagcggcc

SEQ ID NO: 183358 - DNA, 697 bp, Zea mays
  unsure (1)..(697): unsure at all n locations
  Clone ID: MRT4577_98807C.1
cgcccctcaaaaatttccagccgccagcttcttcctccctgctccacgacagcagctgccagcgcgcaggaagctgggccagcagccatggcgcctcctgcattcttccccacgctatcttcctccttccctcgttgctgtcttcaccaacactcgccctcccatggaaaccagcagccatggcgtcccccttcccaagcttccttgccgagcagcgccgcccttccgtggatgaagcccggtgccccttccagcttctccactgcagtaggcacgccgacacctccctctgcaccacatcccagccgtggtggccgccgtgctctctgctcctcctttggcgagcggctgcagcagggggccttcttccccagcggcgcctctgctctccctccccagcgcccctttttcttccatggattgcagcagctcgaccctcctctccatggcgcgagcttcatttttcagagccgtcgaagctcctcctcatggcgcccccactccctgctacatcttctctcagcctcctctcaccctcccaagacagccagcgcaggggccttcttccccatggaggccgagccccctgctcccagccgtgacgcccagattttttccagcagagagcctcttcccatgggcgccacccnctgcagcttccccttgcccgcgccctaaaattgcagcagcagctcct

SEQ ID NO: 183359 - DNA, 389 bp, Zea mays
  Clone ID: MRT4577_98808C.1
ggggggttattttcgaagggtgcagagtataaaggtccctttatagaccgcctttactggctgacgggaggaggccctatgtgaacagttattacagaaaacacccggtacgttttaaacactgctacgtctaacagttaagaaccaaatatactattgaacacatgaaaatgcagcctttgacaactggggacttattccatatctagggacttcgacaccaggggggggattttttgattatattaaaggtcggcctatgccgacttttgccgatactgccctgacccttttgtaggtataatctgggcacttgtactggttgatttgctaaactctggctggcgggattttaacacactgtccatgggaccacttcaaccagttat

SEQ ID NO: 183360 - DNA, 197 bp, Zea mays
  Clone ID: MRT4577_98809C.1
tcaaaaaaaaaaaaaaaaaaattttgtttacaaaccccacactctttatgggctgcacccacattattaagccccccatttttaaccttgcctaaaaacctccttcgctgggcttttttgcagctttgaacctttctaaccacttggcataatccttcatgtaacccgggcaagttttgattcttttaacatttaca

SEQ ID NO: 183361 - DNA, 290 bp, Zea mays
  Clone ID: MRT4577_9880C.1
agaaccgccgcgagatctgcaagtacatcttccatcacgaggacttgtatgccaagaaggactacaacgtggccaaccaccccaagcttgacacccccaacctggaggtgatcaagctcatgcacagcttgaacttcaaggaggatgtcagggagaccttctcctcgccagactactactagcacctcaccaacgatggacacgagcaccttcgcagcttccttaacctgccgcgcgaacatgtgcccaacaccctcaaaaaaggctgcaagcccccgtgccttcccttt

SEQ ID NO: 183362 - DNA, 301 bp, Zea mays
  Clone ID: MRT4577_98810C.1
tccccaatcaatccatcacgttagctgcacctgcgcctctccttgaggtcgcgcagcaacaatggcgtgctccaaagcggtgttgctcgccgcgctcctagccgtcgcaggagcgctctcctcagctgcggtgtgggaggactacgaccaccacatgtaccacaggtgctacaggtcctgcatgaggaagtgcgtcgacgacgatgccgatgatgcattgaagaatagcatcagccccgttgccacctccgtgtcggatgatcgtgaccacgaccatgacgaccaccacgatgatcacgac

SEQ ID NO: 183363 - DNA, 652 bp, Zea mays
  Clone ID: MRT4577_98811C.1
ttcaagttagattcacaggcgcaagatgtctcttgcacatcatttgaggctcatcaggttggtgttgatggtgggacacatactgatattgctgatgacaatcattacaggagtcacggctttggtggtggtgcagaacatgggttcttcggtaatcagtgtgacacaaaagagtgggacttcggtctcagtatcggttgggaaaagcatgattttttgtcaacaaacaatgtcatagaagaggtgttcgggaagtgctgtgacactgctgaccaggaccttatctgagccagacgcggaggcttcttgtcagctgcgaaaactttagggttctctgaattgtacagcagtagttggctattttgatttaatgcctcacttgttcttacaggaatctcatctctgttcttggaacatcatctgcttgtgatttcgtcacatgattaatgtaaatccgtagatatcatctgtcgatctgttgatagcctgtggcatgtatgtatcatctttgttgtgacggtgtctcttgacctgagcgttttttctatgtgctagcgagggtcatgtaataaaagctgttgttgttccttgaccctgtctgcaaataaatgtaacctgccagtcaatgtattccgaaaggtcatttttatct

SEQ ID NO: 183364 - DNA, 523 bp, Zea mays
  unsure (1)..(523): unsure at all n locations
  Clone ID: MRT4577_98812C.1
cgtccgnattcccggtcgaccacgcgtccgtttttttttttttttttttgtaaaccgtaacatttttgtcaaaacagccaaatgaaatctcttctttatacagctgttagcttacttccaagtcactccccaacccccaaaatcagtctgacactcgctgacatggttaattcgaacctgtatttgtagtttctaaattgcggctctgcagacccagtctgggaacaaggtacaccatgaagacgcaggctgtctccgccatccgaggagaggaggcacggctaacattctctaaaatactcatctgactgccctcggacttccacgaaggcagcgacaccataaacacactggtggctgtgtcactgaccacgggtgagtgtccactcactacctgttgtaagccctctctttcttggacttctccagggctttgtccatggtcttctcgctctccccacggtacttggtgcagaaccacttgccctttggtgtatggctgagccccacttactgtccgtgc

SEQ ID NO: 183365 - DNA, 527 bp, Zea mays
  Clone ID: MRT4577_98813C.1
atacaagtaatccaatgcttatatttatcaaaaagaatattaatattttccattccttcacacgctacaaaagacagccggcacccggcagaagccaacatcatcaattcatagtgtcagcatgatccaatacaagttgttttattgttacaattcatatcaacaaataatatcaaccataattcttaattgaagtaatgcagagttctctgtgtgttgaaacaaccacaagggctttcttcattttggccatcttgccttacgaatttgcctttcatcagacagcagcttcgcaaatctcttgagagcttcgtcattagtcagctctgtcctatgacaggcacgcaccatatagccagtttccaaattcgcctgtgagacaggtttctttagtagcatatctctaactctggcaagtttctccattttttcctcggttgcaacatcaaccgaggacacagtccttgtagagtatcatcctgaatgctcagatcgttttactcagaatgcaaggctttgaaactagc

SEQ ID NO: 183366 - DNA, 270 bp, Zea mays
  Clone ID: MRT4577_98814C.1
ggcgaccccaactacctgcaccgactccctacgctcttctgcatgcctgtgccgcacgacgtctgtgcacaggatatcaccaccacgcacatgctacccacggttctgcgcatggctgcggcaacggttgcaaatgtcacgcttcaatgtggcccagtctctgcagaagatagaggccatcctggacaacagcccattgccgagtgaagtcaagcacatcctagagtagctgacacaggaccaggatgtggacgtcaaatactttgccca

SEQ ID NO: 183367 - DNA, 308 bp, Zea mays
  Clone ID: MRT4577_98815C.1
acggacgcgtgggcggacgcgtgggggagtggtcgaaactcgagaagaagggtccacagatcatccttgatcgtcatccacataatccctatctcggaatcaactgttctacttcgaagtatctatcaacttcactactacagactacagtccacaatctatcagcttcactactacagtccacaacagaggaagaaaattatccaacggacaattccctatatgccactacagttttgctcggtactttattcaccatcgtaaatattataatcggatgtaaattcttatccttctatatcatcgct

SEQ ID NO: 183368 - DNA, 231 bp, Zea mays
  Clone ID: MRT4577_98816C.1
acaacgcaacaatcatcatgagtcattgtacaaaaaatggaaatagtatcatcgccgtcctcgtgggactaggatacattgccagacgcaggacatacgctctatcatacgtgcagctccagggagtacgcatagtctggctcccagcaaaacgcgcgtgcggcggctccgggaggccccaaagattgaatgtgcgaacagcaccagcaattctgtatcaaaggatacagc

SEQ ID NO: 183369 - DNA, 402 bp, Zea mays
  Clone ID: MRT4577_98817C.1
atgtcgggaggatccaccaagagggagatggaaacgggcacaagccacgggaaggctccatcaacggagtccggcaccaaaggaagggaggaatcacctccccgcgtcaagtcgcataagagtgatgacaagaagaagaagatgaagaaagtggtctactacgagatcgattcttcgttgccctccggctccgacgccctgtctgtcaattctaagcgccatgagcgcaagaagtttagtaagatccccttacgctatccccacatttctaaacgtgctcctttactttccgtcccattaggcaaaccaccagtttttatggtgaagattattgtaccatccgtaggggatgaaggctacgactcggacgaggtcgcccaaatctgtcacttcaactcctga

SEQ ID NO: 183370 - DNA, 292 bp, Zea mays
  unsure (1)..(292): unsure at all n locations
  Clone ID: MRT4577_98818C.1
ctcgagggcggcgggaaaatgnactcattctgctctacctccttcatgcttgccgatgcagcccgagaacccgcttgtatcagtctgacatcaggcgccgtgcatgtgatgcgctacctgcacttactacttcagagtcattatgatttgaatgacgtgagcagaagaaccagatatggtgcgtgggcagctctcctgngtctccagccatttggcagtgagaactgcactctcatgagcggcaagtggaaatagtggaggtcgatatacgatggctcctagagttacccgg

SEQ ID NO: 183371 - DNA, 532 bp, Zea mays
  Clone ID: MRT4577_98819C.1
agggcggcgtgcggtaccgcgagatctccggcgcgcaccgcaagctgacggcccgcatccaggggctgcgcggccgcgtcgccgccggcgaggcgtgcaacatcgactactacctgctgcttggcgtgcggcgcgggtgcacgcggtccgagctggagcgcgcgcacctgctgctctccctgaagctcaagcctgaccgcgccgtggtgttcggggaacgccttgagctcgtggacgagcaccgcgacctggaggcggtgcgtgaccaggcgcgcatgtccgcgctgctgctgtaccggatgctgcagaagggctactcgttcgtcatgtcagccgttctggacgaggaggccgccgagaggcagagggcaaaggacgccgccgaggccgcagctgctgccgcggctgccgcgctggcggccaagcaggaagccgcgaagcaggaaccaccacagcagcccgtggtgcctgagaaatccaagaacacggagacggagagggggcgtcctagaagcccaccgggccgcgcgca

SEQ ID NO: 183372 - DNA, 388 bp, Zea mays
  Clone ID: MRT4577_9881C.1
acgcccacgcgtacgcctacgcgtggggcagcagatgcggctcatcgaccagactgacgcgcgtgtgcaccgcaccctgatgcgcaccgtcgtcggtcaagtgggcaggatggcggagacgatcgttctacctgtggaactactacggcagctcaagcccgcagagttcggcgacaccgatgagtaccaccaatggcagttccggcagatcaagctcctggaggccggacttatcctgcacccctccctgcgtctcgaccgtctccactctgacgtgctccggatccgcgaggtcatgcgcgcaacagatatccgtgccatcgacaccagcaagaactccgacgtgatgcgcgcactaagcaacgccgtgcacgctctctagtggcgc

SEQ ID NO: 183373 - DNA, 136 bp, Zea mays
  Clone ID: MRT4577_98820C.1
cctatttgccttgagctgcaaaggggtcacttcatggtgctagatgaaagagtctgattactggttttcttcacataagatagtgatggagtccagtaacaactccacattgcgcattttccttatttgataaaaa

SEQ ID NO: 183374 - DNA, 531 bp, Zea mays
  Clone ID: MRT4577_98821C.1
tgttcgcacgtcgatgctgtggcattctgttgctttcaaaaaaaaaaaaaaaaaaaaaaaaaaaaaaaaaaaaagctgccgtaaaaaaaaaccaaactaaatacataaaaaaaaaggtggcgggggccgccctccctacatacgttcctgggaagagagggaggacgggctcttaactctactgggtacgacgaaatggaggacgggggatttacttaaactgaggaagaggcacttgcgtccttggggatgggtaaattccatgcatcagtgcttacaaaccttgggatggttaaaggcccttaagcaaaggagaagaggcttttgtcattacatgagcaatcacttaaagcaaggggggggttttcggcgcaggaagaaggcccataaacaaggggcgtatttgcagagatccttgtaagaacatatgcttggagcttcactgcaaatgactctggaagaaggggtgggtttaactctacagctatagataccggaggagcgatcctacttagagctatggctccaaat

SEQ ID NO: 183375 - DNA, 366 bp, Zea mays
  Clone ID: MRT4577_98822C.1
aaacagggacaaaaaaccctttatgccccaattttgggcccaatggcggtcctcactttccaggggggcttgcccccccttaaaatttccattttgaggggaacaaaaccattttagggccccccaagaacctgttttgttgggccccaggggcttaaagggggccgtagaccctgggaccttaccctttctttttttggaggttgaacccaaagcttggaaatgttggggggattccccggggattggggggggtaattttttttaacaagagaggggtgccttaaaaaaagggttgcccattcccccttaaaaaatttgccgcggggctttgttttcgtttcctaaaatgttttataaataagg

SEQ ID NO: 183376 - DNA, 642 bp, Zea mays
  Clone ID: MRT4577_98823C.1
ctcgagttttttttttttttttttttttttttttttttttttttttttttttttttttttttttttttttttttttttttttttaaaagggggtggggggttttttaaagggaaaaaaacgggcaaggggggaagcccacccacccggaaccctggcaatttggaaaacaagccaaactttggaaaaggaggtttttttgggtttgggggccccccccaccccggggaaaaaaaaaaaagaaccctcccttggacccccgggaaccaggggccctaccacaactggttacagccggatggatccccgcagaaacggggaaccccccctttttaaaaaaaacggggcagggtgaacaaaaatttgtaaaagggggttaaaaccgccccccccgccggggggttaaaaaaaccccgggggggggaggaacctccctgggaaaaccccccctttcctaagggcctccccttttttgacccggaacagaaagccggcaaccccccggggggggggcccctttccctgggacaaaaccatgggggggccccccataaggacctcccggagggccccggaactgttcgcccgggttgtaaggaacccaagccccccaagggaagggtggggttgttttggccaagggc

SEQ ID NO: 183377 - DNA, 704 bp, Zea mays
  Clone ID: MRT4577_98824C.1
atccacataccgttgagacacacaggacatacacaggccagtcttggaccaccacgggcagacggaagacacggccgcctctacgctccttggcctttctgcacgtgctggtacggcgaccattctctcacaatgcctacaggctcttattgcttctgttcttcgcgcgtacctgtcaagagcggcgtgttggggacgcgaaaactcaagaggtgaaccctataggaaccaacaggcaagtccacgctgtcatgttaccttcatcacccttgatcctacaacaatagtatgccctattacaggagctacctctggcgcattgattggcacataacatcaggggacaacaactacaacaacgtgcgctagcaaaccttgatgcccactatcaggaacaacagttgcttgcattcaaccaactagctgtatagaactctgcttgttatttggaacgacaacaactaccatacagccaggtgtctggtgactaccaacagcagtaagttccattccaccaactgacagcttggaactatcactgcttatttacagaagcaacatctactaccattcaggcagctagctggggagagccctgctacctttgtgacacatacacacatgtagtcgctgtaccagcacgctgcgcctaacgctggcacgctcttacaactgcaagaactgctggcatagaaccaacttgc

SEQ ID NO: 183378 - DNA, 171 bp, Zea mays
  Clone ID: MRT4577_98825C.1
gccatgggaacgaccttgtccaagcgattgctacatccctccaaagaagctaactgctctcggttccatatccgctcagcagatgcgtgtgggccatgggtcgactctgctaagcgagtggcacatccctcgaaagaggcgaactgctctcgtttccatatccgcttagca

SEQ ID NO: 183379 - DNA, 260 bp, Zea mays
  unsure (1)..(260): unsure at all n locations
  Clone ID: MRT4577_98826C.1
cccacgcgnccgcccacgcgnccggncaccncgnnnaaacgggcgaacggaagaangcaacaggggcgcccgccgccaccaaangcnagcgcaaaccaagcccgagcccagcgcccccnccggcccacccagcaacgagccaggaagcgagggcggcganancggaagcgcccccggggaacccaacagcgggcgagaagancnncaagaccaagngcgcgcaaggccacaccggcaacaagggcgccggccacaagcaa

SEQ ID NO: 183380 - DNA, 1012 bp, Zea mays
  Clone ID: MRT4577_98827C.1
tcgaagccggccgggactcgctagtcactcctcaatagcaacatgaagtcagcaacctacctacctagacctatcactatcagtatcaagtacctagagctagcaacagccacacccacaccgtacgtcgacatggtctaggaggtcgtcgtcagctctgatcgccgccctcgcggcgctggtcgaggcgatggcgcgttctctctcttgacaagatccggctgacaacccctcctgtgacggatacttctcgacggagaacccagcgccacctccacctcctccccctgctactccgaatcctcatactcccggcgatagctctccttcctcaattccgcatccctcggcgccacagcttcttccatctccgcctcctcatactcccgacgatagctctccttcctcaactccgcatccctcggcgccacagcccccaccatctccgcctccgccgagcgctgatgcttctcctcccctttcgcgacagggcgaaacgtcaccgccgcgcccatcgccccctccctcacccgctccagtatccccgcctactccagcgccggcgtcctcggaagcagggggaacaagtcggagcaggaggaggcggaatcggctagcgaatcggggagcatgacgctagccatcctagactgaagatgccgccgactcgcgtccctagccttcaaggccgcggggcctaacccggggggcccggcggacggcttccgcagcttgggtccaaaaagcccccggtgggcccggcaggatgtgaaaaaaacgaccgggaggcgtctgggagccctgaaccttggttcatgtgaaaattctacatgatttctggggaatccctaaactccaaagtgggcctatattgtagccgtcccttgagtcaaggttggcctttaaaattttggaagcgggaaaaaaaaaaaaaaaaaaaaaaaaaaaaaaaaaaaataaaaaaaaaaaaaaaaaaaaaaaaaaaaaagtactctgcgttgttaccactgct

SEQ ID NO: 183381 - DNA, 256 bp, Zea mays
  Clone ID: MRT4577_98828C.1
caaattttcaacaagctaccccaatttctaaagcaataattactaaatattgcatgagcaaacatgtctgccttgtctcttataactaccaggaccattgaaagagcattagctcataaaccagacttgctatctagcatgatgtgaagaactttttggagaatgcatacagcaattctaataccagtttttcaaaacacaacataaagctccatgctttatcaacccactttttttgcatgagaacctctcatga

SEQ ID NO: 183382 - DNA, 256 bp, Zea mays
  Clone ID: MRT4577_98829C.1
ggcccaaaggaaaacccaacggcaaactggtggggtttcttctttattattattcagcctatcgtccagtacaggggtgttttgcgcgccacacacactccttttgcatttttttcgggcgagggtggatgctctcagacacagagcattttccctgtgcgagaggctgcccctttcgcaagggacggggggggggggaccgacaggggcctcgggatcctttattctgggttcatcaggggggggggggggatcc

SEQ ID NO: 183383 - DNA, 750 bp, Zea mays
  Clone ID: MRT4577_9882C.1
ttttacatccctcgaggccggccgggccgggaggcagtacaccaaatggggcgaccgccctgccgccggggagcattcaatcgtcggcggcacaccgtccccattcttcccgttccccaacgtgaagtggcaccatggtcgccacgcgctcgccgcaggagcaggagcaggagcagcgactgcgggccagccagcctccggttgggtagctgttctgcgcaacagtccgaggggcgcggatggaggagggaccaaacaggagcggaggggaaggcgggcggtacaactgatgagccggtacctgttctacgatagcggtcgcttcagacacgaaagatgttcttgcgagggacatgctgatcatcgccttcgagtaagatgctccaaccatgaggagcataggcacaactagcagggagagcaggccgacctcccaacagcacgcgaaggcaacaatgatagcaactaagaacgtggagaagtttgacatgaagtgacccatctggaggataagccaaacttttaagatctctgttatcatcgagcagtttttttttgtttttttgggggtacttcttctctttggttagttagtgactcttgcaagtgacatgttatgaggaggccggacgaggaaaatcaattaccttttcaccaattgcgtcttgtatgacactcatgtggttggttgccccagccatgatacttgcagtggttaagtcggtgtcgaaggctccgatatcttggctg

SEQ ID NO: 183384 - DNA, 423 bp, Zea mays
  Clone ID: MRT4577_98830C.1
ctccccaactcgccgtttatcttctgcgcttccattttgagctctgtctcttgcacgtccaatctaacctccaaccatgggctatgagaagtgccatatcaacattgcggatattgtacatgtatacatctgttaagttacctccacaggacaccattatctacaagcttgaacagcgttgcaagctggctatcgatatgctgataaggaggctgctgaaatgaataagcgggccttcaagtacacgaggatgctcgactagctcaaaggtgaccgtgaaagatgtatcaccatagctataggtctatgaaagtttgagaccaccaagtactactgcacaaggattgattcccctggacaccgacactttctcacgaacatgaacactggtacctcccaggctgactgtgctgaacttatcat

SEQ ID NO: 183385 - DNA, 2283 bp, Zea mays
  Clone ID: MRT4577_98831C.1
atgtccggtgcacaccggatagtccggtgcccccttctagccgttggcttggccacgtgtcccgcgcagatcgcgcggccgaccattggcccggacgaccgttggctcaccggacagtccggtgcacaccggacagtccgattcacatttaagcacttgtgttggcactcaatcaccaaaatacatagaaatgacctaagggcacatttccctttcagccccggatccgtattctgcttcggaacaatctcatctgtagcggatgaagagggaattctacaccgtatcgcggatccgccggaaagggagtctccttcaacgaactccgaaaataccggagaagcgcaacctccagctcttcggaaaaagatcgtctccggaaagtcgggggccgagggctcgctgacccgaaaaactccactgtctacttccccgacaaaagaatggacacggatcgcgaggaagaaggagaccagggagaagcaaattgttctttccattcctccggcctcaaaggagaacgaaaagaaggacgccacgacagcagcaccattctaccccgacgtcctcttcatcgggagagtggagtcgcctaccgtctccgacgacgagccgaccgcacccggagaagaaccgcctcaacgagaatcccgccgatggaggaatcagcgcaggaacgttcgacgacatcacgcggccggagaactggatccagagcagcctgtctcgcgagacgaggtctcggagataggagaaactctagaagaacgcgtcttcagagaacgaaggaactcccgacgacgtgattgccgacgggctcaggaacaagccgagcaagatgcaaggcaacgccgggagaatccattcttcaggcgcaacctgaatcccgatttcgcccgagctatgaacacgctgagcgaagtcggagggcagcatgagaacgagattcgccgtcaggaggagtacgacagggatcatggtgtcccggctcagagccaggccaccagaactgagtcggcaacggcctcaactggcggaaccacccagggacggtcgaggaaccacaaccacaactcccctccccgggacagacatcgtccccgacgacaggaggacacgtgcagagtatccgctcttactccgcgccttagggccattcaatggcctcccaacttcatggtatccaatgtcgacaaatatgaacctaagcaggatccagggggttggctagctgtctacaccaccgctgctcgagctgccggggcgtccgaagacgtgatgaccgcgtatttacccatcgtccttgggcaagacgcgctacaatggctgcgacatctaccccgacactgcatcgacaactggggggacttcagtcgacgcttcaccgccaacttccagtccctctccgacaagccggcgcaaccatgggacctcaaatccatcaagcgtcggggggatgagactctccggtcgtacctcaaaaggttccagaccatgagaaatcgtatccccgaggagaacaaaagacaacaaaagctcaacgaccgccagatactggtggcgaccaccggtcctcccgctccataccggtggtcggagcacccgatcactttcactcgggaagatcaatggctaaactttgaccatccaggcaaatacccgctcctcgtcgacccggtgatccgagagagccgggtaaagaaggtgctagtggacggggggagcagcatcaacgtcaccttcccccggacactccaaggcttgggagttcacctcaaagagctccacgagtcggacactcctttcttcagcatcgtgccgacggaaggggaatacccgctgggccacatctacatgccggttacctttggaactctggagaactacagaaccgagttcctgaggttcgaagtggcgaacttcgactgcgggtacaacgccatcatcgggaggccggggctggccaaattcatggccatcccccattacacatacatggtactgaagatgccaggaccgcaaggaatcataactgtgcgcgccgacttccaaggcgccgcagaatgtttccgagtggccatccaagcagccctcaacaccaagccatcgacggtttcctcgacaccagcgaactctaagcctagagagaacctcgcagtaccggcaaacgaagctcaggccgtgacctctatgcggccgactgaagatactaagaggatcaacctggggttcgctgatgaacgcaagactgccatcatcagctccagcctggacgacaaatag

SEQ ID NO: 183386 - DNA, 1773 bp, Zea mays
  Clone ID: MRT4577_98832C.1
atggtcgtcaccttctacagcaagatcaccatgcgtcccggatccgtgttctgcttcgggacaatctcatctgtagcggatgaagagggaattctacatcgtatcgcggatccgccggaaaagaagcctcctccaacgaactccgaaaatgccggagaggcgcaacctccagctcttcggaaaaagatcgtctccggaaagtcgggggccgagggctcgctgacccggaagactccgctgtctacttccccgacaaaagaatggacacggatcgcgaggaagaaggagaccagggaaaagcaaggagacttcagtcgacgtttcaccgccaacttccagtccctctccgacaagccagcgcaaccatgggacctcaaatccatcaagcgccggggggatgagactctccggacgtacctcaaaaggttccagaccatgagaaatcgcatccccgaggtcacggaggcggccgtgatcgaggacttctacaggggatccaacgacttggcttttgtccgagccatactacagaaagcgccgactacttccgaggagctgttccgggaagccgacctatacatcaccgccgacgagcgagctcagggcctcatcggaggagcaaagcctgcatcggcagcaccacgacgcgacgcgaaccagccacccgacaaatgctgggagaagaggcctcgcgaagaagtacacgtcgccggaccacctgcctctcgcgcccgaggaggacctcgcggaggcgagcgcacgctagacgacatcctcgacgcccagtgcccataccacaaggacatgcgccacactcttcgcaactgccgggacttcaagcactccgttgggcatggccgacccttccaacctctacctcctcctccgccgaggggaggaccggatgaaccacgacaacctcatcagccggaggagggaggaggaggagctttcccacgcgtcgacagggaggtcaacgtcatcttcggcggacatgggtcgcaggagaacaagagacaacaaaagctcaacgactgccagatactggtggcgaccatcggtcctcccgctccataccgatggtcagaacacccgatcaccttcactcgggaggatcaatggctcaacttcgaccatcccggcaaatacccgctcctcgtcgatccggtgatccgagagagccgggtgaagaaggtgctagtggacggggggagcagcatcaacgtcaccttcccccggacactccaaggcttgggggctcacctcaaagagctccacaagtcggacactcctttcttcggcatcgtgccgacggagggggaatacccgctgggccacatctacatgccggtcaccttcggaactccggagaactacagaaccgagttcctgaggtttgaagtggcaaacttcgactgcgggtacaacgccatcatcggaaggccgggattggccaaattcatggccattccgcactatacatacatgatactgaagatgctaggaccgcaagggatcataactgtgtgcgccgacttccaaggcgccgcagaatgtttccgagtggccatccaagcagccctcaccaccaagccgtcaacggtcccttctacactggcgaactctaagcctgaggaggacctcgcagtaccggcaaacgaaactcaggccgcgacctctattcggccgactgaagaaaccaagcgaatcaacctggggttcgctgatgagcgcaagacagccatcatcagctccagcttggacgacaaatag

SEQ ID NO: 183387 - DNA, 1457 bp, Zea mays
  unsure (1)..(1457): unsure at all n locations
  Clone ID: MRT4577_98833C.1
cattgggtacctcgaggccggccgggaatccttgtttcttcggcgcgaggctgcacgagtcacgaacgaagaggtgaaagcgacggctaggaaccgtggccgcgacccgcgaacgcagacggcctcgagctctccctcgtccccctgccctgcccgcaccctcaacccccgcccgcgggctcttcctccggcccccaggcagacgctcttcgcccccctgtccgcgcccggtgcccagggcacccgagtcccgcctcagccagtccccccgccccgtgcgtcgcgcagtcgcgagaggtggtggtttcaggggattatggaatgcttaacaacaagttttccaagaaatgttggaaaagagtacagctgttcaagcaagttggtgtccagaaaccaatggacccccaaaaggatttgctgctacgtctcttgttcgacaaactccagtcgatgccacaagttcactgatgtggcatgccccatgagcccagttattcgaaaaaggttacgctggagatgctttgctgcaagtttgaacttagaagatggccctgcaccctctgactcgacgtcatcttcatcagagcagactactgatgctgatggaactactaatggtgatgtatctgaaaatctgctttctcgaaagccgagctctgatgagttaaaggctcttttggctgattcggaacgaagtaagcttttgagaagactcagtgaagcaaatcaatataaccgattcctcaagagacagttgcaaataaaggatgatgcagtcgtaaaattcaaaggtgaacttgctgttttggaactagaactgcaggctctggttggcctagctgaagaggttgctaattttgatgttccgttagggtctaggaagataaacggaaaatatattcaatctcatcttctctccagattagaagctgtccatgataagattatggaacaggtaaagagtgttgacgctttaaagacccaagaagttattcctgtctactggattggcatggctgagaatgtgcagatcatgggttcattcgatggatggtcacagggcgaggcgatgtccatggagtattcaggtgactacggaagattctctgcgactctgaagctaagacctggaaggtacgagatcaagtttttggttgatggggaatggagattgtcgcctgaatatcccactgctggagatggactgacgcagaacaatattcttgttgtggagtaatacaacttcctcatctaccatttcaatcatccaaacaatgccgaagtgcacctacatgtcttcttccatctgtaatactatgcttactatgtggacatgtggttgcctcacagaaatcgaataaattagcctatcctggcatatgatcctttcgtatttaaatatatgaagaataaattaacctaaaaaaaaaaaaaaaaaanaaaaaaaaaaaaaaaaa

SEQ ID NO: 183388 - DNA, 1797 bp, Zea mays
  Clone ID: MRT4577_98834C.1
atggccatcaccttccacaacaagatcaccctccgtcccggatccgtattctgctttggaacaatctcatccatagcaaatgaagagggaactctacaccgcattgtagatccgccgaaaaagaagtctcctccaacaaactttgaaaataccggagaagtgcaacctccagctctccgaaaaaagatcgccttcagaaagtcaggggccgagggcccgctgacccggagaactccactgtctacttccccgacgaaagaatggacacaggtcgcaaggaggaaagaggccgggagaaagcaagctgctctttccgttcctccgccctcaaaggagagcggaaaaaagatcgtcacgaccgccgtacctttctaccccgacgtcctcttcatcgggagagtggagtcgccccccttctccgacgacgagccgaccgcgcccggagaagaaccacctcagcgggaatcccgccgacggagaaaccgacgccaaaacattcggcgacaccacgaggccggagaacgggatccggagcaacctgtttcgtgggacgagaaggcgccgactacctccgaggagctgttccgggaagccgacctctacatcaccgccgacgagcgggcccaggacctcatcggaggagcgaaacccgcaccagcagcaccacgacgcgacgcgaaccagcaacccgacaaacgctgggagaagagacctcgcgaagaagtacacgccgccggaccaccagcctctcgcgcccggggaggacctcgcggaggcgagcgcgcgctggacgacatcctcgacgcccagtgcccgtaccacaaagacatgcgccacactcttcggaactgccgggacttcaagcactctgtcgggcacggccgacccttccaacctctacctcctcctccgccgaggggagggccagaagaaccacgacaaccccagcagcaggaggagggaggaggaggagctttcccgcgcgttgacagggagttcaacgtcatcttcggcggacacggatcgcaagagaacagaagacaacaaaagctcaacgatcgccagatattggtggcgaccaccggtcctcccgccccataccggtggtcggagcacccgatcactttcactcgggcggatcaatggctcaacttcgaccacccaggaaaatacccgctcctcgttgatccggtgatccgagagagcagggtgaagaaggtgttagtggacggggggagcagcatcaacgtcaccttcccccggacactccaaggcttgggagttcacctcaaagagctccacgagtccaacactcctttcttcggcatcatgccgactgaaggagaatacccgttgggccacatctacatgcccatcaccttcggaactttggataactataggaccgagttcctgaggttcgaagtggcgaacttcgactgcgggtacaacaccattatcgagaggccgggattggcaaaattcatggccattccgcattacacgtacatgatactgaagatgccaggaccacaaggaatcataactttgcgcgctgacttccaaggcgccgcagagtgtttccgagtggccatccaagcggccctcaccaccaaaccgccggcgacttcttcggcgaaggcgaactctaagcctgaggaggaccttgcatcactggcgaacgaagctcaggccgcgacctctatgcggccgactgaagaaactaaaaggatcaacctggggttcgctgatgaacgcaagactgctatcatcagctccagcctggacgacaaatag

SEQ ID NO: 183389 - DNA, 417 bp, Zea mays
  Clone ID: MRT4577_98835C.1
tttttatatttaattctattttaagaagcaggaaacgggaatttgaggaatgatatcataatcatgaatctaagaacataacaggtgaaacacgaatcaagctgtggcgccatggggttcacagatccacacctaaaccgctgaattaaactgcgagcggttcatgtaaaactaagaccaccattcaaaacaccaccatcttagttagatccaagaaaactaacgcatggggagtcgtcgatcacggagggagggcggccaaacagaccagatcaaagagatctaggagagctgtcctcagtcagcgaccttgaccaccttggaggtggagccgatacgggtgcccaccttctagatggccgtgacgacgttcatgccctttacgacctggccgaagacgacgtgcttgccgtcgag

SEQ ID NO: 183390 - DNA, 305 bp, Zea mays
  Clone ID: MRT4577_98836C.1
cgctgaggaattcggccgaggacggactccttgttttcctccttccgacgccggggcgcgggaggtagccgagccgccagcgggacaagcccggaggctggacatacagatacagcgcggagcggctggtgctcttcatgacttacgtgctcgagctaggcgtcgctgctcagacggacggggagcttgaaggaagcgccgctgtctccaagaggggtcaagttccgtgcatgaacagctttgacttgcgatctgtcagacatgcgtacattgagaggagggtgtcatgttgtacagagaactac

SEQ ID NO: 183391 - DNA, 4686 bp, Zea mays
  Clone ID: MRT4577_98837C.1
atggccgtcaccttccaccgcaagatcaccctccgccccggatccgtgttctgcttcggaactatctcatccgtagcagatgaagaagggactctacatcgcatcgcagacctgcccaggaagaagtctcctccaacaacctctgaaaatgtcggagtaagacagggaaaagtgcaacctccagcgctccaaaaaaagatcgccttcagcaagccagaggctgagggcccgccgacccggagaactccactgtctacctccccgacgaaagaatggacacaaatcgcaaggaagaaagaaacaaataaaaccgggaggaagcaagtcgttctttctgtgcctctgccctcaaaagagaacggaaagaagatcgccctgacagccgcaccattctaccccgacgtcctcttcatcgggagagtggagtcgccccccgtctccaacgacgaaccgaccgctcccggagaggaacctcctcagcgggaatcccgccgacgaaggaaccgacgccgaaatatccggcgacatcacgaggccggagagcgagacccggagcagcctgtctcgcgagacgaggtctcagagataggagaaacaccggaggaatgtgtcttcagagaatggaggaattcccgatggcgtgatcgccgatgggctcaggaacaagccgagcaggaggcaaggcagcgtcgggaaaatccactcttcgggcgcaacctgaaccccgacttcgcccgagccatgaacacgccgagtgaagtcggagggccaaccatcttctacctctcgctcacccgccgaacgacctacgacacgccatcaacagtcgccgggacgcgcggagctccatcaatgcctcgcgtgaacggcaacatgagaatgagatccgccgccaggaagagtacgatagggaccacgacatcccagcccggagtcaggccaccagaactgagtcggcaacggcctcgactggcgataccacccggggacggtcgaggcaccacgacaaccactcccctccccgggacagacatcatccccgacgacaggaagacacgtgtggagtgtctgcacttactacacgccttagggccattcaatggccccctaacttcaagcgacttcagtcgacgcttcaccgccaactttcagtccctctccgacaaaccagcgcaaccatgggacctcaaatccatcaagcgtcggggggacgaaactctccggtcgtacctcaaaaggttccagaccatgagaaatcgtatccccgaggtcacggaggcggccgtgatcgaggacttctacagaggatccaatgactcggccttcgtccgagccatattacagaaggcgccgactacctctgagcaactgttccgggaagccgacctctacatcaccgccgacaagcgagctcaggacctcatcggaggagcgaagcctgcgcccgcagcaccgcgacgcgatacgaaccagcaacccgacaaacgctgggaaaagaggccttgcgaagaagttcacgccgccggaccacccgcctctcgcgcccggggaggacctcgtggggacgaacgcacgctggacgacatcctcgatgcccagtgcccgtaccacaaggacatgcgccacatcctttggaactgcagagacttcaagcactccgtcggacacggctggcccttccaacctctacctcctcctccgccgccgggaggaccaggagaaccgcgacaaccccagcaacaggaggagggaggaggtggagccttcccgcgcatcgacagagaggtcaacgtcatcttcggcggacacggatcgcaggagaacagaagacagcaaaagctcaacgatcgccaaatactggtggcgaccaccggtcctcccgctctgtaccgatggtcggagcacccgatcaccttcactcgggcagatcaatggctcaacttcgaccacccaggcaaatacccgctcctcgtcgatccggtgatccgagagagcagggtgaagaaggttttagtggacggggggagcagcatcaacgtcaccttcccccggacactccaaggcttgggagttcacctcaaagagctccacgagtcagatactcccttcttcgacatcatgtcgactgaaggagaatacccgctgggccacatctacatgccagtcaccttcggaactctggagaactacagaaccgagttcctaaggttcgaagtggcaaacttcgactgcgggtacaacgccatcatcgggaggccgggattggcaaaattcatggccattccacattacacgtacatgatattgaagatgccaggaccgcaaggaatcataactatgcgcgctgacttccaaggcaccgcagaatatatgccgggagtcccgagagaactggccgagcacaaactgaaggtctatccccaggcgaggccgattcggcaaaaactacgtcgtttcacgcccgataagagagaggccattcgcgctgagctggcccgcttggtcgcggctggatttattagagaggtgttacatcccgagtggttagccaaccctgttcttgtactcaaaaagaataaagtagattggcgcatgtgcgtcgactatacggatctcaacaaacactgtccaaaggatcccttcgggcttcctaggatatatcaggtggtagattccactgttggatgttctgtgctgtctttcctggattactactccggatatcatcagattagcttggcaaaagaagacgaggaaaaaacagcattcatcactccgttcggtgctttctgttatacctccatgtcgttcggcctcaaaaacgctggagcgacttataagagagccattcaaacatgcttagccgatcactggggcaagcgggtggaagcctatgtagatgatgtggtaatcaaaacggagaactcggaaaatttcatcgaagacttacagctggttttcaacagtctacggcgatatcgatggaagcttaatcccgaaaaatgtgtctttggggtaccagcaggaaagctactcggatttattgtcagccaccagggaattgaagctaatccggataagatcgaagctatcatgaaaatggaggcgccgcgatcacaaaagaaagttcagagacttaccgggtgtatggcagccctgagcagattcatatccaggctgggagaaaaaggcttaacattttataagctactcaagaaggtggataaatttcagtggacttcagaagcacaggaagccctagacgcattgaaaaaaatcctgacgacaccaccagtgctgaagccaccacggcgagccacgtcaactcaaccgactgaagatttgctgctatatatctcttgcacgactcacgtggtgagcaccgcattagtagtcaagcgagcagaagaaggacatgcttacccagtgcaacatcccgtttatttcattagtgaagttctgggtccctcaaagaaaaaataccctcaggttcagaagctattatatgcagtacttctaactgcgcgcaagctgcgtcactactttgacgaccacaaagtcatagtagtcgctggttttccaataggggatattcttcataacaaggaagccattagccgaatagctaagtgggcctgtgagctgggatctcatgacattgaatttcgacctcgcactgccatcaagactcaagcattggttgatttcgtatcagaatggactgaacaacaaataccagataacccagaaactgcaaaagtatggcgaatgtattttgatggctcgttaaaattgcacggagcaggcgcggggatcctctttaccgcacctggaggcgagcacctcagatatgccctccagctgttatttccggcctctaataatgcagctgaatatgaagctttgattcatggactgaacattgctatgtcactaggcatcaagagactaatggtatacggagattctttggtagtcataaaccagataaacaaagaatgggactgttcgagtgattcaatgggaaagtactgcaccgccgtccggaaactagaagataaattcgaaggtctggaatttcaccatgtagaaagagatcaaaacacggcagctgatgtattgtccaagctaggatccagtcgaactcaggtcccacctggagtctttgtacaagaaataccacacccaagcatctcgctggatcaagcagaagaatgtaataccgtgagccaatcagagtcagattctgatgactggagaaggccgatcatcagatatataaagaatgaagagaaaccagatgacaaaaatgcagccgagcgcatcgctagacagtcagctcactacacactcattggggaaacactatacagaaggggtgcatcgggcatcctcatgaagtgcattctctcatctaccgggaagcaacttctagatgaggtccatgctgggcaatgtggaatacacgcagcatccaagacactagttgggaaggccttcaggtcgggattctattggccaacagcaaaaagtgatgcagccgagttagttcagaggtgcgaagcctgccagtacttgtcaaagcagcaacatctaccagcacagcaactgcagaccataccagtaacttggccgttcgcatgctggggattggatatgattggacctttccagaaagctcaatga

SEQ ID NO: 183392 - DNA, 2331 bp, Zea mays
  Clone ID: MRT4577_98838C.1
atggtcgtcaccttccaccgcaagatcaccctccgccccggatctgtgttctactttggaactatctcatccgtagcagatgaagaaggaactctacatcgcatcgcagatctgccaaggaagaagtctccttcaacaacctccgaaaatgtcggagtaaggcagggaaaagcgcaacttccagcgctccgaaaaaagatcgccttcagcaagccaggggccgagggctcgctgacccgaaaaactccactgtctacttccccgacgaaagaatggacacaaatcgcaaggaagaaagaaacaaacaaaaccgggaggaagcaagttgttctttccgttcctccgccctcaaaggagaacgaaaagaagatcgccacgaccgtcgcaccattctaccccgacgtcctcttcatcgggagagtggagtcgcccccgtctccgacgacgagccgaccgcgcccggataagaacctcagcgggaatcctgccgacggaggaaccgacgccgaaatgtccggcgacatcacgaggccggagagcgggacccagagcagcctgtctcgcgagacgagggctatcgacgactgttcacccaagcagccaaccatcttctacctcttgctcacccaccgaacgacctacgacatgccatcaacagccgccgggacgcgcgaagctccatcaatgcttcgcgagaacgacgacatgagaacgagatccgccgccgggaggagtacgatagggatcatggcatcccagctcggagtcaggccaccagaactgagtcggcaacggcctcgactggcggtactacccggggacggtcgaggaaccacaacaactactcccctccccgggatagacatcatccccgacgacaagaagacacgtgtggagtgtctgcccttactccacgccttaaggccattcaatggccccctaacttcaagcgactttagtcgacgcttcagcgccaactttcagtccctctccgacaaaccagcgcaaccatgggacctcaaatccatcaagcgccggggggacgaaactctccggtcgtacctcaaaaggttccagaccatgagaaatcgtatcccccaggtcacggaggcggccgtgatcgaggacttctacagaggatccaacgactcggccttcgtccgagccatattgcagaaggcgccgactaactccgagcagctgttccgggaagccgacctgtacatcaccgccgacgagcgagctcaggacctcatcgggggagcgaagcccgcgccagcagcaccacgacgcgacgcgaaccagcaacccgacaaacgctgggagaagaggcctcgcgaagaatgtccgtaccacaaggacatgcgccacacccttcggaactgcagagacttcaagcactccgtcggacacggccgacccttccaacctctacctcctcctccgccgcggggaggaccaggagaactgcgacaaccccagcagcaggaggagggaggaggtggagccttcccgcgtgttgacagagaggtcaacgtcatcttcggtggacacggatcgcaggagaacagaagacaacaaaagctcaacgatcgccagatattggtggcgaccaccggtcctcccgctccgtaccgatggtcagagcacccgatcaccttcacttgggcagatcaatggctcaacttcgaccacccaggcaaatacccactcctcgtcgatccggtgatccaagggagcagggtgaagaaggtattagtggacggggggagcagcatcaatgtcaccttcccccggacactccaaggcttgggagttcacctcaaagagctccacgagtcagacactcctttcttcggcatcgtgccgactgaaggagaatacccgctgggccacatctacaagccagtcacctttggaactccggagaactacagaaccgagttcctgaggttcgaagtggcgaacttcgactgcggatacaatgccatcatcaggaggccgggattggcaaaattcatggccatctcgcattacacatacatgatattgaagatgccagggccgcaaggaatcataactgtgcgcgctgacttcgaaggcgccgcagaatgtttccgagtggccatccaggcagccctcaccaccaaactgtcggcgatttcttcaacgcaggcaaactctaagcctgaggaagaccttgcagcacccgcaaatgaagctcaagccgcgacctctatgcggccgactgaagaaaccaaaaggatcaacctggggttcgctgatgaacgcaagactgccatcatcagctccagcctggatgacaaatag

SEQ ID NO: 183393 - DNA, 2223 bp, Zea mays
  Clone ID: MRT4577_98839C.1
atggccgtcacctttcactgcaagatcaccctccgtcccagatccgtgttctgctttggaacaatctcatccatagcagatgaagagggaactctacaccgcatcgccgatccgccaaagaagaagtccactccaacacactccgagaatgtcggggtgaggaaggaaaaagtgcaacctccagcgctccgaataaagatcgtcttcggcatgccaggggctgagggcctgctgacccgaagaactctaccgtccacttccccgacgaaagaatggacacaaatcgcaagaaagaaggaggcaaacaagaccaggaggaagcaagttgttctttccgttcctctgccctcaaaggagaacggaaagaagatcgccacgaccgctgcaccattctaccccgacgtcctcttcatcgagagagtggagtcaccccccgtctccgacgacgagccgaccgcgcccggagaagaaccacctcagcgggaatcccgccgatggagaaaccggcgccgaaatattcggcgacaccacgaggccggagaatgggatccggagcaacctgtttcacgggacgaggtctcggagataggagaaactccggaggaacgcgtcttcagagaacgaaggaattctcgccgaccccttactccacgccttagggccattcaatggccccctaacttcaaggtatccaatgtcgacaaatatgaacctaagcaggatccaggaggctggctggccgtctacaccaccgccgcccgagccgccggagcatccgaggacgtgatgactacgtacttacccattgtcctcgggcaagacgcactacaatggctgcgacatctaccccgacactgcatcgacgactggagcgacttcagtcgacgcttcaccgccaactttcagtccctctccgacaaaccggcgcaaccatgggacctcaaatccatcaagcgccggggggacgaaactctccggtcatacctcaaaaggttccagaccatgagaaatcgtatccccgaggtcacggaggcggccgtgatcgaggacttctacagaggatccaatgactcggccttcgtccgagccatactgcagaaagcgtcgactacctccgagcagctgttccgggaagccgacctctacatcaccgccgacgagcgagctcaggacctcatcgggggagcgaagcccgcaccggcggcgccacgacgcgacgcgaaccagcaacccgacaaacgctgggagaaaagacctcgcgaagaagtgcacgccgccggaccacctgcctctcgcaaccggggaggacctcacggaggcgagcgcacgctggacgacatcctcgacgcccagtgcctgtaccacaaggacatgcgccacaccctgcggaactgcagggacttcaagcactccatcggacacggccgacccttccaacctctacctcctcctccgccgcggggaggaccagaagaaccacgacaaccccagcagcaggaggagggggaaggaggagccttcccatgcgttgacagggaggtcaacgtcatcttcggcggacacagatcgcaggagaacagaagacaacaaaagctcaacgatcgccagatattggtggcgaccaccgagagcagggtgaagaaggtgttagtggacggggggagcagcatcaacgtcaccttcccccggacactccaaggcttgggagttcacctcaaagagctccgcgagtcagacacgcctttcttcggcatcgtgccgactgaagaggaatacccgctgggccacatctacatgcccgtcaccttcggaactccggagaactacagaaccgagttcctgaggttcgaggtggcaaacttcgactgcgggtacaatgccatcatcgggaggccgggattggcaaaattcatggccatcccgcattacacgtacatgatattgaagatgccaggaccacaaggaatcataattgtgcgcgctgacttccaaggcgtcgcagaatgtttccgagtggccatccaagcggctctcaccatcaaaccatcggcgacttcttcagcgcaggcgaactctaagcctgaggaagaccttacaacaccagcgaacgaagctcaagccgcgacctctatgcggccgactgaagaaactaaaaggatcaacctggggtttgctgatgaacgcaagactgccatcatcagctccagcctggacgataaatag

SEQ ID NO: 183394 - DNA, 135 bp, Zea mays
  Clone ID: MRT4577_9883C.1
tcgcgctctgcgtgtgttttcaggtgggcaagttcacggcgaccagcgagcaccaagctgcggaggctcacatgcgcgcggccaacgcgcacgtgcacgcgaccgacgaggcgcacgccaacaacaagcggctcc

SEQ ID NO: 183395 - DNA, 2730 bp, Zea mays
  Clone ID: MRT4577_98840C.1
atggccgtcaccttctaccgcaagatcaccatgcgtcccggattcgtgttccgcttcgggacgatctcatctgtagcggatgaagagggaattctacaccgtatcacggatccgccggaaaagaagtctcctccaacgaaccccgagaatgccggaacagcgcaacctcctgctcttcggaaaaagatcgcctccggaaggtcaggggctgagggcccgctgaaccggaggactccactgtctacttctccgacaacgctgttcctccggcctcaaaggagaacggaaagaaagtcgccacgacagcaacgccattctaccccgacgtcctcttcatcgggagagtggagtcgcctgccgtctccgacgacgaaccaaccgcacccggagaagaaccacctcaacgagaatcccgccgacggaggaaccggcgcaggaacgttcgacgacatcacgcggctggagagcgagatccagaatagcctgtctcgcgagacgagagaacgaaggaactctcgacgacgtgatcgccggcgagctcaggaacaagccgagcaagatgcaaggcaacgccgggagaatccactcttcggacgcaacctgaatcccgacttcgcccgagctatgaacacgccgagcgaagtcggaggggtactagctcgaatagcagatggacttcctcggactcccgacgctgagggctatcgacgcttgttcacccaagcagccaaccatcttctaccacttgctcatccgccgaacgatctgcgacacgccatcaatagccgccgggacgcgcgaagctccatcaacgcttcgcgtgaacggcggcatgagaacgagattcgccgtcgggaagagtatgacagggatcatggcatcccgactcagagccaggccaccaggactgagtcggcgacagcttcaactggcggtaccacccggggacggtcgaggaaccacaatcacaactcccctccccgggacagacatcgtccccgacgacaggaggacacgtgcggagtgtccgcccttactccgcgccttagggccattcaatggcctcccaacttcaaggtatccaacgttgacaagtatgaacctaagcaggatccaggaggatggctggctgtctacaccaccgctgctcgagctgccggggcatccgaggacgttatgaccgcgtatttgcccatcgtccttgggcaagacgcgctgcagtggctgcgacacctaccccgacactgcatcgacgactggggagatttcagtcgacgcttcaccgccaacttccagtccctctccgacaaaccggcgcaaccatgggtcctcaaatccatcaagcgccgaggggatgagactctccggtcgtacctcaaaaggttccagaccatgagaaatcgcatccccgaggtcacggaggcggccgtgattgaggacttctacagaggatcaaacgactcggcttttgtccgagccatactacagaaggcgccgaatacctccgaggagctgttccgggaagccgacctctacatcaccgccgacgagcgagctcaggacctcatcggaggagcgaagcccgcaccggtagcaccacgacgcgacacgaaccagccgaccgacaaacgctgggagaagaggcctcgcgaagaagtgcatgccgccggaccacctgtctctcgtgcccgaggaggacctcgcggaggcgaacgcacgctggacgacatcctcgacgcccagtgcccataccataaggacatgtgccacactcttcgcaactgccggaacttcaagcactccgtcgggcatggccgacccttccaacctctacctcctcctccgccgaggggaggaccagatgaaccacgacaaccccatcagcaggaggagggaggaggaggagcttttccgcgcgttgacagggaggtcaacgtcatcttcggcggacacgggtcgcaggagaacaaaagacaacaaaagctcaacgaccgccagatactggtggcaaccaccggtcctcccaccccataccggtggtcagagcatccgatcaccttcactcgggaggatcaatggctcaacttcgaccaccccggcaaatacccgctcctcgttgatccggtgatccgagagagccgggtgaagaaggtgctagtggacggggggagcagcatcaacgtcaccttcccccggacactccaaggcttgggagctcacctcaaagagcttcacaagtcagacactcctttcttcggcatcgtgccgactgaaggggaatacccgctgggccacatttacatgccggtcacctttggaactccggagaactacagaaccgagttcctaaggtttgaagtagcgaacttcgactgcgggtacaacgccatcatcagaaggccggggttggccaagttcatggccattccacattacacatatatgatactgaagatgccaggaccgcgaggaatcataactgtgcgtgccgacttccaaggcgccgcagaatgtttccgagtggccattcaagcagccctcaccaccaagccgtcgacggttccttctacaccggcgaactctaagcctgaggaggacctcacggtaccggcgaatgaagctcaggccgcgacctctatgcggccgactgaagaaaccaaaagaatcaacctggggtttgctgacgagcgcaagacgactatcatcagctccagcttggacgacaaataa

SEQ ID NO: 183396 - DNA, 1365 bp, Zea mays
  Clone ID: MRT4577_98841C.1
atgaccgcatatctgcccattgtccttgggcaagatgcgctacaatggctacggcatctaccccgacactgcatcgacgactggggagacttcagtcgacgtttcaccgccaacttccagtccctctccgacaagccagcgcaaccatgggacctcaaatccatcaagcgccggggggacgagactctccggtcgtacctcaaaaggttccagaccatgagaaatcgtatccccgaggtcacggaggcggccgtgatcgaggacttctacagaggatccaatgactcggctttcgtccgagccatactacaaaaggcgccgactacctccgaggagctgttccgggaagccgacctctacatcaccgccgacgagcgggcccaagatctcattggaggaacaaagcctacaccagcagcaccgcgacgtgacgcgaaccaaccattcgacaaacgctgggagaagaggcctcgtgaggaagtacacgccgccggaccacccgcctctcgcgcccgaggaggacctcgtggaggcgagcgcacgctggacgacatcctcgacgcccagtgcccgtaccacaaggacatgcgccacactcttcgtaactgccgggacttcaagcactccgtcgggcacgaccgacccttccaacctctaccgcctcctccacccaggggaggaccagatgaaccacgacagccccatcagcaggaggaggggggaggaggagccttcccacgcgttgacagggaggtcaacgtcattttcgacagacatgggtcgcaggagaacaaaagacaacaaaagctcaacgaccgccagatactggtggcgaccaccggcttgggagttcaccttaaagagctccacgagtcagacactcctttcttcggcatcgtgccgacggaaggggaatacccgctgggccacatctacatgttggtcaccttcggaactccggagaactacagaaccgagttcctgaggttcgaggtggcgaacttcgactgcgggtacaacgccatcatcgggaggccgggactggccaagttcatggccattccgcactatacatacatgataatgaagatgccaggaccgcaaggaatcataactgtgcgcgccgacttccaaggcgccgcagaatgtttccgagtggccatccaagcacccctcaccaccaagccgtcaacggttccttctacattggcgaactctaagcctgaggagaaccttgcagtaccggcaaacgaagctcaggccgtgacctctatgcggccgactgaagaaaccaagcgaatcaacctagggttcgctgatgagcgcaagacggccatcatcagctccagtttgaacgacaaatag

SEQ ID NO: 183397 - DNA, 231 bp, Zea mays
  unsure (1)..(231): unsure at all n locations
  Clone ID: MRT4577_98842C.1
tcccatcctcctcgacatctccngcggcggnccgctaggctcctacggcggcgagcgatcctcctcctccttgcaccccaccaacacctatttcgactcctacaagttcgacttcggcataaactcctgccgttactacggctctcgccccctccgcgaccagcggtcgggcgcggataccaacccttcaacgagggccaccaacgaagccacggggaggcaccaacccgc

SEQ ID NO: 183398 - DNA, 265 bp, Zea mays
  unsure (1)..(265): unsure at all n locations
  Clone ID: MRT4577_98843C.1
tttttttttttttttttttttcggcgggccagggcgcttctggcagggggggacctcccggttccagcccaaanccgagggtgttcccccaaccaaacccagaacctggttaccacctaanaaaaccggggggggcaaggcaaatcanggccgtcctttttggtcgtaaaaaaggggtggcgaccggggggggctaaacggcggaaacccacggacggggttaaantgagcacctcggctcgttctggggccctcttcgggggtt

SEQ ID NO: 183399 - DNA, 466 bp, Zea mays
  Clone ID: MRT4577_98844C.1
ccacgcgtccggagggtactaatcgatcgcgacgaacaccacacaagcgaaccgccaggctgacatgcagctaccggtgccagccggagaattcagccagaagatatttctagcgctcatattctttgcgcggagaccatgaatcagacaactacggacagccacatgtgggtggacagcgtgatagatcagacttgactgcctgacattatggtagacaatgattcggatcaatagcctgtacacaacattgaactgtgtagccaaaggcgagaaggattgactaaagcgcgcgctgagtactatacacgggagacgcgcttcggatacctgcagacgggcgtgagcatccgctcgtggaaccatagcataacgatcagcgaatcaaaccggggcactggcgaaatatgcacgctacttgctcaggataagaggagtaatgccgctggaagaaacgagagatgac

SEQ ID NO: 183400 - DNA, 2736 bp, Zea mays
  Clone ID: MRT4577_98845C.1
atggccgtcaccttctacagcaagatcaacatacgtcccggatccgtgttccgctttgggacgatctcgtctgtagcggatgaagagggaattctacaccgtatcgcggatccgccggaaaagaagtctcctccaacaaaccccgaaaatgccggaaaagcgcaacttcctgctcttcggaaaaagatcgcctccggaaggtcaggagccgagggcccgctaaaccggaggactccactgtctacctctccgacaacagaatggacgcgaattgcgaggaagaagaagactggggagacgcaagccgttctttctgttcctccgacctcaagggagaacggaaagaaagtcgccgcgacagcaacaccattctaccccgacatcctcttcatcgggaggcccccagaagaaccacctcaacgagaatcccgccgacggaggaaccggcgcaggaacgttcgacgacatcacgtggccggagaacgggatccggagcagcctgtctcgcgagacgaggtctcggagataggagaaactccagaggaacgcgtcttcagagaacgaaggaactcccgacgacgtgatcgccgacggactcaggagcaagccgagcaagatgcaaggcaacgccgggagaatccgctcttcgggcgcaacctgaaccccgacttcgcccgagctatgaacacaccaagcgaagtcggaggcgtactagctcggatagcagatggacttccccggactcccgacgctgaaggctaccgacgtttgttcacccaagcagccaaccatcttctaccgctcgctcacccgccgaacgacctacgacacgccatcaacagtcgccgagatgcgcgaagctctatcaatgcttcgcgcgaacggcggcatgaaaacgaaattcgccgtcgggaggagtatgatcgagatcatggctttccgactcaaagccaggccaccaggactgagtcggcaacagcttcaactggcggtaccacccggggacggtcgaggaaccaccgtcgccactcccctccccgggataaacatcgtccccgacgacaggaggacacgtgcggagtatccgctcttactccgcgccttagagccatccaatggcctcccaacttcaaggtatccaatgtcgacaaatatgaaccgaagcaggatccagggggttggctagccgtctacaccaccgctgctcgggctgccggagcatctgaggacgtcatgaccgcgtatctgcccattgtccttgggcaagatgcgctgcagtggctacgacatctaccccgacattgcatcgacgactggggagacttcagtcgacgtttcaccgccaacttccagtccctctccgacaagccagcgcaaccatgggacctcaaatccatcaagcgccgaggggacgagactctccggtcgtacctcaaaaggttccagaccatgagaaaccgcatccccgaggttttcgtccgagccatactacaaaaggcgccgactacctccgaggagctgttccgggaagccgacctctacatcaccgccgacgagcgggcccaggatctcattggaggagcaaagcccgcaccgacagcaccacgacgtgacgcaaaccaaccgcccgacaaacgctgggagaagaggcctcgtgaagaagtacacgccgccggaccacccgcctctcgcgcccgaggaggacctcgtggaggcgagcgcacgctggacgacatcctcgacgcccagtgcccgtaccacaaggacatgcgccacactcttcgtaactgccgggacttcaagcactccgtcgggcacgaccgacccttccaacctctaccgcctcctccgccgaggggaggaccagatgaaccacgacaaccccatcagcaggaggaggggggaggaggagccttcccacgcgttgacagggaggtcaacatcatcttcggcggacatgggtcgcaggagaacaaaagacaacaaaagctcaacgaccgccagatactggtggcgaccactggtcctcccgccccataccggtggtcggagcacccaatcactttcactcgggaggatcaatggctcaacttcgaccatccaggcaaatacccgctcctcgtcgatccggtgatccgagagagccgggtaaagaaggtgctagtggacggggggagcaacattaacgtcaccttcccccggacactccaaggcttgggagttcacctcaaggagctccacgattcggacactcctttctttggcatcgtgccgacggaaggggaatacccgctgggccacatctacatgccagtcaccttcggaactccggagaaatacagaactgagttcctgaggttcgaggtggcgaacttcgactgcgggtacaacgccatcattgggaggccggggctggctaagttcatggccattccacactatacatacatgatactgaagatgccaggaccgcaaggaatcataactgtgcgtgccgacttccaaggcgccgcagaatgtttccgagtggccatccaagcagccctcaccaccaagccgtcaacggttccttctacaccggcgaactctaagcctaaggaagacctcgttgtaccggcaaacgaagctcaggccgcgacctctatgcggccgactgaagaaaccaagcggatcaacctggggttcgctgatgagcgcaagacggccatcatcagctccagtttgaatgacaaatag

SEQ ID NO: 183401 - DNA, 1147 bp, Zea mays
  unsure (1)..(1147): unsure at all n locations
  Clone ID: MRT4577_98846C.1
aaaatctaaatttgtgcgctccggctcttctcgcgacgggccttctcctccttcgccgtcttccaaccaactcctccacccctgtcccaatcccaaaacctcgcgggctcattgcagcacacctgcgctgcgcgagatgttccccgcaggcgaccacctcctccttttcgcgctcgcttccctcgggggcgcagcggcggccggcgccggcgaggggttctgctcggcggaaccgtcaaacgattgttctcagtcgccgccgctctactcgaaggtcaccagtcccaccctcgcacccgtgcatttgcaagatttacctggcttcacacgtagtgtgtacaaaaaggatcatgctttaataacaccagaaagccatgtattcagtcctttgcctgattggaccaacacgttaggagcatatttgattagcccagctcttggtgcacacttcactatgtacttggcaaacatgcaagatggatcaaaatcagccttaccaccgaaagatgttgaaaggcttatctttgtagttcaaggcagcattgcattgtctgtggagagcggaacaacccactccctgttggtagactcttatgcttatcttcctgcaaacatgaagcactctgtgatatcagacaaaccaagcactcttgtaatctttgagaggaggtacacagccgttggggattaccatgctgatctagttgttggttcaacagataagcaacccctcccttgaacccagnagaggtatttgagctgaggaagctgctacccacctctcttccttatgactntaatatcatataatggactttcaaccaggcgaatatctcaatgttaaggaggttcattataatcaacatggacttcttcttttagaggggcaaggaatataccgactgggagagagttggtaaggaattagtttgaaatcctccttttgttttagttttattttcttcatgttaagtttttaaccttgtgcaatcttggaatagcagcctatgttttgtatagaaaaatattccgtataatattatgtgtatcacagtgatataacttctagaagacatgacgtacagagattacctacccatttacctcattaaacataaaatgatatgtgtgttcatatgcaaattat

SEQ ID NO: 183402 - DNA, 383 bp, Zea mays
  Clone ID: MRT4577_98847C.1
caacggcctccacaagtaggtggatcgaagcaactcgcactgcaggccacacatacatatataatagagtactacagtgcagaatatatatagagcgatgctggatgctgcacctgcaaatgcagctaggtctattttttttatagagtaataaaaccgggggggggtcaggctgtttttttttaagtgacgctgatattgttgtctgaactagtatcatcaacagacagcttacccccacgtttttcaagaaatccttgatctctgatgggcttaaaactttgaagtcacgaatcagatcgaataattccgatttcaatgctgttggaggaaaattgcccctcaatatcttgtttcaaaggcaaaaatgcagtgcggatggc

SEQ ID NO: 183403 - DNA, 321 bp, Zea mays
  Clone ID: MRT4577_98848C.1
catatcatgctctagcatattaccatacatttgagactttcacctgtactgattacatgactttgttgagatgcataaatggaaccaacctggtctaagccgcttgcggtaaaacaatgggggaagcagctcaaaatttggctgcagcatacgaaactaggatcgagtagcctgataaaaatccgctgcacttaggaaaacatgccttcctagcaataaactgaccgccggataacctaacttgcaagcaactgaaatcctgcgcttgccagcttgcaactgcttcttcaatatggccagagaccgccacagaagatatac

SEQ ID NO: 183404 - DNA, 401 bp, Zea mays
  Clone ID: MRT4577_98849C.1
ttttctctttttttttttttttttttttttttttggggtttttttttttttttttgtggggacccaaacccccctttaatagggcctaaaaaaggcccggggcccccccaaatggggttcccacccataaaaacaggcaaactttccccacaaaaacatcaaacccggcctaacagtttatccataggtgatctaaaacccagggaagggcgaatttggttctcaaaaatgggaacccaagggggacaaacccgggcgaggaaaccccggcgaaacctcgcttttgcaaaagcaggctgtagagcacacctagtgcagctgggcaaaaccaagggggccctttgggggagacctgcaggaaaaaaaaggctgactgggggctaagaaaaacccaaacctct

SEQ ID NO: 183405 - DNA, 368 bp, Zea mays
  Clone ID: MRT4577_9884C.1
ggggctttctctggtagtcgacagccctgatcgttgctaccagctgccaccgcctgttacccgtgatgtctcccgtccttgccgctggcatggagcccatggccgtcgacgattcctcctacaagaaggccaagcgcaagcagctgaaggccgccgtcgccgtcgaggaggcagacgcagaggccgcttcggtcgagaagaaagagaagaatgagaagaagcgaaaggtgaaggagccgtcccctccgctcccataagagcgtgtcctctgatgaggaagagaaaagcatcaccagctcctaggagacagcacccgcggcgaaaaaagcgaaggttaagacgaaaaaaaacgttgatgtctcgtgttc

SEQ ID NO: 183406 - DNA, 189 bp, Zea mays
  Clone ID: MRT4577_98850C.1
gccactcgttcgacgtcgctttagtctgcatgcagggggtactaatatctacgtagggggcaagcacgacctaataaccttcacacgttaacccctacgtactacgggctccagacctcggcttccagctgagatagtgcagatattctgacacaagagttagcaccaactgacagactacctcgtcac

SEQ ID NO: 183407 - DNA, 462 bp, Zea mays
  Clone ID: MRT4577_98851C.1
tcggttggacctaccaaacataactgtactcgaccagctttgagtatggtaccatccgggaagccaaagcccatatacccggccgagggattgcggacccatcgatccagtgctcctcatcgaaacacgcataactctggcccgcacgcatcttgactggttacctagaagcgaaagagagctctcagcagaagctaccgttttaggcaagtcaccacatctaacaatcattaccaacccttgtactatatacaagcagattggtacagagccaaaatatgctaattacaggaggataaattagagcgatgaggaaaggaagcctggcattatcacattgacacgagacaggctgagaactacatctttgctcaactagtgagaaaggagcaaagataaaaagtgctatacccagacaaaacgaacgccttggaagagaaatcagcttcttgatagcttacc

SEQ ID NO: 183408 - DNA, 283 bp, Zea mays
  Clone ID: MRT4577_98852C.1
attttaaacactggataattgaagtggtacgcgttgcatattgaattgttcaaaagtcatttttgagggttcacactggagtcctcaaaaggctaatggcgcacatatgtaggaggtcctaagttttcctctcctggttatttgcaggatgctgctttgcatacacttcagaaggacttgcaagagaagatgaacaaaatgcgcattgttgattcattagactttataccggcaacaatcaacagcaacatttgcagaccaatcatctcactgtggattcatc

SEQ ID NO: 183409 - DNA, 797 bp, Zea mays
  Clone ID: MRT4577_98853C.1
aatggagggcgtgcaccatctcaccatgcccccgcccctgtctgtcccccgcacatccgcactcgagccgcaacagccgccgccgcgctcgtcgcccctccttcctgagatggccgctgccgcgctcgccgcccctccttcccgagactgccgctacgcccccctcccgcgccgacttggcagcggcgtcagcgactctccatcccgccaatcgcctcgtgtcctcgcctctggaactctgcacaccggccagcgacttggtgcgcgattctcgctcccctcctgcctccagtggaccgtcgacggcgttcggccccagcggctacacgtgcgtgcaggtgctattagtggtgaaggcattgtcaattcagccgcatccgaactgggagctcaccggcctccacctccgcaagcgagcccagtcatgcgtgcgtgcaggtgctatcggtggcaaaagcgctatcgatccaggcgcaccagaaccgggagcttgccgaggtggtgctgaaggtccgcgtatcgcgattgtgcatgcgctgcgcccgaccattagttctcctggtgacgaggtggtctcctgatgacgacgccctgtgttttctttccagacccagacccagaagcgcgacacctttgttccgtatggtatgacggcttctggaatttgtttgctcatctcctctgttcgatgcttattcgcccgccaggcgggttgcagaaggagaaccttgccttttgccttttgtttctggggatgcacactgcgaaaccaaaaaaaaaaaaaaaaaaggccccta

SEQ ID NO: 183410 - DNA, 479 bp, Zea mays
  Clone ID: MRT4577_98854C.1
cacaagctagaaaaaaaacaaagtacactcaggagggaagaaaccaaaacgacaattaaatatttaaagcaccaacgtgaaaaccacacaaaatacagttaagttcccaacaagaacaaagggaagaaaaaaaggcggacgaccagcccgagcaggtcgcggccgagggacaccccaccccacaaaaggttccacgccaaaaaaaacacaacccggagcacggggggagacaaataaggggacaaaaaagcgaaggaggaaaccgccggaaaaaaagaaaaaggacgggcaaggaaaacggacgacaaaaaagggggggggggggccaaggaacagcgaccagacgcgcagacaccccaccccacaaaggggggcggggcaaagaaaacaacaaagggaacaccggggggagaaccaaaaaccgaggggaaaaaaaacgggacgggggggagggcgcccagggggaaaaaaaaagaaaa

SEQ ID NO: 183411 - DNA, 306 bp, Zea mays
  unsure (1)..(306): unsure at all n locations
  Clone ID: MRT4577_98855C.1
tccgccccgcgtccgcggtcgcgtgggcggtcgcgtgggcgagcccggcgggcgggaagggggagagcgcgccagagcggggccgtacaaccctggtccaccgcactctcctggaccgtggccatggccatggccgccgcgtcccgatcccgggcgctgtgggcgtcccgcgccgccgcctacctcaggatctccaccttccccagggccttctccaccgngctgaaggatctgaaatatgctgaccctcattanngggagaaggttgcgggcgatccaacagccgcggggannaccgcccatgcc

SEQ ID NO: 183412 - DNA, 383 bp, Zea mays
  Clone ID: MRT4577_98856C.1
ggatcaagttctaaaatcaaattttacaactttttttttaatcaaacttgtttaaatttaattaaaaaaatgaataccttcgtacctttaattgttttgtttgcaatcgtggccatgttctcatcaggttgtttcgccaacccgttagatgctccaaacccttcttttgatattccaaatgttccaaatatgccaaaacccgatcaatttacggaacctctcaaagattcttttaatcgtttaaaagacaatacacaagactactttaatcaacaaaaaggaaactttaatccacaaggaatgttggacatgtttcgaggctggaatgccaaattcaatccattttatcaaaacatgttccctttccaaatgccaagtttttt

SEQ ID NO: 183413 - DNA, 436 bp, Zea mays
  Clone ID: MRT4577_98857C.1
gggcggaaaacagggcccaacaaaagggttgggccatattatgaaaaggggggcgaaaaaaaagggtttccagggggggaaaacgttgctccaaccaaaaaggggggagaatgcctagcaagccaaaaattttaccttacagaagggatcccattggcggttaaaaaatttttggggccttggatacaaaaacaggaaaaaggggttcctagcgggggtgggggttctacaatattgggaatcacgattttcaccggtgaccaaagtttactcctttgagggggggactggggacacgggaaaaaccatggaatccaccccccacttgttgcaaacgttggaaccccggcatattttggagaatccggtctccccccaattttcgccccacaagtttttgataaaccaaaaagggttgtccttcaggcaaatgggg

SEQ ID NO: 183414 - DNA, 293 bp, Zea mays
  Clone ID: MRT4577_98858C.1
ctccaaagtccaaaagcggaacccacgcctggcgcaacggcgaaaccgtcggaaccctagatctctctcgctcgcgctccgaaaccccagatccgcgatgctccagcctagagctcgctacccacccggttatggctccggcggtggaggcggacggtacgtggcggtggaggcggaaatggaggaggtggcggaaaccacatctactacggccgaaacccgtagcaacactactaccaccagcagcagcagtcgcgagcactctcataggatatgttcgtaccagcgacagt

SEQ ID NO: 183415 - DNA, 345 bp, Zea mays
  Clone ID: MRT4577_98859C.1
ggccggtgcaggacgagcgcataccggggcaggggaagcgcatgttcggctttatcaccttcgtctacaccgagacggcgaagatcatgcttagcaagggcaacccgcactttggttgcaacgctcgcgtgcttgtaaagccctacaaggagaagggcatggcgccagacaggttcatgaagctgcagcacccgatccacggtgacttagccggctggacggtaaacaccggactggtggattccagggaccattacgacctgtagaaacctaagatgggacctaggatgatgtaccggaacgtagttggccacgaagcatttctgaggaggaaactgtaagagc

SEQ ID NO: 183416 - DNA, 778 bp, Zea mays
  unsure (1)..(778): unsure at all n locations
  Clone ID: MRT4577_9885C.1
tgtcgataattctgctgctggtaattctgcatctactggtgacttatcaacagaaaaggagaagaaaggggtatcggtatttgtcactgatgaaatatacagtacaattttggatgtttctttcaagagaatgctgaagaacaatggaagtgcaacttctgggttgttagaaatatggagtgaagagcttgaggggaagagcgacttctgcaactaccgcaccaaattgttggatctcattaaagtcattgcttctcaaagatctgtgattgctgcagcaattgtagttcagagaataaatgttgtctttggagatgctaatcaagcaactaagtccccacaggatcttgatgcaatggaaggggctcaactggggcttgaagcagttgtcaatgctattttcgatggctcagttgattgtgggaaaactgatttggatacgaaatcccaactgcacaagatttttgaaggcttacttcaacagcttctttctttaaagtggacagaacctaaccttgcagttattcatggtcattatttggatgctttgngccctttcttgaagatcatccagatgcagttggcagtgttgttaataagctttttgaactgttgacgtctctcccatcacatttcaggatccatcaaacaattctcgcctagcaaggttacagatctgctcatcattcattcgtatatcgagagctgctgataaagcacttctgcctcacatgaaagacattgctgataccatggcttacctttcaaggagagggtc

SEQ ID NO: 183417 - DNA, 412 bp, Zea mays
  unsure (1)..(412): unsure at all n locations
  Clone ID: MRT4577_98860C.1
ggtccagaatacccgggccgacccacgcgtcagaaaaaaaatcatcctatcctgtcaaatgttctttgaaatttagttcactcgtaggctaccttcaaagatatgattgtaatctgcagttttggaggcatcacaatggagataggactttgcagttgaacttggcggcaaatgatcggactttgtatcccacattatttgatgaatgttcatgttgtttaagtgttctcggttctcactatcaaattgatagttaccagagggggtggtcttgctgattgcagatctctangtgggatacttgcatgggcaccgaaagatccagatctattcaaacctacaacaacctttagctcattgtgtttgttcagtgtcctctacctggaagtagataatgattggggtcattgtt

SEQ ID NO: 183418 - DNA, 401 bp, Zea mays
  Clone ID: MRT4577_98861C.1
aaaaaaaaaaatgggttaaaaggttaatttattttcatatgggtaattcaaaccccccaaaactttcctttttaggaaaaaaaggccccctaaacccttgggggggggtttaatcattttccataaaaaccctccccctccttcttttctacaaataaaactatttattttccccccctataaaacattctggaaaaacttctaaccccaaagggcgtttagttgaaggggttggggggaatggattagggggcccatttaacggggtttcctctccaggttctaacattgggatgacaaattttatagaggggcgattcacggggtgcccctggaggccccaaagcccaacaatggcgaatttcttgggaattttaatatccccttcatcctcaacagga

SEQ ID NO: 183419 - DNA, 301 bp, Zea mays
  Clone ID: MRT4577_98862C.1
ccgtcctgattaccgggcgccgcacccgacctggaacgccacgctccgcttctgcgcctagctcattcgccggctccctccacgtactgctgggtgcctagcgcgccctctttgaccgcgacgtcagcgaggtccacatcccgatgtccgagctactatccggcaccctcaacagtcccgaaccacgcaagttcgttgcctacaaggagcgcaagacctaatccagcaagccgcacaaccatgtatacatctaccacaaaatcaaggaggtccagaccctctacaccattgctatcgagaa

SEQ ID NO: 183420 - DNA, 184 bp, Zea mays
  Clone ID: MRT4577_98863C.1
gggggttgatgaagccctatatgaattcttttcttatgtgacattcggaaagccatggcacaatggacatggcaactgaccttgctgaatacccaatgaacggtgacctctgcatgcacagtctagacaacacaaatctgcctactgcactcctcataagtacaccgtgcctacttacgataac

SEQ ID NO: 183421 - DNA, 293 bp, Zea mays
  Clone ID: MRT4577_98864C.1
cccacgcgtacggcgctatactttgtcttagatggcatagagaaccggacaacggatttgtcggacatgctgacatcccaagagtctatagccgcaccaatgactaacctgtatctaacataccaggataaaggtcttgtctatcatgcaaagggcttcttcagtgcaccttacgtgtgctggatgcatagagtgtacggacactacatactctatgtactatacgtctgtctgattcagacgcaagctattgtgatcaacgccacatacgcacattacctgactatgactca

SEQ ID NO: 183422 - DNA, 332 bp, Zea mays
  Clone ID: MRT4577_98865C.1
tggtacgcctgccggtaccgtgccgaagccgcgggtcgaccatcgcgtccgccctcgcttgcgccgtgacgggcgcagggcatgtcagtgcctgtggttcctcctccttctcctacgacacatggcgcccgttcgacatgcactctgcttatttctcggagtcacctttctcgggaccgtcatacacggtgtccaggtcggacaccatgatcgtgaatggctcccactaggtgacactcgcgggctagtctcactcaaaaggaagccatctgtggaagttcaacaattcttagtcctgcaagattggaggatgctactgagggatgtagttc

SEQ ID NO: 183423 - DNA, 252 bp, Zea mays
  unsure (1)..(252): unsure at all n locations
  Clone ID: MRT4577_98866C.1
ggaaaatntgaaggggatattagaagtggagaatngggtgggggggggggagnannanattnanttnaatgggaaggagatgnagaaaagggagaagntgagngnnggtggggtgaaggaaggngannttgtgatgatgatttggagaagggaaaggggatntaaggatggnttaagggtaaatnntgatggaantggtgngaatnataaagnttttaaaaaanatggtggaggtgattaagaanttatggg

SEQ ID NO: 183424 - DNA, 317 bp, Zea mays
  Clone ID: MRT4577_98867C.1
ctcgacccccccgcccgctttctcgtgagattcaaaggtaggacgacgagggggtactagataagtgtcgagccattgatgggctcgggggtgacgaccctctccgcgcctacggaataaccgacatgaggtgcggcgcataccctcgtctcctcctcagagggctgaacttagccccgcctcccgagacactgacgatgggaaagatatttgaacagtgtaccccaatctggggcgacatcaaccacgccagtgaatctcctctgcacgaaatcaagcctttgggcgcccgagcatcccagcgctccgacgaatgg

SEQ ID NO: 183425 - DNA, 297 bp, Zea mays
  Clone ID: MRT4577_98868C.1
tgagcacaccgattcctggaccatacaccaacctgggacagcagggtacaaaccggaaaccagacaggagcacaaaaccaaggcagacacgctaaaggacagcgggccacacgccgtaacttgccgggaacaagagcggcgggcgatgcccaagcactgctgttgcaactgcacgcaagagggcatgatgggtggcctagccatgacatgctggccgctgtacgctgaacaaagactcaacacggggatcacaggggaggagtggcggatctgagcggagctgccctgataccaaaa

SEQ ID NO: 183426 - DNA, 179 bp, Zea mays
  Clone ID: MRT4577_98869C.1
tctggatggtacttctgggttggtgctgccgcgcaaagagccagcgtcaggttgggctttgtacccatgtcctcaagcgtgacctgcaaggtttgttgacgtcgcactcgattttgtcccactctcttaacaaggctctgttcaatgatatgtcaaaaacggcaccttggacattgtat

SEQ ID NO: 183427 - DNA, 525 bp, Zea mays
  Clone ID: MRT4577_9886C.1
ggggtaccctcgggccggccggggcctcagccccgtgcatccgaacgccaaggaaactggcccccactccaccatggcccgcccacgttgctcggtcttcaagccccctgcagttcaactgcatagcagtcctggagtcgcgctcgccgccaagctacgcgttgccatgcccggagaaggctacgcccgtgattctccctcatcgagttcgtcgcaagatcgcgattcgtttccgagcttcgcggaatcgacggtcaaacattggtgaccaagtgagcaagctcttcaagtcctacaaagttgaagactctgagcatctgtttggtgaaggttgcctttggtgcaatctatgctcaggtaaagaaggtgtcgaggcgaatctccaggagttccaagacttcaacgagtccggggattaggctagcgacctcccccagtcagctgcctgtggtgggttgtttacgtttgctacgtttcgattctgtgtactttgatttatgcaaaaaaaaaaaaaaaaaagcggcc

SEQ ID NO: 183428 - DNA, 584 bp, Zea mays
  Clone ID: MRT4577_98870C.1
gcaggacggcatgggcggcctgcaggtgcgcctcggcaacaacgggcagagcggcggctgctgggtggacatcgctccccggcctggggcgctcatggtcaacatcggtgatcttctgcagctcgtgaccaatgaccggttcaggagcgtggagcaccgggtgccagccaacaagagcagcgacacggcgagggtctccgtggcgtccttcttcaacacggacgtgaggaggtccgagaggatgtacggccccattccagaccccagcaagcccccgctgtacaggagcgtcagggcccgagacttcatcgcaaagttcaacaccataggactcgatggccgcgcgctcgaccacttcaggctctagctgcctggctggctacgtttcagattcgtcctttcatttgctttggtctctaattaataattccaaataataagcccgcggatggacctctgtctgtctgtctgtctgtaatttagtttcccaagtttagtttgttgtggtaataattcctgtatgaattatgtcataaataaaagctagggaaccttgataaataacagagagtagtatgtatacc

SEQ ID NO: 183429 - DNA, 342 bp, Zea mays
  Clone ID: MRT4577_98871C.1
agctcttttcaagaaccatgacactccaatgggggaggatgaccattgactctcaaataagtagcatgctgacccgcacaaactacgtcgcacaggcaaagatcattctgtgcgatagactgcccccattcacgaggtggctgaaaagcttatacaccgaatgcgagataagaacagacctgttattgctcttcacctgagatttgaacctgacatgctcgccttctgtgagtgctgtcatcgcggtggagaaaacgagaggagagaattatctgcaattctcaggcgatggagaaccttgcatatacgtgacccggagaaaggaagactgcctggcaggtg

SEQ ID NO: 183430 - DNA, 267 bp, Zea mays
  unsure (1)..(267): unsure at all n locations
  Clone ID: MRT4577_98872C.1
gcggttcaagcggtgctctcttggtaaggctgtgtaccaacttgccttcttactttcttttccaaggacacgagaggaagcccgcgatccttgaatacagtgcattacngcaacaccatcttctgatgctctaattgggctaattcgccccgataagctcaagcctggcgatttagttggacgtaacaaagacaggtacttgctactccatacattgccttcacagtatgactcacgcgttcaggcaatgcaagtctatgagaaacc

SEQ ID NO: 183431 - DNA, 266 bp, Zea mays
  Clone ID: MRT4577_98873C.1
tcgttttttatttctttttttaatcgagagagaatcttaaattaagattccagaaaagactgtctgatgaaaatgtagagagagagaaacaaatggagaggaaaaacacctaaaaaagatcgggtttttttggttttgcttgattattgctgggctattcatgtatcaaactctatagcgagcaaaataaaaaagaccagtcgactacacgacgtccctagatgagctgccgtaagttcggccctactatatggcttttaatcaag

SEQ ID NO: 183432 - DNA, 167 bp, Zea mays
  Clone ID: MRT4577_98874C.1
tcggcgcaagcggcgccggcacacggagcagcggcgagattgaccaggtggtagaagcggaccccgataccgaggccgaggatcaagaagagaggtgggccaggcttcttcccgagcttcttttcgacctggtgcggcgcgtttaggcgttccgcggcgaacggtgg

SEQ ID NO: 183433 - DNA, 288 bp, Zea mays
  Clone ID: MRT4577_98875C.1
ccattttgtgactactgcaccatacgaactcggatctaccgctctgcgtcagcccggcaactggctgccgccggtctgatgccactgccaccgcgactgcacgagatgtacccatcatcggtcgataggaaacacctgcttgagtgttctcggacccaaagtacactgtcatgtgctatcgtgggcttgctgtcctcgcataggacaaagccagagcccattgtccatatcgacctaatgactgggatcatctcccatcacatgtactacgtatgcaccaaaggtgat

SEQ ID NO: 183434 - DNA, 771 bp, Zea mays
  Clone ID: MRT4577_98876C.1
gtacccccgggttcggccgggaggcggcagcaccagcaccttcctctcctccccttcccttccgtgtcatcttcgttcccttccggggtcatcccttccgtcctcctcctaccaagtcccaaggccgcgagacagacagacagacagacagaaagagagagcagagcagacaatggcgacgctcgaggacctgggcgtctccgccttcatcaacatcctgggcgccttcgtcttcctgctcctcttcgccgtcctccgcatccagcccgtcaacgaccgcgtctacttccccaagctctacctcgcgcacaagcgccaccagcacgaccacgccgcccgctccgccttccgccgcttcgtcaacctcaacctctgcacctacgtcaccttcctcagctgggtgcccggcgcgctccgcatgtccgagccggacctcgtcgcccacgccgggctcgactccgccgtctaccttagaatctacacgctcggcctcaagatatttctgcccattacgactctcgcccttctggttcttatcccagtcaacgtatctggcggcacattacttgatctaagaaaggaagttgttttcagtgatatcgataagctttccatatcaaatgttagccctggatccaacagattctttatccatctcttgatggcatatgtgttcacattctgggtgtgctttatgctgtacaaagaatacagcaatgtagcatttatgaggttgcatttcctggcttcccagagcgctgtgccgatcat

SEQ ID NO: 183435 - DNA, 408 bp, Zea mays
  unsure (1)..(408): unsure at all n locations
  Clone ID: MRT4577_98877C.1
ccctcgctttttttatttaaatttttggtttaatgaaaggaaaaaaaaaacccccgaagggtttttttaattgggaannacagttcctaaaaaaaaaaacccccccccccngaaagaaaaaacccgggaaaatgtgggtccntttaaagaaaggggccnggggaacgcccgagaggggggggggaggtgtagggaagttgagggtttttaattaccctttgaaaatttaaagggttttttaaccctaaattttaaagggggaaaggaaggccgaaagcgcgtttaagggggaaccttttggggaccgaaagagcgcnaaaggtttttaaggggtgaggggtcccctgtggcccccttttgggggaaagggttttattttttgaaaaagaaattctccccggttgaggg

SEQ ID NO: 183436 - DNA, 389 bp, Zea mays
  Clone ID: MRT4577_98878C.1
gccacgcgtgcggccacgcgtgcgcgtcaagacacttgttgaggctgctgcagacagttgcccaaaggcgttcatccatatgatcagcaacccggtgaattccacggtgccaatcgtatctgagggtctgaagcagaacggtgtctacaatcccaagaagctttgctgggttaccaccctggatgctgtcacggccaacacatttgctgcgcacaagaagaaccttaagctcatcgatgctgatgtcccacttgttgctggccactgcttgaattacaattctgacactgttatggaagaccactgccatctgtcacctgcacagatgaggaaactgacgagctgacaaagaggatacacattgcctggacagaggtggcggatgccaa

SEQ ID NO: 183437 - DNA, 1629 bp, Zea mays
  unsure (1)..(1629): unsure at all n locations
  Clone ID: MRT4577_98879C.1
cccacgcgtccgactattttggtactcgtgatagtgcttttctgtattgcacattgaacgctaggacaggtcccatatgaatcatttagtattacttataagcaagcattagataagttccatgcgctttctctgatttgcagctggaacctaagcatgatcagaaattaatataaacttttgcttatagcataacacccttgtttcttgcaggttttgcatggtgatgcagttcttgatgaattattggactgtaccatattgagtggggatgtcattatacgagctgcggcatgccatgtccgaatctgacggcgatgttgccatggagaaggttctgggaatggactggagtaggaagcccggagatcctgtcgacccggccgttgacgcggagtggatcgcggggatagctaggctggggctcgacactaacttcgtcgtcgtgcacggggccgggtcttttggccactttcaagcaagtagatctggagttcataaaggagggttacattcgacactggtcaaggctggctttgttgctacaagaatttcagtgacatctctcaaccaggaaattgttagagccctagcaagagaaggaataccatctgttgggatgtcaccatttgcttgtgggtggtctacccaacaaagaaaacttgcatcagcaaatgcttctcaaatatttcagtcactccatgcaggttttgtcccagttttgcatggtgatgcagttcttgatgaattattggactgtaccatattgagtggggatgtcattatacgacatcttgcacagcttctgagtccgaaatatgtagtatttctggtactgttaccttccctcctttacagctttaaaagttttatgttatcgatggaagatggttttgtacactatatggttttctaaaaattgtgatgtagacagatgtccatggagtgtatgatcgccctccaactgactcaaatgcagtacttctgagagaaataggttagtattcacctggttgatttttatctgcccataatatctatcctgtaccttttgatgtgtattagtcattatgcgaggaaacaagacaacaaaggtaatgcaattgtcatcattcaattcttgggtaaaacatggaaatatgcttcttcaacaaattctagctgacttgtgttagttaacagaggtggatgccattggaggctggtcgattgtaaaacctgcattgctgcaaggcaaccctaaaggagtggagatatcagttgcagcacatgacaccaccggtgggatggagaccaaaatactggaggctgcagtgatagctaggcttggaatagacgtgtatattaacaaggctggaacagaaccctcgctgagggccttgaagggagatgtgagccccgactcggaagattggcttggaactattatacgctcttccaaatagatttcttgttgcgaaancattcggactggtttactggcgattttcccgatgttatatgagcagtgatgagccttgggctttcggtgatgatccagcacgggtctattccctactgtggtcgtagtttggtttacaagcgtcagcctgatgttacaaatgccgttcagtaaatttgttttgtttt

SEQ ID NO: 183438 - DNA, 217 bp, Zea mays
  Clone ID: MRT4577_9887C.1
aattcggcacgaggcccgggctccacttactgctcatgagcctacctcctgcgcggcccgggctaactgtcaggaaggccaccccatgcagcggcacgcatacgcttggagtgcatgtgcgcagcaaccatacagactgcgtcatcgtccgcatgttccaagaaatcgagggaaacctgcacagagccgaacaatccgagtgacgaagccggctgac

SEQ ID NO: 183439 - DNA, 494 bp, Zea mays
  unsure (1)..(494): unsure at all n locations
  Clone ID: MRT4577_98880C.1
ccaagggccgggcgcccagcagccacgacacgacggngacgacgacgaacgcgggcgctccngngnggaacgacaacgaggcgcngacgggggggccncgcggncccaacccgcnggaggactaccaccggggcgagaaggnggcgcactncgcgcgcgagcgcancccggagcgcgnggngcacgcgcgcggggcccccgccaagggcttcnncgagngcacccacgacgngacgncgcngacgngcgccgacnnccggcgcgcgcccggcgngcggacgcccgagaacgngcgccacacgacggagaaccacgagcgggggaccccggagacgagccgcgacccgcgcgggggcgccgggaaggncaacacccgcgagggcaacggggaccggcggggcaacaaacaacccggagagaacaaccgcgaaccgcaacaaggaacccgacgggaaccacgcggacaagcccaacccgcgggcgcacgngcagga

SEQ ID NO: 183440 - DNA, 170 bp, Zea mays
  Clone ID: MRT4577_98881C.1
tttcgggccaaaaaaaaactttttggaccacaacggtttgagggttcactttatccgggatgttcaaaggaaatatttttttgggacactaactaggcccgattcccattttagggttgggtgaaaacttcactttactgcagggaaatggaaacagagaccactgggct

SEQ ID NO: 183441 - DNA, 386 bp, Zea mays
  unsure (1)..(386): unsure at all n locations
  Clone ID: MRT4577_98882C.1
ttntttttttttttttttttttttttttttttgtggttttttgaacacaacacacgggttactactttgaagaaaagaccctccaatgaaacagttaatcgagacgccacctctacattaagacctaaacacacgcactgggggggaaatatcaacaaacccctctacaattatcattgaggctgggacacagacacataccaatggctgacagaggatcttatactgatctgtaatattggtacagaaatagaagctctataaactaatgcagtgagttttcctggatttgacctatagtggaccaaaggaccacacgtttgatccacttccctgttcgatgcttaggaaaaccaattataggcattgcctatagggaatccatg

SEQ ID NO: 183442 - DNA, 401 bp, Zea mays
  Clone ID: MRT4577_98883C.1
aaaatagtttgtttttttttttttttttttttttttttttttgggccaacaacacaaaaaaaggtttttgatacattaaagttgtgtgccattaaacaggaaattacgttggttaccgaagtgcccccttcgcacccggggagaggggctgttatctaaccgatggctccttgtaaaaatttgtgagatgtctatacgacggtgctatgaaaaaaaatgtttttaagaaggagagttatatgggcgtttttacttcaattttgaaacagatacctccatgccttagggttgttgcacattcaggatacgctgctagaaaggccctttgcttggatttgatccacaaacgttctttaggggctggcaagcgaacctatctggggtggtggattcctctagga

SEQ ID NO: 183443 - DNA, 771 bp, Zea mays
  Clone ID: MRT4577_98884C.1
cccacgcgtccgggaaaagaacacctagctaggaaaaatcccaagcagctgttgcaaccggttcctgcgaggagaaacaagcatgaggccccaggtggtgctgctcgtctcgctggctgtcttcgtcgtcctcgtagctctgccactcggcaaagcgaacgaggagaaggaggccgccgccgaaggggttgacgcgaggaggtggaggtggccgtgctgcgacgagtgcggcgtttgcacgaggtcgcagccgccgatatgccagtgcctggacacgtcgacgagcggctgcaacccggggtgcaaggcgtgcgtcaagtccatcagcgacggcctctacgagtgcaaggacaggatcgtcaacttctgcaagcgccgctgcacccgtcctgctgctgctgctgctgctgctgatgcgtgatctgcgcggtcgtcgtccgatcccagagccggcaaatgagctttgccaataaataatttccgttcggacttcggagttccctttttgcatctttctcaagatgcagacagggtttgaataaggtgatgcttgctgttttctgaaataaagagcatggatgtgttatgctcggagttctgtagtcatgggaggtagagaaaatgtaataatcgctttgtttatgtgcatctttagatgccatagaccgaggcatgactagctaataagcgcatggctacttgcatctctttgatgcaaaggccgtgatatggacatgtctatttcatataattcccacaaatatcacaaac

SEQ ID NO: 183444 - DNA, 458 bp, Zea mays
  Clone ID: MRT4577_98885C.1
aagatactatacgcatgcagcacggcggaagctcggaattcggctcgagcgcacaccacctgtcacctttttcgccgaggggcaaggccgcaccctggggggatttgaaaagacgattgcgcgctttcatgccaggttacacctgactatgatcgctgcgacctataatctttcccagttagtaacatgtgcaataccctggctgttaagagcaatggaattcaatggagatccgagcagatctgatgatgagaagaaaactctaatcttcaaaggaaatcccaacgagcgagatgggcttttaactgcacgctgaacaaacacaccacatgatagctatatgacaacgatgaccattgatccatctatctaggcaatgacatatcaaatggcatgggaacctacccttaaacgaattgctgatagacacataatagtgctcaaaccacaggagaaca

SEQ ID NO: 183445 - DNA, 315 bp, Zea mays
  unsure (1)..(315): unsure at all n locations
  Clone ID: MRT4577_98886C.1
ttctatcctctattcttccgccctttttttttcttcttttaaaaatagggcaaaacatttacaaaaaatgtcgtgttttccctctcttcacctatataccccctccacnaaaccaaccattcaaccattcattctttacttccatcatcccttttcattttttctttcacgttcctcatgaccctcaatctctccccatccatcctctatctttatttccggcatgaccttttttcaaaaccatttcttcccccatagcatcaccatctctttcattgtcaccccctttttctccttcagtaatacttttacaaa

SEQ ID NO: 183446 - DNA, 502 bp, Zea mays
  Clone ID: MRT4577_98887C.1
ggaaccccagtaatttaaaggaactcgggggggttttactagtaaaattttttccgattcatgggcatgggcaaccacaacggggaaacatgggacaactggaaatccaaaaaaccctgggaaccctttgcatttttcaatgggcaaaagtccaaaaaaaaaaaagggcattaaattgatgggggtttttaattaaaaggggtggtaatttaggggctatactgggggcatgtggatatttaaaaaataaaagggagacagggttgttttggggtttctggggttaaaatggggggggccattaacggggggagggggaccttccttgaacaaaaacaaattggaattggttccgggggccgccgccgcctttgaatttgaagttttccaatttgaagttttcgggagaaaccttctttttctttgggccccaaacatgggggttttgggggagggcgaaagggaaacttttttttgccgcgcttctggtgggggcgaaccg

SEQ ID NO: 183447 - DNA, 501 bp, Zea mays
  Clone ID: MRT4577_98888C.1
gggtacctcgaggccggccgggtccgcaccacgtctcctacactcctccgcctgccgtcctgtcctgcgcccttactcctcggacgccccccacgacaccgatccccaaccccccattcctcactcccctctccctggcccgtcgcgattccttcaatgctaaagcgactgcaatgctgatctggacgctgccggtcttgttccgcttccaccccaccgacgaggagatcgaggatgcactacctgcaagagagcaagatcatcgagtcacgatcaactccgacgacgaggtcatccctcgagatcgacatactgaaacgatagacatggcaccgcgcaagtaagacaccgatacggaccaatgaacctgaatggatgttcctggagaccaaggatccatagaaaacctgagcaatgagacctaacagggtcactgtgctcgcctaatgaaagactactgcaccggagaggaacatgatggccaacgcaaacaagagcaaa

SEQ ID NO: 183448 - DNA, 266 bp, Zea mays
  Clone ID: MRT4577_98889C.1
atgattcaaactgatcactttttggtggtacaagaaaaggagacaatgagcagagaggagtatgctttgcaaggactcatgttgcatggggacaagctgtgttgcaaccatgggcaagaaatgctttcagtcctggacaagttgagcagctacatcaaattgattctgctgcacataaggtcgctctggagctgggtatcaatttaccatctgatccatcagttcggatgcaatgggatccgggcatcagtacggccacagcttgg

SEQ ID NO: 183449 - DNA, 472 bp, Zea mays
  Clone ID: MRT4577_9888C.1
gtaagctcggaattcggctcgagcacaaactaggaaagtcagaaaagacggtttgggaaaaaaatgacgaacccggtgatgaggtcgatgttcagcaaaatggctggggaacatggaaacaaaatagtacgtcagcttggtcttatagagcccttaggagcagcgcccttggcccgacgatggcacttctacgagggaagaacaaccagaggggtaaaccaccctatcgaaagaagggcaagtaattgcctatgtgtttagtgtttaagttcaacgatacctatgtaatcctgtgttggtccaatcttttagcagttgatcttatttatgtaaaatttggcgaggaagagtgactgccgttgctgccctggtcattttgaagtctggccaagcgaattgttatcgtttgcaaaggatcgttatgatttgctccgacacttgtcaaatgctggttttagagttttgcatgtgc

SEQ ID NO: 183450 - DNA, 424 bp, Zea mays
  unsure (1)..(424): unsure at all n locations
  Clone ID: MRT4577_98890C.1
ggtttagatggttcagctacctgacgatatgcttgtggaaatggtgagccgcctcccgcgcagcagcctancggcgtcacgctgcgtctccaagcacttgtgctccatcgtggacgcccgacgtctcctgcgcaccggccacctgcttcctctccgcctcgacgccttctactgcatcagcctggcctcggtcgatcgggagacatatcttttcgcacggccatcggtagcgcgtcggatccccggcgcctgccttgacttcagggtagatcttgaggttgtggatcactgcaacggtctactgttgctgtgtgacatggttttcaggttgctgaaccctgccacacggcaatcggcagccctgcctaaagccccggatccatccattgagaacatgcttggggtcgccacagtttgggccggg

SEQ ID NO: 183451 - DNA, 1051 bp, Zea mays
  Clone ID: MRT4577_98891C.1
gtgatagtaacgatgagctggcagataagtctgagctctggcgtcctttaaattgtttagtagaagctgccaacaggacaaaatcctttaggtcaagttcacagagtccagttgttaagggagagcaacccaatggctctacgagtagtacatttgctagcaaagcaaaggcaagggagaatctggagaagtccaaaattcaggatgacaaaaaagatgttcccatgccaccagtgctgccaaaaagaagagctcaaggtactgcgcggaagaagagagatcgtcttcaagctccaactgatgtgaagcctgatgctgcagttgcacagaatgcaaagaagttcagctccatatggttttcattgattgcctcatttgaccagcaaggagatccacctttaccacagatcccttcccactatttgcgaataaaagacggaaatatccctgcttcatctatcctaaaatacctcatgcaaaagctcagtcttccaagtgagtctgaggtggaaataaagtgttgcgagcagccagtgaacccttcacaacctctgcgcaatttagtagagctgtggctgaagggaagagcaacacagacaactcagaccatgaccggttcgtccgctaaagagtttgtaatggtgctaacatacggacggccaaaggctcctgcaatgtgaaggcaccatgcaaacattcaggccctcaaacctatttttcctgtgaggcagctatagccagacaattgttggcgaggtcatcaaagataactctccctgacgacacagcctcacaatatgcagtggctggctcacttcagagccagcccaagcccttgatgtcacattcatgtattctttttttatagcatatgttgtttgattcctttaggatgtccttttcttatttattatacatcgatagtggtatatagatagaaagttgtgattgatacttgtaggtatcattgatgttttgattgggccttaaattatatagggagagaaacttgtagtctttgcttgtaagagatgagcagagttgattgcag

SEQ ID NO: 183452 - DNA, 1060 bp, Zea mays
  Clone ID: MRT4577_98892C.1
actagagctagggcatgctgggccccctgccggaaccgggccagaattaatgaggctgtcacatggctcaacagtcattatacccgctgagtctggggccgctgctgtacacgtcgtgcagcagcacacgccagcacaggtgtctcggactccgtcgagggcagcgcctacgacgctgtctgcggccagagagttgctacgccaccccctagctgtaggatctaggacaccggctagagggggggtgaatagacggttttgactaaaaacaataatactaagtaaatttaatcaatacaacaagagaaataaatttactagtgtcaataagtaaacaatgtatgaaagacaactacggagattgaatacttgaagaacaataagcaaaacactaatcaattgcaaggcaataagtaatgctagaaggaatagacaccgaaatttatcccgtggtatcggtgatttgccgatcacccctaatccacgttgaggtggacttcaagctctcacttgctcctctatcaagacacgacttgatctttcgttgctgtcgggtgaatagacggttttgactcgattccactaatgtcacctttgccgctccggcgaggtaggcgcgaacccctcacaatcaacaccgcgacttctccacaatcttcttggagagctcgacggagacaatcacccgagccgtctaggaggcggcaacctccaagagtaacaagccaacgacgcttgctcggtgtaccacctagtgcctcaaggatcaccaaatgatgcaaatgcactaggaaccctcaatctctcactagaatgcaatctcaagcaaagagtgtgagagagtgagttggaggatcacaaatgagctcaatgtatgcaaggaatggcgagagcccgtcgcacacacgggctacccttctatttatagtcacccatctaaaaccaaccgttatgagcaaaagagggcagttctgcgcacacgcggaccgtccgcgccctagggccggacggtccgccgtacaccataacggctataatgaccgttgaaacatgtcagagc

SEQ ID NO: 183453 - DNA, 273 bp, Zea mays
  Clone ID: MRT4577_98893C.1
gacaaaaatagtgtatacctattagcctgcatggtatattgttggtgatatatgttggagtagttttgatgccaaaagaaaaaaaataaaaaaaacaaaaaaaaacaaacaaaaaaaaaaaaaacaaagtaaaagaacacataaaaaaaaacaaaagaaacgcaaaagacatatgcactcataacagaaagaaggtaatgcaaaaggaatggagggcgaccccagacgtgaccgccggatgtaccacacaagccacggaattggcctcaacaa

SEQ ID NO: 183454 - DNA, 2093 bp, Zea mays
  Clone ID: MRT4577_98894C.1
ctcgaggccggccgggtttactcatcagggcaccacttcttgatcccatgctatctctacatagatgttcaactgtgcgaggactcttagtcctatttttgctcatcagggcactacttcttgatcccatgctacctctacatattctgtatgaggctagcttatagtagattacttattccaaaaaagctgctcatttgtattgccaagagcagtttcaaaatctctttcttcatgttaattgcttttcacaggatcttcctaggcactatctgctaattgttctttatttcactcaaggtttatgttattaggtcatggttcacaaacatttttttcctcatgcagtatttgctggttttcagagttgatgctaaacatgcttatttaactaaactagaaatttgttaccgagacttgtgaacgaggcagcatcatagttcagtttggaaacatgtcatcgaagaagatagagttggatcacaaggacatggtccatgattctgccatcgactactatggcaagcgccttgccactgcctcttcagacttcaccgtgaagatcgtcaacattggtgctgcaaatgccccatcccaggtccttgcaacgctaagtggccactatggtcctgtgtggcgtgttgcttgggcccatccaaagtatggtgcaatccttgcatcgtgcagttatgatggccgtgtcattatttggaaggaggatgcacgaggcaattggtctcaagtccacgtcttcagtgacaacaagtcatctgtcaactccattgcttgggctccgtatgaggttggcctctgccttgcctgtgcatcttctggtggaagaatatccatcttgacgatgcaagctgacgggggttgggatactgcaaccattgagcgagcacatcctgtcggtgcgactgccatatcctgggcccctgcaacagcgtcactagctggtgcaggggagcttgtttacaagcttgtctcaggagggtttgactctgttgttaaggtctggggattcaacaatggtagttggaagctggagagtgctcttatctctgacatgcacacagattgtgtgagggatgtcgcctgggcaccagttttgggattgtccaagtcgaccattgccagtggttcacaagacgggaaggttgtcatctggaccaagggaaaggatggagacaagtgggagggaaagctcatgcgtgacttcggttcccctgtctggagggtgtcgtggtccttgactggcaacatattatgcatagctgctggcgagaacaacataaccctctggaaggaagggtcagatgggcagtgggaggaggcgatgaaggttgaaccataggatgaccggcaaggtttctgaatttcttgtagatccatgtttcgacaaagacaaagcttgctactgttttactagtgtttcgacaaagtttaagtttgccattgtgttttactagtgtttcctgcggatccatgtttcgataaagacaaagcttgacattgtgtttcgagggatgtcgcctgggcaccagttttgggattgtccaagtcgaccattgccagtggttcacaagacgggaaggttgtcatctggaccaagggaaaggatggagacaagtgggagggaaagctcatgcgtgacttcggttcccctgtctggagggtgtcgtggtccttgactggcaacatattatgcatagctgctggcgagaacaacataaccctctggaaggaagggtcagatgggcagtgggaggaggcgatgaaggttgaaccataggatgaccggcaaggtttctgaatttcttgtagatccatgtttcgacaaagacaaagcttgctactgttttactagtgtttcgacaaagtttaagtttgccattgtgttttactagtgtttcctgcggatccatgtttcgataaagacaaagcttgacattgtgtttccatagacactcaaattcacatattttagtaattcctgatgagcaattatgctcttggaaaaaaaaaaaaaaaaaaaaaaaaaaaaaaaaaaaaaaaaaaaaaaaaaaaggaaaaaaaaaaaaaaaaaggcggcc

SEQ ID NO: 183455 - DNA, 845 bp, Zea mays
  Clone ID: MRT4577_98895C.1
gacataattaaatcttatttgtttcattgacaattgcaccgaagcccctccttttcgtctcattcacacttccaagtccacgacgggctccggtctaacaccggccaacggccggtcacgcccgcggccggggcccttgtgaccaagaggctaccgtatctggatctccgtggcggcgccctccctggcggccgtgaccctccctctgttggttttccattccggcgacgctcactctcatccttggtgctgatcctcagcatcctgctataccagcggatctcgtgtttccttgacgaacttgtgaacaaggcagcagcatggttcagtttggaaacatgtcatcaaagaagatagagttggatcacaaggacatggtccatgattctgctatcgactactatggcaagcgccttgccactgcctcctcagactctaccgtgaagatcatcaacattggcgcggcaaatgccccatcccaggtccttgcaacgcttagtggccactatggtcctgtgtggcgtgttgcttgggcccatccaaagtatggcgctatccttgcttcgtgcagttatgatggccgtgtcattatttggaaggaggatgcacgaggcaattggtctcaagtccatgtgttcagtgacaacaagtcatctgtcaactccattgcatgggctccgtatgaggttgggctttgccttgcctgtgcatcttcaggtggaagaatatccatcttgacgatgcgagctgatggggggtgggatactgcaaccattgagcgagcacatcctgttggtgcgactgccatatcctgggctcctgcaacagattcaatagctggcaca

SEQ ID NO: 183456 - DNA, 322 bp, Zea mays
  Clone ID: MRT4577_98896C.1
ggcaaacaagagggcagctttctaaaatacttcctttacatattacaggtggggggatacagttccaacagttccagaaatgattccaactgcaagagcaaaaaccgcagctcccggggtaaacagggccagaattactgagttgccatgacagggggggggcaacaaattggacaatagttttatttcacacacattactactagcggccacaagaggtttttttcccggcataggggaataggacgtactgtatttgagcgggatgccaatgcaacatttcattttggagatttttggcaaaccagttttcattgggggc

SEQ ID NO: 183457 - DNA, 488 bp, Zea mays
  Clone ID: MRT4577_98897C.1
cctgcgccgctcttcctctgcatgtcgccacggtcttctgcggttgtcgtgatccaccccaggcgcctgctactggcgacctccgcgcctcgccgcccaccctgccgctgctggccgctccccgggttgctatcccccacccctgcacctaggccagggaggctttcggtcttaatctggagcctgtcgccccgccagcgttgggggaggagcctgagggctcggatctggcggggtgcgggcaggtgcatccggccctgctgccatccagtagcaggaggctggttgaacccctcgacgcagcccgcgcatcaggcgggcgtacgacggcgtccggatgggctccgtcgagcgagcttccagaggaaggcggcgacgtccgattctggctctggctcgggtggtggcgccactcgccgatccagctcttcgactgctcgtcgcaagaaggcgaaggtggtggcggggctccttgagctgtcgctggc

SEQ ID NO: 183458 - DNA, 103 bp, Zea mays
  unsure (1)..(103): unsure at all n locations
  Clone ID: MRT4577_98898C.1
gtactacgacctactacccttggttacctacgacggacgaacgaactgggccgagncgcctaccttcccctaccctacactncccctaccgtgagctccctac

SEQ ID NO: 183459 - DNA, 261 bp, Zea mays
  Clone ID: MRT4577_98899C.1
gaagcaatggccatcaagatcagggggcgtacggtcagaaaagagtatcttgcgcgagtcgttggccacttcccggacggcgaagtcgtctgtgaccagcccatcctccaaatatccccgaaactaggccttaacgtgtgcgtgccaatggaaagtccgccaggacagtcttcaagcgcctcgcatactatccatcacgcgacggggatgcagaggagccggctgttctagcggaggacggaaagccactcacacctgcgg

SEQ ID NO: 183460 - DNA, 325 bp, Zea mays
  Clone ID: MRT4577_9889C.1
ggtgggctggcttctcctccccctccttttcgggttcaacttcgtcaggttctacggcgttctgatacatgtttgagcgaatctagatatcagctgtacgatgatgaataccgatgctatcgtcacaggacatccctgatccacacgactaccactccctctacaactccttaagcacctacgccaaggtaccttattccaaaatattactcaacccctatacgcaaaaatccaagctatcaacctgcgcctctgctcgcagaccggacgtaaccacgttagggcattagcgcataaacggcacgttccattgactcatccagat

SEQ ID NO: 183461 - DNA, 819 bp, Zea mays
  unsure (1)..(819): unsure at all n locations
  Clone ID: MRT4577_988C.1
ttggggtaccctccnggttcggccgggatggccacttccaagctcatcactatgactatgactatcctcctcttcctaatcgtagggtttataccagaactctgcgtcgccgctagtagtgaccatgaacagttcgtcttcactggcttcaccggcagcaacctgagcttagatggcgcagccagaatcacgtcgactggcctcatcgagctgactaatgattcggcccggatcaagggtcatgcgtttcacccatctccgctgcgcttccgccggtcctccgatggcacggtccagtccttttccgtctcctttgtgtttggcatcctctcttcattcggggacatcaggggccatggctttgccttcttcgttagcccaagcaaagacttcaccgccgcttacccaatacagttcctgggccttttcaactccacgaacaacggcagcctgagcaaccgcatctttgcagttgagctcgacaccatccaaaacaccgagttcgggggcataaacgacaaccatgtcggcatagacatcaacagcctcaactccttgaaatcctacacggcaggcttctacaacgatcagaacagtggcaggttcacgaacctgcccctgatcggaagccagcagccaatccaagcatgggtggagtatgacggcaacaagacgcggatcgatgtgaccatagcccctctaggcctcgcanaacctctgacgccactgctgtctctagccttcaacctttccacggtactcacggaggaagaatcatacattggcttctcatcttccacaggcctgagcacggngcat

SEQ ID NO: 183462 - DNA, 429 bp, Zea mays
  Clone ID: MRT4577_98900C.1
ggaaaaccccccaagggaaaagggccccctgcgagagctgcgacaaggggggggggggccaaaatggaggggggggcaaaaggccaagggggaaaaaagggaccttttaaaaaccggggaatgtaaaaaaccaatttccaaaaaaagaagcccccaaaaaagggggcccctaacaagggaaaaggccaagtttggggagggggaaaacagccggggcaggaaacagggggggaagccccccggggtaaaagggggcccaccgacatgggggagcaggaaccagggaaaggccccaccttcttacaacaaaaattccctaaaggaaagggggtccaaaggttaaaaaaacaaacctttacgtgcccacctggatgggtgggggggggggggccgttgccacttgaccccctagacgccctttccagggga

SEQ ID NO: 183463 - DNA, 633 bp, Zea mays
  Clone ID: MRT4577_98901C.1
atcatatagagggaactgaagccctgctctgaagaagcttttaaaaacaacaacttcatcctccttcggctctggaatcacctcctcgccggcaaaacgaataagtttactctcagcctcactaaagttgcccaatttcttcatcataaccatgtcgtctgctgtcacagtagatttaccaaattcaaggtggctaggttttgctgggcttagaatagtgtaatcctcttcatcttcgttatcactccctccttcaactgcgatctactcagcttcagcaatcgaggaaccttcggcaacagcctcctctagcacaacaagacctgattgcttcatcacttctgagataggcgttgtttcggcagcttcggcctcgtctccctcacgagacactctagcagtggatcgtactctggccaattcaatgtttacgctttttttagacgaagctgatctcaagtgctgaagcgattgctcaaaaacgcaatgcagaaagctttagctatggttaaattttttaacaacgcaacagtgcgatgacaatgaatgttgtggtaacctttcaccaacccgtctgtttatatagtgctacaagggggaaggcgaaccatcatgccgctcgcgctggctgag

SEQ ID NO: 183464 - DNA, 435 bp, Zea mays
  Clone ID: MRT4577_98902C.1
cccttgctaatatcgactcacgtataggagcttgagcggccggcgcgtctggatcgtggccgagcaacctctacatgacatacagacgcataggctgcagctcgttaatgacgacagacgccagcataaccaaacgcacactgtgggtggtgtgcagaacgactacaagcgacttcattgcgcccattggggtcactacgagcatcctcatgcactacgaaccatgacaactctgatcgactgtgtcactgactttgcgcttgctcattgggcgcctctacgctacgggcagcatccatatcacttacgggcgtgactagctgtgctgcactatctcccagacttggcggatgcacctccatcgctaccacccttgggacaaagttctgcgctctcactgccgcacactatacgatcccggctgcataccgagct

SEQ ID NO: 183465 - DNA, 245 bp, Zea mays
  unsure (1)..(245): unsure at all n locations
  Clone ID: MRT4577_98903C.1
gacctccacanagattctgaagtattttgatctctgtggaggtccaaacattgtgaaattgcttgagatcgtcagtgatcagcctggacgcactgctagacccgggtataatggaccggcaccagcaggcgtaccggcgtggcctcaagagagtcggattataacatccgctactacatataggagctactccaggcccgngattactggcattctcaaggcaccagcctgggcgagccaagccc

SEQ ID NO: 183466 - DNA, 388 bp, Zea mays
  unsure (1)..(388): unsure at all n locations
  Clone ID: MRT4577_98904C.1
aatagtaccaactctcccgaatttaaattaaaattggactttaatgctnatgctgaaggaaatggatcagaatggagaattgctgctggggaatgtccccttcccgtgtgactttcccggctttggaagaagagtgcttgtagtcagcttcgtaccggcaccgatctccggcgtccgcagctggttctttgaaggtccaagagttgttgttgcaccttcgtcgatgaaacaccctcgatcttccttcattcctgccgtccgaactttctcgaaacgccgtccttcaccaatgggctctcgtcagctcacgaacggctccgcgaacttcccccatgtaactcctcgtcgggcgaagtgcgacgagaggatgtccagcgtcgtcatgacc

SEQ ID NO: 183467 - DNA, 280 bp, Zea mays
  Clone ID: MRT4577_98905C.1
gctgctaggatcgcgacgggaactggaacccgaagtccccgcgcggtccgggcctcgcgccctgaggggaagagcggcccggcccagcgtgctggggtggagaccttgactcaggtcgcttccctagccatgacggacgggattctagggaaggcagccacaatggagattcccatccacggaaatggcgaggctgggcagcttcctgaagacgatgggctggagcaggacctccagcaggtgatggtgtcaggacccaacctcaatggaactagcattg

SEQ ID NO: 183468 - DNA, 331 bp, Zea mays
  Clone ID: MRT4577_98906C.1
cttgaaattgcttccaaattgacgcgaaaatgctattgcacattgctagcttcatcaaagcccacgtttttagtcggaggcgccctatcgatggatggaaggacatgattgaagaaattggccccaacgcaagaaaaggaaaggggagtgggcctagattaccacgtgtcagtgctcctgcaacccagccttacagggaagaaactcctgcagtcgcttctagttccttactcacaggcaatccgacatgaaagtgttctgtaaaccaaatctttagctggtgtcacttgcataagttatacaggcattattcccttcattttggcttcaa

SEQ ID NO: 183469 - DNA, 347 bp, Zea mays
  unsure (1)..(347): unsure at all n locations
  Clone ID: MRT4577_98907C.1
gaggagatggttcaagtggctctattgtgtactcaatatcttcccggtcataggcctaaaatgtcggaagtggtacgcatgcttgaaggtgatggactagcagaaagatgngaagcttctcatagagaaaacacaacaaagtgcaaaccacaagagtcctcttcatcagataggtattctgatctcactgatgactctttgttgttagtccaagccatggagctctcaggacccaggtgaattaattgtctagtggtacatttttatatttttgttttaaaggtttttanaagacagcatatgaaatgcaacagcatatgcatgatagttgaatctttgttacaaat

SEQ ID NO: 183470 - DNA, 1047 bp, Zea mays
  unsure (1)..(1047): unsure at all n locations
  Clone ID: MRT4577_98908C.1
cttcaataatagccgctcgtgcaatctccgtcacgcagccttggacatcgcctcatctcctcagctgctcgccctgtctacgcgccaggcgacgtaaccagtagcctctgctcgctggcgtcgtgctcctctgctgaattcgacgctccgctgtcctgcgagctcaaccgcgccgaactgccaagccagtggccgacatgctctgtcctcactgtccctgctcgttcccctgctgcaagttgtcgggcaacctgcagctcggacttcaccatcggctctttgcgtgctccgctgcaccagatcgccgcgtcaccgtgaagctacatgccttgccttgcgttgcctttcgctgctgctgtagccgagtcgtcatcgcccaagtgctgagcgctctgaacttgccagcgttctgcagccctgccccggccggggccgtgttaccgtggagctacatgccttgcccttcgctgtcgttgtagcggagtcgtcatcgcccaagtgctgagcgccctgaactcgctaccgttctgcagccccgccgtcgactccctgctcgtctcgctactttgtcatcattcactatccccgtcctcgacgtctacctcgccgctcctcgtgtctagcaagccgtcacgtttggcgggtttcctctatgcggcctcacgcgttcctctcgcttcattcacatgtcgtgtggtagagcaggtggtttatccgatgtccttggggcaatcgaacggatcctgttaaattatatggtacacatgcatggccgtctgaggtctttaggacaaggacaggtgcatgtgggcccgataccttgggaggttctgccacaaatgaccctagccgaattactgacacacggattcttgaagaagacatgttgagccgaatcgacttgatgttgagaggcaagatttcgaatgttggtgctcccttatcgtattatgcctggaatcttgtaatacccaaaaatgtatacnaagagaatagagtaatctcccttatttttgtggtaaaaaaaaaaaaaaaaaatttgcggcc

SEQ ID NO: 183471 - DNA, 828 bp, Zea mays
  Clone ID: MRT4577_98909C.1
cctcgaggccggccgggctccgccctagcgcactgagccactcaacgtcgagatcgagacgacccgagtccgccgcgcccgtgcaccaccgaccgtcgaactcccgaaagtaactctatttcttgatcaacatcaacatgtcgcgggaggataatgtttacatggccaagctggctgagcaagcagaacggtacgaggaaatggttgagtacatggagaaggtggctaagaccgtagatgtggaagagctcaccgttgaggagcggaacctcttatctgttgcctacaagaacgtaattggggcccgccgtgcctcatggcgcattatctcctccatcgagcataaggaggagtcccagtcgaaggtgttttacctcaagatgaagggagattatcacaggtaccttgctgagtttaagactggtgctgagaggaaggaagctgcagagagtacaatgatagcttataaggcagctcaggatattgcgttggcggaactggcatctactcatcccataagacttggacttgcacttaacttctcagttttctattacgagattctgaactctccagacaaagcttgcaaccttgccaggcaggcgtttgatgaggctatttctcagttggatacgcttggcgaggattcatacaaagatagcaccttgatcatgcagctcctgagggacaacctaaccctatggaccgctgacagcacaacggaggacagcatcgaggagggcaatgaggcctcgaagggtgatgctggtgagggtcagtagtctggtaaacctcgattgatggttcggcatgtttttgaagtctact

SEQ ID NO: 183472 - DNA, 210 bp, Zea mays
  Clone ID: MRT4577_9890C.1
ttttgggtcgactccacgcgtcctacttattagggtgagtttaactatcaacacatatgatttggtgttcatgaaacacccaatctcttaagcattcggaagccctgtcataaatcggcgacttggcgtatttatatacagggttgcttcgtccacctaaccaccgtgtgcggtttgtgaacaccaacatgctaaacatggagccgcttg

SEQ ID NO: 183473 - DNA, 343 bp, Zea mays
  Clone ID: MRT4577_98910C.1
aacgaatatgagatgaactcagctgaagatccactgcgaatgctgtcatggtccacacactctattctatctatctatctataatacctatcggagaaggctggctccaaaacacaaaaaaaaacaccaaaaccaaaaaactaaaaaaaacaaaaaaaaggaatacggaaaacctgcaggtaaccaccgccgggcgagcaaggtcttgagccaacttgacaaccagaccaacaatcaggcctccctcatgaaaatgaacaaaaccgacatccatccaccaccaactgaccttgcgcgacaacagctacaacacgagccacaccatgagcagtatacacagagt

SEQ ID NO: 183474 - DNA, 403 bp, Zea mays
  unsure (1)..(403): unsure at all n locations
  Clone ID: MRT4577_98911C.1
ctgctttcccaccanacaccagtgaagtgagactgcggatgggccctctcggcccgggcgccgacacggcattggcgcgttgaccgcacgacctgccgattccttcgagcgatatagggcgcccccgtccacgacccgagtccgccgcgcccgtgcaccaccgaccgtcgaactcccgaaagtaactctatttcttgatcaacatcaacatgtgggggggaggataatgtttacatggccaagctggctgagcaagcagaacggtacgaggaaatggttgagtacatggagaaggtggctaagaccgtagatgtggaagagctcaccgttgaggagcggaacctattatatgttgtctacaagaacgtaatggggggggcgtagtgccccattcggttttttt

SEQ ID NO: 183475 - DNA, 308 bp, Zea mays
  Clone ID: MRT4577_98912C.1
ggactataaaccataaccactatatactgcagaacaaaccaaaacacaccctgaggggggaggttgttgctctctgtcttctgtctcttggttctagctccaactgcaagcatacaacatgcaagtgggggttgcagccaccaccgaccgttcatctaccatcgaccgtgcatgtgccatctgcgatttacctgtcacctgcgatgcatcttgcatcgccgatccacctgccaccggcggtccacctgccacctgcgatccatgtgccatctgccggttatctgtcatcggcaccatgccactaccct

SEQ ID NO: 183476 - DNA, 308 bp, Zea mays
  Clone ID: MRT4577_98914C.1
tcaaacgggcggggggggcgagggcgggctttttttttttttgttttttttctttaatgctgaaagacagtcttcttaaacttgggaaatccaaaacattagacaaaaagagatttttgggcttttactcacaaaaaatctaaaaggagggggccaccaaaggggggggcgggggggaaccctcttttactactcaaacaaagggggggaaatggccaacattgtttgacaaacaaaagggggccctacctacggcccatcattgggggggacctctacaactatggttatgagaaaaagggcaatag

SEQ ID NO: 183477 - DNA, 610 bp, Zea mays
  Clone ID: MRT4577_98916C.1
aacaggctcatcaagatcacatggccatgggatttctggaattcatccatacagcaaaccaaagaattaacaaatgctactagcagaagtgtgatgacaccctcaagatttgtccaactcaactctccaataggctaatatatatatatatatatatatatatatatatagtgcttatccatcatgtccagactcttatctacatctaagcacaccgaagaactaatagttgcatcatcatcatatcacggaaccaagaaacgccaagccaaaagaaaactctagacaaccaatgaaacttctaggcaattataagggaaaacatatacttaggtgcatactagagacgataacgaatccaactgacacagtattaacgaacgcatgtcgacgaatccaaccgacacagtattaacgaacgcatattgacgagtgggtggcgggcgggcgggtgaggatgaaagaaagatgggaaaactcctttgatccattcattggcgatgaggggctgtgctgtgaggcgaggtgttgtaggctggtggttggtgtgctcacgagacggtcggcttcacggccacctgcttcacgggctctgtcccgagcacgccgc

SEQ ID NO: 183478 - DNA, 2264 bp, Zea mays
  Clone ID: MRT4577_98917C.1
gcgccggccgggtcgggcttttttccgatcccaaatcctcccatccccagacggccagacctagcgcccgcgccgccgccatggccgaaaccggcgagtcgtccccgaaccccgccgcagccccggaggacacgcaccacgaggggtcggaggtgcctgctgctgctgtggcggcggtgcatgcgcagccgcagctgcagccccagccgcgcccgccgccgcagccatccaaggtgcgtctgatggtcagctacgggggccgcatccagccgcggccgcacgacaaccagctcgcgtacgtcaacggcgagaccaagatcctgtcgctcgagaggccggtcctcttcgccgacttcgccgcgcgcctcaccacgctcgtggggaacgcccgggacgtctgcgtcaagtaccagctgcccggggaggacctggacgcgctcatctccgtcaccaacgacgaggatctggagcacctcgtcgtcgagtacgaccgcgcccacaacaacggccccgccgccggttccggctccggccgcggcggagccacgcccaggctcagggtcttcctcttccccgtccagccgccgcctcccccgccgccggccgggctcctcgagcccaaggcggaccagcgcctctatatcgtcgaggcgctcaacaccgtctcgctgccctcctccaagctggacccgccgcccgtgccctcgcaccagtcgtccccgccgcagcagcagaagcgggagtcggtgttcgcgcaacaatcgtcgtcgccgccgccgccaccgccgcaggccaagcacgaggcggtgttcgtccagcaggctccgcctcagccgctgacggcgtttcagatgccgccgccgccgcagccgtcgcacgtggtgctcacggcggccggccccgactacctgttcggcctcgacaacggcttcgttcctcccccggcggtgaaggtcaaggacccggcgggcgatcctccgacggtcagggagaatgtgcccgtggaaatacctgccaaaaacgacgaccgccatcccaaccccgcgggcgaccacgtggctgtctcccctgtcgtctctcctgcggagtaccagcgccagatccaggagctcgagaagctgcaggtcgccgacaacgccacccaccaaccaccacctcctgcgacggctccggcacctacccacggccccgtccccgccgccctcccgaggaacggcagcgacgactcccttgcccgcgcctaccctcccgtgaccgccaccccaacctccaacgctgagtactacattccaaagttcccggagaagccgcccgtgccgccgctgtcatccgctccgcctccgacgacctacgtgcaggtgcagggcaggtacgcatccgtcgctcctggctccggcgcagaccatgcccccgtgttcttcatcccggcgccccacggctactttgcggccgccgcctccccaggcgcgacctcctaccccgccgtgtacgccgtcgcgccacccagtgccaccgccaacggctccgccccgtcagccgcggtgtcgaacgccacggcctacgcccccgcccccacacaggtcgcgtacgacagcaatggccgcgccatctactacaccagcatgctcccccagtacccctcggctgtcaatggcatgtcggcaccgggcggcgtgctcgggacagagcccgcgaagcaggtggccgtgaagccgaccgtctcgtgagcacaccaaccaccagcctacaacacctcgcctcacagcacagcccctcatcgccaatgaatggatcaaaggagttttcccatctttctttcatcctcacccgcccgccacccactcgtcaatatgcgttcgttaatactgtgtcggttggattcgtcaacatgcgttcgttaatactgtgtcagttggattcgttatcgtctctagtatgcacctaagtatatgttttcccttataattgcctagaagtttcattggttgtctagagttttcttttggcttggcgttcttggttccgtgatatgatgatgatgcaactattagttctttggtgtgcttagatgtagataagagtctggacatgatggataagcactatatatatattagcctattggagagttgagttggacaaatcttgagggtgtcatcacacttctgctagtagcatttgttaattctttggtttgctgtatggattaattccagaaatccaatggccatgtgatctcgaaaaaaaaaaaaaaaaaaggcccc

SEQ ID NO: 183479 - DNA, 397 bp, Zea mays
  Clone ID: MRT4577_98918C.1
attcatccccatgcaaatccttatatggctatgcgaccgggccattctacttccagtagaattgatagcgtagtggaaaagcacaacagttctacagcagatgcaaatgacaataacaagagggtccttccatcatccttttcaaatggcaacacatcaaaatctatgcatccaattgttgctagcgaaacacgcaagctcccactgcctttatccaccaaaaagtcaccaaatattggtgaaaacagaatggggacaaatattgccaatggaaatttgcagccttcatcttcaataatggcaagaggaagttctagtacacttaatacccataaagcggatgatgatgatgatatcattgtatatggaggttctagctcacatagggtactacctt

SEQ ID NO: 183480 - DNA, 318 bp, Zea mays
  unsure (1)..(318): unsure at all n locations
  Clone ID: MRT4577_98919C.1
ccaaattcnattttcccccccccccccaacccagggggggtcttatacaaaagacgcaccaacacaacccaggggcaaccgacaggcagcaaacaaagcanggaacactaacagacngaangggggggagaaacaaaccacaggnanggggcaaaagggcccctgagaccggtgccttgctcactgccttgatcattgcttggatctccatctggaagggcaacaacattggcttgaacattttctcccttaaattctgcagatgagacaagcacgaacaaaccagaaactgcatctatttttgatatatgtacagag

SEQ ID NO: 183481 - DNA, 285 bp, Zea mays
  Clone ID: MRT4577_9891C.1
atgcaggaggcatgcaaccgcaccacggttgtgcaccatttcggcttcatcgcatcagggaccgggaaaggggatatttcgaaagggatccttctccgcgaaggaagcgggccccgagccctcctactgatcaggggttcgaaggctggcccctcggaagggttcgacagccgccccagagcactcgggctccaagccctcttattgatcaggggttcgaaggttggcccctcggaagggttcgacagtcgccccagagcactcgggctccgtgcccactactga

SEQ ID NO: 183482 - DNA, 189 bp, Zea mays
  Clone ID: MRT4577_98920C.1
cccccggtctgcaggatttcggcacggggcgtgtggcagctagctgccactcccgagaatcaccttgccttgcaggcgtagtacgttccctggcgctgctaacactagcagtccatccgatcgactgtggcgagaacgacggcgctgtgggtgctgctggtggccgccgccctctccttcgtcgcgcgg

SEQ ID NO: 183483 - DNA, 2120 bp, Zea mays
  Clone ID: MRT4577_98921C.1
atttgcccttttcctcctgtagttccgctcatgtgcagcttcaggtccctgagttggctaacgtaccttttcttttttcctttcttgcgcaggtaaataaagcggttgggataagtttgtaaattgctttgtcaaaccaggacaaggttctgaatcaggggcaggcaacctctcgcgtagcctgttcatcttcatcagacaggcccaaggatatgtcgtcgcccaacaattctgtcagcgcggcactgtcaggaacgacccccgtgtttcagttgagagtatggcaactgattgccattgctgtcgggatagtcatggcgatcctgctcgtcattgcgctttgcctttcgctccggaggaaaaagaagacagtgaaagggtttgacaacagttcgctggctgagatccctatcgtttctaaggaaatcaatgttgacagagttggtgctcagagtctacatgacagtgaagcgcccttcatgccggtgcaggataagtactcgcagaccaaaggcgcagggcagctgggagggcgtagatccgtcgacgtcgacgcgttcagccagtgcagctcggtgtacaacatagagaaggccgggagctcgtactccgaagattacagctacagcagctccggtccggctaggaaaggcagctcaccgtatgcgtattcagcgtcgccgctggttggcctgcctgagctgtcgcatctaggctggggccactggtttaccttgagggacctggagtgcgccacgaaccggtttgcgaagagcaatgttcttggggagggtggctacggagttgtctacaagggccgtctggtgaatgggactgagatcgccgtgaagaagatccttaataatgtggggcaggcagagaaggaattcagagttgaagttgaagccatcggtcatgttcggcacaagaatctggtccgccttctgggatattgcgtggaagggatacataggatgcttgtctacgagtatgttaataatggcaacctggaacaatggcttcatggcgtgaatcaacacggtgtccttagttgggaaaaccgtatgaaaattctccttggcactgcaaaagctctcgcgtaccttcatgaggccatagaccccaaagttgtgcacagagacatcaagtcaagtaatatcttaatcgacgatgaattcaacagcaaggtttctgattttgggttggctaaacttctgaattctgacaaaagtcatatcaatacaagagtgatgggaacatatgggtatgtagcacctgagtacgcaaatagtgggatgctaaatgaaaaaagtgacatatacagttttggagtggtgttgttagaatgtgtgacagctagggatccagttgattacagtaagcctgcagatgaggtgaatctcatagagtggcttaagatgatggttaccagtaagagggcagaggaggtagtggatccaaacctcgatgttaagccaccaaaacgtgcccttaagcgggcaatcctggttggcttcaagtgcgttgatcctgatgctgacaagaggccaaagatgagtcacgttgtccagatgcttgaatccgttcagaacgcataccatcaagatcaaagaaagctcagccaggtgggaagcatagatatcgagtcgcagcagtcgctagaggagacttcaaacagtgctgatgcctgaacctctccgattctgaacaagcactggaatcatctgatagcaacattgaattgatcgttgctcggtactttatagagtgagtggatcaggcttacagtttgcatatactggaggaggaggtggttaaaatcaatcagtagcaagttgttcattccgtttttttacccatttttccgggtgtgcttctatactcccctaaaaggttcatctcttttacccttaggatatgtatagttttccttttgggagagcatagaagcaccttcatcttcttcttctttttcgtttgagttgccaggagcgactaacctcaggcatagtcactggatttcattacccgtgtgtagcggctttatggaaactcactgttaccctatatgaaaacatgaaatttcctgctgtgaagcgctgaaaaatgaaagcccccta

SEQ ID NO: 183484 - DNA, 1303 bp, Zea mays
  Clone ID: MRT4577_98922C.1
gggcctgctgcatcttcttccattccccactctccagtctccactagcatcagtcgccgccgcctatcctcgagcgccatttccatcaacagcatccgcctctggcaagctagcgacagcaactcatggcactccgcgcgctcgacaatacgaagcccgccgccgtcgaggagcggcccaagaaggtggctaaggtgggcgtccccgccgccgccgccaaggccgccgcctcccccgggagtggcggcaagaagaagaaggggaacgacgagaactcggcgccaagggccacggccgcggcggcggagcaggccgtggagtacatctcgtcggaggagctggaggcggcggccagccccaaggccaaggccgcggggctggtcgcggacctggactccaaggactgggtcaggacctgcgaggcgctcaacgacgcgcgccgcctcgcgatccaccaccccgcgctgctgaacccgatcctggagaaggtggtgctggcggttgtgaagacgatgaagagcccccgcagcgcggtgctcaagacgtccatcatggcctgcgccgacatcttcagctccttcggcaacctgctcgcctccgtctccgacgacgccttcgacaagctgctgctccagctcctgctgaaggcgtcccaggacaagcggttcgtgtgcgaggaggccgagaaggcgacgcgcgcgatggcggcgtcgatgccgccgctgccgctgctgaagaagctcaaggcgtacgtccaccacgccaacctcagggtcagggctaaggccgccgtcgccatctcccactgcgccgcccggatggacatcggcgcgatgaaggagttcgggatgtcggcgctgctgcagctggcggcggagctgctgaacgaccggctgccggaggcgagggaggccgcccgcggcgtggtggcgtcgacgcacgcggccttcgtcaaggaggccgccgcgagcggccaggaggacgacgctgccgcgtcctgggagagcctctgcgcgctcagcctcccgcccatctccgcgcaggccgtcgccaagatcgctgccgccgccgccgcctcctcgcagtagccacggcacgcgtgcggacgtgcgccgctggcgttgtttttgggggtcgtctggttcggttcagaagtagcgctcgtgagtcttcagacagagctcgtttgtcgccgccgccgagtctgtttgtttgttctttctactccatgctatctcgcatggttagtgttctgtttatggcttcgtcaagtaataacatatcaattaacatagtttactag

SEQ ID NO: 183485 - DNA, 201 bp, Zea mays
  Clone ID: MRT4577_98923C.1
actgtgtatcacaagtgctgtttatgggggtcctgccgcaggacaaagtagtgtacaatacggagcatttcttcccgtcaaggatgttatgttgagcgcttgattgtgaacggttttttgcgcgcctgcattcgttcttattgtttgcggtagcgatgtgttgggcactgacctgatctgttgtgtatagcttgtccttgc

SEQ ID NO: 183486 - DNA, 185 bp, Zea mays
  Clone ID: MRT4577_98924C.1
ccccccaaaaacaaatcaaaatgggggttgggttacttcgttccccaaacaaaaccaaacatgggttttatgcctcaatgaatgaatgctccaaaagccaattttacatgaaattaagggcaaccgattacttccggtctccataatcgccaaaaatgttccttaaaaccggccccggggtgtcg

SEQ ID NO: 183487 - DNA, 141 bp, Zea mays
  Clone ID: MRT4577_98925C.1
tgcaaactgtcaacttaatctgacctttaccaccacagaccttgtgtcaactctttggctctgctttctaagcacctaaggaagaagcttgcctcatccaacaacctctttactgaggaacccgcttagcccttattctcc

SEQ ID NO: 183488 - DNA, 199 bp, Zea mays
  Clone ID: MRT4577_98926C.1
cgctaagctagctaggtcacatgacatgagctaaagacgacgacacactaataggacacacacaagacacactaactccatagctaaatacactagcatacccccccaaaaaaatatgtccgcgtcacggttcctcctcgccgtcctcgtcgtgggcagcgccgtactgtgcaccgacgccgctccccgcgcgctacgc

SEQ ID NO: 183489 - DNA, 336 bp, Zea mays
  Clone ID: MRT4577_98927C.1
cgaaaggctctttctttttatttcatccaaagagaacccccccctccacagttgggttttacatgcaaacggtttgtcccaacttacaaacaatgtcaatcatgtgatgcccttccaaggggaccccttgtaacaggacccaaaggggataatgatgatcgacacctaacttttgtggctcccagctgtttttgactccaaaatttcaaactggttcagggcctgggaccccaatttaaatgccccctatgcacattagcatgggccttgcctgccctttatcagctacaagggaaactccttttgcagcagtacaggggggctcataaaaaagga

SEQ ID NO: 183490 - DNA, 1172 bp, Zea mays
  Clone ID: MRT4577_98928C.1
aattcggcacgaggcgcgaaacccagctcagttcggtgagcgcagcgctcgaccatcagacatgggcgtcagcgacggcgacggcaacggcccccaaggcgagcgaggaggcggtctcgtgcgaagggagtcccgagtataggttgccgttctccaagccgcacgtccccagcccaccgcaggtgtccgacccgacgaactacgccatgactggcaagatcctgctcgccgcggcgggggcgttcgcgggcgtgctcctggcgctcgtcgcgctgcacctctacaacagcacacggcggcggcgcctcggcggcaaccagcggcggctgttccggagcctggccatcgccggtggcgacgaggaccgccgcgacggtgacggagagggagcgcctcccccccatcgcggcctcgattccgctgtgctcgccgcgataccggtcgtgctgatcgaagcgggcgcggatgcggggggcggggactgcgcggtctgcctcgcggagctcgagcccggggagaaggcccgcgcgctgccgcggtgcggccaccgcttccacatcgagtgcattggcgcctggttccgggggaacgccacgtgcccgctctgccgcgccgacgtcgtcgtcgtggcgccgggcgctatcgtgccagccgagggcggggcgctgtcggaggaggtgcggatagacgtggccggggacgccgtcgccgcgacgcccaatggatccacggtagtgccggtgatggggaggttgcatagcggccgggatcttgagaaagccaggcgggtctttgcttccacccgattctcttccttctgacagggctccattggctcccacagccacagactacaggacctcggaagcttcctctgattttcgcacatggacacctcgattgtttcggagcgttctgccattagactgtacatagatttgttggtgatgccagctgtgttttgccatgatttgtagtacgattttttgcggacgaactcatggacatatctgtctcgacgttgactcgagacatgtaaactgcttggatgctatttgcttcacaacattaatgattgatagttgtaataaatttgaataggtggagctactaatgtgatattttatttcggctgaatctaaacaaatataatctaacgttatcaattatct

SEQ ID NO: 183491 - DNA, 256 bp, Zea mays
  Clone ID: MRT4577_98929C.1
cgggtcgatgttatgttcatttctattggaattgctttttttttttataatatgcattgtgatgaccttacagcataaaaggatggaacagcagaggacaggataccagaaacagaacctcatcttgttgcctagaggaggagggaaacggaccagaggagcgctggctctaatcgaggctggtgtgtggcgttacctactctaactccacgctgtggagggccggcacggaaaaggacctggcggaccgaaacga

SEQ ID NO: 183492 - DNA, 665 bp, Zea mays
  Clone ID: MRT4577_9892C.1
ctcgaggccggccgggccgggacgggggcaaaataatgcagacacaaatcgcagcaggacaaggcaagacgcaaggagaaagaggcggaggggagaggaggtgggcatttgccagatcgaccagccaatgacctgcctcggcgcgcgatgcgtctttgctcgatcaggtagtggttgatgactccgtccgtgtagccgccctgccggcctgtgcccacgcgttccacctgcctgccgcctgaccggagcgcgcaccggaaccgccagttttttgagcggggtcgcgctgcctgcctcccgcggcgattttctccccgtctggactcgcgttggccggccgcgcgcggcgaattcatcggtgcggctgtctccatctggtttgggtttgcagtttattattggctagggcaggagaagcgctggttgctgggttgcttgctagcttcttcagttgtgtcttctcctgcgtgttgtgggcgtgcgttgcttgtgaagccgtgatttgtcaagtcagctggcactggcagacagacagacggacggtacaacgagcgtgagtacatggggttgatcacctgtgccatgaaaagtatcgatatctaatctagagctgggagatatatactcctattacaaaaaaaaaaaaaaaaaaggcccctagggcc

SEQ ID NO: 183493 - DNA, 320 bp, Zea mays
  Clone ID: MRT4577_98930C.1
accgacccgtaactcacactgccgacccaacccacgcgtttcgtcaccaccactacaacaccaactccggcgggcgctcactgtacggcaggccggatcagtcaggctggaccgcaatgccctcttttctgatggctactacctccccgggcgcagtgtcactcacacgctcccacttctgaaatgcagccacactcggggactacaaggctaccattgcttgagctacttctcctaggtgtgctcttccgtccaagctttgacactacggttgaagatggcctgttcagcaatagcgactttgagacgggaccagccgg

SEQ ID NO: 183494 - DNA, 439 bp, Zea mays
  Clone ID: MRT4577_98931C.1
aattgccgggacgacgagttctctaatcggcggccgccctcttgtgttttttgcgaaaatttgaccatgttgctataccgaaaaaaagaggagtgcatgcctattatgcatgcccagctgcgagtaaaaggtgaagctaaaccatgacactgaagagtacgagcaagccagaaaattccaacgggccatcgtgctatggggctaccaggaagatgaactgtgtatctatagcatggcagtctgtatggaacgataccatattgtaaatcacgttcaatgcatgcgcgcgcacgcagacacgatgcatgggaggcagacgcccaccggcatcgtcgcccaacacgcatctaaagccgccgagacagtggcggtgctcgaagccagcaacgccgacaccggatacttggactcctgacctttacccaccaccagtgttgcc

SEQ ID NO: 183495 - DNA, 283 bp, Zea mays
  Clone ID: MRT4577_98932C.1
cccggtcgcccacgcgtccggttttctcggaggcagcctcttcctgtcgccgccgcgtcacccgccgggtgtcggggatgccggtcaggtggtcgataccgcacccttctgcaccctccagcaagaacaaatactggacacccattctctaagtcacttaatgctgaaactttgtggactcaaagttagttgcaaagataacatggaaggaatgcccatctggtgcactgacaggtttcttgtggaacgaggagcgctatgtccttgcagatccctgtgtgct

SEQ ID NO: 183496 - DNA, 304 bp, Zea mays
  unsure (1)..(304): unsure at all n locations
  Clone ID: MRT4577_98933C.1
ggtcaccccctattcaaactcatcaaccactcctttatcgacctccccgccccatgctaacatctccatcatgatgaaacttcggttctctactaggagtatccctccatagtacaaatcctcacaggcttattcctagcaatacactacacgtctgataccataacagcattctcatcagtcacccacatctgccgagacgtaaactacggctgactaatccgatacctacgcgccaacgggccttcaatattttcatctgctattctccatgtgggacggggccntatantanggttccnnt

SEQ ID NO: 183497 - DNA, 398 bp, Zea mays
  Clone ID: MRT4577_98934C.1
cccactcgtccgctgacactcgttgctttcactgactactatgataaatgattgtgcggcaatatctgaaggtatcgagactttcaagctacacgttcaagatcctaaatttcctgatatataccatattaatatgtagtattatttcctcatggtaccatgacactattcatgcgaacaaccaccaatcaaactttcaattcatcacttacacaggataaaccttctactgatctatctaattctttttcttacagtttcagactataactcgatcttatacacaaattataaacacagagctatgacgatcactaactcatcaatcctttattctcaaatcattataaccctgtaataccaacatgtctcatatgatcatactataatacttactt

SEQ ID NO: 183498 - DNA, 279 bp, Zea mays
  unsure (1)..(279): unsure at all n locations
  Clone ID: MRT4577_98935C.1
cccaggcggtcggcggcggcaggacggcggacgacntctggcgccactacctgcacctggagggggacatcgacgacatgggcgccagggagcgggcgaaccgccgccgccaacagtaccgccgcaacgcccagcagcaccaacaccagcacggcgctagcgccaacgccaacgcctacnccagccgcaaccatattagtcggcggagcaacggncggcggcgccagcagcactnacactaacaacattagtagtcatcgcgctactaacngcaacgac

SEQ ID NO: 183499 - DNA, 343 bp, Zea mays
  Clone ID: MRT4577_98936C.1
ttgtcatcgtctacacctacatcggccgggggtctcttcacgagcctgcggtgcaatccgaggatctgcggtggtagacagccgtcagccggcgattacgcgcctcgtggacaactagtacgactacctagacaagaatcgactcatcgacgactgcctcgtcagcgagactaacatggctcccaggtggacccgcaacgagccatgactcgagttcaagtacagcatcggtctaaagatcgccacccagaccctccagatgcaaaggtaaaccatccaaggtcaaatatgggattctgcggagcaagagaggtacagtgcaattccaagttcttactacaga

SEQ ID NO: 183500 - DNA, 837 bp, Zea mays
  unsure (1)..(837): unsure at all n locations
  Clone ID: MRT4577_98937C.1
ctaggcatccctatcgccatgantaaatataaatatagagacagaggggggggagggcatctaggtcaagaacccgagctgctgccatccctgctggatccaacaccagtggctggcacagaacttgctccggtcagctgtgacacagtcaatctggaaggtgacggcagtggtggtcaatttgagagcacagataagtgaggaaagcggaaaaagtgggaggaaggagaagtttcaggcagtggtaggcgcatctggatagaaagggagaggagggagtatgctggatatgtgggggtgaccatgtatatgcgcactggagccattgatacaggaagggaaggagaggctaaagaaaggaggagcatgaagagaaccaggcaaggctgcacctgcacctgcacctgccctcgcccatctctgttggctccggcgcctgtggtcttgcagatcttcactggtcaactgtatagctcgatctgaagggggcagcaccagtgcacaatctgcatgagtagagctctatttcaaaaggggtggcgttggccctcaatctgggaggcgtgctcttggggcagccaggcttgtcattgctcaaagacggcattggaaaggactgatgtaaacaggcaaacagcatcaagtgaggaattggtggattagggattgaggggagagtgtangggtgttgctttatgggctgntgggttaattgggttctaatgagttagtggggtggctgctaatagttaatgtggcccatcgatgcttgtatttacctcttattctacattatatatcttactacatattttatgttccatatcatttactttt

SEQ ID NO: 183501 - DNA, 259 bp, Zea mays
  Clone ID: MRT4577_98938C.1
taaaatactcaacccaacgtatgggatcattataaaccaatcatagggccattatttgtatgggggaattacaaaagacgagactgtataccaatactctactaaaaacttatattcattgatatttgtcatcataagtataatacttgagtcatcactaatttcataaataacaaatcttgattaccatatttttatttattaataaaattattaaagcctattgtatttttaaaatttgtattttacaatattttta

SEQ ID NO: 183502 - DNA, 845 bp, Zea mays
  unsure (1)..(845): unsure at all n locations
  Clone ID: MRT4577_98939C.1
cctcgaggccggccgggatctcttctctagtttccgcacgacatcaccttcctcgccgacaatgcaagactatcttgagacttctttagtcgctactaatggcgtactactaatgcttactcaacagcacgcctgcattgagggcagaagcgccagcacgacttcgagcatgaccgccaaaaggacaagtgttccactgacaatgacacaagtgagagcgtcactcttcgcactcagccaacagggccgaccctcccagctacacttaccacgcggggacttatgctaacactggcggaagaaacacgacgaggactacacacgggaccgctcaaggagagcctctggcatccggaagtaagtggcagccacgctcacgtatccgacccgactggaccgcatgattatcgcgctgacgagaaggctgaccctcgtgtcgactcttaccgcattgggaccgccgtacaaccacaccagcaccacacacggcaccactggccactcctctggcttgaccggtaacacatacagttccgaccccactggtcctcacgactctcgcctcgagaacaaggacgatcctcgtgtcgactctgaccgatatggctctgccggtaaccacaccagcaccacccacggctcttctggcctcaccggcactggacactcctccggcgtgactggtaacacctacngctcagaccccactggtcctcacgactctcacttggctaacaagcncgaccctcgtgttgactctgaccgatatggcgctgctggcaaccacaccagcaccacccacggtaccacccacggctcttccggcctcactggtactggtcact

SEQ ID NO: 183503 - DNA, 1104 bp, Zea mays
  Clone ID: MRT4577_9893C.1
ccggccgggccgggagcccttaacttgtcgatctaattgttatgttacttcttgcttcctcctcactacccgatactaccgcatcaaactccaggtcctcaaaacaagaaactccaccagagctgtgcttcagataagatccaaagacccttggttccctccgtcgattttcagtcttcttgagccaatcaaggtcaagatgaccctagagaaagtcagagtaagcattgccacaaacccccatatacttctgatagacagcgcacacacatttacattaaatgggaaagcagtggtgcgtgttgaagcaccctcatctatgaagaaccatgcccccattgacctagtcacgcttatcaatattaaccaaagcatgagctggccagcggcatcacaaacagagatcccatcaaggttggatctgctgaaaaatgccatgaagttcataataaggcagcttggtgatgacgaccgccttgccattgtagcattcaacgacaaggtcatcaaagagaataccactggcattttagaaatatctggcagtggtcggatggctatcgaaaaaaaggtggatgggcttgtggctatgggtgacactgcttttaaaccgagcttggagcatgctgtgaagctcctggacgaccgagacgataagaagcgtgcaggcttcatcgttctcatttcggatggtctagacggccagtccaaatggggagatgagagtatcacccccacggatcctatccgaggcctcctccgaaagtacccagtccacaccttcggtttgggcaaggctcacgacccaaaggcgcttcactatatcgctgatatatcctatggaatctattcctccatcgtcaccgacaaccttgacaagatcatcgaggcattcgccgtctgcttagctgggttcaagaccgtagtagccgtcgacgcttgcgttgacatctggtcaaatagtttgctgataacaaggatcgaccctgggggttacatactccgggggagttccggaggcatcttggttggcacgctctatgctggggaggtgaaggacttcattgtctacttttcttatcgtaccgggagttggtcgagtgg

SEQ ID NO: 183504 - DNA, 777 bp, Zea mays
  unsure (1)..(777): unsure at all n locations
  Clone ID: MRT4577_98940C.1
ttgggtacctcgaggccggccgggcacgatctcgaactcgcaagctcgatagccacgcctaccctctccactcaaccccaatcgctctcgccatgtttctccaacgctctgccatggccgcggcaaggcgggcggccccccgcgcgctcgcccagcgcactttcacgacatcctttgtccgccgcgacgacagcaagattgcgcaaaaggagactggccactcggccaattcgcccagcgttctcgagggcttcaagaagctcgacgaaatcaagtcagaagcggatctcctccctccgggtgctaagcctggtactgtgcctacggacgcggaacaatctaccggtctggagcgtctcgagattctcggaaagatgcagggtatcgacatcttcgacatgaggccattggatgccagccgtgtcggcaccatggagaacccaatcactgtcaactctgcaggtgatgagcaatatgttggttgcaccggatgccccgccgactcgcacaacgttctgtggatcaccctcacccgcgaggagcccaagtcacgttgcatggagtgcggctccgtgtacgagatgcattatgtgngcccggcagaggatgctcacggtcaccacgaccaccacgaccaccatgagaaaccataccccagggccaagaccatgggcgacttccctcagcccgagtaccgtgagctataaatgtagctgacgtanttttttctccccatgtgcagggtgtatctatangactgagagaaatctgtagcat

SEQ ID NO: 183505 - DNA, 232 bp, Zea mays
  Clone ID: MRT4577_98941C.1
accacccatcattaatcatcataaccaaagaaaaaggcactacttagccgtkgggcatgcacagcttctgtcaaaattccaattgctgtaaaattggatcagcatttcaaaaaaaaacatttttatggtttcctattcttcttttgctcctcaatttactcctcccttcgaacttcttagacccacttttgcattttcctctctgcttggttttcttctgcgccttgttgcc

SEQ ID NO: 183506 - DNA, 832 bp, Zea mays
  Clone ID: MRT4577_98942C.1
ttgggaccctcgcggccgggactctctcccgcgggtctcggcctcctctcctcggctcgctataagcaggctccaccgcttccgcaatggccacctaattcgctcggcgtcgggggagaagagaagcgcgcgcgatggcaccgggaagatctcttcgccctgcggggacggcggcggttctgtgggcggcgtcgctgctgctgctggcgacgtcgtgcgcgcgcgcaggtggcgcgtacgcggggccggggtgccggaagcacgtggcgagggtcacggagtacggcgcggtcggggacgggaggacgctcaacacggcggcgttcgccagggctgtggcggacctggcgcggcgcgcgcccgacggcggcgctgcgctggtggtgccgccggggaagtggctcacggggcccttcaacctcaccagctgcttcacgctctacctcgacgagggcgccgagatcctcgcgtcccaggacatgaagcattggcccctcatagctcccctgccgtcctacgggagaggaagggacgagcctggcccaaggtacagcaatttcatcggaggatccaatctcactgacgtcatcatcacgggcaaaaatggaacgatcaacgggcaggggcaggtctggtgggacaagttccacgccaaggagctcaagttcacccgcggccacctcctcgagctcctctactctgacaacatcatcatctccaatgtcaccttcgtcgacgcgccatactgggacctccaccctacctattgcacattcttcaccatcagtcacgttcgaggactagcgcggtgaatcgcctaataccgatggaa

SEQ ID NO: 183507 - DNA, 1791 bp, Zea mays
  unsure (1)..(1791): unsure at all n locations
  Clone ID: MRT4577_98943C.1
ggtaccctncagagcctggccgggnaccatcaccaccaccggccaccctctccctgccctggccccccccgcttcgcctactcctgctcctcctcctcctccgcctccccctccctcctacaaatagccaccaccaccacagtgacgcagccgccgccgcaaacgtcgcccccgaccgaagcctagccaccaccagcagcaccagcaacctcgcgtagcagcgctcgacaccgctggacgccccgcgcccgcgcgaaagcaggaccttgattctgtcgttggcgataccatggatgtgtcctacgagaagtgtgctgatccgtcgaactcggacctgcctagcgctgttgttgatgctgagcgatacgacgatggcggctccgaacacctgggatctgctgtagtagagggagctattggaaacgaagggaattcggggaccgaaagttccgagcagactggtgatgagcgcgctggaggaggtgaaggctctcctgttgatgtcgaaaacagcgctgataaacaagagagccaggagacgacggttccgatggaagaaacagaaacgagcgacggcacctcgatcacgtcgatggaggatgccctggaaccgaaccgtcatcacgatctcccgtcggagcctgaggatgtgggcaaccacactcctgatcctgatcagtccagcggcaagaactccaaaggaaacagtagcgtgttccagagcgcaagggagggtgctggcttcaaccaataagaaaactccatctgcaactgcacggaagccactgcagttgactaacagaggtaaccaggatgacgcgaaatcgtcggctggaaaggccgccacggttccatcaggcccggttttccgctgtactgaacgggccgagaagcgcagagaattttatatgaagctggaggagaagcatcaagctatggaggaagagaagattcagttggaggctaagttgaagaaagagcaggaggaggcactgaagcagctgaggaagagcctgaccttcaaagccaaccccatgccgagcttctaccacgaggcgacgccgtccccgaaggccgagttcaagaagctgcccacgacccggcccaagtcgcccaagctgggcaggaggaagacggcctcgacctccatggagacgtccaactcgtcgtcggagagcgagggcacgaggccgtgctgccgcgccagccgcgacggcctcgacagcagctgcagatgcggcggcaggagcaggccgcaggccgcgaacgccaagccggccgccgggcccaagaagccgccgccgcagcagcagcagccgaaacaccgcgcccacaagatcgccggcgagggcgccatcaacatcgccgtgcactagccgccgccgccgcttcttgaaacttctttccggtcgcatgcatgcaggacgatggcgatggcgtgcggattttccttctaagttatgagagtgctttgtcggcttgtggatttggtgtagataataatataagttatggtgacgacgaacgaacaggggctgctgccacgagtgaggccggtcagtcagacagaggtggtggtgtttattgcttgcttgcttgtttgtctgtttgtttgtttatttatgctaatcttatttatttaatctgctgtcgaggatggcctgcgcattgcccctgtgcagcgctgcttgttttttcgtcttcttaatttatggggagtggtaaaaaaaactttagcgctggatgtaacgtgtacaaacgaaaacgaaggcttgctggtggtggtgatgg

SEQ ID NO: 183508 - DNA, 397 bp, Zea mays
  Clone ID: MRT4577_98944C.1
agtatcaagaaaagcagttatatttccaggtaatattttcagcatatacagtcgtacaggtgcaaaacttgaacccaccacatacaggtggatgcaaaaataacaaagcaacttgaaaccagctattcctgtctaaatgactttaaatgttgcatttccagcaatatacccatgacagatacatttaaatgataaaagataataggacaagcatctgaagatgaaatatacccatgacatatacaataatatggattcttcatattatattataatgttatgtcctacaaaaactgatccggctagctgacattgcagcacgaagttgcatcgcctttaatttgggtcctgagcatagacatttaccacttaaagcaaccaatgaggcgcgcttttt

SEQ ID NO: 183509 - DNA, 713 bp, Zea mays
  Clone ID: MRT4577_98945C.1
tcgaggccggccggggccgccgcaaacgtcgcccccgaccgaagcctagccaccaccagcagcaccagcaacctcgcgtagcagcgctcgacaccgctggacgccccgcgcccgcgcgaaagcaggtaggatcggagcaccctgtttcctccgtggtcacagcttcgccagttggtcgtccttgttccttggcaaaaaggaccttgattctgtcgttggcgataccatggatgtgtcctacgagaagtgtgctgatccgtcgaactcggacctgcctagcgctgttgttgatgctgagcgatacgacgatggcggctccgaacacctgggatctgctgtagtacagggagctactggaaacgaagggaattcggggaccgaaagttccgagcagactggtgatgagcgcgctggaggaggtgaaggctctcctgttgatgtcgaaaacagcgctgataaacaagagagccaggagacgacggttccgatggaagaaacagaaacgagcgacggcacctcgatcacgtcgatggaggatgccctggaaccgaaccgtcatcacgatctcccgtcggagcctgaggatgtgggcaaccacactcctgatcctgatcagtccagcggcaagaactccaaaggaaacagtagcgtgctccagagcgcaaggagggtgctggcttcaaccaataagaaaactccatctgcactggacg

SEQ ID NO: 183510 - DNA, 502 bp, Zea mays
  Clone ID: MRT4577_98946C.1
tcgcacgccacccccccccccccccccccccctcttctttttttttttttttttttttttttttttttttttttacataaaaaaattgggtggggttgagggcctcctctttaaccttctgtgggggaacccgctcaacaaaatttaaaggggggcaaaaaaaaagggccaccctcaaacaaaaatgaaggaaccattttaacaccccacaataaaaaaccaccaaaaaacatacggggagggaaaaaacccaagggccccattaaggcaaacccaacctaaagcttggaaaaacaaggggaccccaccaaaccagcagctttgctccacccagccatgaaaaagcttgaagcaaatctgggcatggttgagaaacccaacctaaaaccttgggctcttgccaaaagcgaacttgattcctatggggataggacagccccccatcaaccataatttgctcatcaatggtcatccggaatgggggaaacccgaaaaggggtct

SEQ ID NO: 183511 - DNA, 598 bp, Zea mays
  Clone ID: MRT4577_98947C.1
tcccatcaaaagagagcatcgcagagctgtagtacgtagcacgcaggacggcaggaggcagcggtcatccgcggtggccggtgagcggtggccatggtcttgtctccttcccctcccctgcccaccgctgcttccgagccgaaacagcagcagcgaggcggcaccaatgcggcgccggagaagtccgacaagaagtacgcgcacgtcccgacgccgctccaccacggccaccgcggcgccagcaagaaggcaccccgcgggggcaagggcggcgacgttgccgaccccgcggcgtacgtcgcggcggtgtcctgctcggactgccgcttcaagcagcgcgccctcgcgccggcgtcgcccggcgccgtcatccgctcgctgttcgtctccctcacccgccgctccaccccgcgctcgtcgccgtcggccacgccggcctcggcaggcgccgacgcgggggacggcgagcagtggcgcctcgccgcggccgacctctcccgcaggctcgccgcggccacgcgcacgcgggacgaggcgctggaggagaccacgcgcctgaagcactccctcgccgagctggagcacaagctcgcgcgcg

SEQ ID NO: 183512 - DNA, 739 bp, Zea mays
  Clone ID: MRT4577_98948C.1
ggccgcttttttttttttttttttccttcaacacttttcgcgcagtgctactcagttccattcattgaagatactatctacatgcaacccatcatgcgccccgcctgacattcgtgctcatcagcgtaatcttcttgcccttcttcttcttgccaccagcttgcttcttgggcgcttcctcatcggccaaagacatggcttggacttgcgcaatgacatcgtcctcttgaagcaagtccttttcccatccctggagccagccgtcgtccacatcttggtccagttgtggtcccatgctgggcgatgtggatgcgatggctgtcgtgccccagaccgtgcgcggggcagaaggactggtcgagggagaagctagagaagcaaagccctcgcctcgtcgcgttggccatggcggtgatgtagaggtggtgtcgccatccacgccagacgcttcagcaccaatgtgggaggccaatggctggaagtcgtctgctgagaatctctcagatatgctattccgcttcctccggcccgacgcaaactcggcatactctgccttttcagctcgcactcgtgccttttcttctcgtgtctctttctcagtgtgcttcttcctgcgtttctcgatatcgggcttgaagcgttctagaatctcaggcgagacggtgtcggtccaatcgcattcgaggaagcccacctcgcagccatacggaagatgggcaaggtacttggtacgctttcg

SEQ ID NO: 183513 - DNA, 216 bp, Zea mays
  Clone ID: MRT4577_98949C.1
ccaggcgggcgggggggtgataacctgatgccccctcccaaccctgacctcttcgacttctccgaccttctcaccctcccagccctcttccctctaactggcacccagaacgcgcaggcattgttactttttcccgctgttcgcactatcctttcccgtggggaggtgcaagaggaaatccttcattccttgccaccactgtatgcctttaccaag

SEQ ID NO: 183514 - DNA, 433 bp, Zea mays
  unsure (1)..(433): unsure at all n locations
  Clone ID: MRT4577_9894C.1
gtacnncctcgaggnnccggccgggaaacgctaaaccaaactgctcgccatgacggatccatccacatgaggtttcctcttgtttcgtcgtgggagtactgctgctgactctcatcgacgtctgctatcgctcgcatatgcgcctctcgctgaggtttgacctgcgtcgcgcacggcctttgcccgtgccaatgggtccttgggcacaggatacgcctaggccgatgaagtgtaaggaatatcactttgttctagcaatcctctctatgtgggtcgtgatttctatatggtgattactaccctctttgtaagcaaagaaggaaccttagactggagtcggattaccacatgtttgagaggtcgctacggagatagaccagaatttgcagtgctgtcaacaatggtgaataacaggaatgctatatggtgtgct

SEQ ID NO: 183515 - DNA, 295 bp, Zea mays
  Clone ID: MRT4577_98950C.1
aacaaatataatacaaactggattcaactcgcaattaatgttccacaacacgtaaaatgcttacaaattcacacaggggtaagcaagggaagtttgacagcacactgggaaaaaagggcggcaagctgagggactccaaacgttcatcagctacagctagtacggattctttacggggaagaaggaaacaagagctgctttggattgacctaactaatatgcaactcacggtgttcctccttccgagcggggggactataccattaccgcagggtttactcacttactcacccaa

SEQ ID NO: 183516 - DNA, 148 bp, Zea mays
  Clone ID: MRT4577_98951C.1
aggagcatcaagctttgttttctagtggaatttaaacgatatcacattgcatcactagttgcgcacaatcagaaaagacgtgcttgctgaaaccacgtttttctcgagtacgaagacaatatatagattgtctaataaatggacagta

SEQ ID NO: 183517 - DNA, 712 bp, Zea mays
  Clone ID: MRT4577_98952C.1
gccggccgggtcgggatgctatatatgtaccctcttttatttttttctctctcttttaacttgctgctgttatttgttatttgaattaaagttacgtataccgtatacgtaaaaaaaaaaaaaaaaggaaaaaaattcgtgcctccggtcgactcgtcgacatcatcagatcagcaatcgaccctctggtccaggcggtggctagctagcgcaacgcccatggggtgggcgaagaaggcggcagtggcggagacgacggcgcgggtggtggacgacaggtcgacggtggaccaggcggtggcgtacgtgctcatggccgccgcgctcgccgtcacctacctcgtccactgagcaccgcgcggggtcgttgagttcttcttcaccatagatcgatggatcgagatggttgtacagctcgctactgcttgacatcgtttcttgtctcgattcgatgcatgactccatgtcctctcaccaaaaaaaaaataatacagtaattgccatcaaaaaaaaaaaaaaaaaagactccactcgtgtgtctcgcagccactgctccactacgcggcgccaactggtgtctaatggccacgcctgccgtacgggcactatcgatgaggacacgagaacccctctctgtaaattatttaagctaatttgttatcttcagtagagcgtcgttacacagaaaaaaaaaaaaaaaaaaggcccccta

SEQ ID NO: 183518 - DNA, 255 bp, Zea mays
  Clone ID: MRT4577_98953C.1
agcggaaaaagaacttttttttggcaacaaatgtttcgattaatttaacccttaatacagtgcttatttattttaaacaaatcgcccaatttgtaactactttttaacattattcaatgggtatctaaccccaaccgacccaaaatatctttgaataattaaacaagataaaaaggggtttggcgtcccttgattaaataaaggagattgtgggctatttatccattcgagtcaacatttttaaaaattgttttg

SEQ ID NO: 183519 - DNA, 2714 bp, Zea mays
  Clone ID: MRT4577_98954C.1
ttcgcggggggcctgctgcttgcccctgatgctgggttgccccttgctcaggggcttgtggaggcggcgtcatccgcccttgctctcggggggatcgctcgtggcgtttctgctgggtctcccttgtttgcgttaaaatctaaaaggcaccctgatatggacagcaatcctaaaccaagcaaatgccctcgaccaattgatgaacgctcaaaactttcatatgaatacagtgtggaatcattttgcagcatagatgaccatctaccagatggtttttatgatgcaggccgagatatgccattcatgtcattagaggagtatgaaaggagtcttgggctgtatgcacgggaggttattctcttggacagagaacaagatgaagaattggatacaatcgcttcttcagcacaattactgctatctagtttgacaaggccaagctcttgtgaaatggaggaagatgcaggccatgatttactgagggcatcagtgctcgctttgtttgtttctgactgctttggtggttgtgaccgaagcgcttctcttgggagaacacgtagagctattgttagcttgaggaaggagcagccttttgtttgtacttgttctgctgggaacttgggcgacaacaatgaagctaagcagaccaatattctttctgggcactttgattttgctggtttgtgtaatagatcaatacatctcatcaaggaaagaagaaattcgggtattgtacctataggttcactgcaattaggtgtttgtaggcaccgagctgtcctaatgaagtatttgtgtgaccgggcggatcctccaattccttgtgagcttgtgaggggccatcttgactatacacctcatgcttggaacattgttcctgttaaaaagaggaatggctgggtaaggatgattgttgatgcttgttaccccaccaacataaaggaagagacagatccagagtacttttgcaggtatataccactcagtcgacttcaaattgtgctcgatgatgagggctatactcctcggtgctctttcccatctgtgtcatcatgcaaagaaattgaagttacaccttctagttctgtctatcactgtaaaattggtgctgttgatgctgctgcaaagatacgatatctggatactcgtagggtctcaaatgatgaagttaaactttttgaatacaagcttctgggggaagtaaggatgctgggtgcgctaaggaagcacagatccatagtggacatatatggacaccaactttcatctaaatgggttcaagtcgacggtgataaagaatataggatattgcagtctataattttaatggaatatgtaaatggaggttctcttaagggatatttgacaaagctactgaaggagggcaagaagtgtgtccccattgatctgtcagtttacattgctcgggaagttgcttgtgcattgttggagatgcacaagaagctagttattcacagggacataaaaagtgagaatgttttgattgatttggatcccaagaggaatgctggtgcaccccccattgtcaaactatctgattttgacagatccgttcctttgtattctttgtcccatacatgctgtatatctcagcttggtacacacccacctgatgtttgtgttggaacaccttgttggatggctccagaggttgttaaggccatgcatgaaaaacaccactatggactggaaatagatatctggtcatttggatgttttttattggagatgcttacgcttcagatgccttaccagggactttctgacactgaaatatatgatctgatactgaggaagaaacagaggccaaggctaactcaggaactagaagcattctggacaatggatgagccagctacgagactcaagttagggatcacatctgatgctcatgcagataaattgagacacctgatagatctcttctaccagtgtaccagaggacatgcatccaggcggcccaaagctgtgcaaatttacaactcactgtgctccttgcccacatgttacgacatgaggtgaacgttctgatactgtatgaacgcgaaacttgatgcagaagtgcaggggaagaaggtcaaggcaggacatctagccagcctcagagggtttggtgctctaacccgaacatttcaccgtgagttggccttcaggtgctgccaggcagaacatgagaagtgggaccaaggctagcggctgtggtcgccagagctcctcctgagttggtcagttttgtagcggcacggcatctgcgtccacttgtagtcatcatcagttggtcagttttgtagtggcacggcatctgcgtccacctgtagtcatcatcatgtatgtgttatcacatccattgtttccccttttcatggttgttgccatcacaatggggtttaagttatcaaattaggtcattggtgccccaggggcatttgtctgctagaccgctgcatttacttctctatgtgtattgtattgtttatatctgtttagaaaaaaatgactgttgtccatgtaacaattgatgacatctgctatgtgttattgcgaggttatttgtttatgctgattttaccagccattttcgggcatgagctcttgggaaacctgtatcgtgtacagtctcgacagacaagaatatactgatgaatcttgatttaaacccaaaaaaaaaagggcggcccccgactagagggctc

SEQ ID NO: 183520 - DNA, 421 bp, Zea mays
  Clone ID: MRT4577_98955C.1
cgaaatgaatgaatgttattatttaacctaagtaatgaacggtgtttattttaatgacataatgaatgttgaaactcagaatcgtgtttattaaagattcatcttatctcttttcatcaaccactcaggattggcaatagtcgtttagtggcggcaccttccatgtttgaaatcgtagtcctgtcgtcgacaacatctgtgtcgttggtgatcgtaaaaatagctgcgaggacagcaaacccttccatctgggtagtatgtgtaatcacgctgacagcaaaacttcccattcggatagaagatgtatccgggctgtctacagaagcatcggttgaactgtgagctccaagatgcaaattggccacagtctggatgtccaccacgagcagcgagatcgtcttcaatttcgagatctcgggca

SEQ ID NO: 183521 - DNA, 133 bp, Zea mays
  unsure (1)..(133): unsure at all n locations
  Clone ID: MRT4577_98956C.1
agctcgggaaaaggatgcacagttcatatataataacgtaatactccaacctccgctattnataattggggcttgattaaaaataaactaccgacaaatatccaagaatttcagattgcatgaaacatacaat

SEQ ID NO: 183522 - DNA, 297 bp, Zea mays
  Clone ID: MRT4577_98957C.1
gaggcgagaagctccaactatacactgctgaccattagagcccaggaacaggaaaaggatccttttcttccaattgaattgaatgctggtatcaaacagctaaccaattactactgcaagatgtttacagcaaatgatacgaatacccctggagaattctctgatcctcgccaatacaaatcagaaagtgttccctccactacatctttcacaacagtgtgcagtgcacgagctgaacgccaaacatctgcctaataatgaagggaaacccagccatatacaatcacggccacccaa

SEQ ID NO: 183523 - DNA, 335 bp, Zea mays
  Clone ID: MRT4577_98958C.1
cctcccctatccattggtggcctattctttctagttctatgactattctactgccattgatcttcatctgtatcatcatctgcaatatcatctttcctccctctcctctctctactagtccctctccttctacccctccaactcctaccttctcgatgttcatgatgagcttcttgctgctattaatgattcctaagaaggtcttctccatttgaagctctctatgctacttaatcaagtatattatatctttccatataatgaatcaatatcccaatcaccctaattttctattgactcattatatccctattaattttatccatacccacttt

SEQ ID NO: 183524 - DNA, 405 bp, Zea mays
  Clone ID: MRT4577_98959C.1
gtgatcaatatatcattttcgcttatttttttttccttttggccaaaattgggacccaatttcattccataaattgtggtcaaagggaatacccacaggggtgcaccggcggagcgtatttctatgggagccactcagggcaaatcacaggatagcagtggctcacaagcccgacgacgccgagccagtagagcgactagtactcgtcaccctggggggcggcctcaccctcgtcaaactcagcaccgacctcctcgtagtccttctcaagcgccgccagatcctcacgagcctgggagaactcgccctcctccatacccttaccgacgtaccagtgcacgaaggcgcgcttggcgtacatgaggtcgaacttgtggtcaatgcgggagaagacctccacaacac

SEQ ID NO: 183525 - DNA, 410 bp, Zea mays
  Clone ID: MRT4577_9895C.1
caccggaaccgccatcttccagtaattcgccaaaatgacgaacacaaagggaaagaggagaggcacccgatatatgttctctaggccttttagaaaacatggagttgttcctttggccacatatatgcgaatctataagaaaggtgatattgtagacatcaagggaatgggtactgttcaaaaaggaatgccccacaagtgttaccatggcaaaactggaagagtctacaatgttacccagcatgctgttggcattgttgtaaacaaacaagttaagggcaagattcttgccaagagaattaatgtgcgtattgagcacattaagctctctaagagccgagatagcttcctggacacgtgtgaaggaaaatgatcagaaaaagaaagaagccaaagagaaaggtacctgg

SEQ ID NO: 183526 - DNA, 773 bp, Zea mays
  unsure (1)..(773): unsure at all n locations
  Clone ID: MRT4577_98960C.1
gctggacgcctgcaggtaccggtccggaattcccgggtcgaccccgcgtccgtacatttggccagtttagctattgtacttctaagttctttatcattgttaatgttacattgttcacatgataaactctaatagctgaattctatagtaattttcattagcatattaatttctaaatgcataatggaaagctttgaaaataaggaagtagattgaatagtgtgaagtaccattgtgaaacctcaaaagttcttaccatgtaaataatgctttgtctttgctccacctgagttattttggagcaaatctcaggtgaatcaccttattgcactagagaataaggttgttaaacaattaagagaggggagagaaagatacctagctctgacttcgtttcgagacaaaataaatcagtttattctggggagagtttacccaggagtcattatttgtacttctttttctactttttacagaaaggtttcccaactgacgccacccttgatgatataaaagaatggctagacgataaaggccaaatactgaatattcaaatgagaagaacattacacaaaacatttaaggtatgataatttgatgtagactttctgattgtgacatatcactgtaaggaaatatttatttgtcctttacaggggtcaatatttgctgtgtttgatagtattcagtctgcaaagaaagttgtggagatccctggccagaagtacaaagacactaacctgctaatactctntaagggaagattactttgc

SEQ ID NO: 183527 - DNA, 685 bp, Zea mays
  Clone ID: MRT4577_98961C.1
cgcccggcctccccagaggcgcgcaggcggaccgacgcgcccaggcctcccccgacgcgcccaggccgagccccgacgccctgctccagctcgctgaatcctctctgctcacccatggcgctcggccgtcacttccttggccgcgtccccactctgctctagttctacgtcgcgccctgctcggcttctccggtgacggccgccgctcccagctgcgccatgtacgtgcgccgcgtactccagctgcgccacggccgcgtactccagctgctggtgcgccgcgtactcccagctgcgccatgcttgattattgctgtcaggcagctacaccgggagctttatttgaggataaaccccaatctgcaaatgatacatggagaaaactccactctgatcctctactcctaataaggcagcgggagcaggatgcgatttcaaggattaaaaacaatccaatcaatcaagatggccgagataaagaaatctgttaaacatgcatatagaggagtgtggtgatcagggcgccatgagaactcattatgggcatgaacaagatttgaacagctacagaactttatagctggggcaaccactgccatatgatcaagatctggggcaaccactgccatatgaacaagttttgaagagagaaacatcaagtaagtggccacatcacaacccctac

SEQ ID NO: 183528 - DNA, 634 bp, Zea mays
  unsure (1)..(634): unsure at all n locations
  Clone ID: MRT4577_98962C.1
tccgccccgctccttgccacgcganccccaatttctccttcggatctcgcattcagcgcagcgcaggtgtgaaggaagggggacgcggaggaagatggggctcgcgttcgggaagctcttcagccggctcttcgccaagaaggagatgcggatcctcatggtcggcctcgacgccgccggtaaaaccaccatcctctacaagctcaagctcggggagatcgncacctttttttttaccagcggnnncaangnngaaaccgnngagnacaagaacannagcnncacccggcggcgangncgggggncaggacaagaacagaccncnnnggaggcannaccaccagaacacacagggncnnancnnngnngnggacagcaangaccgngaccgngnngnngaagccagagangagcnccacaggangcngaacgaggangagcnacgngangcngngcngcnngnnnnngccaacaagcaagaacnncccaangccangaangcngcngagannaccgacaagcnnggannacacncccngcgccagcgacacnggnacanccagagcacnngggccacaacnggcgagggncngnangaaggccnggaccggcngnccagcaacanngcgagcaa

SEQ ID NO: 183529 - DNA, 575 bp, Zea mays
  Clone ID: MRT4577_98963C.1
attgggtacctcgaggccggccgggataaccttttctaccaatccacactaccgcttccatgtcacatccggactgtgcgaacagacacaccaagcgtcggaaccaatggcttactaccacgaggtggactactgcctcagatgaagtgtaggtcaagtgaccaccggcctgacttcatggcgagaccgtggtgtcgtccagaaccacgacctcaaggagaagctcgaggaggccgacacggtcctcacgcgccggcaccaaacaccaccaccaccatggtgaccacgtcggacacggcttcctggtgcgcgagaacaggctcctgaggacatcaacaactgaaccggtctgttacatgagtgcacggagagcctcctactcagggttcaaatgagctcggcctctgggggtatccacgcacgttcgtgtttgcctacacgccttatgtatgccacgggttgactggttgtgcacgctcatccctcttgggtatcgtgcgtgcactcactcaggtcatgtacgaattaatcctcttcattcgggagcgtgatgaaatttcttcgtactacgaaaa

SEQ ID NO: 183530 - DNA, 341 bp, Zea mays
  Clone ID: MRT4577_98964C.1
cacatagggagcacataggtaagcatattttggggcaaaattttttactgccaaaacgggggaccataaattttagagtggtgtatgcaaaccataccccaaaaactgttcatgtactttaccaggcaaattcttcttttttaacccaaccaccccggttggttttgtttggaacagtgaactttttatcacctgaagggtggaatatttacctagggccccatcccccactggattaagagcaaggggaaacacacgcttgccatcactgtttgcgcttcccggggttagatcatggtttttgccaccattccgcccgggattattatccagcttaattt

SEQ ID NO: 183531 - DNA, 366 bp, Zea mays
  Clone ID: MRT4577_98965C.1
tcgaaacatttccagttactatagctgatcaaggagggttacgtgctttcctggagtttcggtactcaagacaaatgactggtgtggatttttgatatagtaaatatgtgtattatggttgctatttctaaaactacgtcaataattataaattaaatgagaattttcagggaaagactgaattactttatggtgtgatggagaaaacacttaacttgcttcagatgggctttaccgaggaagaggtatcatcagctattgacaattttgaccagagagcaactgttcaagagctggctgactcaattttggcaaggcgaatagccaatagcattgagcagaaagagataaaagttgaatctgact

SEQ ID NO: 183532 - DNA, 304 bp, Zea mays
  Clone ID: MRT4577_98966C.1
aaaaaaaagggcggggccccaacaagggggggggaaatttggcctgaaaagggacccccgggcccggggggcttttttttaggggcgcccaaatggccgggaaaaaaaaatttttggatgacacgcgggtttaggttggcccgttttaaaccaatggggggcgggcctgtttttgaacacccccccttggtgtttaaaacggggttataaggcggagccccccgaaaaacaaacgggttgggttgggaaaccccccccggtgttccccggttttcccaaaagggggatttactggcaaaccccc

SEQ ID NO: 183533 - DNA, 365 bp, Zea mays
  Clone ID: MRT4577_98967C.1
ggccgggccgggacttcatctcatcgagatctgccagagatactgattcctacgagctcgagaaacatgccatcgagagataagagaaggcacattattattgatccggtatgcctagcgcacggcgcggctctcccggactacatgccagtgctatcacgaagccggcgatcctggagggtgtcgatgaggtgcggcgtgaagcagcatctcagagctcatctaccaagagaccccacgagtgctcaaaatcttcctcgagaacgtcatccctaataccaaaacctacgacgggccacgtccgcctggacatcgtagccgctatggacggcgtgaacgcctatttttttttttccccccccccc

SEQ ID NO: 183534 - DNA, 407 bp, Zea mays
  Clone ID: MRT4577_98968C.1
ccggccggtatcagccccttgtatctgttatggcctgcatcttcccctgacagatcatctgcctgcctctcgctctagagacacagagaccaccccctacctagagatgcacgtattgatgactgttcttgctgtcatctcgccgctggcggtactcatggcactacacccccgccgggaccacttggtatgcggtcctaagtacacacatcatacagaagaacttgtctatgttgcacagcctgtcgtgccttcagagccctgtaactactcattaattgcgcaggtgctcgactgatccgctttccagtccgcgaatccatttcatgccaggtgcattcaagaatacggccccgcacgtgcagatgaccaatgcccattacggcactcttgcggtgcctcgtctt

SEQ ID NO: 183535 - DNA, 212 bp, Zea mays
  Clone ID: MRT4577_98969C.1
gtgaccagaatctaggctgtcactgaaatcagcagtggcataagaagtgtcatccagtgcagactgaagtcagactgcctgcgcctttcggtgtgattgagatccctcctggctcgtgcgctaggtctactgatgatcctgacagactgagatgctcgcctcagatcggtgacatcaacattttccagaatgatgttttaggaacactacag

SEQ ID NO: 183536 - DNA, 254 bp, Zea mays
  Clone ID: MRT4577_9896C.1
acggcgcaagggcggacggaccccaacatgcccacgggcaacgagcgccagggcagacgcaaagagccggagcaggcgcacaaccccgaccggcaacagagcgccaccgaccaaggccgtgccgggaaggagaacgcgaggacggaggggaaggagagcaccatcggcgacctcatcaggccggaagggagggcggagaggaagggcgaacccggcctcaagacgcgctacgacgccgagaacgccaacaccgg

SEQ ID NO: 183537 - DNA, 194 bp, Zea mays
  unsure (1)..(194): unsure at all n locations
  Clone ID: MRT4577_98970C.1
tttcagaagcgctgctgctacagcgaccgcggcagctgggggnggctccacctccatgggtgtctgccactttgcctttgcgatcttgggcggggctccctcttcccctgtggccctgcactgcttttctttctagtctgaactatagagcattctctgctctctcagcttccttggcttctgctgtctcgtgc

SEQ ID NO: 183538 - DNA, 143 bp, Zea mays
  Clone ID: MRT4577_98971C.1
aattaaaaaataaagagaataggctcaacgtatgttgaaatgaaaaattttaacgggtgggggcataaaaattcaaactatggtaaatctaaataaggggagcttttagcttaatcagattaattgaaaagattgcaatgatt

SEQ ID NO: 183539 - DNA, 209 bp, Zea mays
  Clone ID: MRT4577_98972C.1
gcgagcctgaatgcgaccgcaaggcgctagttgagccgccgtgccctgcgcacgtgtgggagggcgactaggacggcctagtccctgtcgtgctgcataggtacctagcctgcaagatcggatggatcaactaccatgaactctctggcaccggacactttctgtcgttcggtgcctgggctcggagacaacgtccttaggaccctttt

SEQ ID NO: 183540 - DNA, 400 bp, Zea mays
  Clone ID: MRT4577_98973C.1
ggccgctgcccagtgcccactgcgctccgctttaggaatctgacagagagactagagagggggaaagattcgaaggctggcatgggctccccttcctccctccccgccaacacgacactcatgctcctagccctgctctccagagcccaaagccgctaggcccaattctacacctcagacgccatcacggagaacttcaacaccatctaggccatcatgtactgggtccccttgcacaaggccctcaccacctgttacagacagcccaactgcgcctgcccttacgacaaccgtagtgcgtgcggcttcaagcacaccaaccagtaccccttcatgtccatagactcctactgaaaccatacattgttcaaggactgcaaggcatgctgctcctgctaca

SEQ ID NO: 183541 - DNA, 497 bp, Zea mays
  Clone ID: MRT4577_98974C.1
aaagaaaggccaatagattgttttttacacaatatacatatgtttctggggggctaaaaaataagttgcctttaagatccaaaccccacctaaaaggtgggctgaaaaaaaaacataggggtttttggtgcttgacacacaactcaacaaaacatgcacacgttacaagctggaaaataaaaaaaacacagccgtttgtattagatgggtttcaaaaactaaagattatttcctgcattatatactcttttatatcccagagagctaaacggggggactaaaatagagactaaactgttttagttttatcccctaaagggatgactaaacgggactaaaccatattagtgccacattttgacccttatttatttctattcgccccgtccaagagtaatggagaatgaatggcaaaggccattctagtatcctaataagaaatataatgggttgttaacacttttggtccctggcaccaaacagagactaatgaaacc

SEQ ID NO: 183542 - DNA, 360 bp, Zea mays
  Clone ID: MRT4577_98975C.1
actggtgcctcacctcgcgctcacatattgccagttactcgatacgtgatgttgctcgtacacgtgcgcttgacgcaagtatcggacgtatctactgcactactctggaccatcaattagacatgcccagtccgctaccgcggcgaggactcaacttcctttgcacaatttacatggggatgtcccttctggttcgtggtattctctgtactcatccacggatgcttcctgagtcttatttctacttctgaactcctgctgccggacgttgccatggacaacgtccatgagattggattatttatggataatatgttgtcttacgaacaaaacataagaaaggcctctatggccgccaca

SEQ ID NO: 183543 - DNA, 463 bp, Zea mays
  Clone ID: MRT4577_98976C.1
gcgttcactcgtcctgttcaacaacatctccaccctccttccaaagaccaccatgagggctccggtcctctactcgctgctcaacctcgccaacgtcatcaccgtgcctctactactctacgtccatgaacatcatccggcacacacaatttcgacagcaaggctgacaaagaaactgctgctactaccgcgtctgacgatgagcataactgtatcaacaccatatccttcgacacatactgaccactcgacatgatcgccaacaagcccaacgaacaagtcttgaacgcacaagctacgccggcgactaacactgacacatattaccacaaaccaaacggtcaataacaatctgaaactgacacaggcaacgctgctgactatgaacaagccgacagataccatgcagctctaattcctgaccacacaccctatgaatttcccataaatatgtggaagctct

SEQ ID NO: 183544 - DNA, 444 bp, Zea mays
  Clone ID: MRT4577_98977C.1
gcccaatggagccgcagtgcaacgtcggtatgttcacgcgcgccgagctgctggaggccagcgtggagcttcgtcatcacgccctcggctacgtcaagtccacggccctccggtgcgctgtcaagctcggcgtcgccaacgccatccagcgccgtggcggcagggcctccgtcgaggacctgctcaccgagctctctctggacgcaagcagactccgctgcctgcacagcgtcatgcgcgcgctcgccgcgttgggcgtcttcaaggaggggagcgacggcgagtacggcctcactgccgtttcctctctgctcgtggacgacgacagcagcgtccgagattgggcccttgctggtgtcgatggtagcgacgacgacaacaactgcagtgctcgaagaacggcgttcaagatgacgcacgggcaggacgtctgggatgtcctcg

SEQ ID NO: 183545 - DNA, 2393 bp, Zea mays
  Clone ID: MRT4577_98978C.1
ccggggccggcaactgccagttgggggttttttaggacaaagggagcaaaaagaaaaaaacgaacaccttcctgagcttaagacagcatggatcagtacgaggtgctggagcagatcggcaaaggagcatttggctctgctctgctggtcaggcacaagctggagaggaagaagtatgtgttgaaaaagatccgtcttgcgcgtcagacagaccgcactcgccggtccgcccaccaagagatgcagctcattgctaatgtgaggaatccattcattgtggagcacaaggattcatgggtggataagggttgctacgtctgcattgttatagggtactgcgagggaggagacatggctgaagctattaaaagggctaatgatacccacttttctgaggagaagctttgccagtggctagtgcagcttctcatggcccttgactatttgcatgcacatcacattcttcaccgtgatgtgaagtgctcgaatatatttctcactagggaccaaaacataagactcggtgactttggtctcgcaaaaatattgaccgccgatgatctggcatcctcgattgtaggaacaccaagttacatgtgcccagaactcctcgccgatataccttatggtaccaaatctgatatttggtcactaggatgctgcatgtatgaaatggctgcgctcaaacctgcttttagagcttttgatatgcaaaaccttatcaacaagattaccaagtcgatagtatcacctttgccaacaagatattctggtgcatttcgaagacttgttaggagcatgctacggagaagtccagagcataggcctagtgcagccgaactacttaagcatccacatctgcaaccgtacgtcctgcaactccatctgaagtcacacctttctcgcagcatagttcctgttcaccagtctccaagcgagaagaggatgacattcgccgcagagcccgtttgcaggaggaactctttaggcagcgaaaggatgatagcagcctttagcaaaccttctcctgatagaagttctgtcagctctattcggagtgtcaaggacgactacaccgccacacagagtgtcagagagctatccgttgatgacagcatggtcgaggctgctagtaaacccgtggcatcaaggacctcagatgtcatgaggactccgaaggcgactccgtggaagatgatggcgactctgaggaatcggctagaagctccacaagcatcatatgacaacgagtcatacagagttttcaagaacaccggttgacaagaggaacagccgcgtggcccgcagagcatcgcttcctctgcccgtatttgagaccccgaagcagcgcagcagcatgagcgtcctggagcagctggagtcccccgacgtctccgtgaactcgcctcgcatcgacagaatcgccgagtttccgctagcttcgtgcgaggaccccttgttctcgaccgtgaagccaccgacacccgccagcgccagcgccagcgccacgcctccgttcgtggaccggtccatcaccaaggacaagtgcacggcccagacgctccggtccgcggcccgcgacggtggcaacggcagaagcgaggacggcggcggtttgtcctcgggtcgcaccaccaccacggcagcgtcaagcggtgggacgtcggggtcgttgcagccgaaggggcggttcgacacgacgtcgtaccagcagcgcgcggaggcgctggagggcctgctggagttcagcgcgcagctgctgcagcaggagcggtacgaggagctcggggtcctgctgaggccgttcggccccgacgagatggtgtcccccagggagacggccatctggctcaccaagagcttcaaggaggcgatggccacgggcttgcagcggtggcctccttgcaccggcatggacggatcaggaattcaggatcgcccatcagccttgcaggctgtagacggccggatggcatcgccggtgctggcgtgtgtaggtcaggtaggtaggctatgagaattgagaagagagaggcgttagcgttgacggatcagttgttagttgctgggagtggacacaacaccatctcagtgttggccccccggtttattttgttactatgctagcagttcttagttagttaatggcgctctggctagctagctagtgatgtaccaatgcaacccccccccagcagaattagtagcatcagggagtagcagtagaggtagtgctggaggagtcttgagctaggaaggagaaggggattagtgagatgaaattcctatactgtgatgtagcccaaggatgtaccagtagcttcatatgcatcagtgctgactgctgaagaacattcagacatctatggattcagccattcaggccgattgac

SEQ ID NO: 183546 - DNA, 1839 bp, Zea mays
  Clone ID: MRT4577_98979C.1
cggtctgccggccgggaaggcaacaacgaatcagcccaatggagccgcagtgcaacgtcggtatgttcacgcgcgccgagctgctggaggccagcgtggagcttcgtcatcacgccctcggctacgtcaagtccacggccctccggtgcgctgtcaagctcggcgtcgccaacgccatccagcgccgtggcggcagggcctccgtcgaggacctgctcaccgagctctctctggacgcaagcagactccgctgcctgcacagcgtcatgcgcgcgctcgccgcgttgggcgtcttcaaggaggggagcgacggcgagtacggcctcactgccgtttcctctctgctcgtggacgacgacagcagcgtccgaggtagcctccggccgatcacgctcttgtacctggagcctgcattcatggcgccagtgctcaacctggcagattgggcccttgctggtgtcgatggtagcgacgacgacaacaactgcagtgctcgaggaacggcgttcaagatgacgcacggcgaggacgtctgggatgtcctcgcgcgcgacgcctttctgggcgacttcttcaacggcgcgctcgcgtcagagactcggttcctcatggacatagccatccgcggatccccccaggtgttcgagggaatagcatcgctagtggacgccggcggtggcaccggcgcagcagcccaagcggtggctgcagcattcccggacacccggtgcacggtgctggagcttccgcaggtggtagacgctgctccgattgatgggccggttcgctttgtcggaggtgacatgacgaagttcatccctcctgctgatgccgttcttctaaagaatgtgctgcatgactggagtgacaaggattgcgtgatcatcctaaagcgatgcaaggaggcgattgccgccagtggaaaagtgatcgtcatagatattgtacttgggtcatcttcccttgcaatttgcaacgagacccagctctggcttgatcttttcatgtccacggtaacgacgggcaaggagcggagggaggaagaatggtatcggctattcaaggaagctggattcagtgcgtacaagatctgcccagttctagggcttctctcggtcattgaggtttttctgtagccaccctgttcatctgggagactgggactggggctgctcatcacattttacggcattgtacgtctgttttgtaccaaaccttcttctgatttactattccctcgcgcgtagcgctcctacggactatagtgtagtatgcttcatccatgaaaccaatgtgtattgaaaacaccctacaaactacctttctaatagcaagtttaataatatagccgccagcaggcggtaagaaatccttgcaacctactttttagcttatatgcataatgattagctcttcattattaatgtatggcccacttatctctcttacaatattttcttggttctctctcatacacctcaacatttagactgcttagaacaagtataataagaggttataaatatgctaaatgctaaaatggatgagagagcgagcaaaaatagaatgtaaatttaaaactggcttcgacacaagaaccaataaatattgtgacagagataagtgggtcattcattaacagtgaagagctaaccattatataaatgagttaaaaactaggttgtaaagagtgtcagctgttgactatattattaaacttgttcttataggctcttattatatttgctctaactgtgttgttatggtcatcatgtcaagggcgaacatgtgagggacaactatgtagcatgtgtgttataaactggacaaacatgtgtt

SEQ ID NO: 183547 - DNA, 230 bp, Zea mays
  Clone ID: MRT4577_9897C.1
ccggggaacaagaacccccgggggatgagttgtaattccccaacaaatatttttttaaacaacatgggcatgggggtgggtttgttttcctaacccggttgtttgaacaaaaactgatttggaacaggagaaaaagttacttacgaggagaggaaaggaaaaagcaccggccgccttggccaaatcccccctccgggtttttcaggcgttttgtatacaaaaaaacaaac

SEQ ID NO: 183548 - DNA, 256 bp, Zea mays
  unsure (1)..(256): unsure at all n locations
  Clone ID: MRT4577_98980C.1
ttcgggatcagaatcagaccaccacacgcccgaggnccgactgcaagcgcctgagnccaagacccatggncatggncgncgncaccgtcgcagcgtnactggccgtggcgnaagggttcgggaagnccctctgcgncggnagnaacgcgccgtcgttccgggncgtcgcgggcgcgccccgtcgtcggtcggtcaggaccagnatggccgtcgtccgggcgtccgcgcaaaagcagcactcggtcaaggagtgggc

SEQ ID NO: 183549 - DNA, 652 bp, Zea mays
  Clone ID: MRT4577_98981C.1
actctcctcctcactcgtcccttgtgttcttgcatttcattctctgctccgtgccttgtcagtctcatctcccctcctgccatgagaaaagacccacctcacctttgcgtgtgattgtacaggccacctctgctctggcaaccaccaccaccacacctgatctgcactattggattgattgacttgacaatgatctaaacgatagataagaaaactactgtgatgaactgaacaaccttcccttacacgacgctggtctgctcgatcaactctgagctgaacataagaaacgcctctcctatcatattgctctaggtaaagaccaccaccacactactgtactgcacttgctttgcctgcactgcacgacttgatttcaaacataatctctgcaatctcacctcctgactggactgtgctgatcatatactccactcctccactgttggatgttaggatctcctctgctgggctgacccgagcccatgatctgctctccttgacccctgccttgaagcgaatgatatgatgctgtgatgcaacgaaatggatgactccactccactacactgcacggtatgatgtgattgtaaagggaatgtcatcccatcctacctcaggagagtacaaccctgccctgattgcattggct

SEQ ID NO: 183550 - DNA, 284 bp, Zea mays
  Clone ID: MRT4577_98982C.1
attccgtccgtgagagagagagagagagcgcgcgcgcgcggcgatgacgaagctaccagcggccggtcggccgcggttgacgctggaggactacgtcctcttcttcaccacccgcagcggtcgagaccttaccgtcgaccaactcaatcagatcctcttcatgcacggcttcaagaagttctacaactccaacaagccggtgatcgtcgacgcgctcaactcgctcgacctactacgcccgcgccgcgccacagtcagcatcaacgccgtggcgcccccgccgg

SEQ ID NO: 183551 - DNA, 324 bp, Zea mays
  Clone ID: MRT4577_98983C.1
attcggctcgagctgataccccgtgttcttttggtctgaaaagacgccagataaggaaatctctgtcgacgaaaacctgtagccatagaaagttgcttgggacggtaccggtgaggaggcccgtcttattgtgggtcacgtaaatactaacttttagatgatgttggtctatcaagagtggacgttgatgacacgcattcacctgatgcggtttaggaagtctgtagattgacacgtgaggattctgctagacttcccctgatgttgacaactgactgggaggtgcatataactgaggaccacttctctgaggtggcttaactg

SEQ ID NO: 183552 - DNA, 1052 bp, Zea mays
  unsure (1)..(1052): unsure at all n locations
  Clone ID: MRT4577_98984C.1
aactggggtctaaagctcttctccatcccctgatcagcgtccagcagaaccatcgagttcgaggaccatcctccgccgacaataaaaacatttcggtctcatctccgtccacatccgtcctccagcactccagctgcatcgacgaggaccgccgtagcgatttgcgaagcaagggacgggagaggaacccgaggaaggcgaaaatgatctaccgcaactggtcgctgctctcgtccacagtcgtcatttggggcggcgtcgccaccgccggcctcgccggtatcttcctcttgggcggcaaggagaaattcaatggttatctgtgccgcgaaggcgagaggcttaggcagcaggacagagccacgatgggccgaagctaagcgttagcttctttggtatctcaagggagcaatagcccttggaaatttcacaagattcctgcgtccctaccagaacaagtccctatctagggactaggatggaatccatccttctgcaggctttcactttcctgataataacagtaacaataaattgacaatggtttgtgttcttctgcaacctttttggctccctggtttcgcaagggttccgtgctttgtttggcgtcatcacttgcatgtcttgtataaaaaggttgctgttgcatttggcgtacgggactaaaaaaaatatctgggtcctgtctttgacacgtggccgacgattttgccacatattgtacctacccatgatgttcagtgttgcttacgcgcgaaatgtgcagcagcaaggagtcagtgttgctacagtggcaataaagtgaaatttaattgatgcccagtcactaaccaaccaaacatccactgcacgcggcccttctcttaggcctttgattatccaacatggattaggtgatgcagcttggagatcaaggtagcctcgttcttaaactcctcagtcccttgctcggagtccctgctcagcctcttgacggngacttcagggccacccaacagtgtccccttcagaacagtagtaccagagcaataactgggtgttgttggttcgtg

SEQ ID NO: 183553 - DNA, 229 bp, Zea mays
  Clone ID: MRT4577_98985C.1
aggtaataaaaataatataaaacgatgtggaatgtagaatattaaagataaatatgttgtagataaatggcaccattcacatatttattatctgaatctaaaatgtttgaatacaatgtttaaggtatgtttataccttcgccttgacaagcaataattcccgagtgatgctcttgaaattacagaatgcgacgacagtacaggaatactgttcactatttataggcac

SEQ ID NO: 183554 - DNA, 998 bp, Zea mays
  Clone ID: MRT4577_98986C.1
cattgtgttcctcgcggggccggccgggatccgtcctccagcactccagctgcatcgacgaggaccgccgtagcgatttgcgaagcaagggacgggagaggaacccgaggaaggcgaaaatgatctaccgcaactggtcgctgctctcgtccacagtcgtcatttggggcggcgtcgccaccgccggcctcgccggtatcttcctcttgggcggcaaggagaaattcaatggttatctgtgccgcgaaggcgagaggcttaggcagcaggacagagccacgatgggccgaagctaagcgttagcttctttggtatctcaagggagcaatagcccttggaaatttcacaagattcctgcgtccctaccagaacaagtccctatctaggatggaatccatccttctgcaggctttcactttcctgataataacagtaacaataaattgacaatggtttgtgttcttctgcaacctttttggctccctggtttcgcaagggttccgtgctttgtttgaagtcatcacttgcatgcgttggtataaaaaggttgctgttgcatttggcgtacgggactaaaaaaaaactgggtcctgtctttgacacgtagccgacgattttgccacatattgtacctacccatgatgttcagtgttgcttacgcgcgataaatgtgcagcagcaaggagtcagtgttgctacagtggcatttgagtgatgtgcagttactaaccaaccaatcatccactgcacgcggctcttctcgccgtggtttaggctctgtttgattatataatccagcttatggattatataagtacacctaatgacttgtttatagattatcataatctagttatctagattatataatccatctaataaaatgtattgtttgtttatctttcgacttatttaagatggattatataatttagagggcaaataaatatggccttaggctccctctaggatggattatatgatctagcttatgtatt

SEQ ID NO: 183555 - DNA, 607 bp, Zea mays
  Clone ID: MRT4577_98987C.1
gaaggcccaggtggtgcggctttttccgcgacggaacccatccacagccgcacgacctggcgcctatgtagcaaggtgggctagagataccactcgaacccagccgtcttgttctgcatgccattgcgcaccggcattaccctatcggacaaccccaacctctctccctgttcacgcacgcatacgggactcgtgaccatcccaagaaatgatatcctaagatgcttgaggaggacttagctttgaagactctaataatcattagcaacctatgaccttgagaaaagaggagctgactgctaaacttagtactgctgtgctacggacaataactgaatggactaccctgccttaaccatcgaggctgcgaagcctctcaagtcggagaaaccttgtgcctaaggtgtactttattcaagctaaaatcctctggcgtgctactgcgcttaatcatgctagtgtatggctaatacatgttgtggctctttcttgatctgcaccgcgcttataaaagcgtgtggctgccctattaattgggcttatgacgactgcctctggcatgctgcttatgttgaatgcgtcgaaacatgaagatctcacgccacag

SEQ ID NO: 183556 - DNA, 167 bp, Zea mays
  Clone ID: MRT4577_98988C.1
ttcatccaattttttcacaaccattaattccacactaatcctctcaaccttcatttcattccatacattcttaaaataaaagcgtaagtatcaaaaataactctaactactcacccccataatttcttccacaatttcttcattcaaaactttaattgaccatgacc

SEQ ID NO: 183557 - DNA, 414 bp, Zea mays
  Clone ID: MRT4577_98989C.1
ggggccacgcgttcggggacgccttggtgcgcaaccttatcttcaaccagaagcgccactgtcgcttgccaccgagcccttcgtcgttcctggccggcattgggcacctgcaccttttgaagaaaccggttcaccgaacgctgtctgctcttgcggcgcaacacgggcctgttcttctctttcgattcggcttccgccgcgttgtccacattgccgaccctgccgtcgccgcggagtgtttgagcacccacgacgttacctttgccaaccgcccgcggctttccttcgcccgctatctcttcaacgactacaccacgttgggctcgtcaagctaccggcccaactggcgcaacacttgccgcatatccaccgtcgacatcttttcctctcatagcgtgctctgctccgcggatg

SEQ ID NO: 183558 - DNA, 193 bp, Zea mays
  Clone ID: MRT4577_9898C.1
acggctaggcctgtgggagttgcttgccgaatcgagatagagcctgtcggaatcccagctacaggggggcacccccctgtcaatgctcagagtgccctgagggtgggtgtcactggcatacgcgggatcgccagaggaggttgcgtgccggttaccgagatgcggagctggaccgcccgtgcacgtcctaccc

SEQ ID NO: 183559 - DNA, 277 bp, Zea mays
  Clone ID: MRT4577_98990C.1
cagccgtctatttctgtactcggacccgacctcaatatggctttgatgtttggggccaaggaacatgggtcaccgtctcttcagcctccaccaagggctcatcggtcttccccctggcaccctcctccaagagcacctctgggggcacagcggccctgggctgcctggtcaaggactacttccccgaaccggtgacggtgtcgtggaactcaggcgccctgaccagcggcgtgcacaccttcccggctgtcctacagtcctcaggactctactccct

SEQ ID NO: 183560 - DNA, 303 bp, Zea mays
  Clone ID: MRT4577_98991C.1
ggcagcggggggggaggggggggcgcgacgacggggccagacggcgcccgcgccgcccccccacggcgacgcccacaacgagccccccctcgccccccccgacgccgcccccgacgggaaggcgacgcggccgcccttcctggccgaccgcgagcctgacgccacccgcccccggcgccccgacgggaacgcggcggagccgcgggactaccagcgaccggaggcactggagggcgaggacgcggggttcctgcgcgagctacgccggggaccaggccagttggtgcgccccggtgcacccgg

SEQ ID NO: 183561 - DNA, 186 bp, Zea mays
  Clone ID: MRT4577_98992C.1
actaaatatcacataacaatgtctctctttttagtgaacatattagtacgtgttagcgtaaacaaataaaatgatgagggaggacggcaaaatcaagaaaaacatgaggaacaaagaaaaacttgaggaataggaatttgagacattgggaatgaggcacctactgatccaaaagcgagcgctgcc

SEQ ID NO: 183562 - DNA, 263 bp, Zea mays
  Clone ID: MRT4577_98993C.1
ggtggcgccatgggagggctccggcagcacacagtgctcatctctacccagcacgacgagacagtgacgcaacgacgagattggtggtgacctggatgagcacgttatagagcccgacattgccgatcagtaccattactagaagacaatgtgccagctaaacacgtctgggcgcttcatcattggttgacctgacaggcacgcccgcgtcactggacggcagatcattcgagacacctacggtggctgctgagcccactgac

SEQ ID NO: 183563 - DNA, 573 bp, Zea mays
  unsure (1)..(573): unsure at all n locations
  Clone ID: MRT4577_98994C.1
acaaaaataaacgtaaggtatgtcacagtatgcgtaacgcatacacatacctaattctaattcttcttattatatatgtatacgtcaattgcttcttaaaaacaccatataattctaaaataaatctagaaaaaacaaacatctcccgtgacatcgaggactcagaatccaagtgaaaagttctagtcagccagctgagctacgcgttcagctcactcatatcgagctaaaagggtccattaacttcttttttttttcttccattagctaatggaggaactaaaatgtagaaatcgaagctacaccacttgcttgatgcaaacggcgtttccaggctactctagtgctgatcactgccctgatttcacaatgtttttctcacgacatatgtccagcaatgctatgctgctactccctagtcacctgaagactggactcgnntcgcgtcaagagcttgaggcaggagtagacctggtgggtgtcctcggacacgcagggagacgactcgtnacgagtgcctcgcttgcgacggaacgcagnataagntgntgctccgcttgctccccctgtccc

SEQ ID NO: 183564 - DNA, 536 bp, Zea mays
  Clone ID: MRT4577_98995C.1
aaaaaaaaaaaaaaaaaaaaaaaaaaaaaaaaaattttaaaaaaaaaaaaaacttgtacatatattcttaacttcttccttcggccaaattctggggttttgtgctccttctgtcccttttgggggggaatttgggtgtattttcgccccatgggggggggggggtgcgattttttttttttgtgggtccccttttcccttttttgggggctgtttttttaaaaccctggggcctgcctaatccctgcggatttccggaattaccccctttctccccttttttttttttgtggagggttttcctttttgccgttccgccttttgtgcaatggccccccccattggcttttcctgcaattggcctttccttttggaaaatgctccccctttgggggggttgtacgcacccccagggtttcccttttccccgccagcgcccccttacctgcccatttttctttctccctttcctttttgttcccgttcgtcgttttttccccggctgccctgattttcccgttttatttttttttggg

SEQ ID NO: 183565 - DNA, 276 bp, Zea mays
  Clone ID: MRT4577_98996C.1
gaactataatcagtgcctcttcgtccaaaaatatccttgtacctgcatctcgatgtcaccgctgttggtgggcggaatcactatggagacgtagataggacgaagacctcttccaggatgaggcaggtgaagcgattcatcgcactagtaggggtcgaatccgactcatcctcgacccagtacttcgagcacatgaccgtctccgaccacgacgtcgctcatcttctccaagtcatactgcccgtactgcaaaagagcaaacgccgggtttaaaga

SEQ ID NO: 183566 - DNA, 700 bp, Zea mays
  Clone ID: MRT4577_98997C.1
tcctcgccactcccagcagcgccccaaccgcccgcccctccgccatccctcctccccgccgggatcaaagattcaagatgtcaaacagagccacacattggtgttatgcgtgccgtcggccaattcgtcttcgtggacaagatataatctgtcccaactgcaatgatggcttcatacaagagatcagtgagacacgaggcgctttgaacaactacggtatgtttgggccacgcttcgatgatcgcctagatggacgatttggaatgatggatgctatgtctgccctcatgcgtcgccggatggcagaaatgggcagcaatcctgtgtttgatcctaatgcagcttgggcaagtactacacaaggaaggccatcccctattggccctaggctgatattcggcagcaacatgcctgctcaggggagcgacgacagcggagtaaacgtgcttgtcaggggaggccgcagaatcggcgctgaccgtccaaacttcagtggcttccttgtcggcggccccagcctggaagctctgttcgagcagttgctactgcagaccggcaaccgtcaaggaccagcgccggctccacagtccgtgatcgactccatgccggtggtgaggataacccgcaggcatctgagcgatgatccagtctgcccagtctgcacggaaagatttgaaattggctcggaggcgagggagat

SEQ ID NO: 183567 - DNA, 256 bp, Zea mays
  Clone ID: MRT4577_98998C.1
ggaccgggttctgctgcagcaaattgatgcatacaatgacttcttgaagagttttgcaaagcttgctcgctctgcttggacaagatttgatttatggtcaatgggcattgggcttttacttatgatattgtcagttatcattcaggcatccatgcttgtaaatatgaccataagccaatcttcagatcagaaaagttctggttcaagcatcattcgtagactttcccttgctttttctttagtcgtgattcgagca

SEQ ID NO: 183568 - DNA, 222 bp, Zea mays
  Clone ID: MRT4577_98999C.1
cttctatgtatgcgtttcttatgccgggagggggcccccgcctttcttcgggctgcccgcggcagttctttctcgtcggctctctcttctcccgtgctgcggcatgggttggatgtcgcgcttcgcttccatcttctccgccggtggggtgcgcctggctgccgctgtctgccgaggcctgtggacacgtttagggcgctcgtccgtggtcaccccggagcc

SEQ ID NO: 183569 - DNA, 492 bp, Zea mays
  Clone ID: MRT4577_9899C.1
tacaaccgccgcatgagccccgtcgtggccgcagggcagtggcgcaagggctgccagtggttcgacctggaccggaccctggccgccgacgtggtcgccgaccgcgtctacttcccgctcttccgccgcttctgccgccgccgccactgctacgccgacgagcactacctgcccacgctcctcaacatcgtccggcgcccgtcggcgggggccaaccggagcctcacgtgggtcgactggtcccacggcggctgtcaccccgcgcggttcacgaggatgaaggtcaccgtcgacttcctccggtggctcagggaaggcagcacgtgcacgtacaacggcaggaccaccaccgtctgcttccttttcgccaggaagttcctgccgaactcgctcaccaggttcttgaggttcgcgcccaaagtgatggggtttggttaaaaaccatcatgcatcgacgacggggtacatattttaaggatcaacatctgacgt

SEQ ID NO: 183570 - DNA, 423 bp, Zea mays
  Clone ID: MRT4577_989C.1
actcgatatccacgatcgcgttctccatcctgatcgagggcccaatgtttttcaaggccctgaccttctgcgttacatgtatgtacaactccggcctgttggatgcgagggatcagcgacgatctttgacatgtctgctctttcccttgcaactatctgcagcggctacatcgagatcgctcttgctgtctacatgctagagcctgaactagattggtacatactgcctacctgtcttttgatcgaagctgcttgcacaacagtccccacatatgcgctcgtcctggatcgaagacagaagacattgagctaaaccacggagctgattacatttttattatctaaagatgatgtaaagatcattgtagctaccctcatactcatggtgtaacatacatgttgacatgcacatcatagctcgca

SEQ ID NO: 183571 - DNA, 651 bp, Zea mays
  Clone ID: MRT4577_98C.1
cggccgggagctcaataacaacatctaattcttcttcttcatcttgtctctacttgccccgcaccgcgggagcggcgagcatctcgtcaatcccatcgactggccacaagtaccggcatggagccgtgatcgcgcgctgtcgccatctccggaatctgcatcggcgcgttcgcgacggcacgctctaggttctacatatactcagggacggctaatgacttcaaaagaaaaaaacacctctctgcgacattaaggacgtgacctacactgaagaaagaagtttgctactccgactatgctctcccattctgtgacttcgaacaacataagtgagagggcagaaaagatcggggaagatcgtcatgaaaatcgcattgaaaactctccctatacgctcgaaatgaggaagcctcacatgtggcaagcactctgcaagatatctgctcgcagagaaagaattaaagcttctcaatgagaagattgaagatgaataccgtgataacatgatacttgacaacctacctgtaatcgaccctattcaaagagtgaatgaagaaggtgcatatttctatcaacgtggattccatgttggggacaaaggaaaatattctcgtagcatagatgagaaatacttcgtccacatcatctatc

SEQ ID NO: 183572 - DNA, 373 bp, Zea mays
  Clone ID: MRT4577_99000C.1
aaggctctgaaccgacaaatttggatgtttaacagacctgtaaatggttctgtactctaaaatatagtatatagagaatacatgcatctttttatctccaacaaaagtctgtaaagaatcatctaaagtttagagcacggcatgcatccgctagaaatgaagggcgtacggtcctactctatacactggtgcttatttattgtgtttgctcattcacatgcacatgaccggtaaaaatcaatatagaatgtgaaatatggtacactattgatatagaggatgaaatttagaggacattgctggagatggagaaaatatagagaacaaaattttttagagagtgctgtaaaggactgagaatattcttttaggg

SEQ ID NO: 183573 - DNA, 2680 bp, Zea mays
  Clone ID: MRT4577_99001C.1
gcgcatacaaatctctcctgctccactcttctccacgtccatcccgcgccccgaatttcccgagccaactccgccccgccctgtcgctttcccttccacacgcgccgttcgctttgatcgatcaggcaggcatggccgacgagacgaagcaagaagccgccgccccggcggccgaggtggtcgtgacggaggaggagaagaaggcagaagagaccgccccggtggcggaggaaaaggccgtggaggcggctgtagagaaggccgcggaggcggaggcgggggccgaggaaaaggccgcggaagcggactcggaggaggagaagaaggcggaggaggccgaggaggccgccgcgggcgatgaggcggccgtgatcgatggcactgggtcgttcaaggaggagagtaacctggtgtccgagctccccgaccctgagcgcacagcgctcgcgcagctcagggagctcgtcgccaccgcgctcgctaacggggggttcaacctgccgccgcggccagcccagaaggagatggagaaggcgcagccggcgtaggtaaaagctcgggcggccccggacgaggagcccaaggcagagagggcggctgcccaagacacggtcaaggaggaggccaagctggaggagcacaatccggaggcccggaggaagacagtgccgggggggcttaaggagaagacacccgagaccgaagagaccgaccctgaggctgaggccccggagggacccccggcccactagtctgccaagggcgaggctaaggcaaaggcgaccgatggccaggcagctccagagaccaaaccatctgagccgacgtcgggcgatgaggtacagttttgcacgagaggagagggggaggggaagaaaacgaataaagcgtttcagcagacggtcgccggccccttccctgccgccgccgctgaggagcccgaggcgggcgagcccgaaggaggagctgatctggggcgtgccgctggcgggcgacgacgagcgcacggacacggtgctgctcaagttcctccgcgcgcgcgagttcaaggtgaaggaggcgatggcgatgctcaagtcggcggtgctgtggcgcaagcggttcggcatcgacgagctcctcctggacgccgacctcggcctgcgggagctggagggcgtggtgttctaccgcggcgccgaccgcgagggccacccggtctgctacaacgtgtacggcgagttccaggacaaggagctgtacgagagggccttcggcgacgaggagaagcgggagcgcttcctcaagtggcgcatccagctcctggagcgcggcatccgggagcagctcgacttctcgcccagcggcatctgctccatggtgcaggtcaccgacctcaagaactcgccgcccatgctcggcaagcaccgcgccgtcacgcgccaggctctcgccctgctacaggacaactaccccgagttcgtggccaagaaggtgttcatcaacgtgccgtggtggtatctggcggcaaacaagatgatgagcccattcctgactcagcgcaccaagagcaagttcgtcttctccagccccgccaagtcggcagagaccctcttcaggtacatcgccccggagcaagttcccgtccagttcggcggcctgtacaaggaggacgataccgagttcaccacctcggacaccgtcaccgagctcaccgtgaaaccgtcctcgaagatgaaccgtcgagatcccagccaccgagaactccaccatggtgtgggaactccgggtgctggggtgggaggtgagctacggcgccgagttcacccccgaaggtgaagagcaccagcgagtgagtgtgaggtcacgccgctagctgcctgggccctacagttaaaacgatctacaggtttgatagccgccgggcccggcattttggtttggggcgttaacaacccggctcgagtaataaggttctcatttgacggtttattttgatgaaacccaagtgagcttgtttttgtggttggagtggggacaagtaggttgggcctgtctgctgcatggcacagcccgacatatataattcgatcgatcgccaaccaggtccagtccgccaccatttgaatgaacatgctgcattgctgtgcattacatgataggagagagagagagagagagaggaataaagagtttctgcttcctagctaggcccgttccgtgtcctggtcgttctttgattatttgttggcttgctgttctttttttttcttggggggagggtcgcgtttgtatgtgtttattacttgaatgaaaacaaaagtgagcttgttatatgagatagccatggcttgttgcatgatagaagagagaaggaaccttttggtttggttcgttaatttactgggatttgctggggtttttttttttgggttcgcattctacattttgtttggttgaaaccaaagtgagcttgtttttgtgacagtagatgggagaagtataatggcattgtgtgatggatggttgttgatgagggcagggaggacgaaaatgtgggggaatgaaaggctggagaatgtctgtccctctgtagatgtgttctgtacattgcatctcttggattctcattgatatgttaaaatttaggagtacttggtcacatcattattcaatccatgttactctgcatgttcctctt

SEQ ID NO: 183574 - DNA, 490 bp, Zea mays
  Clone ID: MRT4577_99002C.1
gggtttgtttttttttttttttttttttttttttttttttttttttttttttttttttttttttttttttatttttaggatcaaatcatatcatcgggggccaattaatatttgggtaccgcagatgccatcgggtcaaccaacatgcgggggggcccccgtccctccatgagcccaaagactggcccccaacatgccggggggggtagcaaactggagaactctgtttttttttttttcacaccccccacacaatacctatgtttgggagccagctcggcctcgcttattattggtcaacccccccccccagcttgatagataataatcatatccctgggcggcgatcgatgtgatcaacaattgcaggggtcgcacttgcagttgccaccccaactgcagccgggggcgggctccccggactcccccgggggctcgacgaactcgggcgcggcctttttttccggggccacccccaggaccaccgggg

SEQ ID NO: 183575 - DNA, 2329 bp, Zea mays
  unsure (1)..(2329): unsure at all n locations
  Clone ID: MRT4577_99003C.1
ttgcagctgctctggttttggttctcttccagccagccaccgtagagcgcgcagaaaagctggcgtcagtctgacagctcagctcctcccgacctccctatatctctctgctcccccaaaccctaatccctggcataacacaacaatctctctcccctcactccctctctgcagcgcgcagctttcaaagcgttgggagagatggcagaggagacgcaaccagaggccgccgcagccgccgccgcgcccgccgcggccgaggtagtcgtgaccgaagctgcgccggcggaggcggaggtgcctgcggcggcggaagctgaagccgaggccaaggatgagaagaaaggtgacgaggcggagctcaccgccgatgacgcgggggtggggaccggctcgttcaaggaggaaagcaacctggtggaagacctgcccgacccggagaagaaggcgctcgacgagttcaagcagctgatcgctgccgccctcgccgccggtgagttcaacctgcctcccccgccgccgccgccgaaggccaaggagacgaaggtggaggaagccaaggccgaggagcccgccaaagaagagcccgcggccgaggcggaggctacggcggaggagcccaaggcccaggtggctgcggatgccccggttgaggaggtcaagacggaggtgccgccggccgaggaggccaaggctgagacactggctgaggaagccaagccttccgagcccgagccgcaggagaagaccgtcgtggtcactgaggaggagactgccaccaagacggtggaagcaatcgaggaaaccgtcgtgtccgcccccgccgccatcccggaggaagcagcggcgccagaggcggtggtcgaggctcaggcgaccgcgcctgaacccgtgctgatttggggcgtgccgctggtcggcgacgacgagcgcacggacacggttctgctcaagttcctgcgtgcgcgggagttcaaggtgaaggatgccatggcgatgctcaagtccgcggtgctgtggcgcaagcgcttcggcatcacctcgctcctcgacgccgacctcggcctgacggagctggagaacgtggtgttctaccgcggcacggaccgcgaaggccaccccgtgtgctacaacgtctacggtgagttccaggacaaggatctctacgagaaggccttcggcgacgatgagaagagggagcgcttcctcaagtggcgcatccagctgctggagcgcggcattctgtcgaagctggacttctcgcccagcggcatctgctccatggttcaggttaccgacctcaagaactcgccgcctatgctcggcaagcaccgcgccgtcacccgccaggctgtcacgctgctccaggacaactaccccgagttcgtggccaagaaggtgttcatcaacgtgccgtggtggtacctggcggcaaacaaggtgatgagcccattcctgactcagcgcaccaagagcaagatcgtcttctgcagccctggcaagtcggcggagaccctcttcagatacatcgccccggagcaagtccccgtccagttcggcggcctgtacaaggaggacgacacggagttctccacctccgacgccgtcaccgagctcaccgtgaaaccgtcctccaaggagaccgtcgagatcccagccaccgagaactccaccgtggtgtgggagctccgcgtgctggggtgggaggtgagctacggcgccgagttcacccccgacgcggagggcggctacaccgtcatcgtgcagaagacgcggaaggtccccgcccacgaggagcccatcatgaagggcagcttcaaggccacggagcccggcaagctggtgctgggcgtgaacaacccggcgtccaggaagaagaagctgctgtgccggttcaaggtgaggagcgccgccgcctgatgagggtcgttggtctgggtcccagcaggtacagcctgccagctgcttgaccaccagcccgacatgtataattcgatcgatcgccaaccaggtccataccgccaccatttgaatgaacatgctgcattgcattacatgataggagagagagagagagagagagaggacaataaagagtttctgcttcctagctaggcccgttccgtgtcctggtcgttctttgattatttgttggcttgctgttcttttttttccttggggggagggtcgcgtttgtatgtgtttattacttgaatgaaaacaaaagtgagcttgttatatgagatagccatggcttgttgaggtcnnnnnnnnnnnnnnnnnnnnnnnnnnnnnnnnnnnnnnnnnnnnnnnnnnnnnnnnnnnnnnn

SEQ ID NO: 183576 - DNA, 704 bp, Zea mays
  unsure (1)..(704): unsure at all n locations
  Clone ID: MRT4577_99004C.1
aattcggcacgaggtccacagtcgccatcgcccccacctctcgtcgtcgtctccgtgcaccactaggcccccactgccggccgcgcctcctagccacctcgtgccgctcggccaccatgcccgtcctccactgcccctatggctgccatgggcgagcgctgcccgagcagccgaccgccctttccctaccgttttcagctgccgcgcgctgcctctcctccccgccaggcctccactgcccacttctccggcggctacagcggaaggcaaggagaaggacagcgggcagcggtagctagatctagcaagcacagggcgtcttctccatgcgtccgctctcggcgcatcatcagctgaggctgagctctctcattcaccgctggctcttgctcttgtgttcataagtaacttcgcattgccttgcccccttgtcctgctccctcctcccctccggatctccccgcctgctccatttaattactgactcgtacccttccccgcattcgccttcttgtttcttccatcccacccgtatcagccaccggttcccaatgcccaggtaggcagcccagcactgtgtggtcgtctgatccgcggcggcgcgcccgtcgttacctacgcgaatggctcctccagcaggggcagggacggaggggaggccattgcancggngcggnaccggaaccagccccggccgcaccaag

SEQ ID NO: 183577 - DNA, 356 bp, Zea mays
  unsure (1)..(356): unsure at all n locations
  Clone ID: MRT4577_99005C.1
tgagagggaaaagagagaacttggagnnannaatggagtntaccgngntaatgaccgngagaatacnantggtgacctctggntcnngntccaaacccctcccctttgnttccttcaccagggcggcttgccgnctcgnctccgcccccttctccganagcgnnagcataatcntgctgtcgcgccggagccgcgactatgttgaagatggatccttgctctccgccccggngaatactggggataaggcggacgacagaatacgagaaactacgcacaacgnccagcggatgaagggcgaaggcggggcccggaagcangaagcgaacactgaaccgacaaaccaaggtaacttc

SEQ ID NO: 183578 - DNA, 431 bp, Zea mays
  unsure (1)..(431): unsure at all n locations
  Clone ID: MRT4577_99006C.1
ctttnnnnnntngctgattcnnnnnnaaaaannnnnnnnaatttgtnntttttaaagggtttttccccatcccccccgaaaaccaaagccacatttggttaaaccaaacaaaaatgaaatttgccccccaccaaacattcgactaaaaaacaattccaaaaaagaaaccgcccatggtttttcccggacaacgggcggggccccaatttaacaaaaaaacagccgtttcccaatttttcaaaatcaccaaaacccggaatccaaacctctaaaaccccccaacaaatgaaataagggaattccaaacctcaaaaaaactcttaaaaaaaccgaaatggacaaaaatcccccaaaaaaaaaaggcactattccgaaaaacaacccctggagaagcccaaaaatcccgaaaaacaggggaaaaacccgggggg

SEQ ID NO: 183579 - DNA, 255 bp, Zea mays
  Clone ID: MRT4577_99008C.1
ggtcattgcaccactctagactgagtcatattacggcagctatcgtttgctgagtctaatgatcccaagtctcacagtaagcaggtgtctgctatcagaacatttcccgcttagtcaaccaatccatccacggttctgccatcacacgggagtttctgtaagctgtgatagtcgatctgacatacattcccagcctcatgtcactacagatatcttggattcagtcatagctgattggccttgccatctccaatc

SEQ ID NO: 183580 - DNA, 403 bp, Zea mays
  Clone ID: MRT4577_99009C.1
attcggctcgaggcgagagagatagcgcacggtttttaatatggcgcgtagcatgcgcaaaatcaagcccggttgggctcatacgaaggtagtcgttgacgacaagatgctgcgtaccgggttattctacggcacgccgttggatggcgtgaagaagcaccactgcgacaccgtcgatcccttagacgctgcccggcgtgtgttcaacgcccagtacatatcggagcacgaaggaacacactaggaggggaccaacaagaacgccgaaatcgtctagaagaagcccgtcgagatgaccattagatcgctgtgcgtgacttaggtgaaccaaactgggccggaagagcagacaaaacgccggccgtaggccatggactaacccaccgacagtggacgtaaattg

SEQ ID NO: 183581 - DNA, 744 bp, Zea mays
  unsure (1)..(744): unsure at all n locations
  Clone ID: MRT4577_9900C.1
gccggccggttcagaaaaggaggacggcagctcccacacttcctccccaacctcgtacgagccggctgcgagatccaacgacctccgcacggcagttccattagagatgcctctagggaagagatccacacgactatcctagaaatccgaagggcatggaggtactgctggtaacaagttctgaatgtcattaggtctaccattgatagctactatgaattgtgctggtaacactggagccaagaacctctacatcatttctgtgaagggaatcaagggcgccttaacaggcgtccttctgcctgtgttggtgaccatggagaatggaaagcctaaccttaggaagaaggtgatgccagctgtcattgtgaggtagcgcaagccatggtgctgaaaggatgacgtctacatgtactttgaagaagcaagacaaatataaggatgctgaacctagtgcaatagatctttttaaggagatgcattgcagcaaaaagaaaggttttagcaaaaatgttcagaaagctattgttgatatggaagaaatggtggcaacatcagttcaagatggacaacaaccaaaatatcctacagaagttgtttatagtgtgcaactgggctccagtgtgttcttatgcaatcttggtctttagtccttctcccagaaatctcaacatcaatagtttctataaaggttcaancacttcaggatcgactggaggcccagaagcaagaaaagatagactt

SEQ ID NO: 183582 - DNA, 345 bp, Zea mays
  Clone ID: MRT4577_99010C.1
gctctagcctcactgcctgccagagcgcgctggggaccacgtccatgatcaagtgaaagctggagtggacgattgcgagctcgactgcggtcgcggaagatgcctgagccataactggaagctatcaggtaaagacgcatgccagaactacaacacaggtgcggtcgaatcagcgagatgcggaccaatcaagagctcaggaagacgccaaaccgcaaggtgaaggaggcgggcacatgatgctggagcacatatgatcttcggcatctacagaaaggcttctccctcatgccttagggcaaatctgacaaagccaaaaggccgaaggctatcacgctgagagcc

SEQ ID NO: 183583 - DNA, 540 bp, Zea mays
  Clone ID: MRT4577_99011C.1
tcgagccggccgggagaaattatttttcctctctcttgcgtctgtgcattatcattttgaccgcttagagacgcgcataccatcttggcgtcgagtcctggtgcaacgaactaactgaactgtggacagtagttcctcatggactagcatcgtggcttctcttcggggggcttcgctgacccctccagtggaggccgtcatgcgacggccccgtgtagtctcccgtgtcttcttggtcagccgcataagtggccgtcgcccccgctgggtggtgccatatgccatcccaacgagtggtgtaccaacaactgtgcgacaaacaaaaccgactctcctcttctactacatgaccgccttcccagacattaacagttcaaccggccaagaacttgtggcgcaccaggccctgatgactacatcaagaacgatcaggtggacgccgggatcgctcttgggttggctgtgtcctattgtgcgctctgagcgcgtcgccacgaatggctcgaggatatgttcttcatgccctctgtgacagcggta

SEQ ID NO: 183584 - DNA, 697 bp, Zea mays
  Clone ID: MRT4577_99012C.1
attgggtacctcgaggccggccgaccctacctctgcacaccaatgagagtacgtgagtggagcagccatggatgcattggtggacgccgctctgagtacattcctgggcacccgcctggcggcacccggcgccacataacgggcgtatcgcgccccggttcgtcttcgggttggttgggaaggcgaagcctgctccgaagaaggtggcgaagacatcgacctcctctaaccggccgctgtggttccccgatgccgtggagcccgattacctggacggttcgctggtcggagtactacggattcgacccgttcgttctcggcaagaccgtggagtacctgcagctcgagttggactcgctggagcagaacctggtcaagaatgaggacggcggcatcatcttcacgcggttcgagtcctccgaagtcgagtccaccccgatgcaggcctacagtgaggtgtatcttcctccagcggctccgggagtgctagctcatccacggtccgctgggtcatgctcgacaccctcgtcgccctctccgtcgagagaatcaccgcggtcacctggcaggacttctcgatcgtgtagactggaggacgcgtcctcctatctgggccagacgctgccgctgtccgtctcgacgttcatgttggatccaggtgctcgtgatcggctatatcgagttccagtgcttcgac

SEQ ID NO: 183585 - DNA, 480 bp, Zea mays
  Clone ID: MRT4577_99013C.1
gatattgagcttctccggcaattgggggattgctttgccctgtaaggcgaacccccgcaaaagataggggcgggctatggaggacgactagttcgcgacaacgctgatgggctcgcgattttggccgatgtggaggaaggaggccatgttggcgctggactctaggttcacaagcatgatgacggaccaaagaagcccgagaactccatgctatctcaaccaagaggacttggtggaggaaggaaagaaggaagagaagaaggagaaaccgagtaacatgtttgtcctgatccccgtaaaaaaacagatttgtcctcccccatctgtttctcaaaaatttttactatgcccgcctaagattgtaaaagatttgccaatgtaagtttctgatttggctcaaaaatgttgagctacttttcttatttctagaagtcccttgagaatcagtctggtcaaaaaaaaaaaaaaaaaaaaaaaaaa

SEQ ID NO: 183586 - DNA, 357 bp, Zea mays
  Clone ID: MRT4577_99014C.1
gacacaaacttaattttattgtcatgagaaatcactgcacagatcttacatcctcgctccagctactacagatcaagattcactgatctaactagccgccaccatttcatttcgcagtaaggacgagaagaaacagtgaaggcatatgagaattctcagctgctcacattcctagctggatagctcatcaaaacgggacacactgcatgctaggaacttggaacgaagcactacctgaacctgatgaggccgcactgctaaaaccggagcccctcaagacggcgacccgctggcactcagttccccggcggtgtccagctgaggtcgaggccggcgatgtcgccccacgcgcccacg

SEQ ID NO: 183587 - DNA, 970 bp, Zea mays
  Clone ID: MRT4577_99015C.1
agcagtaaacggatctagagctcaatgctcatcaccttgttttatttgatcgatcgtagaaacgtcatgaacatacagaaccattcagactaactgagatgacaagaccaagcaagagctctacgcgccctgagtgcagttcttgtagcaggtgtcctggcagtcgatcatgcagtactccacagccctgtcgtagtaattccggcagcgctgctcctcgcggtacaaaacgttgccgcaggattggcagcagctggtcgcgttggcgttgtcgcaggggcagtggccgaagccgcagccactgccggcgcaggagtcgccggggcagacatggctggtgcagctgtcgtagcacccgttgtagttggtggcgaggtcgctttcgcacttggcgatgccggcgtcgtggttggcttggcagaccgggctacattgcatggcgcagtacatgtagctgcagttattgacgggtgccggcgacggcgacggcgtgggcgttggcgcaggtgtcggcgttggtgccggcggcggcggcggcggcatgggcgcttgtactggcggtggcggtggcggcggcgacggcgacggcatgggcgctggtactggtggtggcggcggcggcgagtacaacgacgctggcaccggcgagggcggtggctgctgccccgtgtaatggcaatgcggtggaggcggcgacttgggcggctgatgtcccgccgaagagtggagcagcagcacgatgcacacggcgacgacgaccaaggcctccttaacagcgctgctagccgcagcagctgaagccatgtacgtcgttcttggacgtactaataagcaagcttattgagtctatgtcgacaagtagatttgagacagaatgtataatgaagatgggcaaacacagttcagctgacaattggagcctgcagtatcgtcatgacagaatcccggcccggccggcctcgaggtaccc

SEQ ID NO: 183588 - DNA, 640 bp, Zea mays
  Clone ID: MRT4577_99016C.1
agccactgcgggcgcaggagtcgccggggcagacatggctggtgcagctgtcgtagcacccgttgtagttggtggcgaggtcgctttcgcacttggcgatgccggcgtcgtggttggcttggcagaccgggctacattgcatggcgcagtacatgtagctgcagttattgacgggtgccggcgacggcgtgggcgtcggcgcaggtgtcggcgttggtgccggcggcggcggcggcggcatgggcgcttgtactggcggtggcggtggcggcggcgacggcgacggcatgggcgctggtactggtggtggcggcggcggcgagtacaacgacgctggcaccggcgagggcggtggctgctgccccgtgtaatggcaatgcggtggaggcggcgacttgggcggctgatgtcccgccgaagagtggagcagcagcacgatgcacacggcgacgaccaaggcctccttaacagcgctagccgcagcagccgacgccatgtacgtcgtcgttcttggacgtactaataagcaagcttgagtctatgtcgacaagtagaacaaaatgagctatagctggacagaatgtataatgaagatgggcaaacacagttcagctgacaattggagcctgcagtatcgtca

SEQ ID NO: 183589 - DNA, 449 bp, Zea mays
  Clone ID: MRT4577_99017C.1
attcttctgaggctacctgtactgctattagtcaagccaggtacaacccacgactctgtggggagttgtgttgaggtacacatggagcactgccctgttctggaagcatcttcattattcacttggtggtggataaggaattgatcgacacacacaattgaaagtaatatgagatggttctctaggtcatgctgttacagttccaatgaatttgcaccgtgatccgattgttgcagatgcacatcttgatgtgactctcgaactcctttgtaaagagcccaacacttcgctgacctacgacgaggagtgcatatgctacactgcagagtgcctgacccggctgatatgcacactcgcatagctgtacacgtggccaagatcaagcaaagggattgcaggccaggtaaacttcacggcggacatccgcgcaatggaccaccaaatgaggg

SEQ ID NO: 183590 - DNA, 367 bp, Zea mays
  Clone ID: MRT4577_99018C.1
ggcaggcccacgtttaaatttaattcaaaaaaggggaaaaaaaaaaaaaaaaaaatggaacccggacgggccaaacccaaaaaggggttttttttttttttcctttccaaaagccaaaaaaaccaactgggaggggaggctacgggggcaagcaacggatcagccccccagggaagcaaacatttattccaaggggggggacaaaaaaaaggcttaattttggaaaaaaaaggggggaaagcccccctttttaagccagggacaaaaagaaatgggagcctcccaaaagcccccctccgaaaaaaacctgagggaacgccggccaacgggggaaaccctggagggtttccctaaccccggggggggg

SEQ ID NO: 183591 - DNA, 272 bp, Zea mays
  Clone ID: MRT4577_99019C.1
gcgactaacgctacccagcgtgacctcagaacactttcccatctcttttctaatattcctcctgcatctcgcgtttcatatctgacgagctcaccatcagggagaatattgtgatccacatggggccatgaagtacacaaaggaaaatacaccccctgagggcgtgcctggcctgagcatggtacagagggtggccggcagatctcgggggacaagacctttgcgccatgtgattatacctgtaacacctttactaaacgggactggagcct

SEQ ID NO: 183592 - DNA, 3644 bp, Zea mays
  Clone ID: MRT4577_9901C.1
tcatcagcgactctggatccatagctccatcatgcagtcaacagacggcacccaaaactatttttggcacaatggtgcttgacatgatggttaattcggcacgaggcgcaaaaaggcagcaaggtttaggagatctcacccagctactaacaaaggaacaagctgacctgggggtaatctcagtgtggggaacaggcagtgaactcggtacaacatccatcatcagaaaggcctaccaggacccagaactttgtcaaaaatttgaatgtcgtggctgggtgaagcttacacaacctttcaatcctcatgagtttctccgcagtatggtcgcccagttctacgcaaacagttgcctgcaaaatggaatcgttataaatgtcgatgaactgaagaggattgaggaaatggcgacaacgggaggcggactcattggggcatttatggataaagtaaatgagaacagatacctaatcgtcctggaaaatctgtccacaattggagattgggacaccatcggaacttacctgccagacaggaagaatggcagtcgggtcattgtatccacacagcagtgtgaaattgcaagcttgtgcattgggcattcataccaagtagcagaggtgaagcagtactcagcagagcactctgtatgtgtcttcttcgaggagggattgcaaggtaatggtgataaaagcatggaatctgatagagtagtagacaacaacaatgaaatgtcaatgcaggatgaaataacccacggtactggctttctgtccgacagaattccaacatctaaacggaaggatgcctctgattgggtgaagaattttcaacttgttgaacgcaagtcagaaatgaaccaactcggtaactatattgctaaggcacgtgtctatggtttgcaaatactgtctgtgtgggggatagctggtgttgggaaatcagccctcgttaggaacatgtactttgacagaattcatcgaaatgaccaattatttgagaagtacggttgggttgatgtaacccacccattcaatttaagggacttctcccggagtttgcttttggatttccattcagaacctgttcaagccatgggaatcaaagaccctactcaagagtgtcataagattctagaagataaccggtgccttgttgttattgatgatttgcagtccattgaagaatgggacttaatacaagctgccttggtgtctagaccttctagaagtattatcattgtcattacaactgaagcaagtatcgccacatattgtgcagataatgaaggggtcgtatttaatgtcaaaggtctagaagacaaagcagccctcaagcttttcaaaaagcaggtacataggcaaaaaccatcatctcctataaaggactccatagatgaagagctacaagaacttattttgaagtgtggtggtcttccaaaagttatagttgccgtagctaactttttggcacctaaaacagtctcatggatggacagtgcaagttctatgaatctcaaatttatgcaagagctggagagcagcccagagtttgcttgcctgcagccactctttggttggctgcactcctactttcgaacatgcccggattttctcaagccatgtatcttctatctgtcaatttttcctcgagatcacagtatccggagaaggcgattggtgagacggtggattgcagagggctatgccagggacacggacaaaatttctgcagaggaaagaggggagcagttcttctgcaggctcctcgatctgagcataataatgcagaaaccatattcagtcaccaccggattcagagacagcagaatgactttgtgtcaagtcaacagttttgtccgagagtatatcatctctcgtcaaatggaagagaaccttgtatttgaactgggaggcagttgcaccctaacctctcagcgcatggggcgtcacctcatcatactgaaaagctgggacagagacagaattgtgtttgagagcattgacttctcaaggctacgatctttgacagtgtttggagaatggaagccattcttcatatctgataggatgaggttgcttcgggttctggatcttgaggatgcatctgatttaaaagatgaagacctcaaacaaatgatgaagctgctttgtcgcctcaagtatctttccctacgaggatgcactgggatctatagcctgccgaattcattaggttgcttgaggcagcttgagactctggatgtcagacatacagccatagcaaccatgccaaggactatcaccaagctaaagaagttgcagtacctccgcgctagtaccaccaaaccaactaaggaacaaccaacacccgatactgctgttacacccaaaccaacaaagaaacaaccaaatccacacacctcggtatcatggacgtcatccttgttccacagacatcgacaactagagggtgttgtggttcctactgggctagagaaattgactgcattgctcaccatcggtgttgttaatgtcaattctgctcgggggaggtccatcttgaaagaggtcaggaagctcacccaattgcgcaagcttggagtgtctggaataagtaggaacaacagcaaagatttctgtttggccatctcaagtcgtgcgcatttagactccttatcagttaagctcaagaaggacaatcaggactgcttgtgtgtcaccccagatggctaccttccccccaagaacctacagagctttaaattgtatggccttgcagacagttttccaaaatggatcaatcaacttgaaaatctcaggaagttagttttggagatgactatattaacgcaagatactatcaagggactcaaggatcttaaagtatgtattctgcgtctaattaccaagcagcttcctgatggtaagctcaatttttgtgtcatgttgcatgggcagcaattacgttgctatgaaacagtgaagatactcgagatctcttgcagctccagcttagatgtggcttttggatcacaatcactgcaaaatcttgagctgctgaaagtttcctgctgtagtggttcagggtcggtaatgaagctctctgggctagaaaaactgtctgaatctgaactcaaggaagtccagattaagggttccgatgatttcatagtaaaaacagatgtggaggaacaacttgccaggcacccaaagaaacctgttttgaagcttgaaaaggtactgtcgtccactggggattttgagctctagagtgtcagtttcctatcgttacgatatcaaggattagtgactggtgctgtttgcttcctcttatttcttcagtgctattcgatccaatctaaccgattagaaagatcagttatgcagccatcgtgccaataataaactgtgaaacctgaaagcttccttcttggccacatattgatcagtctatttttcttgtgcctgtggtttatttattcctactgcatagtcccagtctggatttgttctaaaagatatggatggtgtgcaaatgtgtttatgtatatagagaatgttggaccagtgaattgctattgtacttttctgttgctctcatgtattgtagtttcgtggtgtatcttgctacatccatgttctcttgtggttgtttgtgtgtac

SEQ ID NO: 183593 - DNA, 165 bp, Zea mays
  Clone ID: MRT4577_99020C.1
cttgtgttgttaccattttacaacttggttgttttgtccttccacagggtttacacatccgggactccaaagtggtgcgagaaaatgacggttctgcacatattattcttggagcaacgcggggacacaatcggggatgatccaacctccccgacttcgcaaaca

SEQ ID NO: 183594 - DNA, 150 bp, Zea mays
  Clone ID: MRT4577_99021C.1
ttcttttatacccgaagacgtacaaccaaaggcggaccctactttttctcagcggggcgcccactgctgaccatccatctcaattcccaactatggttacgcatctcacacaaactcatcattagtattttccgacaataccataattca

SEQ ID NO: 183595 - DNA, 640 bp, Zea mays
  Clone ID: MRT4577_99022C.1
cattgggtacctcgaggccggccgggattcccccgtgctcaggagaggacaacaatactcagtgaatcctcagtcttcaggctgatcacagctcaagccgcccagtctccgccgaggcagcctcttgtcgttcgctgctctacatcggcgtctccagagctgcccgacgtctcgtttctcccctcgggcctctccgcgatgaaggaggtgtacgcggagcagatctgcctgttcgcagcgagcaccgtgctgttctttcgatgcgtgctcagcttcagtgcacgagctgccaagggacgggtctgcaaagttgcgactgaaaagactatgacatgtgtgcagggcctcggtgaaggactcgtcgacgttattgaccgatcgtctcgcggtggatgggctcacgcagaacaccaccgttctggagcatacgcatcgcgagggcgatgaagatctactgcactatccgcgcgatacacgagcaatggagaactccccgtgagagaccccacgctttgacagtctgtcaagaagaccactcgataggtaacggagcgtcatgaccgatcattcagtacggactcttgctcagcacggtgaaggccctaccttagacaatgaactggaagatgatcatggcctg

SEQ ID NO: 183596 - DNA, 584 bp, Zea mays
  Clone ID: MRT4577_99023C.1
gacccgttttcctcattgaccccctgaagcgcctccttgatcctacgatcctcaatagctcgatgatgaacccgaacgagaacaacaaggacaaccaccagcacaaaggcgccaacgaagcggatgtcctctacaaggaggcgcaaatctaccactgccacttcagactggaaaaatggcatacggtaccacaccagcagcttcaaactcctggagagccatttgataaggagagatgactgctgtgtgattgcatatgatgtcgatgcatccaatggagttgaagagctcgacaactgtcaagaggaatctataattccagacatctgatgagacccagataatgtaggatttgtgagggctagctatgcagatctatgctaggagacgaacatactgcggcatgcacctgaaaagaatgataatgattgccgaggatatcaagcttgcatgccgtattctgagagagagggtatagagggcttaattgtagacgttgaattccaatgtaaagatgggaatgcttgctggaatgatgcagaataagatactgatctatcatctactattgattgtgcactgct

SEQ ID NO: 183597 - DNA, 351 bp, Zea mays
  Clone ID: MRT4577_99024C.1
gtctggattactggaattaatggattaacacgtgccatggcggcttcggcaaacagccaggactcaccgctgaagccactcatcatgaaattctttatttcctgtcgatatccattggaattcacacgatactgtgctgatcctttgtcaaagatcgtgatattaagctatttgcagctatcttggctggacgcctgctagcaactcgtattgaaccacctgctttcatggctacatcctcgaattacgcggatgccactattaagagggatatcgatgtagcacaggagacagcagcttgtaatccctctggggctgccaacacgactcaacatcacaccgggcatatgt

SEQ ID NO: 183598 - DNA, 830 bp, Zea mays
  unsure (1)..(830): unsure at all n locations
  Clone ID: MRT4577_99025C.1
accatcgacatctccggctcgctcgtcgccccatcccatcctccctccccccgaccgattttgacgactcctttgacctctcgcgctgtccctccccgccccgcctgcgtcgccgcgccgagctccaggcgccccccctccggtcggattccatggccaacagcaacctcccccgccggatcatcaaggagacgcagcggctgctcagcgagccagcgcccgggatcagcgcctcgccgtcggaggagaacatgcgctacttcaatgtcatggtccttggccccgcgcagtcgccctacgaaggtggagtcttcaagcttgaacttttcttacccgaggaatatccgatggctgctcctaaagttaggtttctcacaaaaatataccatcccaacattgacaagcttggtagaatatgcctcgacatcctaaaggacaagtggagtccagctcttcagatacgcactgttcttttgagcattcaggcactgctgagcgccccaaacccagatgatcctctctcagaaaacgtcgcaaaacactggaaatccaatgaagctgaagctgttgagacagcgaaggaatggactcgtatgtatgccagtggcgcatgacaagctaacgctgttatggatgtaataacaccgtgtcatagttgggcctaatcgaaaaccatttgcttgataaaaacacacttgaaatgatttgcgatggacgaatgtatccagagcggcatcatttctagttggtggttgtatttgtggtgcgtgttctggcacgcttcataacttgctgcttatagaacacgctttgtttctcgntcatcttca

SEQ ID NO: 183599 - DNA, 318 bp, Zea mays
  Clone ID: MRT4577_99026C.1
gccgggccgggatttaccaaacacactgcagagtgtcgtgtgttcaccccgaggagccgagtacgagaagcagtgaagggaaccctctcgtattctcccgacatcgatccggaaaaagggggtcgacggacgagacattcatcccctcggagggctccaacccaatgcggtggatcaacgcggcgctgcatgcgaggaacccgcaagagcttctcgatcgattactcgccgacgcccacgagagactgcgttccggggtcgaatacgccgtgagcgcgctcgagagggatagcggggacaccctaagacgcgtatccc

SEQ ID NO: 183600 - DNA, 388 bp, Zea mays
  Clone ID: MRT4577_99027C.1
tttgttttttttttgcgaaagggcgaacaaagatctattattggaagcggttaagaaaatatctttgtaaggtattgttgataaattttaaaaatcacaactagttaacatagcgctacatttgtctataaataaacaaactatttaactaagctatcttttaattatttaaacaatattgtttaataatggatagaaacataggatgatatctcccctaggctttagacaactaatttttggtcaaagggcaaacacacaccgagtggaatccatctgtttcacatttgtgaccgttgacataataaccctgatagaattttgcctgcgtaaaacaattgggcttgtatattggtttaaagtggaatgggtgggcgtgcaacatact

SEQ ID NO: 183601 - DNA, 346 bp, Zea mays
  Clone ID: MRT4577_99028C.1
cggacagcgtggggctgaaagtacttatcgattcgaacggattccaacatgggttacggatgtcggatgcagacccgcaattgctgcgatgaacctatacctctcctcagcagataatagctctaataatcgctacttctcgattatcaatcctaagaacgcactgtcagacaggaacggtgtctgtaccaaatgcagcacatgccttatgggccaatttcaaagaatacatctctcttatactcgtcacactcgagctttgccaaaacgtgcaggccacgttgcgtcttcgagctgtgtcatgcctgtgactgaagagaacgtggagagagtgctcgacgaagta

SEQ ID NO: 183602 - DNA, 275 bp, Zea mays
  unsure (1)..(275): unsure at all n locations
  Clone ID: MRT4577_99029C.1
cgggagctgcaggcacgttagttgctttgctcaccccaccttctcttctgctgctgctcggcggcggttgctgatcgcgaccatgggaccccgcgccgtcgccctagcgctcctcgcggaggcgctgatccatgccctcgcccccgcgtcggcggcggggggcctggtgcgggtcagcgctgaagaagcagccagtcgaccagaacccccacgtggtcgggggggctggcncgcaggtgggggacgggcgctcacttgccggctgcaacgtccag

SEQ ID NO: 183603 - DNA, 1581 bp, Zea mays
  Clone ID: MRT4577_9902C.1
caacatcttccccaacctcgtacgagccggctgcgagatccaacgacctccgcacggcagttccattagagatgcctctagggaagagatccacacgactatcctagaaatccgaagcggcctcctcgctcggcaaattctccgccgacgacagggagaaggtgctcactgccgttggagtacacacgacgatatctattgcacaacctacttcccagatacaggaggagggtgataaccacactgggaatcaagaaatcataccaaggtcaaatagaatgggcaggcaacttgaatcgttaagcagaggactgggaatcaagattccaacccaaatcactgaagggaacaaaagccagagccacctattcaagctactaagtttgcattagagggatggtcgccaaggccagggatttactgtcgaggtgtacaagtccatggcagtggctgtttgtgcagattagaagctgatgagggagtctcgtagcagaacttcaatgttgagatatggaaaagctacctatgtatcaagatatgtgaagactgcccgcctcaaacaagaggagtattttggtggagcgaagtttatgaagggcatggaggtactgctggtaacaagttctgaatgtcattaggtctaccattgatagctactatgaattgtgctggtaacactggagccaagaacctctacatcatttctgtgaagggaatcaagggcgccttaacaggcgtccttctgcctgtgttggtgaccatggagaatggaaagcctaaccttaggaagaaggtgatgccagctgtcattgtgaggtagcgcaagccatggtgctgaaaggatgacgtctacatgtactttgaagaagcaagacaaatataaggatgctgaacctagtgcaatagatctttttaaggagatgcattgcagcaaaaagaaaggttttagcaaaaatgttcagaaagctattgttgatatggaagaaatggtggcaacatcagttcaagatggacaacaaccaaaatatcctacagaagttgtttatagtgtgcaactgggctccagtgtgttcttatgcaatcttggtctttagtccgtctccaagaaaatctcaacatcaatagtttctataaaggttcaacaacttcaggatcgactggaggccaagaagcaagaaaaagatagactttgggaagaagtgtaaaccttaaatgctcaggcagtcatctcaggagaccattgatagtatgaagaggtcgaccgaagaaaataacaatctccttagtcaactattaagcttcaatagaggccaagtgcctccatctcaagtctacttaaccattataggatctgcagccttatggttgctatagtagctagttacaatagctctggatttgaagagtagctctggatttgaagttataggattattttcaattaagcttaatgtttaattccttgagttgaagttataggattttctttggatcttatgtaaaaggatttgtagatatatgttttgaagctatatgattcttggttggatgaaatatttgtgttaaacaaattcataagat

SEQ ID NO: 183604 - DNA, 329 bp, Zea mays
  Clone ID: MRT4577_99030C.1
gacaagctttttttttttttttttttttttttttctttttcttttttttattttttttttatgtctcctccttttttggtttgttggttgatctcttttgggtcccgccccgcccgccccccgcctggcggcccttctcgcgggggggggggggggcccccgttcggcgcctcgtgctggtggaacggcaacaattgcgggtgcgccaagaacgcaccacggctcacactagctagctggctgactggtaccagctgcggctgctgctaataagccggagagtcgactgctgccactcgcctgaatggaacaaactgctgggtgtccgc

SEQ ID NO: 183605 - DNA, 1439 bp, Zea mays
  Clone ID: MRT4577_99031C.1
ggccgggtcccagctactggtcccaagacctaccgataggaagcgccctttgacactgcaaacagcagctgcctctctcagctgcaggtgttccatcctttgaccataacctttgtggtttggtcaggctggagctcccatctgcagctgtttgtttcagctgtggtgtgtgactttagtcgggtctctgagggaccgacacagtcacacaggcggccagggccagggaggcagcttcggcgcggcgcaggccgcagcgcgcttgctatttttccgccggccccttggccctcgccttgctcctcttcttctttattatacgcgccaccacacgcatcgcgtccgcctcccaccacctcgccattctccccctcccgcgccccgagaagcgctgcgggcctcacctgcccgtcctcctgcctctcaggaaccgcggttcaggaaggaagggaaggcaagtgcctgccggggctcagcaccgatggcgtacagggcggaggacgactacgactacctcttcaaggtcgttctcatcggcgactctggcgtcggcaaatccaacctgctctccaggttcacgcgcaacgagttcagcctagagtccaagtccaccatcggggtcgagtttgctaccaggagcatcagggtcgacgacaaggtcgtcaaggcccagatctgggacactgctggccaggagaggtatcgggcaattacaagtgcgtactatagaggggctgttggagcacttgtcgtgtatgatgtgacacgccatgtgacctttgagaatgtggagaggtggttaaaggagctccgggatcacactgatgcaaacattgtcatcatgcttgttggcaacaaagctgatctgcgacaccttagagctgtatccgtggaggatgccaagggcttcgccgagagggagagcacattcttcatggagacgtccgcactggaggcgatgaacgtggagggcgccttcaccgaggtgctcacccagatctaccacgtcgtgagcaagaaggccctcgacatcggcgatgaccccgcagcgcctcccaggggccagaccatcagtgtcggcggcaaggacgatgtgtccgcagtgaagaagtctgcctgctgttcgtcttagcttggaagggggtaggacatgtacttgggttggttggttacttgtgcagtagagagcgcaggacgttatttgcagtcatggtccttgagctgtattcatgtgttaccagctgtctcgttgatttttgccatttgatacatttaattcattcaggaattcagcctgcgggtatagcttagggacatggaagtgtgcggctatcgtatttttttcatataacagagccttctctgcattgttgctttcatttcttgtgtatatctgtatgatgtcgcttctcttgaaaaaaaaaaaaaaaaaagcggcc

SEQ ID NO: 183606 - DNA, 622 bp, Zea mays
  unsure (1)..(622): unsure at all n locations
  Clone ID: MRT4577_99032C.1
gccggccgggtcgngaaacaacgaaggctgaggaccgactgagagacatcagcccgattgccccgaccccgaccaaacctcacgtggaggagccatggggacccccgagtatctctctaacgacgaaaatgccacccaactgtgtggggaacgcgcttcgctgcgcaatgcggcgaaggcgcttgacgtgagcatcgtccgccagcgcaaacacggaatgattgagtgccaggtgtacaacagcatactccgacgagcgaatcaacgacatggataagcagaatgtgaagaaactcgtcctactcgcggatatctcgtcgcccaccggccatgtgcctctccactaaggagcattacttccccctggaggttcagggaacgccggcgccattcaccaaatataaggagagactgggcaacgacatcgcaaaaggaagagtgcctcaacacagcacgtgcccaacgaccgcacgactccagcaggagcttaccgtatgaccccacgataccagtgggcgcaacaagacaacacgctgaccgcctacgagatcgactccaagagcacgcaccgcatgtgactggtgtcttgtaacggcaccagagaactagttcatctgcccat

SEQ ID NO: 183607 - DNA, 1986 bp, Zea mays
  Clone ID: MRT4577_99033C.1
cattgggtacctcgaggccggccgggacgcgtccagcgaggtagcgcggctcacctccttcccggtcccggctacccacaggccgcagtgccccgcttgctattttccgccgccaacgttctccctcctccccgccccacctccgcttcctcctacgcgccacccacacgcctcgcgtccgcctccccgcctacacctccccattctccccctcccgcgccccgagaagcgctgcaggcctcaccttcccgtcctcctgccccaggaaccgcggttcaggaaggaaggaaggaggaaaggcaagtgcctgccggtgccggggctcagcagcgcgcgatggcgtacagggcggaggacgactacgactacctcttcaaggtcgttcttatcggcgactccggcgtcggcaaatccaacctgctctccaggttcacacgcaacgagttcagcctcgagtccaagtccaccatcggggtcgagtttgccaccaggagcatcagggtcgacgacaaggtcgtcaaggcccagatctgggacaccgccggccaggagaggtatcgggcaattacaagtgcgtactatagaggggctgttggagcacttgtcgtgtatgatgtgacacgccatgtgacctttgagaatgtggagaggtggttaaaggagctccgggatcacactgatgcaaacattgtcataatgcttgttggcaacaaagctgatctgcgacaccttagagctgtatccgtggaggatgccaagggcttcgccgagagggaaaggacattcttcatggaaacatccgcactggagtccatgaatgtcgagagcgctttcaccgaggtcctaactcagatctatcgtgtggtcagcaagaaggcccttgacattggcgatgaccccgctgctccaccaagagggcaaaccatcaacgttggtggcaaggatgatgtctctgctgtgaagaagtcagggtgctgttcatcctaaatcacttatgaccatgaaaaggaaccatatactctccgatcatatgattggtaactgaaaataggactctcttgtgcttcctaacctgttggttatgagattatgttggtgctccagagaaatgattagatgttaagaatttgattccaagctgggacaagaacgttctttccgtggtgtcattgatattcatggtttctttctatggtttatagtgttccacactaattgacattagaatcctccccacacctcacagcttaacataccttgctaaacatgttgtaattggagctactgatgtttccttactgggagcaaagagtgtaactttttctttttatgtcacgagggattatgttccactcggtaaatgcccatctatcgttggtaggcagcaagtgttttagagtgttatatcatgtaattctcacagatgtacaaaatttgggttggaagtttatgttctgcaacagcttatttatcgacatgttcagacatatgcagacgtttatatttgctgttcatgatggtgaagctaatttgattttttagcttggaagggggtagaacatgtacttgggttggttggttacttgtgcagtagagagcgcaggacgttatttgcagtcatggtccttgagctgtattcatgtgttaccagctgtctcgttgatttttgccatttgatacatttaattcattcaggaattcagcctgcgggtatagcttagggacatggaagtgtgcggctatcgtatttttttcatataacagagccttctctgcattgttgctttcaaaaaaaaaaaaaaaaaaaaaaaaaaaaaaaaaaaaaaaaaaaaaaaaaaaaaaaaaaaaaaaaaaaaaaaaaaaaaaataaaaaaaaaaaaaaaaaaaaaaaaaaataaaaataaagggggggccccttttaaaggatccaaattttcctcccctggcataacaatgtatagtttttttttaggggccccaaaatta

SEQ ID NO: 183608 - DNA, 491 bp, Zea mays
  Clone ID: MRT4577_99034C.1
ataagaagagcgggaaggatctatgcagagctttgacaggagaccatgcccacaagacatcaagtgtgacgagacggcctaccttgaagccaagatcacgagctacaaccgcaggcaccacgaggtgctgcttctgtcttacagaactagcctggcgccactgagtgagtgctactacaaggctgacatgacgatctagggaacaaagagtaaagcgctgcaagcacacatactgtcgattcacctaagaggatccatgtccaccacattgttcacgaaaacagcttcatagacgaacaggatggaaggtgggtgataagaaattacctgtaccatatgcagtgaggaagacctgaactgaaatctctacctaaaccgccttcatagcaacacaaccagagctgacattacattattaatgacctctggagcacagctaaaactaaattactctacgaagggtattaatctagtggctacctgtgctcaaa

SEQ ID NO: 183609 - DNA, 391 bp, Zea mays
  Clone ID: MRT4577_99035C.1
aacgattataaagacgtagacttcagaatagtgtacagtggcataattaactcatattacatcattagtaacattgcagctaccatgtttgggtgcccgtcttctcttcacatggatttctttttacacaaaaattcggatgttatttgcaattcacatctgacacagcttgcaagcattcaaaagacattacctttattttaatgcaagaaaatcaaatgtgcatctattttagaaaagtgaaaacagcagtagccatttaccacagacaaaatcaggatgacttccctaacaaaaacattatctatgagagattcccaaatttaatatcataattcaaacaatcatgaaaactgatccacaaactaatattggaaaccggatttttcat

SEQ ID NO: 183610 - DNA, 375 bp, Zea mays
  unsure (1)..(375): unsure at all n locations
  Clone ID: MRT4577_99036C.1
gcgaagccccctctanagcagcncggacggccgccangnngaggaancngcagaancggcggagcggggncgcggccgagggacccgancgananagcngnngnaggccaaggaccagggcacagacgnnggnaannncnnnncaaggggncnnnggcnnnnngagaancacaaggaanccaacagccngccnaanangnnnnaagncggcccaggaagaaccggcanacccnncngnngcanaaaggcaccacggcncnaanncngccaanccagcnnncacacannccccgnngccaaaagaacagcacccccgncgaagaagaagaccancaaagaaccgaacagcaacaaacgaaaagaggcgagggaaca

SEQ ID NO: 183611 - DNA, 466 bp, Zea mays
  Clone ID: MRT4577_99037C.1
gctctttccatgtcaagaggtaccaactgctgcttcagatgccgcgtagccgatggctgcaacttcatgggccccctgttccatctgctcctgtacatagacgcgcgggaggtggaaaatacaaggcttgactgagggcgcgcagtacatgggcggactagctgtcaacgccgctatggttacaaaaaaagaaggggacccacctgacacgagaccgtacgaaagacatattcaattccatatgtaactgatccagggatcaagccgccgttgtatagcagataaaatgacatgagtctacaacttatcactcccctgcttaagtaatatacacaagcgtgacgactgtccgctgaactcatatgcaccgctttctgttctaggatgtatctctactttcggagctgtaggacactagatatacatactccatatggacacattgaacagcattaatgtgtgatga

SEQ ID NO: 183612 - DNA, 694 bp, Zea mays
  Clone ID: MRT4577_99038C.1
acgaagccccctccgccgtcctctgcgcccacgcgtccgaaagctagctagcgcaatgtccgccgccaccagcgtctccctcgccgtcgccgacgccgtctgggcggagatcagatccgctggccgggcatccgacgagcacctatccatcctcgagacgctgttcggaaagaacatgctgcgggcctgcaagatcgtcgacgagcgcggcgtcaggcgcgtcaccggcgcgcccagtggccgctcggtctttctggtgctgggggagtcgaagaggaaggaggagtacctatgcttcccggagcacctctgcacgtgctactcattcttctacgacgtcgtcgggcgtggcgagcagctgagctgtaagcaccagttagctgcacggcttgcagaggctgtgggagagcaccaggaggttgaagtgaaagatgaggagctcgcaaatatgcttgtaaatctatgaagcttgcacataacatttatgaattgtatcttctccttacccgaccactctgatagtctgatgcactggactggagtcacgcacacagactacaatagggacatgatgtgccggaaccatggtagaatcagctcaatatcataatcctttttgtatgcatggtccttaaaactattgatgaattgagatgactggtttgttcattcactgaaataaaaaaaaaaaaaa

SEQ ID NO: 183613 - DNA, 261 bp, Zea mays
  Clone ID: MRT4577_99039C.1
ggcactgttctagcaattgcaaccatagactgcatatgaagcctatatagtttagagaaggatgatgataccactttccacatggacttgaccggtgctccacaggcgggctagggattacagcattcctgaagttgaccaattgcagggaaacttcatcgctggaagaatcatcacagccatcggaacctcaactgcaatgggaaccggacttgtctgcctgcagctttacaaaggtcctgctggtgggcaaaaggttga

SEQ ID NO: 183614 - DNA, 459 bp, Zea mays
  Clone ID: MRT4577_9903C.1
gtagggatacagaagtggaccattgtaaggaatggaacagttaccgacgcgacaaaggtgaaccaggatatgatcctcatatataaggagatcttgaagttgatttgagaagccacgatagacacactcgaagggatgcccctgtgcatgaattgtacccatctaagatgaataagaggaaacagctcctgttcttgctgaagctgtgctatatttgacaaaagaagcggataccaaaacaagagatgtaaaagctctccaacctacatgttgccccttatacggcgagatctgcataagataatttcctaaattatatggacaatgcaccgcacgaggtgctcaacgcgattcatgaagctacagtcatgcggtcttgggcttgctgtgaataacaacttcattgcacccagcttgccaactatacaacttgaaagatctggtggactacctgaactc

SEQ ID NO: 183615 - DNA, 351 bp, Zea mays
  Clone ID: MRT4577_99040C.1
cttcctgggggggttttttgtgtgattttggggcttttttttatttgtggttttgtttttttttgtgatgacacttactgtcttgcaaaacccaaagacgagagtttttggataccattgacaatgtggggggcaagacccaccacaaggagggggtccttttttaacagcagcgtctcatcttttttggcaagcaactggaggttgttcgcaccctgtcttttgggagggtccccaaggagagcactctccacctggtgctcccccttatgtttggcacgcacatgtttgcgaagacattgggtggggggacccccccttggaggtggagagctctgaaggcagggacaa

SEQ ID NO: 183616 - DNA, 529 bp, Zea mays
  Clone ID: MRT4577_99041C.1
tccaccgcggtggcggccgccctttttttttttttgaaagaggcgcatgacgagctgttgctgctgaatgttcttgacatgaaaaaatgttgctgatcacttccttgaacaagggctaactgcatattataattccaggaaaacactaacgcttttggtacaccaagatcacagcaacatggacctggataatatctgcattccaaacaccatatcaggattataacatacactggaacaggccccttgaaacaattaccaatagttcttcaggttcacatacactacatgacaattaactacgggtacaggaccaaactaccacttgtagacatacagatgacacacacaactctagctcgaacagggagaatcccatgatacgcctacgatctcttccttatactgttccttcttgtcctccttgcgagcctgggcagctgctccaccagatgcatcagctccgacgacgtcacctacgataaccatcattgcaccaccaccgacagtaccgacgatcacctgtaac

SEQ ID NO: 183617 - DNA, 181 bp, Zea mays
  Clone ID: MRT4577_99042C.1
cgcgcaaattgcaccattaaattcatcgagaggccgtcgacagtgaagatagtttcatcgtcaagtagcaccacccacccccgactcatcctcgcaaccgtcatactgctctccgtgctcgcagctgccaacaccagcgccgacacctcctgcatgccgcggttggccatcccatacaacc

SEQ ID NO: 183618 - DNA, 296 bp, Zea mays
  Clone ID: MRT4577_99043C.1
gcaaaaaaaaaaaaaatgctgctcgtcgtgatgaacgcagtgctgttcctgctctacgggggcggggcaccagataacagcggggtccctgcgccgcaaccttatgcttgccagcggataacatcgccgaagcgttaagattgttctgatgctcgctgcgtggtgtttagtttgccagaacagtggtgtccactctacgccgaatcatggagaaactctagtgttagcaaattgtaattttagaacaagcgtagagtggagtttttaaaactctaaactggctgtctggtgaatgc

SEQ ID NO: 183619 - DNA, 421 bp, Zea mays
  Clone ID: MRT4577_99044C.1
tttttttttttttttttttgttccggggtgtgattggatcagggctgtcgtagggaggagaaagaggaggagatcggtgaggagagaagtggatttatgtcccagcgaggagacaggggcgagggccacgctaggagacccggccggtccagcagcttcggcagccaccgcggaggcgaagtcggtggcgcaggcaagggcggtgcgggctcctcaagccagcctcctctctcatccaaccgcaggtaaattactgccatatttgattctgattgccctctacctctacttcacacgattggttgatctcgccagggatgatagggttttgatgagaactttggatcttgatttcagctttagaaagcctggcaatggccacggcgggcaccaaagggtggtgaaccagcctgacaccact

SEQ ID NO: 183620 - DNA, 386 bp, Zea mays
  Clone ID: MRT4577_99045C.1
gcggccggcccgacaggctcacaacgcttttaacgccacaccgattaggcatcgctgcactctgaagtgcttctacacctacggtgtgatactaaaagtgtcctgacactcctatatgggatacgagaatgatcaaacagagagtggctctagaggctggtatgtgccactcatgacatccctctatacatcgctgtcttcatcacccgatatggatacccacgcctgagagaataatatcaccagcagaacgatctttctcaatacactcatactgcaataaatgaacaaaacctacagttatttcgcgtatcgcttctaacctacctactactgatcgctcaaccgtgatcagcctacagtcgaacgatgatcattatgctctc

SEQ ID NO: 183621 - DNA, 227 bp, Zea mays
  unsure (1)..(227): unsure at all n locations
  Clone ID: MRT4577_99046C.1
cgatcgcccaccctatcgccccnttcttcntgncngttcccgngccgnncttcgtcgacaccacacctctcgccatcgctcctcccctcggcttggtgctcgtgtgggtcgttatgtgtggcggctaggccgcgggcaagaagaaggggtcggtagccttcacgatcgactgcaacaagcccgtggaggacaagatcatggagatcgcctcgctcgagaagttcctg

SEQ ID NO: 183622 - DNA, 664 bp, Zea mays
  Clone ID: MRT4577_99047C.1
ttgggaccctcgaggccggccgggcttggtcgctgcgccgccgtctccgacatcattccttcttttccatgagcgaccggtaatccgtcgcctttgagatgatggtatgtctcgatctcctatctggatgcgagctcctgtggcattcctgcacctgctctgagctctagaacgttgtcttggtggaaggtccaggaaaagtgtatcacccttggtcctgttggtgtgtagattgctgccaatccatccgccgagggagaagaggacaaccgcgttgctgactcagctgcgacagaggccgatattgccgaatcattccgccttgaggagcaacctccttttgccaccatctcatgtgggatttacatcatgaaagacatcaagatgctcactgctgagttgcacgcacataccgcggatggattgaagaatggcgcctcggctgcaaccatgtatctccttaacatgctgtaagacctccaagtccttgtggtggggtcgatgaacgatgatgcccttgcggtattgcgctatgtacaaggatcgtccgacactaatcctatgtctcctctaatgctctcctgtgctctactggatatgtgctaagcgtgcctcttgattagttacccatggcgcaccactatctatgtcaccatcattatat

SEQ ID NO: 183623 - DNA, 684 bp, Zea mays
  Clone ID: MRT4577_99048C.1
gcacgaggcagattgtcatcctgcagtttatttacatgccggacttgataaatacggtgtcaacactactcctcaggctacccttctcacgaagaatggagatagaggctgaccacatcgggctcctgctgctcgcttctgctggttacgatccgcgtgtcgccccttcggtctatgagaagctaggaaagatcggaggagattcagcactgaataactacctctcgactcacccgtccagcaagaagagggcgcagcttctgtcgcaggccagtgtcatgaacgaggcgctgaaactgtatagggaggttagcagggaggttagtgccggccaaggcaccgaaggtttcctctagattctgggacctgctcctctgcttgtttcaaacgcctcacaaagaggttggtggtcttgttagctgcagtagtgactgcctgtggcatcggcgttctgagtggttcagaagcctggaagattaaacctcgttatttccagtcgttctgatgtcgaacggggccctcgtcgcttcccctagcggaagcaggatagctgctttgcatttgtcattaggaaaaaaaaagaaattaagcaccgtattattgtcaataattgttggttgacaccagctcctgtttcaagtgtggttttgctccaaaaaaaaaaaaaaaaaaaaaaaagtccta

SEQ ID NO: 183624 - DNA, 441 bp, Zea mays
  Clone ID: MRT4577_99049C.1
gtggagaccatgcaaaccagagggatctgattagtcatgattatacgccgcacccaggcaagagatgatgtattcttcactcaggggcaggggggtctgaagctgacccttttcaactgcatctactgcatggattatacatgggcatcgtcgcagcgagcagcccgtcccgccgctcttgaacaccgaagcttttgacttgtacataaggcagaatcctgttccaaatgcctacaccttagcaatcaacgacaaaaaaccattcattgtcgttcacacaagccttgtggagctgcttactccaagggaattgcaggctgttttggctcatgagctgggtcacctcaagtgcgatcatggtgtttggctcacttttgccaatatactcacaatgggagcatacactgtccctggcttcggcatggttgctggctttctgga

SEQ ID NO: 183625 - DNA, 721 bp, Zea mays
  unsure (1)..(721): unsure at all n locations
  Clone ID: MRT4577_9904C.1
gccgcgcgaatgactcgctccgagccttcagcggcctcctcgctcggcaaattctccgccgacgacagggagaaggtgctcactgccgttggagtacacacgacgatatctattgcacaacctacttcccagatacaggaggagggtgataaccacactgggaatcaaggcaaaaatcataccaaggtcaaatagaatgggcaggcaacttgaatcgttaagcagaggactgggaatcaagattccaacccaaatcactgaagggaacaaaagccagagccacctattcaagctactaagtttgcattagagggatggtcgccaaggccagggatttactgtcgaggtgtacaagtccatggcagtggctgtttgtgcagattagaagctgaggagggagtctcgtagcagaacttcaatgttgagatgtactgacttaactatgttcatgtagtatatcatgttactttttttattaaactagcaaaaggttgtgttaataattcatggtgtactaaatgtgataccatcttcattttgtctaattggatgattaatgccatgcacattaaagatggaaaagctacctatgtatcaagatatgtgaagactgcccgcctcaaacaagaggagtattttggtggagcgaagtttatgaaggtaaaaatacttgnttcactcaaaacctaagcattntattagcagatgaccatttaacggt

SEQ ID NO: 183626 - DNA, 378 bp, Zea mays
  Clone ID: MRT4577_99050C.1
ataaacactaattttattgcaatccttttttttaacaaacacttcaacttttccaaaaacgaaagaaaccaaaaggaaacatcggggctgctacttagtctgcacttgggtgataatcttgcggaacagtttttccttccattccaccaacaccttcaactccaacagatcaatccgtcaactttgctggccaaccctgttcattattacccggatgattatgcccatcacatcctggatcatcatcctttgttgcccagcttaaggcagcatggattatttttgtcggaccaacccaaccctgtttatttgatctccatttgttcgggctcctttaaccaacttctcaaattaacttgtaggatgttttttttcatt

SEQ ID NO: 183627 - DNA, 1689 bp, Zea mays
  Clone ID: MRT4577_99051C.1
cctcgtgtgaggctgggcaggatgctcctcttcaaaacgtacgtctccgccttcggggctttcttctgggtctcgttacttggctggacaaacacctgtggcagcggccgcgctgcttgcctcgccttgctctcggtttgtggggcatggcggcttcgccggcttgtgctccggggctcatctccggccccaccctccctcccctgcccgttgccttccgctgctactgggcccaaaagccctcctccgcgtcgacctcctccaggcgcccgtgccgcaggcggttcgttcccgttgcagctgcctccacccgcacctcctctgcggctgctcggggcctcgacgccgacgacttccgccacccgctggacaagcagaacactctgctgctgagagcaattcccgggctcaacgacgtgggcaaagctttgctaggacccgtctcggagcaagttatggtactccagaacattggaacatcagttctcgtctccccgaaccagcttccagatctccaccaactgctggttgaggctgcgaagctcttgaacaccgaagctcctgacttgtacataaggcagaatcctgttccaaatgcctacaccttagcaatcaacggcaaaaaaccattcattgtcgttcacacaagccttgtggagctgcttactccaagggaattgcaggctgttttggctcatgagctgggtcacctcaagtgcgatcatggtgtttggctcacttttgccaatatactcacaatgggagcatacactgtccctggttttggcatggttgctggcttcctggaagagcagctatacagatggctacgagctgcagagctgacttgtgacagggcagctcttcttgtggtgcaagatccgaaggtagtcatctctgttctgatgaaattggccggaggatgcccatctcttgccgacaagctaaatgtggatgccttcctggagcaagctcgttcgtacgacaaggctgcatcgaacccagttgggtggtacatccggtcagaactgttatcacttgaaccatgattcacgatattattgttgtggaaatgcatatgtgtttgtgttgtatgacatttctttctcaatctctttacatgttgcaggaatgcacaaaccagagagctttcacaccctttgcctgtgatgcgagccagagagatcgatgagtggtcaagaagccaggagtacaagaccgtaatgcaaaaaatgtttcagatggggctgaacagagtatagttagtggcgacacatacgaagaggtctgtacatggaatccatcatgtttctttgcaaggatttagctttagatcatgactgtcctttcctgtatatctgatcatgagtttgtgattttctcctgggtggctgggcaccgttttttttccaggactgtagagtctgtagcttgtgtatggaagggaatgtctgtatatggagaaggctggtgtttctggaaaaaaaacagatacaaacatagacatattgtatatatttgcagttgaatttagtctccttgtatatgatatatttttttcttttttgttactgtgtaatactgtaactagaatgaataaaagtttgtttgagtttgccggataactggaaagatcggcatggttagccaaaaaaaaaaaaaaaaaggccggcgctcgcgtctagaacg

SEQ ID NO: 183628 - DNA, 496 bp, Zea mays
  Clone ID: MRT4577_99052C.1
cccacgcgtccgcccacgcgtccgaaaaaaaaaaaaaaaaaaaaaaaaaaaaaaaaaaaaaaaaaaaaaaaagggaaaggcggtctagaggttccgggcttacattctcgtgccggcgccggcgtagctgttatttttttttaccgtgccctaatttactggccgtggtcttgctttttccccaccgtgataaccttgaccgtgccgattttaatctccttgtgggttgggccaccttttgccttttcccgttttagcgataaggcctagacccctcctctttcccatttttttcacatgctaaacgccctttgggactgcccttccccctgtgccttaaccttttacgcggagggggttgcgctttatggcaccgttacacttgcacttgccgtagccctcgcgccttccgctttctttcctttttttttctttttgtccaccggtttttccttttcccctctttatctagaactccgtttaggttttcggttcc

SEQ ID NO: 183629 - DNA, 611 bp, Zea mays
  Clone ID: MRT4577_99053C.1
gctgcttgcctcgccttgctctcggttcgtggggcatggcggcttcgccggcttgtgctccggggctcatctccggccccaccctccctcccctgcccgttgccttccgctgctactgggcccaaaagccctcctccgcgtcgacctcctccaggcgcccgtgccgcaggcggttcgttcccgttgcagctgcctccacccgcacctcctctgcggctgctcggggcctcgacgccgacgacttccgccacccgctcgacaagcagaacactcttctgctgagagcaattccagggctcaacgacgtgggcaaagctttgctaggtcgcccatcacattgttcctcagcgttgccagtccatctcaacgtagtatcctcaacgattcattcctgccatcttttgctactgcaggacccgtctcggagcaagttatggtactccagaacattggaacatcagttctcgtctccccgaaccagcttccagatctccaccaactgctggttgaggctgcgaagctcttgaacaccgaagctcctgacttgtacataaggcagaatcctgttccaaatgcctacaccttagcaatcaacggcaaaaaaccattca

SEQ ID NO: 183630 - DNA, 1371 bp, Zea mays
  Clone ID: MRT4577_99054C.1
tgattatacgccgcacccactcaacaaatgatggtaaaatgagatttttgcctgagggcagttatacattttgaactaacaaaatcaccatctctggatgcagtattcttcactcaggggcaggggggtctgaagctgacccttttcaactgcatctactgcatggattatacatgggcatcgtcgcagcgagcagcccgccccgccgtggtaggtacatgaacggaagaacacaagacgatcattatcaagatctcaaaggtctcgatcccactctcttgaacaccgaagcttttgacttgtacataaggcagaatcctgttccaaatgcctacaccttagcaatcaacgacaaaaaaccattcgtccgcgttcacacaagccttgtggagctgcttactccaagggaattgcaggctgttttggctcatgagctgggtcacctcaagtgcgatcatggtgtttggctcacttttgccaatatactcacaatgggagcatacactgtccctggtttcggcatggttgctggctttctggaagagcagctatatagatggctacgagctgcagagctgacttgtgacagggcagctcttcttgtggtgcaagatccgaagattctcctgcagccacgggatggtggcggccttcgcgcgggcagcgtggctcaaggagtaccacgagaaggtgcttgtggagatctacaggttagcatgacgctgaacattttggcctacctttcacctcttttgacgtgggacacaaaacaggtgtttgtttttgtggcagcagagtgtgagactccacaggatgcttttattcaattgtgttcaaatacggaagtggtttgattatcgtagccatatttgtattaaaactgacatctgtgaaggaaaagtcccttgggctcctcacccagaattttgtcaagctcttcttcaccatgaaggttgagacaatctcactttgacgaaggtgcaaggcttctccttggagacgaacatgtagagagcaacatgagaagttagcgcatgcattccttttgtttagttccatgtttgtgttaaatgccttttctatccaaatagaacacacaatggacacatgtaagcagatatgtactccaatctttagattttcgttgttaaaacactctatttgtttaatgatgttattgtcaattaaactaggatcagtggtcttctctataaaggtatatgttgataaaaaaaataaaacaaaagataaaacaaaaaattaaaaaaggaaggccggtctaaatagtccatcctagcttaccttcgcgtgcatgttaaggcctagctcttctgtagagttaagttaatttaattgactggccttttatat

SEQ ID NO: 183631 - DNA, 428 bp, Zea mays
  Clone ID: MRT4577_99055C.1
atgacacacatatatggtctttgtgctggactattacagaaatacttagttggcccccaccaagccaagtaaataagatgttttggtgtctaatttatggttctacatttatattgaaacgtggcggctggaaatatttgtaaaagctggtttctcaaaacgtaatacaccagaacatccacccatcatgacatgtgcctgttaactgctctgttagggtcaccacctcaatatttctgagcttgccactcagatgatagtaatgcaggtttattttctcaaaatacaccagaacattcatacatcatcccatgtgcctgttacctgttctgttgtatgttgccaccacaatatttctgagcttgacactgaaatggtagcaaagcgtgtttgctttctcaaacgcaatacaccagaacatacataca

SEQ ID NO: 183632 - DNA, 632 bp, Zea mays
  unsure (1)..(632): unsure at all n locations
  Clone ID: MRT4577_99056C.1
ccggtttcgacccacgcgttttgggggnacttgnntccaccggtccctagcgccgtggctcgggggactnngtgccgaccaccgagcactatgacgctcgggngacctggtcgaccagctttcaccaatttaangaacttnggnnggactgcacnncgaccaccgagnncactatacgcnntcggggaatgtgtcgaccagcccccaccaatttgagaattcgggggactgtacnncgaccaccgagcgttatatgctncggatactggntcgattagtctattcaattgcagacgagcttgatatgctcggggactggtaaattcaattttttagaccttgctacaaggctcatacttcgccttccagcaagctcggggactacatcggtacgatgcatctggcgatgcatctcagtttcagaatttctttgaggacttttcttttgaccctggcaccacgtgcctacgtcacctactaccaggctctttttctaagngggcacacttcacctttcggngaatatgcttgctttttttaagtctatactttttagaaaagtaaagtgggcacacttcaccaggaaaaaattttttttagagcaccatgcattctttcgaacaacctgcttc

SEQ ID NO: 183633 - DNA, 161 bp, Zea mays
  Clone ID: MRT4577_99057C.1
cgtccgcggacagcgtggggactttgcatcccttatagagaggttttctcattttagttagactctttggcgatgggtgaggtgatgaggcagggttctatagacgcagtaatactacctctcagagataaaagagattacccttctcgttagagaaaagc

SEQ ID NO: 183634 - DNA, 409 bp, Zea mays
  Clone ID: MRT4577_99058C.1
acgcatccgattctaaatcgcggttcactcactattgcttggtatgtttatgcaaatatgggtttcggaaatcctctggcaactgttacagaaggagtgctccagcacatccaaagctcgctgtttccttcccatttaacgaagctcccgtaaagctccacttaggccggattgtcatcaatggctatatttatgacagggatcgtgccagctacactgggactgtagaaggcataaggccacagacagtcgcgatcggttcaaggctccagtcgtccgcacagggctacgccgatcgatgtcacattacactgtcaaccgatcgtatagacgactggtcattctacggtagttaccaagttactaattacccgcatgagtcttcaactgtcgatgatggactcgccga

SEQ ID NO: 183635 - DNA, 1187 bp, Zea mays
  Clone ID: MRT4577_99059C.1
tcgtcggccagcagctcaggtttccggactgccccggcacgagcaacgcgagcagggacctgatcagaggcctgctggccaaggagccccagagccggctgggcgtgaagaggggcgccgcggagataaagcagcaccccttctttgagggcgtcaactgggcgcttatccgctgcagcactccccccggcgtgccccgggccgtcgagcccgtggcggtggcgccgcccgcgccaaacaagccagcgccggtggagagggtggagatcaacagcagcagcagcagcaagaggatggagatcaacagcagcagcaagaggatggcaggaaccggttctgagtccggggggaagttcctagacttcgaattcttttagctagttttgagttaacgatacttgttgcagttccagacgaattgtaggtgtagttccatactggagtgctagcgtttggcatgtctgaccggtcccaagtctgttgcttgttgagagttgcggctcatcccatgtcactagacagtagacactagtagttacttagtcaaagagtaagccatgaagtttgagtagtcgaaggaacgatttgtcatcatgtctgtttccattacaagttatatagccttatcagatttttttttactacatgatcagcaacgaaatacaccatgtagtttgcctaagcattctgtactgtaccaaaatgtgaatgtccccataatatgaagtggaacagatgaagatacagagttaccgaccacctcaataaacatacgctatacgttagtatacggtgcactacacgaccaggttttctgctgcgccgatgaggcccatgccggcggcggggctccggtgccgcatgagcacgcgcagctgcgcccgctggcactcgaggttggacaccagatccacccgctcctcgcgcgggcgcgggcgcaggcgcaggcgcgcggccctggggaactccacgaaccccttgatccccctccggatgtgcgggttctcgccgccgccgccgggctctcgccggtgcggcttaccgtgctgcgggctctgttgcccgccgtgctggctcgccgacttgctgccgttggggctgctgcagcagctgctcttgttggcgtcggcagtggcctggagctgtgccacggcgtcgtcgatcttccgcagcttctcgttcagcgc

SEQ ID NO: 183636 - DNA, 296 bp, Zea mays
  Clone ID: MRT4577_9905C.1
gcgcctcgggtgtttgaacaagttcggctatccggttgatgtggaggcaatctatgtgtctactgatctagctgttcgtgtctctgcctagtacagagggatctctggtaagtgctgtacagtcggtgattctcttctacgcatactggaagacttggatgcccgttagctctatattgatatgatgctcttcaatgattagttgctcctggatggggatgtcactctgcattcagtacaatgtctctctgaacgtactaggcctgtctacatgcgcagctcttgtgtcagtagtc

SEQ ID NO: 183637 - DNA, 547 bp, Zea mays
  Clone ID: MRT4577_99060C.1
tttttaaaattcttttttttttttttttttttttttttttttttttttttttcttttttttttttttttttttggcgagcaactcccaacccatgtttaaaagagccccaacaacctacaataagcccgggttcttaaacttgggacaaaaccacgggacttattacttttttcttaccacccaacccccattttttatttcaccactttctttaaaagggaagaaccgcccatggctcccgttcctcctaaaaacctgggggggggggacccctaccccctaataaaacatcctgggccaaaaccaagggaatgtggacccggaaccaaggggcatgcccattttctttaatggggcaaggccttcttccctgcgataagggtaaaaaaaaaccttcagggattaaaacgccgcccgccccttcaaaaagaacttggaccggctgaaaacccgggggtcacgaaagaaaaaaaaaattccccaaagttaaaagggggccccgcccccggaaagatgttggttttgaaaacaaacccccaaagtggg

SEQ ID NO: 183638 - DNA, 649 bp, Zea mays
  unsure (1)..(649): unsure at all n locations
  Clone ID: MRT4577_99061C.1
caaatacccggtgccggtgtttgatcaactcatggatgaactgtcacactcaagctggtttagtaaattggatctcanggcgggataccatcaaattttttgcaaaatggtgaagaatataaaccagcgttccaaacgcacatgggtcgctatgaattccgtgttatggcatttggcctcactggtgctccaaatacatttttagaagctatgaatgaaacacttaagccagttttccggcgttgtgccctggttttctttgatgacatcctaatatatagcaagtcatttgaggaacatctccttcatttgtctgaagttctgcagttgctgttgcaagatcattggaaagttaaactcaccaaatgtgactttgctaagcaacaaatctcgtatttgggccatgttataagtgttgagggtgtatcaacggatccagaaaaggtttgagctgtggagcaatggcctacaccgacaaatgccaagcaattgcgtagttttttgggcttagccggtttctaccgaaaatttgtgaaacattttggtataatcagtcgacctctgtttaatctgctaaaaaagaacccatctttgtctggaccttggatcatcaacaggcttttaactccctcaaaattgctttaatcac

SEQ ID NO: 183639 - DNA, 177 bp, Zea mays
  Clone ID: MRT4577_99062C.1
acacgctttattttgtagtctggttctattgtatgcctaatttggtgggtctactactatgtctactttatgtgcctaatggttgaagtattttgggagtcactttgcttgcgaaggtggcgtaagattgtgggggggggggggggtttttgtttggtttggtagggcggttggttg

SEQ ID NO: 183640 - DNA, 335 bp, Zea mays
  unsure (1)..(335): unsure at all n locations
  Clone ID: MRT4577_99063C.1
cacattaccttacaccgcaacccaattactcctctggatctcaaatatcttggcggctgacncnacancnacaacatccaanaactcgctcgcgcgcacggacagtaccggaacccagggatcgagactgaacagcagtcctacactccatgaacttagaagatacaggtccggaggctcaataaggagatccatatgctcggtcagcagcagcccaatggctcttacaatgtcaaaattggcgttctatttaacaacaatcggtgtgcaaatatctttgaagcactaattcgcaccttgtagcccgccaagaacaagaagatcttgacctacta

SEQ ID NO: 183641 - DNA, 215 bp, Zea mays
  Clone ID: MRT4577_99064C.1
tgcttgtatatctagaactcgccgaattgggaaaggttttttaatacaggtcgagtggttcaaacagccttgtggttccatcaacatatttttattgtttttagcaaaatgtcaaggccggctaacaccatttactgtgctcttacgacctcggatttgcgtcgaccagcgttagtctcatgaaggggtggatcttcaaagcttgctggagcaat

SEQ ID NO: 183642 - DNA, 499 bp, Zea mays
  Clone ID: MRT4577_99065C.1
gggggggcaaaaaattttcgggttttttagggggaaattttaaaccccggtttttttttgggggtgggttgggggggtccccacggggaaaaaaaaacgggggagggacagggggggggaaaacaaaatggaaatggggggtggcccccccaaaattcccccaaaagcatgcattttggggggggaacggggccccttttttaaaaaaaaaaaaaacaattaaccccttaaaaagggggaaaaaaagaccgggggtaataattattcctggacaaaggggggggagtcaaccccggggatttatttggccgggaaaaattttttggccaacaatttcctgccggaatttttggggatccccatggaaaaggggccccggggggggggggggggggcaaccctccaaagggggccccaaaaattgggcaggggctcccagggggcggagtttttttgaaaaatttccccctgcaccaaggccccccccttgtttttgggc

SEQ ID NO: 183643 - DNA, 588 bp, Zea mays
  Clone ID: MRT4577_99066C.1
ggccgcttttttttttttttttttggactatcaacacgactgacacgcgaatgccagataaccgcgcagcccaatacatcagaatggcatgacgagtctgaacactcaatgacacacaatctatattcatggaaccgagccgacacacaattgcgcgtctcatattgaataaaatccgaggcacccgccgattcattatgaaaagcctgaccctgacaagccaacggcatgctggtcctgatgagacgaacccatccatttgctcatgaggagagcctaacgggaagggtgcatgatggcgtgctaacatgcaatgaaagagcgaaccatagacggcatgcgatgagacctgaggttgaggagagtgactctggctgccgagacatctgaaacaccagcaaacacagctaggccttgcacaaatgaggcctgtataggagcacctatccttaaaaggaccagaatgctcaaaacatggtgtgctatatactgcgcaaaagagtgaaccgctgagactaagactgcactcgcgagggacaaaggaccctcaatgcagaagccagtagcaccaaccgcgggtgatgcatt

SEQ ID NO: 183644 - DNA, 905 bp, Zea mays
  unsure (1)..(905): unsure at all n locations
  Clone ID: MRT4577_99067C.1
gactagttctagatcgaggaacagctcaagttgttccgtgggatatttaagaagcatnnttagagttggaaaagcacatagaagccagagcattttcaatgtatctttgcatgatagctaaaaaaggtgtgaagttggcttccagagtcatggacagtgcagctttaagacttgataagcaggatgaaatttgttcatgtacaacaaaacagacccttgcgatgtatgtatccatctttgttaagctagcaaaggatgcacatgataagaagttcaatgatgagtctgttttgtcacttcttggcgcttttaggggtgtggctgcagtaggccacatcatgcttcaggatgccatggcaaatggtaactatgttggatatagctaccgtttagtgctggacgtagactacacttggtgtgagtttggacagaatatgaacaatttggaagagaaattcaaggctgtttcaaagagtactaaggcatatgagatcctaaggtctacaatgaccgatgcaatgatacttacagtattctttatctccgcggtggttgctagacacgaaaggctactacgttatgtcccaggtaccaaggggaggcgtaccatcaacccttcagatgacggggaacccggcgcttcaggtacggcgcttcaggaatagaagtcgtcgtgccttttgtacggacagacgtgtgtgttttgttgctaatcaccggctggtttttcacttctacacgtgtgatttttcacgcgttacagttttgccgaagaaaatcttttatgcaacttgtttggtgaattttttttctcgaatatgtaaaaggcttgcgaatctttatattaaatagggaaggttcttacagagacgcaggccgggggccggaaagggcctaattaagtt

SEQ ID NO: 183645 - DNA, 278 bp, Zea mays
  Clone ID: MRT4577_99068C.1
ggccacaggaagtgttcacacttaagattgccacctactatccctagttgtgatttaggtttctcttgatgagatctcttgagtccagtattataaaacagagagtgggctagcggagttcagtgtcagtgtgagtgagtgtcagtgtaattccacatcctccgaatgtggacagtccaatcaccagctccttttttcctccccggctttcttacaggcttgactgttgtaatgacgggtgctcagattccatggtagggcacaatgaagaggcatct

SEQ ID NO: 183646 - DNA, 259 bp, Zea mays
  Clone ID: MRT4577_99069C.1
atattatcgtattttttttttctatcctatcaagaaggaatttaggccttgtccttttaaaaacagttgcaatgtatgatagcccctatacatgaggaggaaggtgacacaccccgggtgaaatagaccaaaagaggccttctagaaaatgaaagtccaccccggggtcaatagctgtaggcgaatataaggagaaacacaaattaaagggcctaacaggaatacacaatacttaaaggcccccgggtgaagggagtaa

SEQ ID NO: 183647 - DNA, 160 bp, Zea mays
  Clone ID: MRT4577_9906C.1
gaacacctatggcgctactttcattggcaacaacaaactaaggacggggaatgaacagtccaaaacggggcgcatggcatgcaaacgaccggaccgggcctatatagcaaaaactgacgtgcagagtgagatatcttaaacaggcggccacttgatccgg

SEQ ID NO: 183648 - DNA, 894 bp, Zea mays
  Clone ID: MRT4577_99070C.1
aattcggcacgagggtccaccatgcctcctcccatcctcctgcccccgatcttcctcctcttcctcgtcgcccctttggcggcgccgcagcccgcgccgggatcggcggcggcgccgcaggaggacgacctgcgctgcctccgaggcgttaagcacgacctcgccgaccccaacgagcgtctcgcagactgggacttcaagaacacctcgggcggcgctgtctgcaattacaacggcatcggctgctggaacctgcaggagtcccgcgtcctctcgctctcgctctccgggttcggcctcgtcggctccatcccctcctcgctccagtactgccgcgccgccaccacgctcgacctctccagcaacgcgctcgtcggcacaatcctgccagccctctgcgactggctccccttcctcgtcaccctcgacctctcctccaaccagctcaatggcccaattcccgccgagctcgccaactgccgcttcctcaactcgctcaggctctccgggaaccagctctccggccagatccccgcctccctcgcgcggctcgaccgactcaagtcgctcgacctctcggggaacaagctcgacggccagatcccgtcccagctcggcgacaacttccccatggactccttctccgggaactcgggcctctgcggccgccccgtatcctctcgctgcggccgcgggctggggagcaccggccttggcatcgtcatagccgcgggagtcttcggcgccgccgcctcgttgctcctcgcctacttcttctggcggtgcaccgggaagggcaaaggaggccgccgccgccacaggcgcggcaccagcgagtcgggcggtggggaagacggcagctggtggaccgagaggctgcgggcggcgcacaac

SEQ ID NO: 183649 - DNA, 218 bp, Zea mays
  Clone ID: MRT4577_99071C.1
gttgaggtcaacaattgtcagtttcagcaccctgcaggaactgccaacttcagaacacaagattacagaaccctaaggttacgggggaccacctgacagttcttccaaggttgggaaatccatcaccacgggggggcgcaaaccctagccctggacgttgtaagcacagcttaaagactcttggcttttgacacatatcggacaggagatatggctat

SEQ ID NO: 183650 - DNA, 269 bp, Zea mays
  unsure (1)..(269): unsure at all n locations
  Clone ID: MRT4577_99072C.1
ggttctgatgttttccggggaacggcttcgaggaaggtgttgtggttatggaggcgtagggtggtgaccacccctgcttagtcggaggactcgcctgggtcacggccgaccaatccgtggacaacgccttcaagaacctacggagaggttctcgagtccaagagcatcctnnntcgggagacgcataggtcctgaggaatacgattggtcaccttntncactgaagaggcgatgcggaacaccatcgagggcatgaacggacaaggagc

SEQ ID NO: 183651 - DNA, 132 bp, Zea mays
  Clone ID: MRT4577_99073C.1
cccacgcttccgctgaaaaagaaggctaccgactgaccggtactacacacacaagaaattcggcttctggagactagtgctgcacaaggagcgtctatcttctgccaccaccccgaggaaatgcatctgcca

SEQ ID NO: 183652 - DNA, 240 bp, Zea mays
  unsure (1)..(240): unsure at all n locations
  Clone ID: MRT4577_99074C.1
aaatatttttttcttctaaattttgtttaattccatcaatccatctattatacgaataacctaacaagacctaaaactacaggactctttataagtattatcctacagaaataaacctaaatgttcataccancccgtgtgtggaaaannnaactttatcttcaaaacaaaatanttatatttccttctnctananaaatcatncctncaccaatncactcatncanatattttcttcat

SEQ ID NO: 183653 - DNA, 216 bp, Zea mays
  Clone ID: MRT4577_99075C.1
agctgctcttaatcaacttttttccagcctttgcctccaccacatcacacggggtactctgggtgctcttcttgtaccacaggtctctcctaataacactatacccaacaactccatacatcccttcgaccactacgacgactaccagcactactggatatgctaaataaatagtcgacaaatagagcaatagcgcatacgcatactcatgcactg

SEQ ID NO: 183654 - DNA, 222 bp, Zea mays
  Clone ID: MRT4577_99076C.1
gaaactgcttgagggtcgcctgaaacatcactttgtaacatgaacttgtgtggactccggccagacctatctgatggatctaacacccagaacgggtgtgacgttgttagagctaaattctgtttggaaaatgatcgttttccactcgtgctcatcttgtatggtttcatacgacgccatgatgaagagatcgagcaacacctgcttgtatacatgctttcg

SEQ ID NO: 183655 - DNA, 335 bp, Zea mays
  unsure (1)..(335): unsure at all n locations
  Clone ID: MRT4577_99077C.1
ctcagcccctccaatactcttgctcccaaacagnaccttaattataattatacttgggggtatcccacgaacaccatcgtccacgacaagacattccggggcggcatactgtcgaacaactcaataagagttttcatgcagatggcatacgcatgctgccgctgctacctttgaaaagggatcattgggtctgcacaagcgctcaccccaccaatatggcatatgtagagtcagttattttaaattcactaatcatttacaattgtcgagggacaacacatgtagatgcctattacatgtgtctagtactggttccgttaaataggtctcatgta

SEQ ID NO: 183656 - DNA, 548 bp, Zea mays
  Clone ID: MRT4577_99078C.1
tggttttttttttttttttttttttttttttttttttttttttttttttttttttttttttggggggggcaaaaaaaccacatttttttggccaacattttttgggggaccccccgaggacaaaaaaaacccctgtttttggttgtttgggggggacccggcctgtttaccaggcttggaaaaaccaggacaaaccatttttgttcttttgggggggggggccctgggaccaattttttgcggcccccttaactttggggccctcatccccccatctttatgggggggcctgccctcctttgtggggggggggccctcctttcccagtggacccatcccaaaaatcgtttccgtccttgtttcccttataatcccgaggggaatttttttttaagggggcctcctttccttttccaaaaaaaaaaaccgggacaagtttcctttgaacccggtgccaccatggagaaggggttttttcctgtgaaaaacctcgaaaaaaaggaccccaaaccggaaaccgccctttttttctttaagtgggcctgggg

SEQ ID NO: 183657 - DNA, 548 bp, Zea mays
  Clone ID: MRT4577_99079C.1
atcgagagagaaatttttttgaagcattcagctaatgatagataatatgctaattgacatgtgcatatctgatttcctataacgccctccgactcccccaacttattgaatcaatttagtaatggtacagcaaggccatttgttttctcttgtttggccatgaattcattctgtacattgccctcttaaaaacggaaatgcttccatctttttcagcttgttttaaatggtagtgttggtggcatcatcgctcacccattcatcgttcagggccttaatagcaggtatatagtaacgcagggaaagtgacataggaaaaaaagtaatttcaatcaaggtgtggcctgtttatttgtcggctggttctgcctaataggcaggagccggggtagagtcctgagcctcttcagcctataacaagcccctcttctcctcctaagcggaggggaactggccagagttgcgtcggtggtgagggcaccatgagcggcgctgagctacaccacggacgaacatgctaatacggtagacgacgctgcacaagaaca

SEQ ID NO: 183658 - DNA, 1039 bp, Zea mays
  Clone ID: MRT4577_9907C.1
ggattaaatcatccgtcatgtcttgcactttgcggaaccgggaggagagcaaggcgtgcgacgtttttcctgccgattggctctcgtcgtatgccgtcgctgcattaggatctggatgaggtaggtgaggtagaggaggccacaacatgggccgaggcggtgctactcctcatcatgtgcggcgatcaccacgcatctggcgagggcatcaaggatgtgctttcagtctttcacccaggagcttggcgatgactgtcagaagcaagaaaaatataaggatgctgaacctagtggaatagatcttttaaaggagatgcattgcaacaaaaagaaaggttttagtgaaaatgttgagaaagctattgttgatatggaagaaatggtggtaacattcagttcaagatggacaacaaccaaaatatcctacagaagttgtttatagtgtgcaactgggctccagtgtgttcttatgcaatcttggtctttagtccgtctccaagaaaatctcaacatcaatagtttctataaaggttcaacaacttcaggatcgactggaggccaagaagcaagaaaaagatagactttgggaagaagtgtaaaccttaaatgctcaggcagtcatctcaggagaccattgatagtatgaagaggtcgaccgaagaaaataacaatctccttagtcaactgttaagcttcaatagaggccaagtgcctccatctcaagtctacttaaccattttaggatctgcagccttatggttgctatagtagctagttacaatagctctggatttgaagagtagctctggatttgaagttataggattattttcaattaagcctaatgtttaattccctgagttgaagttataggattttctttggatcctatgtaaaaggatttgtagatatatgttttgaagttatatgattctttgttggatgaaatatttgtgttaaacaaattcataagatattttggttgtgatgtgtaatattctacgacgatatgaatttatatgacatcttccttctgatg

SEQ ID NO: 183659 - DNA, 715 bp, Zea mays
  Clone ID: MRT4577_99080C.1
agccaccttatggccgagtctatttctgagctacagaagaaggagaggtcactgcaggaggagaacaaggctctgcagaaggaacttgcggagaggcagaaggccgtcgcgagccggcagcagcaggtgcagtgggaccagcagacacatgcccaggcccagacaagctcatcatcgtcctccttcatgatgaggcaggatcagcagggattgccgcctccacacaacatctgcttcccgccgttgacaatgggagatagaggtgaagagctggctgcggcggcgcagcagcagccactgccggggcaggcgcaaccgcagctccgcatcgcaggtctgccaccatggatgctgagccacctcaatgcataaggagagggtcgatggatcatgacgtacgcgtaccatatggttgctgtgcctgcccccatcgatcgcgagcaatggcacgctcatgcaagtgatcattgctccctgttggttaaaccctagcctatgttcatggcgtcagcaactaagctaaactattgttatgtttgcaagaaagggtaaacccgctagctgtgtaatcttgtccagctaccatgtatgcttgttactgcccagttacccttgaatctaggggcgcttttggtgagagggtgcagtttactttaaacatggttcgtgacttgctgtaaatagtagtattaatcgatttgggcatctagtaagt

SEQ ID NO: 183660 - DNA, 935 bp, Zea mays
  Clone ID: MRT4577_99081C.1
ctcactactactactagctactcatcgaccaatctccacgtgcatcgttccacagcttgcagcgcggcttgttgacagttgacacacacacacacacagagagagagagagagagagagagagagaaaagtcaattgagagggacgacagagtgagttagcttgcattggacagagagagccaaaccagaaccaaaagcaagcaaggagagattgttacttaatggagcgcgtgatgaagatcgcgtcggagcgcgcggtggtggtgttcactctgagcagctgctgcatgtgccacacggtgacgaggctgatggcggacctgggcgtgaacgcgctggtgcacgagctggacagcgaccccaggggcaaggacatggagcgcgcgctgctcaagatgctgggagggaggggccccgccgtccccgccgtcttcatcggcggcaagcttgtcggcggaactaacagggtcatgtcgctccacctcgccggcgagctcgtgcccatgctcaagagcgccggtgcgctctggttgtagagagagacctgctagctgctgatcatgcatggcgcgggcggcagcctatgcgtgcactgcacctttgtgtgcgtgcatgcatggctactgtgcgtatgcatgcatgcgcgcgagcgcgggaaaaaataaataaagacactaaaccaagggcaggcacaggcaggttagtacttagtagtgtgtgtaccggtcaaagacaggttttttcccgtcctgttcttctgaattctgacagcaacaataagcaaactgtggcttgctagcttcatgcatgcggcttagcttgtataggagttagtgagcgatctagagagatggcggcctaggtatatcaatatatgtatgtactgctctttttccatgggcttatgaatatcaatatatatgtatttttaatt

SEQ ID NO: 183661 - DNA, 249 bp, Zea mays
  unsure (1)..(249): unsure at all n locations
  Clone ID: MRT4577_99083C.1
cccacgcgnccgcccacgcgnccgcccacgcgnccggacggaaagaanagcaagncgcaaaagaagcagcanaccncagcccaanaagggagcncnaaggaaggcgnanccaaacaaanaagagacncaacgaaagggggacacccccaaaggaaannnaaaccagacgcncaaagccgaanncacgaacaagccaacnccggaggagagcaccagagcggncaaaggacaaaaaagggaagaaaaggc

SEQ ID NO: 183662 - DNA, 226 bp, Zea mays
  Clone ID: MRT4577_99084C.1
tttgggggtttttataaacaatcgtggggtttacaatttcttggagatcaataaaacaataacccctaatttaataacccctttccaaatcggcggaattaaattttacaacgaaagttgtaaaccacacaactccagatggatattaacccacagaaacataactcgatcggagccactcagggcatattaaaggatagcaatggcacacaagccccacaacccc

SEQ ID NO: 183663 - DNA, 775 bp, Zea mays
  Clone ID: MRT4577_99085C.1
acagtcttgccatctcttcccctcgtctcgtcccctacctacgcagaccaggtgccaactgccaagtgactgcaaaaggcgcgggttcttctcgttcggggccgccgccgccccgtgaagaagccctcgagcacgggacccatggcgacggagcagttcgtcctgttcatcttcatctgctgtctgtcctcccaattcgctgatggatatgatccggtggatccgaacgggaacatcaccatcaactgggatttcccgtccatcgagcctaatgtgtacgcggtaaaggtgagcatccacaattaccagctgtaccgccacatcgagcgcccggggtggcggctcagctgggtgtgggccggcgacgagttcatctcggacgtgatcggcgcggagacgacggagcggggcaactgcaccggccgccacggcgccaacggcgcccctccgcattgctgcgagaagcaaccggtcatggcggacctgctgccgggcgcgccgtacaacaggcagtccgccaactgctgccgcggcggcgtgctctcgtccgtcacgcagaacaacaggacggccacctcacagttcgacatgtacatcgtcaatttcgcgctcgacgagcatggcgaccccaagatgccgaccaccttcagcatcggcgtgccgggctacacctgcagcaacgccaccaatgtgccggcgacgaggtcccaggtcgacgagcagcggcacgtaccagttctgcgcacatggcagatcatctgctcgtactcgcagt

SEQ ID NO: 183664 - DNA, 2348 bp, Zea mays
  Clone ID: MRT4577_99086C.1
gcgagcaccggctgcagcgcttgatcgacgaggcggacgccaaccccaacgacgcggccaagcagagcgcgctcctgcacgagctcaacaagttaagccctgaagatgtcattaaaaggtttgaggagcgaagccatgctgtggatagcaggggggctgcagagtacctgcgggcacttattctcactaacactatagcagattaccttccagatgaacaatctgggaggtctgcaagcctgccagccctgtgtgcaagagttgaaacaacgtgtatctgggaatgaggacaaacctttcatgaaccctgggatatcagaaaagcaacctttacatgttgtaatggttgaccccaaatctacaggtagatcaacacgttttgctcaagaaatcttctcaacgatcttgtttacaattgctgttggcgtaatgtgggtgatgggtgctgctgcacttcaaaaatatattgggagcttaggtggaattggggcatctggtgctggttctagctcatcatattctccaaaagagatgaataaggatatgatgccagagaagaatgtcaagacatttaaagatgtcaaaggttgtgatgatgcaaaaaaggaacttgaggaagtagttgagtatctcaagaacccttcaaagttcactcgccttggtggaaagctacctaagggcatacttttgactggtgctccaggaactgggaagacactactagcaaaggccattgctggagaagctggcgtaccattcttttaccgagcaggttctgaatttgaggaaatgtttgttggtgttggtgctcggagagtgaggtcattgtttcaagctgcaaagaagaaggcaccatgcattgttttcattgatgaaatagatgctgtgggatcaactaggaaacagtgggaagggcacacaaagaagaccttgcatcaacttcttgttgagatggatgggtttgtacacaatgagggaataattgtgatggctgcaacaaacttgccagacattcttgatcctgcactcacaagacctggtagatttgataggcatattgttgtcccaagtccagatgtgcggggtcgccaagagattctggagctgtatttgcaagataagccagtggcaaatgatgtagatatcaatgcaattgcccgaagtacaccaggcttcaggggggctgacctagccaaccttgtaaacattgcagcaataaaggctgcggttgaaggtgcggacaaattgaatgctgttcagttggagtttgccaaagatcgtattatcatgggaaccgagaggagatcaatgttcatatctgatgaatcgagaaagcttactgcctaccatgaaagtggacatgctattgttgcactcaacacccagggtgctcaccccatacacaaggcaactatccttcctcgtggatctgcccttggaatggtcacacaactcccctcacaggatgagacctctattagcaagaaacaactccttgcacgtcttgatgtttgcatgggtgggagggttgctgaagagctgatctttggggaagacaatgttacaactggggcaagaaatgaccttcacactgcaacagagcttgcccagtacatggtatcgaactgtgggatgagtgatgctatcggtcctgtgcatgtgaaagaacgaccaagcatagagatgcaatcaaggatagatgctgaggtggtgaagctcctaagagaggcttatgggcgggtcaagcgattgcttaggaagcacgagaagcaattacatgctctagcaaatgcgctgctggagcgtgaaacgcttactgcagatgagatcaacaaagtagttcacccgtaccaagaagagccccatctttccttccaagacgaggagtttgccctcgcttaaagattcttttgttgcatcaagatatcggtcaccacccgtgaattgtaaatccgtgtacagtaagtggcgtctagatgagccatggaagttccttcagatgctctcttctgtaaaacagggcgcaacacctatggtaaattagaagattggtgttgcgaaagctgatgcctgcttattgacaattctttggatggaaggcttcccgggaaggctctgggtttgcaaaaccctctcatacttttggtttagttaggatagatgtaggtttaacactgcatgttctgattgctaggtttctggctagggcaacatgttgatcatgttcttttcacttttttattgacattttctgtaaggaaatcgtacatgtaacgattgttttatttgtcaaacaagcactgtttgtttttgtcaaacagtattcggttaatgtattcgtgttgcta

SEQ ID NO: 183665 - DNA, 1984 bp, Zea mays
  unsure (1)..(1984): unsure at all n locations
  Clone ID: MRT4577_99087C.1
gnttgttgtcccaatccagagtgcggggtcgccaagagattctggagctgtatttgcaagataagccagtggcaaatgatgtagatatcaatgcaattgcccgaagtacaccaggctttaatggggctggtacatgcattttcctttgttccattattgagaagtagcatgtcacatttcattttataagtgccatgaggaatttaaaggactgtgtaattcttttcactagcagctacatcttcctgtttttcctttgtcatttacgagtggtattttgaatatgaatacaatattacacatttttcattttaagaaaaagatgttaaacatgccttgagtataatcttttagattgtaccgtgatatttgtattctgacatctctttgtctctttctgttagacctagccaaccttgtaaacattgcagcaataaaggctgcggttgaaggtgcggacaaattgaatgctgttcagttggagtttgccaaagatcgtattatcatgggaaccgagaggagatcaatgttcatatctgatgacacgcgaaggagctaactgcgtctaccatgaatggacatgctattgttgcgctcaacacccaggtgctcaccccatacacaaagcaactatccttcctcgtgggtctgcccttggaatggtcacacaactcccctcacaggatgagacttctattagcaagaaacaactccttgcacgtcttgatgtttgcatgggtgggagggttgctgaagagctgatatttggggaagacaatgttacaactggggcgagaaatgaccttcacactgcaacagagcttgcccagtacatggtatcaaactgcgggatgagtgatgctatcggtcctgtgcatgtgaaagagcgaccaagtgtagagatgcaatcaaggatagatgctgaggtacttttccatagaccactcaaatatactgataacattttggccgtactatttcatttttgatatacatttagtgagcaaatggtagctcattgttgtatgctccttccgtctcaaatgtctgcgttaactagcctcttgatcaatcccaagaggttggttgtattgatgaccttaaatgtagtagttacggtctcctgttgcattttctgatttgatggtcttgcaggtggtgaagctcctaagaaagcttatgggcgggtcaaacgattgcttaagaaggtttgtctcacaatcgtgatgggttctgccctagaatgagcagtttcacataacaccagattcttttagtgtacttaatgccgatacattttccaaactttgttttcagcatgagaagcaattacatgctttggctaatgcgctgctggagcgtgaaacacttactgcagatgagatcaacatagtagttcacccctaccaagaagaaccccagttttccttccaagacgaggagtttgccctcacttaaaagattcctttgttgcatccagattttacctactgtgaattgtaaatccgtgtacagtaagtggcatctagatgagccatcgaagtttgttcacatgcccccttctgcaaaatagggcgcaacacaccttcggtacatttttcaccttgacaccatttccatttgaggagcagccagtacatcagaaaatgagaagattggtgttgcaaaagctgatgcctgcttattgataattcttgggatggaagaccgccatggtggccggcaaggctctgggttgcaaaaccctccatacttttggttttagttaggatagatataggtgcagcattgcatgctctgaatgctaggtttctggctaggggtttaccatgttctttttacttctttattacatttgatgtaaggaaatcgtacatatagcggtagtttttttttcaaacaagcactgtttgttttttgtcacacaatacacgttccaatgtatctgtattgctaaaaaaaaaaaaaaaaaaaaccagcccgc

SEQ ID NO: 183666 - DNA, 595 bp, Zea mays
  Clone ID: MRT4577_99088C.1
gccagctgctgctgcttctcagccgaataggtagcaccggaggaggtacgatgctgcaccatctccttcgccgccgacatgatggagaacgctcctaacaccaagaagacctgctgcaacaacaaagagtgcaagaacccccccctccacgaggcgactcataataagaagggagaggatctgctggctgctcaagaaaagcgccgttatgaccgcaagcagtcatgatatggtggtaacaccactgctgtcttccacaagaacgacaccaccaccaagaatattgttctgaagctgcggcgccagagctgcaagtactactcacaggacgtcatcaaaagatgcaagcattttaatattggtgacgacaagaaggacgaggcctcatctcttttctaagcttctccaccagctgtgttgttgatgagaagaagctgtgcgactactactgctgttctaaccacctctcgcctaatttcgatgatgatgtagcgatgaaagcacaccatgctatgcctcctaattccgatggctgacatttgttctggtggtggtggactactgttggctagatgaaagtgttgcatgttgcacc

SEQ ID NO: 183667 - DNA, 492 bp, Zea mays
  Clone ID: MRT4577_99089C.1
aggtcttttccccctttttttttttttttttttttttttttttttttttttaaagaaggaggggggctatttttattggccaaacaaccaccaaccggtgacccaaggcggttcaaaaatacccataaccactttcaaaaattttttttgaacggggggattccgcaatagcggaaaaagaggaaaatatggggggaccccaggccttttttcaggaaatttatttgggagccaaaaaccctggttaagggctaaactccccaccactaaacttttttttccatcccccacaaactggatgtatagcccacttgcccataaaaaaaaagtccccagctgacattaatggggggggccggggaaccgtccctccagcccaatttcgaggttacctaccccggcctgggaaggaataagtttttttttggggcccccaaaatcaaatcactgggcggcgttttacaaccgcgggaccgggaaaaacccgggggt

SEQ ID NO: 183668 - DNA, 346 bp, Zea mays
  unsure (1)..(346): unsure at all n locations
  Clone ID: MRT4577_9908C.1
ggtggaacacgcgttcggaaatacttccgccaggcaagttttaaattttgcaccctatgataggatcaatatggctcgtacgaagcagaccttccgcaagtccaccggaggcaaggccccgcgcaagcagctcgccaccaaggcggcgaggaagttggcgccgacnaccggcggcgtgaataancctcacaggtacaggccacgtacggtggcgcttntcgagatccgcaggtaccagaatagcatggagtttgtgattcggaagttgctcttccagcgcctggttcannngatcgctcaggactttaagacggatctgcggttccagagccacgcccgcctggcc

SEQ ID NO: 183669 - DNA, 277 bp, Zea mays
  Clone ID: MRT4577_99090C.1
ccttcgacaaggtgaacgggttttacttccgcgggcacgcgtctgggacgccaccgtccggcacctcctctccatcgggatggccgctgcggaccaggtgttgctcgctggctgctccgccggcgggctggcggtcatactgcactgcgaccagttccaggccttctccctcggtccaacaacgccgccgccgccggtgctaccgacgacactactaccgtcaagtgcctcgccgacgccgccctcttcctcgacgccatcgacgtctccggcgggc

SEQ ID NO: 183670 - DNA, 291 bp, Zea mays
  Clone ID: MRT4577_99091C.1
gccgttaccctcctatcttatcaactcaattctgctactcattcccaccagcgcagagtgggcattgctggcggcgagtggcctacatttgaccagcttgctcttcgtgctccacttggcgagaacacggtcctcttgaggggccccaagaatgcccgtgaggcagtgaggcactttggcaaggcttctggagtgccgcacagccacaccaagccgtatgtgcgctccaagggaaggaagttcgagaaggctcgcggcaggaggaacaggcggtgattcaagggttaaaac

SEQ ID NO: 183671 - DNA, 1191 bp, Zea mays
  Clone ID: MRT4577_99092C.1
cggccgcgccggctctttccaggttgcggcgctacccgaccagtgagtaactccccgtccgcacgagggtgagctcactccggttcgtacctcgcacaggggcggcggcaaggcagctctgaggggatctcggcggcgacgacgcggcgacagcgaccgccgggctcgaggattcgcacggagtgaacaaggctgagcgtcgcctcattccgacttccgatccccaacggaaagcggagccaggaccgggagctggagcagttgtcttcccccctcgtctccgtcaactggtctttaattctctctttacacatatcttggtatttaattctctcatcaccagcgtaagaaaaaaccatttgaagctaaatttttcaacaagccacttgagaactaccattacatggctgttatatttgggaatcatcaagcaactggactatttgcaaaatgcaccagtgatcccctaggtttcgacacatctgaaagtgcaggtacatatggtgtgggttattctggagacttggctggtcatgagagtaacaatgcaagtccaactcgtgatagtggagaatcattgaacccaagtggtccaattcgtgatggtggagactcatctactcgaagtggtgcaagaaggaagagagggcgcatgatgatggaagatgaggatccattgatatgcactgtcactgaagcttttaagactctttcagatgcaatcaagcagtcagcaccacaaccacgtccgataatcccacccaacctatggactatgatgaaacagattcctgtttttgaaagagaacatatagcacactactatggctacttgtgtgagaatccagcccttgcttatgcctttctagagatgggactagatgatcaaatggtatgggtgtctaggtacatcaagactcatctttctgattgatgcatcaaaaaagcagattagcctaaaacttgtgtctgaaactttttagttatttctatgatggatggagtctatgaaacttatctttgaacattgatatggatgttggataacttctcaattttatttgtatgctggataatgttgaatatgtatgttggataaattctcagtttttaatgtatgttggataatgctggatcaaaaaaaaaaaaaaaaaaggcccctgtgaagattcaagtttcaattttcagttt

SEQ ID NO: 183672 - DNA, 2159 bp, Zea mays
  Clone ID: MRT4577_99093C.1
atggtggccgccggggcagcagcggccgcgccccggctgaacccgtcgccgtccccgcaccgccgccgagcttcctccgcgctctccccggcaaagtccaacgccaacgccaacaccaacgccggcgacgcgcggcccaagcccaaggctaaggtcgtctcctcccgctacctcgcgcccttctccaggtccacctccagctcgacctccacctccacctccaccaccaccaccacttcgagctccaactccacctcgacatcgtcgtccacgccctcccgccgcttcgcgtcgccgctgccgaggcgctcggtctccgtcgaccgcccgcgcccagccccggctggcaatgctgccgtcggggagactgggggacccaaagcgggcaccaccaccaccacgaggagcctctccgtggcgttccagggccggtccttctccttcgagacgagcaaggcgaagccggccacgtccccgtctccgtcgcggcgaccagtggcttcggcggcgggggccatcacgccggagaggactcgtccaactatggggacagtgccggagagggggaagggttttgagggggtccatgctcaccacaggtggccaatgtcggcgaggctgtcgcaggggtttgaggggaacccgcttaccaaaagcttggattgctctttgcacaagagggacgctgctgtacttgctgctgtccggtcgctgcggcagtccatggtgtttgaggagggggcacggcgatcctcgttcgacagtggggactacttgatgtcgtcggacacagagagtgtgtcatctgggagcaattcagggtctcaggatgcaggtatcggaatttcgcacagagcacgaccatccccaaagggtatgagtgtgccagcacggttcttgcaggatgctgcagtcagcaggtcacaaagattcacagatcctggcacaccatacttggcgtatacctctgggttggctgcatctccaaggacagcgccggttaagaagtcactgcaaaatggctttgtttcgtccccactgaaccggtcagtcaggcaatcttcaccaagtaagcttaccggcaatccatcgaggagggtgtcaagcccatcacggtcgagaaattgtgtggggtcgggcacttcatcttgggatcaccagggaagaaactcatctggatctggttatgctttgaatggtgaagtgaggaggaggtggcatgggggtagtaaggttgactgtgagcatctgttgagaattttatccaatcgacatttgcagtggcggtgtgtgaacgcacaggctgaagctgcactttctgcacaaaaaatgacagcagagaagtacttatctgatgcgtggattactaccctagggatgcgtaaatctgttgctcttaagaggttccagctacagttataccggaacaattggaagctcatgacagttctaaagggacagatggggtatctagaagaatggtctttgttagagagggactatgtggattctctatctgtaactgtggatgctctaactgccagcattttgtgccttcctgtcactgatggagcaaaggctgatatccaagatgtgaaaaatgctgttggttctgctgttgatatcatgcaaacaataggaagctcaatatgttcattattagctaagctggctggaacaagtattttggtttctgatctttccaaagttgctacccaagagcgcactctaatggagcagtccagagaattgctgtccacactcgcaacaatgcatatcaaatactgttacctggaagggcaaagagaacaggcaactgacaggagctccatgcatccctagccagactactataaccccccactaaccgaagaatgtaggtgcaactgcaaattctggtggcttggctggtgcccccagagcaatcctgactcatccgaagatgctatctaggctaggctagttccagtggtctatggtggctatggcccccctagttctggttgctgatttgatgtatgctaaccaatgcagaacagatggcatgcgccatgtgtatagatgtacctcatttgttggttttagtcgaggattaggtcagatgctaactagaaagattgggttccttttgttcatcagcagatgactaacgactacca

SEQ ID NO: 183673 - DNA, 584 bp, Zea mays
  Clone ID: MRT4577_99094C.1
cttgggggttggttttttttttttttttttttttttttttttttttttttttttttttttttttttttttttttttttttttttttttttttttttttcccccaaaaaaaaccaccgcgggggtaaaaaaagcctgggtccgggccccacaaaaaacaaggggccccggggggaaccaaacccgggggcccctaattccggcaggacccccaaaccaaagggggaaccccgcaggggggggcccccccccctaagggggggggaactgggggcacgcctggggccccccgaaaaggggggccttgggcacccccccgggggggaccgggcccccgggggctcggcccccccggggggggggggggggctttttgtgaaaccgccccagcttggggggccgggggggagactcttaaaaaagggccgtgggaaaggggcttccgggggacggggccttaaagggaagcccccattccggggccccctatcaaaccccttggaacaatacaaatgggggggggctcccccgcttttttgccctcttttgggggcctcttttcccttcgccggccctttgggggggg

SEQ ID NO: 183674 - DNA, 144 bp, Zea mays
  Clone ID: MRT4577_99095C.1
ggggcttgcagctggagcatctatggtccgagttacttcctctttcctccaaggcaaggctcctacaacttgcgctcactgtttctgtacagatccttatctactactctcgtacttcgtcgtcgccaacttcttcacgtgatc

SEQ ID NO: 183675 - DNA, 243 bp, Zea mays
  Clone ID: MRT4577_99096C.1
ctgtccaaggtgtgggctcgcgtactcgcgacctgctggggcgccccttcagcaagaaggtctacatcgagctcaccacctacctcagcacctacaactgcggctactacgaccgcgacaaggtgaacggcgcccaccacagggggatgccgcacaagttttaccacggccgcaccggacagcgagtggagacgtgaccaaacgcaccatcgtcgtcggagatgaacaagcatgagaatgttt

SEQ ID NO: 183676 - DNA, 464 bp, Zea mays
  Clone ID: MRT4577_99097C.1
aatccagacgacgcactgaagcgttatctcatctgcgaaagcctgggaccagatggatgactctcacgagtgggttcaccaccgccagatacagtcccttttatccatacagctcatctcacaggcagtgagccacaggggagctggaaaagagcacacagggtttagcaagcacaacccagcatccaagtgcataagcgatactcaaaaataggacctttatagctagccacacagagccgggacctccagtataagcgcgcggggcaagatacacatatatacagatgggaccacgtgaaaaacgagcacagagagaatgatcacgcgtccagattcacttgcggcttcagctagctgcctgagctcggactttattcgtcagacaggttgaacgtatttaggagcccgaaactctcatcaacctgtaacatcgaccttggtgacaactaggataaccttga

SEQ ID NO: 183677 - DNA, 569 bp, Zea mays
  Clone ID: MRT4577_99098C.1
gggtctagttttgtaattttaataattgatttctagttggaataatgctaaataaacatttcactttgaatctgatctggactagaggttcttttatttttcctaggttctttctcacttaagcaaactaggaaaaataatttcatccactggtcattaatttctaaggcctttctgattttcctaaggtttgggcagaaatggctcttaatgaatatctatacttaatttttcaatactggggttctcactatttttaaacagtgtttaaatggggtttgaacatctacaaattttcttaggttcagcacagaaacataactaattttccttaattaaacaaggtttggtcagtttctgtatttaattttaaactctaaaaattagaacaaaaagcatagggttcagtatttttaataaatagttcataatatttagaatttagcaaaattggtttgataacttttggttaagtattcatcaagttttgaattttctaagttctctgtttattaaaaagattaaacagaaatggttaaatggaaaactactttgcaacggggtccctg

SEQ ID NO: 183678 - DNA, 254 bp, Zea mays
  Clone ID: MRT4577_99099C.1
agcgggtccaagacaaagccgggaaaccactccgggtccgagaggaactgtgaacggccagcttctttggatatggctactcagcttgggaagagaccaatgagaatgccctgatgacattggggacatagtagcatgccgagtctaccatctcggggacctacaagggctcccaaaccctggcctcacaagcttgcaacacagactcagcctagagaacatcaggccttgggagctagggctggcaccgactg

SEQ ID NO: 183679 - DNA, 562 bp, Zea mays
  unsure (1)..(562): unsure at all n locations
  Clone ID: MRT4577_9909C.1
aacataaaacactggcagcatctatagcttgcttgcattgcattgctttgctttggtgtctcatcatcatcagtctctgatttaaaaagaaaaaaatgcacaacaaacaaacaaacaaaacccaatccaaaccatccatctcaatatctcatcacagtgatgcaagcaaggaagcttcttctagtctagcctctccctgtccgtgaagctttccgcggcctgatcccgtggcagtggtacgcccagcatggcatccgaccaccgagctggtgaccggtcgctgctgtttgacgatgacatggcctcggccctcgcctccctcaccatccggagcagctccgccgtggtggggcgcctggccgggtccgcagccacgcacgtcgcggcgatgttgatcagcgccgtgagcttctcctcggctccacctccaccggcggacacagactccgtctccctcttctnctcacgcaccgngcgaacccagctggggatgtcgtcgccatgcagctccatgaggtcctggaacggtgtccggcccgtcaggagctccagcaggagcacc

SEQ ID NO: 183680 - DNA, 379 bp, Zea mays
  Clone ID: MRT4577_990C.1
ggaaaattggggggcattactggtttaccgatcccgggatttacgtttcgaaacgggggggacaattcccaaaaaaaagaggggggaaaagattcccggggccagaaagagccaaaaaaaaaagccgggggataaataatgctggggggcgtctattataattggaatgaggatgcggccgggggccccctcgggggcggggggggggcaagccaagccagggcatgttttcactttacccgggggcaaagggggaccccctcccccacggggagctggcaaaacttaacccggtcgtcggggggaagccccttgttgaggaccaacacaaaatcccggtaaaagcggatgtacttgcccatgggccgcctcgtcgggg

SEQ ID NO: 183681 - DNA, 813 bp, Zea mays
  Clone ID: MRT4577_99100C.1
ttcttgtcagaactaattcttctttgaagctatgggcttccagacttaagcaagcgcttgaagcttcgccagccaaaagtgaaaatgcctcaaagcacaccatggagacctgttcaaaatctgctgcaaaagggactgacaagttgtttcctagcaacagcatcttacctccagcaggcccggcagtatcaccttcacaagacttggtctgcagcagcagcaacaacttaccagagactgacctgattgtctcgccttcacctcttgtttcatggcgtaccggggcatgcatggtcggcagtgggaagcagttatttctcttgacaccattgccaaaatcaaaagcacgctcatccatgtgcccaaaatcatcaaaagcacagttgacgacaactgccagcatggatgagctgaatcttcccaatttacctgtttggaaactaaccatttctgatgacagcagccctgatctggagcaaagtgtgaaaggaaaggaagcaagggctggtgtcgcgacacctcatcctagcaaagcaaagaaaagctcatcagaagacaatctattttcgccttttagcttctcaattcagaagagcaggagagcaccactgcctactccatgcccgaagacagcattgcgaggtaagcaacatgtgttctcaccgatatcggagggctcaagtaaggatgacattctcagtgctggaccggttgagggtgacaaaccaccatctggaggctctgatgagatgctgtctgatgagaaggatctggcatcaagatatccagacctgtatgggtttaatcaacctg

SEQ ID NO: 183682 - DNA, 366 bp, Zea mays
  Clone ID: MRT4577_99101C.1
ttgctttacaacactgcataatttaactaaaaacgggggccttttgaagagctatgcccaacttctctctgcgaaacaaatggtggatacgagcatataccagaagcacgggagaccacccaatggccccggaacctgggaagccgcacaaactgaaaccactggggcgaccaccgccacgcgattgtggaaactcactgcagggcagcacctcaataactgacaaggcatttacgagccaaaacatgctaccgggaccaaactaactggacgcacacctgctatggtgggactggtcactggagtccatgcattgcaggcggcgaggcccaggtccctcaaggcacacgaggccgcatgcccaca

SEQ ID NO: 183683 - DNA, 322 bp, Zea mays
  Clone ID: MRT4577_99102C.1
gcttttcattcacggagatcccagcgtcggatatctagatatctcccgactagcttttgtttacagtattcttaagtttgtgatgcaaaatacctaggatttaggatggaagaaagagtagaaaacattttaggaaggaaactagacagatttatgtaggacgctgtcagggtagatgttgctcttatgctttagagcagttgaacttgggagaccgagtaattccagtgatttttttaattcgtttttgagaccctatattcaaattttgtgagcatgttcgcttgtctgaaaagtcatagctctgatttgttgtgagagg

SEQ ID NO: 183684 - DNA, 543 bp, Zea mays
  Clone ID: MRT4577_99103C.1
ggccgcttttttttttttttttttatttttttttttttttttttttttttttttttttttttttttttttttttttttttttttttttttcttttttttttttctaaaaacaaaaccccaaaaaagaccctccttccaacggggaaaagggggacgaaacctgacaaaaaggggataaaagaaccgggcgaaagccaccaatagaagctgatgagggaaggccctaaccccagccctttcttttaagaaaggacccccccttccccgccaaagggggaggaacaaggtggaaacccaccccccccgggggggggtgggtggccccaaccccccctggaaaaagccgaaaggccacccccccgcccctttttttttgggaaccgccgccccccccaaaattttatttggggacccgcattggcctttttttgcgggctccacaaagggaggatcttccgcggggggtgggccccccccccccccttcaaaagcagaatttgcgaccccaaaggcaccccccggtgccccttgtccccgggaaag

SEQ ID NO: 183685 - DNA, 438 bp, Zea mays
  Clone ID: MRT4577_99104C.1
cccacacttgccagacggcgtcgaatctgagaggcaaccaatggacacatgctgcacttcgggacagctaacaactacactagatcacttagacgagcacaagtcccaactgctggaacagcttcatagcctagattgctgacctgaatctgctgcaaacggatttgcatgcaagcacaccctctcattggaaccaccccaagtaggaagatgaccgacctatggcatgatagggaactctcatgcatgagtgaattcatgccatgctgtcaatctcagactactgcatatgctagtgcatatgactcgtgctgttcgatacggtatgagctatcatgccgtacgaagactgctccttaaacgtgatgtggacaatagtcttttctgtataccacgttgtcatggaaagatgccttttagacaagtttttccagtgtt

SEQ ID NO: 183686 - DNA, 169 bp, Zea mays
  Clone ID: MRT4577_99105C.1
gctcaggggttgtccggaggaaggatggcttcgacctgcaagaatagtggcattgggagcatggtgggatcttactgcaaagggccctggaaggcgctgctcagcccaaggaacacaaaacaagcctaaggatggaaagacggaaatcgagacttgggctaagaacagg

SEQ ID NO: 183687 - DNA, 263 bp, Zea mays
  Clone ID: MRT4577_99106C.1
gatgtttctaaagctgccagaccactaggatgattagggaattgagtcctttcctcatgtcctttccaacactcttgatgctttggctccaccagtttgagaaatgcgtgcagtccagcagaggggcaatggggagcagaccaaacttgctgaggatcgaagtccagacttcacgccgcaaaaacacaagagatgaggatatgttgaatggtctcgtcggactgatcacaaagaggacatgcattaggatgaggcagccctct

SEQ ID NO: 183688 - DNA, 419 bp, Zea mays
  Clone ID: MRT4577_99107C.1
ccacgcgtacgaacagatgcaagacgacctgacacagggcctggacacggtctaccttatgcagtctcctggtgatatcggaccactcttggtcaacgaagcacgtttgcctcataaggctgtcactgcctacgacaccgccaccttcatcacacagcacgagcatgacatgcgctacctctccaacatccgatagctcaacgccgacagatctgacatctgacttaaccgattcaacatctgagatttgcgcaccacactgccactgtgcctcagtcaactacatacttgtccaccagaccacaacttcttcaccgacgactgatacaaccacttcctctccagctgagaccgccgctgctcgttctccaccttctcgctgacgacaactactactgccaccaccaccaccactacca

SEQ ID NO: 183689 - DNA, 359 bp, Zea mays
  Clone ID: MRT4577_99108C.1
ttcgacgcgttgtcgaacacatcggggcgtactcctcactaatgccccaaggaaaatgccccgttgcgtgtaatctgcggccaacaaacatcccattattatgatcacaatcttcgagccgcggatctgcgttccttcttcatgcccccagcggtgcgacggcgggaattaaaataaggtatgtttttaacttatgctccaccaccgcccgcgtgacatctttattacaccgagcgcatattctagtctccgatgctctttttgcgcgtttgtatttttcatccaacgtgaggtttttttcacggataatttccctgctcttttaaaactcttaaggcacaacacactgcgcacgagat

SEQ ID NO: 183690 - DNA, 181 bp, Zea mays
  Clone ID: MRT4577_99109C.1
gcttgtcactagtttccaggaacggcatcccgggcgactggaggccctacagatgctaccgatccttcaaacaataccactagctctctagctgaaaagagcccctagctcaccaaccaccactactaccaccaacaccctctagactaccggttctactacccaatactacggctgaacg

SEQ ID NO: 183691 - DNA, 1002 bp, Zea mays
  Clone ID: MRT4577_9910C.1
ttttttgggttttttttttttttttgccggtggggggccatttatttatttatacagacatcaatagcagatgttgtatgtcatatatataggagtaattcaaaacaaatacgtactatgttgtagataatcattgactggaagattaacataaaacactggcagcatctatagcttgcttgcattgctttgctttggtgtctcatcatcatcagtctctgatttaaaaaggaaaaaaaatgcacaacaaacaaacaaacaaaacccaatccaaaccatccatctcaatatctcatcacagtgatgcaagcaagcaaggaagccctatggcctattattatggcttcttctagtctagcctctccctgtccgtgaagctttccgcggcctgatcccgtggcagtggtacgcccagcatggcatccgaccaccgagctggtgaccggtcgctgctgtttgacgatgacatggcctcggccctcgcctccctcaccatccggagcagctccgccgtggtggggcgcctggccgggtccgcagccacgcacgtcgcggcgatgttgatcagcgccgtgagcttctcctcggctccacctccaccggcggacacagactccgtctccctctcctcctcacgcaccgcgcgaacccagctggggatgtcgtcgccatgcagctccatgaggtcctggaacggtgtccggcccgtcaggagctccagcaggagcaccccgaagctgtacacgtctgtcgcgggcgtgaataattccaaggacgtggcgtgggcgccgcgtacctctggggcgcggtagaacagggagctcgaggagtggagctcggcgttggagggtagcagcgtcggcagcaggccgtagtcggtgagacacgactcgaagtcggggcctaggaggacgttggagggcttcaggttgccgtggacgatgctccactggtggaggtgcaccagccccgccgcaacgtcctctgcgatcttcatgcacg

SEQ ID NO: 183692 - DNA, 107 bp, Zea mays
  Clone ID: MRT4577_99110C.1
acgcgtcagtgaacgattccatctagatgttgatggcgtggctcacaaaaatggtaagttttgcttcatacatctcttactatttggaatctcaacaaatcccctct

SEQ ID NO: 183693 - DNA, 828 bp, Zea mays
  Clone ID: MRT4577_99111C.1
cattgggaccctcgaggccggcaaaactggggaaagggacaagcagcgagcggcgccgggctccccctcccttcctcgcccctgatctacgccgatcgaaggccgggcggcgatgctttcattagatcagcgttgaagacgtccgctgctgctccctgtggctgcggttttgcagcataagaaatatagctacacacagctcaatgcttgtcaggatcgatggcagatagggagcatcgaacagtatttgtcacggtggggacgacatgctttgatgctcttgtcatggcggtagattctccagaagtgaagaaggctttattgcaaaaaggttatagtaatcttcttattcagatgggccgaggaacatatgttccattgaaggtctcaggagatgctacccttcaagttgatcatttcacattttcaccaagcatcgctgacaatatgagaacagcttccctagttatcagccatgcaggaagcatatttgagacactgcgactcggcaaaccactaatcgttgttgtaaatgaagatttgatggacaatcaccagagtgaattagcagaagaattggctgaaaggaagcatctcttctgtgcacgcccacaaacattgggagagaccatccgggcaatggacctagagacactggttccttatgagccaggggatgccaaaccagtcgtcaccctgatcaacagatttcttggatttccagttgactgacgaataaatgacgatgtctccgttagggcctatccggttgtccttcaatccatgtggattaggtggtattgcgtcggtttaattccataacaggtc

SEQ ID NO: 183694 - DNA, 1232 bp, Zea mays
  unsure (1)..(1232): unsure at all n locations
  Clone ID: MRT4577_99112C.1
ctcctcctcggggcgaggacggctacgccgatgccgatggcgatggtgatggagggtactaccctcagctccgctgcaacgacggggagtactactacgaggacgaggaggaagaggatgcggttgccctcgatctggagcgccggatctgccgcctcgagcacgatcaggaaactcccctgcttgagccaccccttcaggaagacgaagaggaaggcacccacctctacacagaagaggcgttgccggacttgtctgggcatgagcagggtggcctctatgctgatgacatgttatctgtggacggtgtggaagaactgagcgacctccacaatgacgatgaagagctgccagagtctcctactgctggccgtggtgatagggtggaagcaagcgaggctgatggtgttgacagtgcaagtgacagtggcagtgatagggtatacaccattgacaaggtgcatcaaggtgagtctgcgcctattgcaagggtcatggataagtaccagggtgaggcggtggagccagacattaagaagctttacatgaggctggaggcactggaggctgatagggagtcgatgaggcaggcccttgtggcaatgcgcacagagaaggcacaacttgttcttctttgtgagattgcgcagcatcttgccaaggatggagttccagctggggtggggccaggtgtacaccgttcccctagaaagcgagcagttgggattgtagaaaggagattcacggaggacaagagggtgccactcctcaagacatattccgtggttgccttgtttaagtgggtcctcactttatttggcaagaaaaagaagctatctcaaagcaggtatacttttggcttatcaagtaataatgttggtttgctcctactcttggataagtgcccacggatccagaaaaccctcatgagaacaaagtaaaacctgccgaaaagaagcagcagcagcatgtacaatgtaaataaatagctgtcagttgggaaatgcattgcatcggattggttttttttttgnnntggagccagagttcagttgattctttagttgatgattttctgatttcacatctttggtgatgaggatatgcgcgttggtcttgcaatcgttcaagtcacnnnnnngctattgctttgcttctttctcaccagcaagagctacaatgcatgatagtaatacactggtggttggtttacttgcttgcaggttgatgag

SEQ ID NO: 183695 - DNA, 1132 bp, Zea mays
  Clone ID: MRT4577_99113C.1
ggtacccttctctgaagcggtcgaaactcgaaagggacaaagcagcgagcggcgccgggctccccctcccttcctcgcccctgatctacgccgatcgaaggccgggcggcgatgcttccttgcctgcacctctcggtccaacacacagattagatcagcgtcgaggacgtccgctgctgctccctgtggctgcggttttgcagcataagaaatatagctacacacagctcaatgcttgtcaggatcgatggcagatagggagcatcgaacagtatttgtcacggtggggacgacatgctttgatgctcttgtcatggcggtagattctccagaagtgaagaaggctttattgcaaaaaggttatagtaatcttcttattcagatgggccgaggaacatatgttccattgaaggtctcaggagatgctacccttcaagttgatcatttcacattttcaccaagcatcgctgacaatatgagaacagcttccctagttatcagccatgcaggttcaggaagcatatttgagactctgcgactcggcaaaccactaatcgttgttgtaaatgaagatttgatggacaatcaccagagtgaattagcagaagaattggctgaaaggaagcatctcttctgtgcacgcccacaaacattgggagagaccatccgggcaatggacctagagacactggttccttatgagccaggggatgccaaaccagtcgtcaccctgatcaacagatttcttggctttccagttgattgacgaatctattcggttgttcttcaatccatgtggattagatggtattgcgtcggtttaattccatagcaagtcaaaatacatcctaaacccactcaatccactccaatccatatggaatcagtgtctaaacgaacatgtgctactccgtgtatttgatcggttatttcaaaattatgtggagctatagatttcaaccgactcaatatcactcaatccccatggattaacagtaaaacaaacaatcccttaatgagtctagttgatataaaatggattaactgacatggaaatagcagaccgttctaaaggcaaaaaaaaaaaaatgcagaccgttctcttgcaatttcagaaaaaaaaaaaaaaaaa

SEQ ID NO: 183696 - DNA, 601 bp, Zea mays
  Clone ID: MRT4577_99114C.1
ctcgaggccggccgggccggttactggatcgatggcagatagggagcatcttacagtatttgtcacggtggggacgacatgctttgatgctcttgtcatggcggttgattctccagaagtgaagaaggctttattgcaaaaaggttatagtaatcttcttattcagatgggccgaggaacatatgttccattgaaggtctcaggagatgctacccttcaagttgatcatttcacattttcaccaagcatcgctgacaatatgagaacagcttccctagttatcagccatgcaggtgtgttatagtctttccaaaatggatgaaaacattggaatattttccatggcattatatttttcctcgctaaatcttgaaattgctaggatgaactaagtgcatcggagaatttttccactaattttattttagaccataaaatgtgaaataacatacttccttttagcttgctcttctctttctattttagaatgatgagctatataagtaacaatttatcatattctttggaatctgagctattttcaccctgccccacttccttatttatctgatgaagtgattgaaatttgagaaccttcaat

SEQ ID NO: 183697 - DNA, 540 bp, Zea mays
  Clone ID: MRT4577_99115C.1
gtattgaagaaaatttcaggtgcaaactgagatactaaaattctttgcagtccaaggtctgttctcagcctctttaggaactgaggtgacatcgtttgagttgcaagagaagttcaaatggccaaaggcagctatatcgacatcgcttcgtaatgaatgcattgaacaacttcagttattactagaagatgcgcagaaggacgaggctttgcatgttagcggggttaagtctaatgacttaggcttctacttcatgcgtttcattaacactgtgtgcaatattccttcagtttcactgttcagaaccttgagcagcaatgatgataatgcattcaagaaaacactggctacggaatctgcacttttccaggaggaaagaaaaattggcactggattggattcaactaaaatgcacgtgatacgttatctccttattcagttactgctgcaagttctgctccatccagaggagttctgggaggctgcaattgatgtgattatatgttgcaagaaaacattttccttccattgctcagagcg

SEQ ID NO: 183698 - DNA, 213 bp, Zea mays
  Clone ID: MRT4577_99116C.1
cctccgccgccgccgcagctgcccgcgtgtcgaggccgggcagcgtccctcccgccgccgcgcagagggggcaccttgggagcagtcagcgccaccacctgcccggacgcgtcctcttccagtcgactccgacctctcagggccgagaggttgggggacgcgcgctgtcggggggatgcgggtcgcgaggcggggcaggggagagacatgggt

SEQ ID NO: 183699 - DNA, 709 bp, Zea mays
  Clone ID: MRT4577_99117C.1
agatataattaacctttatttgtttcactgacaattacaccgaggcccctccttttcacacttccaagtccacgacgggctccggtcaaacaccggccaacagccggtcacgcccgccggtgagggcccctctgaccaaaaagagctcatccacagctaccccgaaccaaggtgaacaccatcaagggcacagacggttcacagaggcttgagagctatactgctgacggcgacggcggacaccgaagtccgacgagcccgttcccggtgactcaacgtcatagaacggtcgacgtcgggcggcgttcaacagtgcacaccggcggcgaagcggtgtaccgttgcatcttcatcgggacagctgaaacggtcaagtcgaggagcatcagtacaactagagggagctagaacacgggagctatgggatgaaacactctcgggttgaggcggttccacagcgatggcggtgagcaaattcaaggaattctggtgattggcagatacggtggacgaacgggtgaacggaagggtttgctcgggtgagcaaagagaaggcgcagagggtgatacattcaatttatagagggacacgactactgtggtctgtggccgatgtggcggcggtttcaggcgagcaacgtggtccgccggctcatggcaggttgcgccacttcactgaggacgcacacaagcacctacacacaggaag

SEQ ID NO: 183700 - DNA, 229 bp, Zea mays
  Clone ID: MRT4577_99118C.1
cctggtctaactcttctgctctacacatgcagatgctgaaggagagaagttgaagaacttgtgcaaaatcgcacagctagttagctacaaagcttgggtggaatcctgcttctctgactcccagattaggatttctttgacttcacctcccctttggaaaaacgatgcgtttcaggggaagttcctgggcatttatggccaaactgccctcgctctgaagattcaatgt

SEQ ID NO: 183701 - DNA, 798 bp, Zea mays
  Clone ID: MRT4577_99119C.1
aattcggcacgaggcaaccactgggcctccctcctgcacctgcagcctcgccgcgacacgctccccagagatctcccccgcccgacttgtcagatccagcaatccgcatcaccgccgccgtgatctccctcttagatcccggagatggcggggacggaggccttcgaggcctacttccgccgcgcggatttggaccaggacggccgcatcagcggccaggaggccgttgctttcttccagggcgccaacctgccgcagcaagtcctcgcccaggtatggatgcacgccgatcggaacaagactggcttcctcggccgcccggaattcttcaacgcgctgcgcctggtcaccgtggcgcagagcgggcgtcagctcacgcccgacatagttcagtcggcgctgtatggtcccgccgctgctcgaattccagctcccaagatagccgcaggggcggttcctccacaaatgggtgctgcgggggcgcctaggcctcaggggagtgctgcgatgacgcccacaccagggcaggttggggcggctcagatgaatccggctgccacaccaaggccccagggaagcggtatggtgccgacatctacccaagtaagcgtgccgcaggtgaaccctggtgctgctccaaggccccaagggatcaattctatgatgccagctgcgagtcagggtggtgctctacaagcaactcaatttgctgcaccaagggcaatgcagccacagcctcctaacctgggaattactcaacagcaaccttctagtaccggtttcatgcggccaccacag

SEQ ID NO: 183702 - DNA, 236 bp, Zea mays
  Clone ID: MRT4577_9911C.1
cttgaaacttttttgtttttttcttttttttttttctttttttaaaccactaggaccgccggcacgacgccgaacagccctcatgtgttgcctgccctggggggggggggctggctggactgaccagagatcatccttatgagtccccttgccatcagatccttgattgccctccgtgcctgtgatccgttactcctgacacgctcggtgaggacgggtggggtgatctgcttgtg

SEQ ID NO: 183703 - DNA, 848 bp, Zea mays
  Clone ID: MRT4577_99120C.1
tcgcgatctagactttttttttttttttttttttttttttttttttttttttagaaaaatttaatggcatagatataattaacccttatttgtttcactgataattacaccaaggcccctccttttcgtctcattcacacttcaagtccacgaccggctccggtcaaacaccggctgaccaaaaagagctcacccacagctaccccgaaccaaggtgaacaccagcaagggcacagacggttcacagaggcttgagagctatactgctgacggcgacggcggacaccaaagtccgacgagcccgttcccggtgactcaacgtcatagaacctaaacgtaaggcatggcgagcattagcgactcacccaacactcgatgctcacacaaacacaaacagggaaagcgtagaacggacggtcgacgtcgggcggcgttcaacagtgcacaccggcggcgaagcggtgtcccgatgaagacgcaacggtagagctgaaacggtcaagtcgaggagcatcagtacaactagagggagctagaacacgggagctatgggatgaaacactctcgggttgaggcggttccacagcgatggcggtgagcaatttcaaggaattctggtgattggcagatacggtggacgaacgggtgaacggaagggtttgctcgggtgcgcaaagaggaggcgcagagggtgatacgttcaatttatagagggacacgactactgtggtctgtggccgatgtggcggcggtttcaggcgagcaacgtggtccgccggctcatggcaggttgcgccacttcactgaggacgcacacaagcacctacacacaggaaggggcgtggacg

SEQ ID NO: 183704 - DNA, 780 bp, Zea mays
  unsure (1)..(780): unsure at all n locations
  Clone ID: MRT4577_99121C.1
cctcgaggttttcggccggtagtaattgctaatacanntttttgataacaaaattataagcaatgcccagactcaaccattatccttggtaagccttacactacacttcttgaaccccaaccataagcgagcctatacacatttttccacacttgttgagcgatggccgtacgagagctcacccttgctaaaataaaattaggtcaagaacaggttcagacaagaggaggatcgctataaagatgagttcggaatggtctaagccgtcgtctctcagttaactatagttgtagaggatcgttgtcatcgtatggtgtaattgacttagttattttgtacagaaattatattaagtaataaatatgtgacactgttttctgtacactaagtcgtcacatgtgtgtgaaacttgatcctgacacatatgtaagatgcatctagatttgtccttaaattcgggtgtgacatgtgtgctccacagaaataaaattgtacgacaaaaaagcagctggcaacgtggcacccaattttcagttgcttcatggcggcaaattagttggcgggcatttttgacgattaattcctaaccttctccgtctggagcaagttaagcctcgcttacacctcagccttgtcacgtacgtactccggttcgagatgtaatcgagactggntattctttgctaagtgatggagactgttgcgagagtactacactctagcttactgatgaaatttcactgtagtgggacagagacgactcataggcctnggttggtt

SEQ ID NO: 183705 - DNA, 259 bp, Zea mays
  Clone ID: MRT4577_99122C.1
accaaaacaaccaaaaaggggattgggtttcttacaattaaccaaaaataacccctggcggcagaaacccaaaacaacgacccctactccaacccatttaaaacatgggtaagcctaaaccgcagatgaactcacaaaatacagccgagcccgagcgccctttctaccaaaaacacacaggggctacaacaaaccctacacgaacgaaaaaataccctctggaccagggaaaacatcccaagcccaaacaaaataacta

SEQ ID NO: 183706 - DNA, 393 bp, Zea mays
  Clone ID: MRT4577_99123C.1
gatctcactagtcttcgtgcgcccttcctttttttttttttttttggtggttttttttttttttttttttctcaaaagccccaaacgaaaagggtgctatccataacccctggggaagagtttaaaggccccccaaaattttttgtctccctggctatgaggaggattacatttttccgggatccaaaaagatttggagtcaccatttattggacagttgcccaaaaaaaaagacaggcaaactcttggttactgaaaatcattggtgcaatagctcgagtactcaagaatccgaaggaaaaaacctttggggggccttggtcaattgaaccggaattattcaaaggcaagaaagtaaattttttttcctatttttcatacagcacgacccac

SEQ ID NO: 183707 - DNA, 276 bp, Zea mays
  Clone ID: MRT4577_99124C.1
gggtacacgcggtacaaccctcaggtttgggtctactataaaaaggggtccctattccatcaaaatccggtagttgcttgtgtgcatcaaataaacatccacataaacggttcaaagaaatcaggaaggctagcttttgcttacacagaaaggggctccaccagtttgtattattctgggtgaaagaaatcagaaaactttgacatgcgggtggcacattaggcaaaagccgccaacagctccctttcaatttgctcggggatcctttttttaaac

SEQ ID NO: 183708 - DNA, 516 bp, Zea mays
  Clone ID: MRT4577_99125C.1
ttggatgcaggcctctaggtggtaggtggagctgctggttcctttctaatcctaatttccatattgttaaatcaacccgcatcatttgctatgctacttccattccaaattatatatcactttagcttttgtcctaaatcatttttaaaaaaacttttacttagttataaaaaaatacaccatctataacatcaattttgtttctttgggccttatttgctagagctcttagagctgattctctgctgaatccagcaggagctctgtcaaacagtttttcagagggaagcgattatttgctgattgtgtgaaacgattctctgaaatgaattaagaggctgggagttgaaaaaagtagctctcctgattgtgtgaagtgattgtccatcgtgattttgagagttcatgctaaagaatcaaagagaatcatttttagccacaaaaccactgtctcagaaaatcaacttccatagagaatcagaatcaaatgaagctatactgaacagtcccttaaat

SEQ ID NO: 183709 - DNA, 604 bp, Zea mays
  unsure (1)..(604): unsure at all n locations
  Clone ID: MRT4577_99126C.1
ccggccgggattgtcgttctcccgacggtcgtcgatacatacccgaagaaatcggagagcgcgcgctcgtcacggcgccgcgtccgaaaagaagtcaaatggactatctacttatactgtggatgagacacttgtatccatgaccctatngaaattacctgcatgcgccgctgcatactctgggtatggctacaaacctctgaaccaacggaaacgacgcttttgtcatttgctgctacatcagcccatactgaccgtccgctttctgcacatgaagaaagcctcataacaagcgttgcctttgcgagaatgcttgtacgaccatatgcttgacgcatactgtcaaataactatggaagaagggctgagatcaacttcacagatattgttactgtaggagatgaccttcatatcgcttttgctccaaattacttatctttgattgaactgagatttatgctcgctagttggactgtgacggtgcgtccagttatacgatcatgctgcctaaagttcatccctgctcctaaccgaggaacatggatggtcatgctctcaacattatggactgctggcaccataatgcaagcttctcttgcttgag

SEQ ID NO: 183710 - DNA, 1229 bp, Zea mays
  Clone ID: MRT4577_99127C.1
aggagatcaaggccaacagggatttggtagagagtcagaaccaggagcttcggtcaaagatttcgagtgcagagcaagagcgtagcctatttgaaggagagattaagagcgtcaggatggaattgggggcagtagaggaggccaagcagatccttacgagggagttcgatgctgagaaggcagagatcctgaaggaactggatgaccttgagaagaagctagaggaattgcagaccaacaagggtttgctggaggctgaaaacgacaagcttcagctggaggttttgaccgcacagcacaaacaaagcatgtccgaagcagaggctgagagccttaagatggaactgggagcattggtggaggcaaaggaggcggctacaaaagcatttggtgccgagaaagcaaagaccacgaaggaactggaggatcttaagaggaaggtggaggaaatccaaaccaagaaggatctggtggagggcgaaaaggataagctccgtttggagattttaatagcggagcagaggcatgccatggctgaattagaggttaagcgcctcaagatggacttggctgcatcggcagaggcgagggagacagttgtgaggtcatgtgacgctgagaaggccaagttcatggcagaaatagagaacctcaggaggaagatagaggaaatccacgccagcaaggaagcggccgagaaagcagcgcgcaacaaagatgcagaggctgacaggctgaaggatgagctggcgaggatccggctctctgtgtcacagctgcaagcgtcctgcgacgaacttgatgccaagcagtcgcgcctgaacgacgagaagaactctgtccagaaagcactagtgtccgagaaggtcgaaggtaacaagctcaagttaaaaatcgaggaactcgagaatcacattgctggcaaggacggtgagaaagggaaactgaaggcggcgttggaggaaaagatgactgagatcaatgctctcagcaaagacaacgcgatgctacatcgcacaattctcgaggcgcaagagaagaataaaggtagcattttatcgttcttgtcaccgtgcggctccaagtaacttggttgtaatgtgttgcattactaatgcaatggtgaaggtaccatgcaatgaaataaaaatttcagtttgctctgtgaagatcaaagtaactcggccggccgctcttgcatcactaatgcaacgatgaagataccatgg

SEQ ID NO: 183711 - DNA, 678 bp, Zea mays
  Clone ID: MRT4577_99128C.1
cattgggtacctcgaggccggccgggacatatcctactcctcatgtagcacgattattaagacacatatcccattaccatctctcattagggcgatcccagcgtaacctggattgccatctggatgacaaagatatccgaaccagaactagttattggcatgcaccacatctacgccctccttccctgagcatgaagacgcgcccatgcaccgccactaccaagaccactggcgcaccctgccacgaacccgccaagcatcatgaatacaacggcggagtctgcgccaacaaccacgccgtcccaccaacctccgttctcgagaatgatcaccggcgagaggcaatccatcgtaccaggacgaggagggctcgggaacctgactagcaacacgaagctgacaccggacagcgatccgtgctcccgcaccccggggagagtgcgtatcaccgacctgcgcctcgacgctacgtgccagctgcatcccgtccacttcgacctgaacgccacgctgtgcgatgccatggcgaaggccagtcagggcgagatgatccgaaacgccggccgcctacaagtgcagcacactcgggtggcacgaaactggaacggcttgtacatcgccttcagggtggacgccggttcaaacgacaactacctgtgcatggacatcgagcacgag

SEQ ID NO: 183712 - DNA, 1538 bp, Zea mays
  unsure (1)..(1538): unsure at all n locations
  Clone ID: MRT4577_99129C.1
gggtttggtttttttaattgatgaaagagggtatgtataaacaaaagattaagcagaagcttcggttatagaagcaccaacaaatcagtaccaaccgtccatactgttgacaggcgttgaacccaagacagcacacaacataaatgtgaacgaaatacctgatagatgttcctcagattttgctggcgagctcacattaacacaatcaaaacaacagttatttgttcctaactgctagtctgatcatcaagatggaattatgggcacagacgcaaaactggcagtgcatttggtatccaacaaacacagaattcatagtacacagattatacttgagaactggagtgctaaagggcaagtcgtttgatgactatcaatgattacgaggtgttttgggccttgttgaggatgacaccctcgtacttcacctggaaccacttcatggcgtcttctttggtcaccctgtgctggatgccaacgcgggacttgcacctgcgccgacgtgcaacacgataaccagctcgttccagaacgacgtaaaagtccatgccataaataccagtagacgggtcatacttgattccaagatcaatgtgctcctgaataccaaaaccaaagcagccagtatcactgaagttcctcctcagaagctcatactccttcaccttgaggccactctcgagaagctgcattgccttctcacccctgaccgtaacgtagcatgcaatcttctcattacgacgaataccgaaagacctcacagtataccttgccttggagaaaaccggagactgcccactcaactgctccaacaccttggcggcgcgggtgagtcgatctccactctctccaacggagatattgagcacgagcttctgcaccttgatctcccgcatcgggttcgactgcttcttttctgacgccatcgcgatcttggagagcagagacggcggcggaggggaagagatgggagggatttgatgttggggtgtggctgcggttgattccgattntgttggccacatcaagagcatcatagtcgggagtcagcttcacgtaagccttcttcttcccatcaggcctgatcaaggtgttgnaccttctttgcctggatgtcatacatcttcttgacggcagccttgatcttcttcttgtctgccttgaggtcaacaatgaagaccagagtgttgttatcttcaatcttcttcatcgctgattctgtggtaagggggtacttgagaatttggtactgatcaagcttgttccttccggtagtgctgattcgtgggtacttggggtccctagccttcttcagggtcgtggggcggtgaaatgtcacagacgtgcggatcttcttggtcttcttcttggctgccccagacttcacagccttggcaaccttcaaggcctgggtcttggcatcacccttcttggcaggagcagctttaggagccatttcagcttctcgaagatgtctcctgaacttacctctccttgcggcgggctgaggcggacgcgaaacggatgacggctggccc

SEQ ID NO: 183713 - DNA, 401 bp, Zea mays
  unsure (1)..(401): unsure at all n locations
  Clone ID: MRT4577_9912C.1
agggattaggattaccaaaaagttttattcagggcaccagcctattggcgtaattcgcacaggagccgagggcgggcccgggcgtaccccagccaaggaccaagaccccgcccaatcacagacatacataagggcccccggcgggccccaacgggcggggatgcccgcccccccggctgctcaattagccctggggaggaaaccctccctgcgcccggggacccccccggggcaggggttgatgtcccccccgaccctgggctcgcccaccacaaaacccgggccccccgggggaccatggggggggggggggttggcccccgcccgtgccacccttttnacctcctcgaacttttccttgacaacctgctgttggaccccccccccctgggggcccaaac

SEQ ID NO: 183714 - DNA, 500 bp, Zea mays
  Clone ID: MRT4577_99130C.1
aggaaccccttttgggtttagggcccccttggccagttccttttattttttattttaaaaaatggcccctccaccattgggtggttgcagggcggggtccttaaaagggaccgggtggtttggcaccattggtggtggttgttccgggaaggtaccacccaatgggttaccccctgccattggtttaattacctgtggcccttgttgtgggtccccaccaaatttggccccacccggttggttaattggaaccacttgttgtaagtagccacaaggtttggccccacttggttaattcaaacttggtccatttggttccaccacctgtggttgtaggtccttagttcctttgccaaccgcaaccggcttaaataaaattatttgtaggtgaccggcagggtcaaccttggttagttacctgacccctgccttaaactgtgcaacttgtggttgttcctggtttccacttccttccgccaaaccaggtggtttgattccaa

SEQ ID NO: 183715 - DNA, 706 bp, Zea mays
  Clone ID: MRT4577_99131C.1
attctatatacctctgcccgggggctagggtttcctcccagccgtcatcgtttcgcgtccgcctcagcccgccgcaaggagaggtaagttcaggagacatcttcgagaagctgaaatggctcctaaagctgcccctgccaagaagggtgatgccaagacccaagaataagaccgagaagatccgcgacgtctgtgacatttcaccgccccacaaccctgaaaaaggctagggaccccaagtacccacgaatcagcactaccggaaggaacaagcttgatcagaaccaaattctcaagcacccccttaccacagaatcggtgatgaacaagattgaagataacaacactctggtcttcattgttgacctcaaggtagacaagaagaagatctgggctgccgtgaagaacatgtatgacatccagacaaaaaaggtcatcaccttgatcaggtctgatgcgaacaagaaggcttacgtgaagctgactcccgactatgatgctcttgatgtggtcaacaaaatctgaatcatctaaatgctgcattaggcgtcctagatcatctgttgtgccctagatctatgcgataccagagctatgtagctatgggtctcaatcgttccattaccatgagatatgcgcacttctgaatctgatatcatccaagagcacgtgtgaactacactgcgtactgcacttcattacactt

SEQ ID NO: 183716 - DNA, 678 bp, Zea mays
  Clone ID: MRT4577_99132C.1
ggccgcttttttttttttttttttgttttttttttttttttttttttttttttttttttttttttgtttttttttttttaatatacccggcagcaaggcaggggaattaacaactcttacaacaacagggggtggaaaccacacaatacttcaaaacaaacacacaaaacacgaaaacaggaggaggggggggcagatcacgggataagggcaggacactggcctgatgctgcgtcatcaacaaacttctttaatactcgtcaccctcgtcgccatcctccccctcattgaacccaacaccgaccccctcgtatccctttttgagcgccgccaggtccttacgggcctcaaaaaactaaccttccttcattccctcaccgacctaccagcgcaccaaggcacgcttggcgtacatgaagtcaaacttgtggtccatgcgggggaacacctccacaacactggtggagttggggatcatgcacacgggacgctgcaccttggccaggtcggcaccaggcccaaccctaggaggctggtagttgatgccgcacttgaagccagtcgggcaccaacccacgaactggatggtgcggttggtcttgatggtggccacagcagcattcacatccttgggggccacattaccacggtacatgaggcaacaggccatgtacttgc

SEQ ID NO: 183717 - DNA, 979 bp, Zea mays
  Clone ID: MRT4577_99133C.1
ctcgtttcaccccatttcgtccggccgtctaattcgttggccggcccgttctgttcgtggaagcgctcggatctgctctgtatatgcttgttctcgttcggttttgccggtcggagttgtctcgcgaggcgtagcttgagggagttttgagaagctcaaatggctcctaaagccgctcctgccaagaagggtgatgccaaggcccaggccttgaaggtggccaaggctgtgaagtctggggcaggcaagaagaagaccaagaagattcgcacatctgtaacatttcaccagcccaagaccctgaagaaggccagggacccgaagtacccaagaatcagcactactggaagaaacaagcttgatcagtaccaaattctcaagtaccccctcaccacagaatctgcaatgaagaagattgaagataacaacactctggtctttattgttgacctcaaggcagacaagaaaaagatcaaggctgcggtcaagaagatgtatgacattcaagcaaagaaggtcaacaccctgatcaggcctgatgggaagaagaaggcttatgtgaaactgacacccgactacgatgcccttgatgtggccaacaaaattggcatcatctaagttaataggcaactggattcgacatctgtgtcctactagttctgagcataccaacagatttttctatgttactagtaattttgtttgtcatatttggtttttttgcaactaagtcttgttcgcagttgcagactacatatgcctgtattgagatcctggttgccaaattaaccatcttgaactggcattattcccctttacgtataatggctgaatctgttgtggcgttgtgcgaacaccctgcatcaccctgcatagtttagtggactattgctaaatacaatatctctgtttatttgctatcagtaaccaacctgtatagattgtagctgaattttgtcgaaatttgcagtcgcccttg

SEQ ID NO: 183718 - DNA, 805 bp, Zea mays
  Clone ID: MRT4577_99134C.1
gtaagccacccactgccgccgctctcctttcaccccatttcgtgcggccgtctaattcgttggccggcccgttctgttcgtggaagcgctcggatctgctctgaggaagttttgagaagctcaaatggctcctaaagccgctcctgccaagaagggtgatgccaaggcccaggccttgaaggtggccaaggctgtgaagtctggggcaggcaagaagaagaccaagaagattcgcacatctgtaacatttcaccagcccaagaccctgaagaaggccagggacccgaagtacccaagaatcagcactactggaagaaacaagcttgatcagtaccaaatccttaagtaccccctcaccacagaatctgcaatgaagaagattgaagataacaacactctggtctttattgttgacctcaaggcagacaagaaaaagatcaaggctgcagtcaagaagatgtatgacattcaagcaaagaaggtcaacaccctgatcaggcctgatgggaagaagaaggcttatgtgaaactgacacccgactacgatgcccttgatgtggccaacaaaattggcatcatctaagttaataggcaactggattcgacatctatgtcctactagttctgagcataccaacagatttttctatgttactagtaattttgtttgtcatattgggttgtttttttgcaactaagtcttgttcgcagtcgcagactacatatgcctgtattgagttcctggttgccaaattaaccatcttgaactggcattattcctaaaaaaaaaaaaaaaaaagcggcc

SEQ ID NO: 183719 - DNA, 720 bp, Zea mays
  Clone ID: MRT4577_99135C.1
cggaaaaaccagccgtcatcgcttcacgtccgctacagaccggcgaggagacgaaaggagggagttttgagaagctcaaatggctcctaaagccgctcctgccaagaagggtgatgccaaggcccaggccttgaaggtggccaaggctgtgaagtctggggcaggcaagaagaagaccaagaagattcgcacatctgtaacatttcaccagcccaagaccctgaagaaggccagggacccgaagtacccaagaatcagcactactggaagaaacaagcttgatcagtaccaaattctcaagtacccccttaccacagaatcagcgatgaagaagattgaagataacaacactctggtcttcattgttgacctcaaggcagacaagaagaagatcaaggctgccgtcaagaagatgtatgacatccaggcaaagaaggtcaacaccttgatcaggcctgatgggaagaagaaggcttacgtgaagctgactcccgactatgatgctcttgatgttgccaacaaaatcggcatcatctaagtgctgcattaggcatcctaattcatctgttgtgtcctagttctatgtgaaaccagagttttctagctatggctctcaatcgctccattaccatgtgttatgcacacttctgaatttgatatcatccaagtgaccttttgaactagtttgcgttctgcacttcattacacttggacaccgtc

SEQ ID NO: 183720 - DNA, 792 bp, Zea mays
  Clone ID: MRT4577_99136C.1
gcatcgtttgggtccgcctcascccgcvgcargggaagtaagttcatgagacaccttcgagasgctgaaatggctcctaaggctgctcctgccaagragggtgatgccaagacccaggccttgaaggttgcaaaggytgtgaagtctggggcagccaagaagaccaagaagatcggaacwtttgtgacatttcaccgacccacgaccctgaagaaggctagggaccccaagtacccacgaatcagcactaccggaaggaacaagcttgatcagtaccaaattctcaagtacccccttaccacagaatcagcgatgaagaagattgaagataacaacactctggtcttcattgttgacctcaaggcagacaagaagaagatcaaggctgccgtcaagaagatgtatgacatccaggcaaagaaagtcaacaccttgatcaggcctgatgggaagaagaaggcttacgtgaagctgactcccgactatgatgctcttgatgtggccaacaaaattggcatcatctaagtgctgcattaggcatctgttgtttcctagttcatctgttgtgtcctagttctatgtggaaccagagttttgtagctatggctctcaatcgttccattaccatgtgttatgcacacttctgaatttgatatcatccaagtgaccggttgaactagtttgcgttctgcacttcattacacttggacaccgtcagtctttgtgaccagtaattttgtttgtcgtaatgggttggttttgcaactcgaaaaaaaaaaaaaaaaaaaaaaa

SEQ ID NO: 183721 - DNA, 383 bp, Zea mays
  Clone ID: MRT4577_99137C.1
acggacgcgtcggcggacgcctacgcggaccagtgggccctcagcagattcatccccgatcgtctcacacggaccaggatcacgttcagctacgccttatgcttcaacggcggctcacacatcttcagcgacggcaggttggacgacctcgggaacacgagcatcatcgacgcggagagcatccttgccatcttggcctgccagatcatggtcatgggcgacttcgacggcgaccgcatcgcctgcggccagctcggcgaggtcgtcaactcgctctaacccggcagcagcatccatgcgctcggcctctccaacgatcccaaagcattcgccaaactcaaagtcatcgagctcagtaacggtcgcctcgccatgttctccaa

SEQ ID NO: 183722 - DNA, 780 bp, Zea mays
  unsure (1)..(780): unsure at all n locations
  Clone ID: MRT4577_99138C.1
aaaaagccgtcatcgtttcgcgtctgcctcagcccgccgcaaggagaggtaagttcaggagacatcttcgagaagctgaaatggctcctaaagctgctcctgccaagaagggtgatgccaagacccaggccttgaaggttgccaaggctgtgaagtctggggcagccaagaagaagaccaagaagatccgcacgtctgtgacatttcaccgccccacgaccctgaagaaggctagggaccccaagtacccacgaatcagcactaccggaaggaacaagcttgatcagtaaccaaattctcaagtaccccctcaccacagaatctgcaatgaagaagattgaagataacaacactctggtctttattgttgacctcaaggcagacaagaaaaagatcaaggctgcggtcaagaagatgtatgacattcaagcaaagaaggtcaacanccctgatcaggcctgatgggaagaagaaggcttatgtgaaactgacacccgactacgatgcccttgatgtggccaacaaaattggcatcatctaagttaatgggcaactggattcgacatctgtgtcctactagttctgagcataccaacagatttttctatgttactagtaattttgtttgtcatatttggtttttttgcaactaagtcttgttcgcagttgcagactacatatgcctgtattgagatcctggttgccaaattaaccatcttgaactggcattattccactttacgtataatggcagaaaaaaaaagaaaaaaaaggccccta

SEQ ID NO: 183723 - DNA, 751 bp, Zea mays
  Clone ID: MRT4577_99139C.1
gcagccgtcatcgcttcacgtccgctacagaccggcgaggagacgaaaggaggaagttttgagaagctcaaatggctcctaaagccgctcctgccaagaagggtgatgccaaggcccaggccttgaaggtggccaaggctgtgaagtctggggcaggcaagaagaagaccaagaagattcgcacatctgtaacatttcaccagcccaagaccctgaagaaggccagggacccgaagtacccaagaatcagcactactggaagaaacaagcttgatcagtaccaaatccttaagtaccccctcaccacagaatctgcaatgaagaagattgaagataacaacactctggtctttattgttgacctcaaggcagacaagaaaaagatcaaggctgcagtcaagaagatgtatgacattcaagcaaagaaggtcaacaccctgatcaggcctgatgggaagaagaaggcttatgtgaaactgacacccgactatgatgcccttgatgtggccaacaaaattggcatcatctaagttaataggcaactggattcgacatctatgtcctactagttctgagcataccaataaatttttctatgttactagtaattttgtttgtcatattgggttgtttttttgcaactaagtcttgttcgcagtcgcagactacatatgcctgtattgagttcctggttgccaaattaaccatctttaactggctaaaaaaaaaaaaaaaaaaggcccctagggcc

SEQ ID NO: 183724 - DNA, 238 bp, Zea mays
  Clone ID: MRT4577_9913C.1
gatgaaaagtgcctgagggatgccaacatggacaacatcaccgaccatgacgttgtactggtggggggctccactaggatccccagtgtacatcaactgctccaggacttcttcaacggcaaggagctgtgcaagaacatcaaccccgatgaggctgtcgcctatggtgctgctgtccatgctgacatcctgagcggcgagggcaatgaaaaagtgcacgagctgcttctgttgacgt

SEQ ID NO: 183725 - DNA, 483 bp, Zea mays
  Clone ID: MRT4577_99140C.1
gacaaaaaaattccaaacgaattataaattgtaacggacactaaataaaagttcattttgatcgaaactggggctaaaccattacaacaattaattggctgattggctacttatatcaaaacagaattgggaggccgcagctgccactttgccagaaatagctagtggaacggccacgacacctcacgacgacggggagggcgagtgcatgatgagacagccagacccgcgcccgccatgcatgcgtcacccgagcagcttgcaatcgccagccacccttcttccttcctcctcctccttcctcctacatacgccttgtctccgccctagctcctccgcaatctcctgatcgaggccgccgccgtctccgaggtaataaactcgtcccgtcgatcgctcgctccatcgatcttgcaaccagcgcggcgctccatctcaccggcacgccattaattaacggatgttgtgttgacggtggatcgc

SEQ ID NO: 183726 - DNA, 862 bp, Zea mays
  Clone ID: MRT4577_99141C.1
gggtacctcgaggccggccgggccgggagttcaccccaacatcaaaaccctcccatctcttccccttcgccgccgtctctgctctccaagatcgccatggcgtcagaaaagaagcagtcgaacccgatgcgcgagatcaaggtgcagaagctcgtgctcaatatctccgttggagagagtggagatcgactcacccgcgccgccaaggtgttggagcagttgagtgggcagtctccggttttctccaaggcaaggtatactgtgaggtctttcggtattcgtcgtaatgagaagattgcatgctacgttacggtcaggggtgagaaggcaatgcagcttctcgagagtggcctcaaggtgaaggagtatgagcttctgaggaggaacttcagtgatactggctgctttggttttggtattcaggagcacattgatcttggaatcaagtcatgccgtgtatgcctacttagctgtgagctgatgactaatatgccttttatcaatttaaattgtcacatgggtatgacccgtctactggtatttatggcatggacttttacgtcgttctggaacgagctggctatcgtgttgcacgtcggcgcaggtgcaagtcctgcgttggcatccagcacaggttgaccccagaagcccccatgcctttgttcccgggtgaacgtccagggtgtcctcctccaacaaggccctatacacattttaattccctgataagtaattatcacaataccctttccaaaccccccccccccatttaccccatccccccttttttctcctccccctttttttacccccctttcccccccctttttcccccccccaattttttcccctcccccctccc

SEQ ID NO: 183727 - DNA, 513 bp, Zea mays
  Clone ID: MRT4577_99142C.1
aaccgataatggctgggggccaaattaaataaacatataaggaacaggggatgttcaacactgcccccctggaaaaactcgatcctaacaggccccccagccaggcgagccccctggagctcccgcaccggggccacagggtccccctcccgaaggaagctaacaaacgcaaagttccggccgggttcgggggcaacaccctcaacgtcgccgaaccggagaaacagctccaacaggtcgaaccccggaaccctgggccccaggccacccacccacaggggccgggacgggggggccactcccaagcccaacccccgacgcggaaatggaaagtacggtttctcctcaacgcggaccccgtgacggactggccgttcgtcgcccagggggccgccgccaaacctcccccgtccacccgggccgggggggcccctcgccataattggccgcggaaagcggggggcaacaacaagcggggggcggcggaaatcaaaaggttagggtttgcggttc

SEQ ID NO: 183728 - DNA, 184 bp, Zea mays
  Clone ID: MRT4577_99143C.1
gtgcgagtcctcatgtctccaacagcaacctgcgcctgcgcggcatctccttgttttatcaggatcgcaggacctttttcgtattttcagttttcatcatgtgacacgttcctgtctagtagcatccaaatcattgcgcccgccggcccagccggcctttcggcgacgtaaacgcttgccgtcc

SEQ ID NO: 183729 - DNA, 358 bp, Zea mays
  unsure (1)..(358): unsure at all n locations
  Clone ID: MRT4577_99144C.1
accaaacaccacaaatacagaaagggtggatattattatgttttgacaatccaaaccacnacnnnnnaaatcatntccatctaccactttacacatttaatgtaccacaaacaaatactatctttcattcaaaacaaaacacacaatctctatctgaactatccctctcaagaatgagatccatttacttacaccacatatttataaaaatttctccaacaacaataaaaaataaaattccaaaaatctaacacaaacagtatagcctaccaaccctaataactctctaccacactaaaatctttatatcaccatatccactaataccataacagtcacttcacaccatctaatacat

SEQ ID NO: 183730 - DNA, 200 bp, Zea mays
  unsure (1)..(200): unsure at all n locations
  Clone ID: MRT4577_99145C.1
ccaaagctcgccccgctcccagctaggggggcctctttccatccacaggggccgtgtcgcctccnactaggacagcgccgacacgatgttggagatgagtttggtgcaagggagccttcttaagaaggtcttggaggcgattctcgtgagctgtacacggacaccttctttttactgttccgggaccggtattcttgttg

SEQ ID NO: 183731 - DNA, 460 bp, Zea mays
  Clone ID: MRT4577_99146C.1
aagcaaaaaaaccagtttattttggaaccagacaagactccagggggggccgttcctttaaaaaacaaaggcttaacataaggggggttaaattccggggggggaagcaaccgggggggttgggggaacagggggggcctagtcgcccacaggaaacagcacccagcagtggagcggagctaagggggaaatggatcgggggaagaagatgcccccgatgttgtgggcccacgggccgggaaggggggagggaaggttctccagggggccggggccggggaaccccaacggggggacccaaaacccgacaaaggccagcagggggggggggccgttctggaccccctggagctggaacccccaaaactggggggggccctgggaaaacccaagcgggtcaaaggcccccccggggtacttttttttttgggggcccttctccatggggccctggggctcg

SEQ ID NO: 183732 - DNA, 749 bp, Zea mays
  unsure (1)..(749): unsure at all n locations
  Clone ID: MRT4577_99147C.1
cccacgcgtacgcccacgcgtccgggacgggagtccgccttaggttgtaggctccgttcgatcataagcaacacaacacccttccgtttgcgtcgctcctccggcctcccctccctggtcggtcgatcgcgaggatgacgccggcgagcgtggtcgccgcgcccaggagcgtcggggcgttgcccttggcggcgttcccggcgcccgcgagggccggggtgcggaggaacggccggtcctcgaggcccgcggcgtgcggcggggacgaccagcagccgccgtccatggccgcgatgccggcgtcgctgcgcgccatccaggccaggaggaagcaggaggcggcgcagcgcggggtgccgcgggcgacggccacgagcgcggccgggtgcgccgtggcggccctcgtcaaggccgtggaggccgtccagggcgcggcggccgggggcgccgcggaggccgcgcgcggcgccggggacgccgtggcgtgggtgttcagcaaggtccacctccagtcgcccgacctcgccgtcgggctgctcgggatggtcgcctgctgcctcggcacgatcgtggaggcggagaggtgccgcgtggaggcgaggaagcccgaggcggcgccggcgggcaacgcgggggccgaccgccccgacggcaacggggcccccgcggaggagatcgagaccacgacatgccgcannctgtggaggcngatgtggagaatgcgctgtgggcccagatcggcatcttgc

SEQ ID NO: 183733 - DNA, 361 bp, Zea mays
  Clone ID: MRT4577_99148C.1
tcgctggggcatatcgccttagtgactcacgtttttgctccaagaaaccacctccgagcccgggcgcacatgcgctcgaggcatgatagagatagaggcggtgagcaaaactatggatgggaaagaggaggacgtgcgcctgggcgccaacaagttctcggagctccagcccatcttgacggctgctcatggcgctgctgacgactaggactacaaggagcccccgtcggcgccgctgttcgagcccggagagctcaagtcctggtccttctactgcgcgggcatcgtcgagttcgtcgtcatcttcctcttgctctacatcaccattctcaccgtcatgggcgtctacaagttcaccttc

SEQ ID NO: 183734 - DNA, 436 bp, Zea mays
  unsure (1)..(436): unsure at all n locations
  Clone ID: MRT4577_99149C.1
ctggtccttgnccgcgggggggggccgctctctcggtcctgtngcgcntggcggctnntctctgtgggctcctgttctngccctcgtcgtcgtcgttgctgccctggttggcgcctcgtgcgccggctcttcgcngtgtgctggggcctgttcggtggcggggggagcctggcggtcgcctgcntctccgggctcttctcctgcgtgttcttcgcgttcctctccgccttcggcggcgggctgccccccgtcctctgcctcgccgggctctgcgaccccggctctggccgctgctccggcccgtgctgcgtcttcctggcctgcgcgtcgctgggcctcgtggtgctcctctccgtcggcggcgccngcgggggctgcggcctctcctgttttgtcttcttctctgtgtggccggcttcctgtgggtcttcttcct

SEQ ID NO: 183735 - DNA, 381 bp, Zea mays
  Clone ID: MRT4577_9914C.1
atcttggcctcgtcaatccaccaccaccgtcgtcgctgagctcctgcttcggtttcggtgctctaggttgccttctcctcggtcgaagaagaagaagacgaaaacatgtgtccgggatccgtggagtcgtcgtcggcggcggcggcgggcgagagcgtgtgcgtgatggacgccacggggccggtgggccactcgctcatggaccgactactccggcgcgggtacaccgtacacagccgtcacgtacgcccacgacggggaggagggcgcggctggcatgtgactggttagcccgctcgcggcacagatcgagatctggagaaccacttgtccactgacggtgaggagattgatgcatgcgttgcgtatgatcctacgaca

SEQ ID NO: 183736 - DNA, 196 bp, Zea mays
  Clone ID: MRT4577_99150C.1
tttactaactacccaacctattcagataatgagaggttgaaagacccctcgtaaagtgaacacctttaggataagttcctatcagggagcaactacctaactgactgatgccttgggcggtatttcatcacaatagtaatcagggtatactatagatagacctccccaccccgacaccatatggaggaacaatttg

SEQ ID NO: 183737 - DNA, 644 bp, Zea mays
  unsure (1)..(644): unsure at all n locations
  Clone ID: MRT4577_99151C.1
tttttttttttttttnnnnnnnnnnnnnnnnnnnatgataatttcagcatcaatcaacatgtcatagataaaaattgaaaaaaattagaatttaggataatatattaaatctggatgtcccacatatcagatattcattgggtaacgggtatggataccggatatccatacccgtgaaaaaattacccacgatactttattatatccataactgtacccgcggataccaaattccactataaccatatccaatgaataattatccgcggttatttactcatacccgtacccattgtcatccctaagttggaggtgtaccaatgcaaatacttgcataaaacttagatccacgtgtagctgtttcatgatggatttagatgaatatgatgaatttagagccggacggtggagctctgcaaaaaggccgtgagttcgaaatttctgaccctgctagtagtgcatgcatctggcaggtgctggtgcgtttggcgagaggcatgacttgattcacgcgtaaaatataattacatggcacatatgcacaagggttgaactgatggagttacacagcacaacaatatcactcagatcaagtttggaattcgcagccgacgagacgacgaccaaatcagaggaggaacggc

SEQ ID NO: 183738 - DNA, 979 bp, Zea mays
  Clone ID: MRT4577_99152C.1
ggcgcgcggcgtggtgggcaccgactccgcgaccatcgcgctgtccgggagcgagagccgggacggcggcggcaggcgcgcgaagctgcagggcgtcgtgctgggctgcaccgcgtcgtacgacggccagagcttccagtcctcggacggcgtgctcagcctgggcaacagcaacatctccttcgcgtcccgcgccgccgcgcgcttcgggggccgcttctcctactgcctcgtcgaccacctggccccgcgcaacgccaccagctacctcaccttcgggccgccggggcccgagggcggcgccgcggcgtccagcagctcctccgccgccgcagcgcggacgccgctgctgctcgaccgccggatgagcccgttctacgccgtggcggtcgacgccgtgcacgtggccggggaggcgctcgacatccccgcggacgtgtgggacgtcgcccgcggcggcggcgcgatcctcgactccgggaccagcctcaccgtcctcgccaccccggcgtacagggccgtggtcgccgccctcagcgagcgcctcgccggcctgcccagggtcgccatggacccgttcgagtactgctacaactggaccgccgccgcgcccggagatccccgggctggaggtgcgcttcgccgggtccgcgcgcctgcagccgccggccaagagctacgtcgtcgacgcggcgcccggggtgaagtgcatcggcgtgcaggagggcgcgtggcccggggtgtcggtcatcggcaacatcctgcagcaggaccacctctgggagttcgacctcagggaccggtggctccggttcaagcacacgcgctgcgccctatgatgattgctcacggacgccgcgcatgattcctctatgccttgataaaatttgtgacgagtttggagggagttgggtttttttttcctgaatgaatgaatgaaaatataatttttagcgcaaagggaaatcgttcaccttgc

SEQ ID NO: 183739 - DNA, 167 bp, Zea mays
  Clone ID: MRT4577_99153C.1
attcgttcacacgtattaactaataccttctgcatatgaacttgaaagcttaacttagtcatatgggctcatagtcataggtctatagtcataagattaatgtaaatcaatttctataccattatctaatctatgaacatttatttacattattttatcttctaaac

SEQ ID NO: 183740 - DNA, 963 bp, Zea mays
  Clone ID: MRT4577_99154C.1
ggcatggcaggtacaagggcggctccgcggcgcgcggcgtggtgggcaccgacgcggccaccatcgcgctgtcggggagcgggagcgaggacggcagcggcggcggcggcaggcgcgcgaagctgcagggcgtggttctgggctgcaccgccacgtacgacgggcagagcttccagtcctcggacggggtgctgagcctgggcaacagcaacatctcgttcgcgtcccgcgccgccgcgcgcttcgggggccgcttctcctactgcctcgtggaccacctggccccgcgcaacgccagcagctacctcaccttcggcccggggcccgagggcggcggcgcccccgccgcgcggacgccgctggtgctcgaccgccgggtgagcccgttctacgccgtggcggtggacgccgtgtacgtggccggcgaggcgctcgacatccccgcggacgtgtgggacgtgggccggggcggcggcgcgatcctcgactccgggaccagcctcaccgtcctcgccaccccggcgtaccgggccgtggtcgccgcgctcggcgggcgcctcgccgcgctgcccagggtcgccatggacccgttcgagtactgctacaactggaccgccggcgcgccggagatccccaagctggaggtaagcttcgccgggtcggcgcggctggagccccccgccaagagctacgtcatcgacgcggcgccaggggtgaagtgcatcggcgtgcaggagggcgcgtggccaggggtgtcggtcatcggcaacatcctgcaacaggagcacctctgggagttcgacctcagggaccgctggctccggttcaagcacacgcgctgcgccctatgatgatttgctgacggacgccgcgaatgcatgattgattcctctatcgcatcgcattgataaaatttgtgacgaggtttttttctgaatgaaatgaaaagatgattcttagcgc

SEQ ID NO: 183741 - DNA, 733 bp, Zea mays
  unsure (1)..(733): unsure at all n locations
  Clone ID: MRT4577_99155C.1
gaaatcatcgtgttcctcgcctgcacgacgagaacccgagaccaatccagccgccgcctccgccttcgccttcgccttcgccttcgcctcgcctagtattccctccgattcagaggccgatggagtgcatcgccgagatgccccgcgcgccgctggacagcaggctgcgcaagcgtcagcgtctcggctgggacgtcggccctgccgagatgtataaggccgtgcggccgcggcacgggtgggacgtcggccccgccgagatgtatcgcgtatactctctcttgccgttcccgtgatttcttgcggatctgcagcgtgaggcctttcgtttcgacgagctataggattaagtggtcaagctgtagaatagaagtactcccctcctcagattgaatcggactggtgtcgatctatcatatttgccgatggagagctagggtcatgtggctagtttgttcagcgtgtgatggctagggttagctgatggatgggttcagctttgatagtcagactacagactcacaggatcaatgctattctcaggatggggctgttattgtttgcacaagcagtgctttttttacattatttactataccttttgtagattgtagtgttgccactaggaaaggaaaagaaatgntggctatcagaatcgctaggggcattataaagtacaggtatgctgcaatgatcgaaattggcatgctcaagcagcttgataaatatgatg

SEQ ID NO: 183742 - DNA, 1894 bp, Zea mays
  Clone ID: MRT4577_99156C.1
gaaagagttaaatgtatggtaggcccttgaacttgtgaggatgtcacttaggtccacaaactatcaaaatgcatttttggcatcctaaattcctaacattgcttaagtgtgcgacttaggtccataacggttcggaaggtgggttttggcctacatggcttcgccagtgtcgcagtgactgtcgttgcgcatgtaaggagcgtgtgaggttggtttgtaccatggaaataaccagagaagaccctcttcttcctttctttttgtttctgtggtccaagatggtggagtagaaatgaagggaagaagagggtatctttgcttattttcatggccaaaccaacctcatgctctcaccttgtgcgcagcgacacagttggtgccatgctggcaacggcatgtagaccgaaacctaccttcagtaccgttatggaccaaagtggcacacttaaacaacactaggatgctagaaatgcatttgtcacccacactggctacgtgtcattgccagtgtgggtgacacgtagccaaaacctagcttccaaaccgttatggacctaagtgacacacttaaacaatattagggtgccaaaaatacattatgagagttcatgtatctaagtggcaccctcagacaagttcaagggcctaccctgcatttaactctttgataaaacatttgtggcataggattattcaataaacagcagttgtctgatgaaatatgtgtactttgttcttgcatcgtctgcagacagaacattctatacatattggtggactggtgcgcctggacgtagaagagttaactgtaggatcgatctatgttacagtttgggcatcaccacttgtcccacttcacatgggaaagacagaaaacacgacaacattgataaaagaacactttggcttgcaattacagcctcccataggccaggagcgggtaaaggagcttggtaaatgggtgaggaaacagttcaaagtttctgggaacagttgggatacaaactctaaggatatagccatcgctggtcttggttggtttggaattgggctgaaaggagaggcagtgttaggattatggacatatgatggtgttgatgtcatctccaggagctccttagtccatgagagggcttcagtttttgaggaagctggtttcacagtttcacagattgtttctaaggcagatagcatgaccaataagctgaagagcaccaagaagccaaaaaaggagagaatgaaacgtacttcccccacagagccggaagcttgagacctgcttccaccgatagatacttgagtcttttcatccagtcctgtgactggagtatcattttggtgatcatgttacacaatgttccgcattggtcctagaaactgttaattgaattcagaagcagcggctgagtatacaatgtattgttctccagaaggaacctgccctaatcggagtgtctatgttttacaaagctctaaattttgatcctttgctagtttgctgagctggagagtcaggaagtattctgagatgtcagtcagttacggaacacctatctggagagtcagtcagttaggaaatactctgtgagatgttttgatgttaacttataaaatccaacatgaggacttgtgttccagcattaaagggaaggtgtggagacattccagattgcatttgatgttatcattcagttttaggattcatgattgtgcctccttgtaaagttgtagctgaactataatgatgtaggttccacagatgcatatcctgtttttcgtcaacattgcctgcattatagattccgtgggcatcgttctcagaccacagcttgttttctaatgaactttctctcaattgcttgttgagctattggatgcaatgcgttttgtattg

SEQ ID NO: 183743 - DNA, 284 bp, Zea mays
  Clone ID: MRT4577_99157C.1
cccacgcgtccgcccacgcgtccgaatcaggcatgcaatgagcttggtcaaacgtggatggagtctggtaagttgtaaatcacatttattgacacaaaaatttccataaaccacattcctattaatgaacaattaacagtatgcttttttcctacttttcttgcgcaatgctgccattgtatctcgttgtatacctgaatcacacctcaaatgtgccaaaccagcatcacctgtatagtgttttctccttgttttatgtcactagtcatcagtatccttcagcc

SEQ ID NO: 183744 - DNA, 822 bp, Zea mays
  Clone ID: MRT4577_99158C.1
tggaaattgcagaactgctctatttgtcagtgagcatgggggacaatcagagattgtgttaagggtgaagcagggaaataatccgacatttgggttcttgatgcctgaccatcatctccacagctacttccgctacattgttgatcatcctcagctgttgaaagatggctctgatgctgacaccaataaaggcaacaaaattgttatgggtgagagtgagattgctgcctcgtcaagcggagctttatcattgcttggggccgtctatgagtctggagatgaggatgaaggcgtgcttccagctagttcaaaaggcaaggatcctggaaatgaagctttgcatgacaatgcccacaaaggctcatcattccttgtacatgacaacgaagtgaaaaaagatcagacagtaacaatagaagcatccactttagtaaaggataaacctattttcaccaagaagaacccaacaattgctggaaacagcattgttgctgctcagcgggagaaggttaaagatgccacgacagtgttaaccacttctaccaagtctgacaactctaaattaggtgtgtctgacacaaaagaaatgatactggaaccaccatccattttgaagggcacaatggagaaaatagtcgagtttattctcaggaacgggaaggagtttgaacaaaagctcattgagcaagacaggatgacagggaggtttccatttcttctgccgtctaatccatatcactcttactatctcaagatgcttcaggaaaccccagagtccaaggtcccgtggtggtgcttcagagcacagagacagaaggagct

SEQ ID NO: 183745 - DNA, 423 bp, Zea mays
  Clone ID: MRT4577_99159C.1
gctgggggggtggtttttttttttttttttttttggaatgggcagtggtgttgtgtttacatgatcgcaattgagttaatgctggtattgttgccatggttcacgtggaaaatgtgcaatgcagactgcttttttttttttctgctaggttacaggttagggggggtggtggttgtgacctgtgcagtttcttgggtgggggaacaacttgtgtgtttattagcggtggcgagacgatgatgatcgccccgtccaaggggaactgggggcttgtccacagcgtgaagttgggatgtttgacttctcttgattggatctacctgttgtggcaatgggttctgggtgggccaggggttgcaggtcacgagcttgatccgtgagaaatcatgaaacagggagctagtaagctttgttgtgtggaag

SEQ ID NO: 183746 - DNA, 435 bp, Zea mays
  Clone ID: MRT4577_9915C.1
agagcctatctcaatagagaattcctcaaacgaatcaacagcccagcaagttctccaacactcacccaccctacccaaaataatgccctctcaaatgatcagtcctcagttaccggtgccaacaagggcatcggctacgaaatcagtcaaggccctcctcagcttcccccaagtcctaccatgtactcttgggaagtcgctccctcgaaagcggccacgaagcggctgcaaagcttcgcaacgagctccccgatactaccaactcggtcgagcccatccagctcgacctcaactcagacagctccatccaatccgccttcgagacggtccagtcgtcccatggccgcctcgacgtcctcatcaacaacgccggcctcactgctgatcccgattttttgcgcggcaaagtcacactccgtgagagcatgaccaact

SEQ ID NO: 183747 - DNA, 344 bp, Zea mays
  Clone ID: MRT4577_99160C.1
tatggagtttccgctcagacaccttctgagggtggagcactgcagagtgctcttgtatttggggaaataggtcgacgcctcaaggatgttggacgtgaggtggtaaagacagtaaatgctgtatttgaatggcatatcacgaaaaatgggaatgttgcagccaagtggaccattgacctgaagaacggctctggagaggtttaccaaggccctaccacacgaactgctgacacgaccatcaaaatttctgatgaggatttcatggaagtggtcctgggcaagcttaacccacagaatgccttcttcacaagcagactgaaggcccgaggaaacatcatgctgag

SEQ ID NO: 183748 - DNA, 391 bp, Zea mays
  Clone ID: MRT4577_99161C.1
cctgctccttcagcatacgcctctcgatcatgttctactatccatgctccatgtgcttctgtattttacgacaccggcttcattataagcacaccagggcgatctagaggggctctaagagccagagcgctaggtcggagtccactaataaatgaattggccaggagatccttaacaggtagtgcatgactgacatctacgctctctcaaccatatgatgactcgttaccattacctgacagatctttttggacataccagtgcgttgacgcgccagatgcttgtttatgagattgacatacgaatgaatagattacagcacctcattatgtctgaaccaaaagactgaaagcccttcctgtgaaaccaaggtcacgtcacttgaccggtg

SEQ ID NO: 183749 - DNA, 291 bp, Zea mays
  unsure (1)..(291): unsure at all n locations
  Clone ID: MRT4577_99162C.1
ggggggggggttttttcttttcgacagttctgctttggaagttggaaagatagcacactggtgacatgcagaggcgactttgagccgtccccttccccttgtaattatgcatgtgctttttttttttttttagggcatnggattagatttgtgggggggggtgggccatttgaccttattggaggaatnttgagaggggaggggaggccaagaacttatcgtacttgttaaactgtgccgttgtttttgatttgtgaatactataatgcatagatatgggtgttacgcgtt

SEQ ID NO: 183750 - DNA, 199 bp, Zea mays
  unsure (1)..(199): unsure at all n locations
  Clone ID: MRT4577_99163C.1
aggcagcgagcgaagggggtgggnctatttttagagccaggctatagtgagagatactccntcttgtnatagggggctgtggagcgggtgcaatacattttcgagctggatgtgtccggccacatatctatcggacataatggagcaaatctggtaccattgagctggatatgtaggtggccttactaaggtcttcatt

SEQ ID NO: 183751 - DNA, 4591 bp, Zea mays
  unsure (1)..(4591): unsure at all n locations
  Clone ID: MRT4577_99164C.1
aattcggcacgaggcttccctcccttcccttccatccagcacgccacgctcgcccgcaagtcgcaactcgcaaggggtagcgcagaggcgggtcggacggcgagagagagagagagagagagagagagagagagagagagagagagagagagagagagagagcctagtcgactttccgtttcgggaaattcccgtgccgctgctcgccgcggcgagtgtcgccctttggatcgggcgaatcatcctgacccgcgccccggaaccgcagccaatcggtcgcgggagggggggctcgtggcggcgctgcgcgcgaggttgcgccgcgcggccggttcgcttctgctggcctgctgcatccgggcgcgcggcgtaattcggcacgaatttaggtagttgctgctgtgctgttcccccccgtctgtccctgagaggcccgcggcgtctccgcttcgcctcaccacccaccacctcctcctcgccggtacccctcgccggagccagcgagcttccggcgaagaaatccggcgggcacaccacacgggggcggagcaggggggaaggggtccggcgccggaatgggggcaagcggccgggtgctcaacgccgtcgtcgctggtgtcgcgtcgctctagggttaggtaggtgtccgtagctttctccttcgctccccctccctcccctttgccgcccggcgtcgcattggggtcccgtgccgaccgccaggccgcgtgatccacccgtgctcgagctcggagaggctcccggttgcgtggcatggggccatctcttccgcctgctgccgctgactgggaattcggcaccatttcttcgctctgaggagtagtaggtggcagcagtcgccgatctggatgccatctcaagtcatggatccgaggcgccacctctcccagttcagcaatccaaccgtggctgcgtcctccttctctgaggagcagtttcgccttcccacagagaggcaggtcggattttggaagcaggagtcgctgcatcacattggaagcaagtcagttgcatcttctccaattgaaaagccccaacccattgggacaaaaactgtgggtcgggtagaaccacaaccatacaagctgagagaccagaagactgcatttagccttgagcacaagacttttggtcaagagagacatgttaacctaccaccatctctgtggagagctgatcaagaccctaacctccaatctgatccatctttatttcccgatggaaggaggactagtccaaatgaggcctacaacgagaatgggcttttctcaagctccctatcagaaatttttgacagaaaattgggactgagatccatggatgtgcgtctacgccagccagttcaaaaggttgatctaactcatgtagatgatgagccctttgagttaacagaggaaatcgaggcgcaaataataggaaacatacttcctgatgatgatgacctactatcagatgttcttgatgttgggtacacagcccatgctaacatgggtgatgatgtcgatgatgatatattctacactggaggcgggatggaactggctttccctgctttcccaattttggttctgttttgtaaagtctcccgatctgtatttattgacttccacgatgcgggtcaccgaagacttaggttgctgcaaaattttgtccctctctttgtcctaaatgcaaaagggtgggtttgggtatgtgcattttaacttctaggccaagaatggtgagaagcgcagggagtgtctactgctttcgatcgctgtggttttgtgatcatattttactatcacataacagcagcatgtaatgccgtgagggtgcttcaatacaaaccacttattcgtggaaaacttgacatacattactccattccgaaggataatccttcggagaaggacattaaccaggggatgcttgttgtatttaatgttgacccctctataacagacaatgatatccatcagatatttagcgaatatggtgacataaaagggattcgcgatgcaccgcaaaagggccatcacaaaattatagaattttatgatgtcagagcagccgaaggtgcagctcgtgctttaaacaggagtgatcttgctggcaagaaaataaaactggagactggccgtctgagtggtgctagacgttcaacacagcacatgtccaaggagttggggcaggaagaatttggtgtatgcaaactgggcagtccaagcacaaatagcccttcattgccttcattgggttcatctaatatagcagcaatgacatcttgtggacgtgaaaatgggagtatgcatggtttgcattctggacttctcacatcaatgagcccgttcagagaggcttcatttctgggtctatcatctaccctaccacagagcctgtcctctcccattggaattgcttctgctgcaactcatagtaaccaggctccccttggtgagctcagccactctcttagtcggatgaatgggcatgtgaattatggttttcaaggcttgggtgctattcatccccattctcttcctgatgttcacaatggagcaaataatggcaccccttacaatctgaacaccatcacacctgttggtgtcaataagaactcaagaacagctgaagcagttgacagcagacatcttcataaagtgggttctggcaatctcaatgggcactcatttgatcgtgccggtgaaggagccatgggattttcaagaagtggaagcggtcataactgtggtcaccagttaatgtggaataattcaaataacttccacggtcatcccaattctcctgtgctgtggcaaaatcccggatcatttgtaaataatgtaccgtctcgccccccagcacaaatgcatggagttccaagagcaccatcacacatgattgagaatgttcttccaatgcatcatcatcatgtgggctctgcgccagcaatcaatccgtcactttgggacaggcggcatggctatgcaggggacttgacagaagcatcaagttttcatcctggcagtgttgggagcatgggatttcctggtagccctcagcttcatggtctggagctaaatagcatattttctcacactggtgggagtcgcatggatccaactgtgtcttcagctcagatcagcgcaccatctcaacagagaggtcctatgttccatggaaggaatcctatggtcccccttccttcatttgattcacctggtgagcggatgagaagccggagaaatgattcaggtgttaaccagtctgataataagcggcagtatgagcttgatgttgaccgcataatgcggggggaagactcacgaactacactgatgataaagaatatcccaaataagtatacctccaagatgctcttggctgctattgatgaaagtcataagggcacttatgattttatttacttgccaattgattttaagaataaatgtaatgtcggctatgctttcatcaacatgaccaatcctcagcatatcattccgttttatcagagttttaatggtaaaaagtgggagaagtttaacagtgagaaggtggcatcacttgcttatgccagaatccaagggaaaacagccctgattgctcatttccagaactctagtttgatgaatgaggacaaacgctgccgccccatacttttccactcagatggtcctaatgcaggagatcaggaacctttccccatgggttcaaacatccgagccaggtctgggagatcccggacttcttcgggtgaagaaaatcaccatgacatccagacagtcttgaccaacggtgacacttcttccaatggagctgacaattcaggtcccaccaaggatactgagtagctgaactgcagcttgctgcatcgctaaccacaaaggcccaagttattactttttgcagacctattttcagttctagcccctcccttcccatttcgattttgtttgttaagtcctcccgatctgtatttattaacttgcatgatgcgggtcaccgaagacttaggctgctgcagaagttttgtctctggcgggaagctatatgcaagagggtggtaccggttcgttccccagaatctatgtgcttgttaacctgaaggccgagaaaggcgaaaaggcgcagggagagcctccagattttggtcgctgtaagaattaaccccatgttgtacagctggtcccagtaatttgtgctgaggggagagtgaaggagtcatttgatcagtttttagtggtggtgtgtggagaggaagagtcttgcctgcttttcctttttgaactttcttttgtgccttcacctgtgttacattttgagtcgagggctcctcttaaattgtgtgcagaggggctcgattttgttaccccagaacaaggcgcatgtgcgtcggcgtcgtcttctgccaccgtatctatcgaccttatgtacatcttcatctatatatagtatgagttttgatgtcatctatttcttggatgtctcacaaggttatttatttgtatctcctcctgtaaaanaaaaaaaaaccttaaccgggcggccctttttttggctttaggggaacaacaatatttttttt

SEQ ID NO: 183752 - DNA, 477 bp, Zea mays
  Clone ID: MRT4577_99165C.1
actccaacccacaaaagtaaaaaatgccagggcgacaagcaggggcaaaaaaaaacagggggggagcacaggcagggttgatggggggggccgggccaggggcgctgaggacggggaaggagccaaaaaaaacggcaaaagaaaacgggaaaaaaaacggaggggacgggaaccaaaaggggagacaaaggggggggaccggggggccccccctgagggaaccaaggcaaggacaccatcccaaaaacaccgggcccccgcaaccgaagcggggagggggccccaaggggggcccccatgggacccaccccaacatgcggatggaaaacgccaaagggaaacaccaagaagcaagccggagaagccagctccaacccaaaccacgggggaaaaccaccgctgccgacaaccaaggaagtcctcttgccgatccctgggagaaagggccagcaaaagaagcccgcccaaaaaccccca

SEQ ID NO: 183753 - DNA, 700 bp, Zea mays
  Clone ID: MRT4577_99166C.1
aattcggcacgaggcgtctgtccctgagaggcccgcggcgtctccgcttcgcctcaccacccaccacctcctcctcgccggtacccctcgccggagccagcgagcttccggcgaagaaatccggcgggcacaccacacgggggcggagcaggggggaaggggtccggcgccggaatgggggcaagcggccgggtgctcaacgccgtcgtcgctggtgtcgcgtcgctctagggttaggatgccatctcaagtcatggatccgaggcgccacctctcccagttcagcaatccaaccgtggctgcgtcctccttctctgaggagcagtttcgccttcccacagagaggcaggtcggattttggaagcaggagtcgctgcatcacattggaagcaagtcagttgcatcttctccaattgaaaagccccaacccattgggacaaaaactgtgggtcgggtagaaccacaaccatacaagctgagagaccagaagactgcatttagccttgagcacaagacttttggtcaagagagacatgttaacctaccaccatctctgtggagagctgatcaagaccctaacctccaatctgatccatctttatttcccgatggaaggaggactagtccaaatgagggcctacacgagaatgggcttttctcaagctccctatcagaaatttttgacagaaaattgggactg

SEQ ID NO: 183754 - DNA, 666 bp, Zea mays
  unsure (1)..(666): unsure at all n locations
  Clone ID: MRT4577_99167C.1
aattcggcacgaggctcgacttcctcctcgcccttccttccaccgcttccctcccttcccttccatccagcacgccacgctcgcccgcaagtcgcaactcgcaaggggtagcgcagaggcgggtcggacggcgagagagagagagagagagagagagagagagagagagagagagagagagagagagagagagcctagtcgactttccgtttcgggaaattcccgtgccgctgctcgccgcggcgagtgtcgccctttggatcgggcgaatcatcctgacccgcgccccggaaccgcagccaatcggtcgcgggagggggggctcgtggcggcgctgcgcgcgaggatgcgccgcgcgggcggctcgcttctgctggcctgctgcgcccgcgcgcgcgcgcccgccgngaggtacgagcgcatgactccccgccgctgaactgaatcggtcctgggctggttttcggcttttgcgcgactgggcccgtgcgccgtgaccttattgcgcgggcgccgcgcggtttgcgcagggtaggtttggtgcgatggaaggggcggcggcggcggaggtgggcggcggcggcgaggatgtgcatatcaagggcgccaaggagagtgggcagcccgcgggggcggcgcagcagccgccgccgctgccgtccggca

SEQ ID NO: 183755 - DNA, 605 bp, Zea mays
  unsure (1)..(605): unsure at all n locations
  Clone ID: MRT4577_99168C.1
gtgaataaagnagatcgtgatgcaccgcaaagggccatcacaaagttatagaattttacgatgtcagagcagctgaaggtgcagttcgtgctttaaacaggagtgatcttgctggcaagaaaataaatttggggactgttggtctgagtggtgttagacgattaacacagcacatgtccaaagagtcggggcaagaagaatttggtgtatgcaaactgggcagtctaagcacaaatagccctccattgccttcattgggtatgctgttggtttttttcatctttaatgtatgtcatgtctatagctacatttcctgacatggaggataattcttcaaggttcatcttatatggtagccatgacatcttctggccgtgaaaatgggagtattcatggtttgcattctggactgctcacatcaatgagcccgttcagagaggcttcttttccgggcctatcatctaccataccacagagcctgtcctctcccattggaattgcatctgctacaactcatagtaatcaggctccccttggtgagctcagccactcacttagtcggatgaatgggcatatgaattatggttntcaaggcttgggtgctc

SEQ ID NO: 183756 - DNA, 358 bp, Zea mays
  Clone ID: MRT4577_99169C.1
gccggccggttccaaacttcgcaagcctttcaatctaaagtgtatccttgataagccagtattttaaccctgctagcatgcttccttatagtttcgaagtgcaaggagatcccgttacctgtctgtatcataactcataaattgttcgaaactttgattgaggatgtggcgtgctctgctcctctaaacctggacgatgtggaatggtgggaaaaccccccctactattgtgttgtttgtgaatgtaccgttgtaaccacaagtgaacttgctgtctcggacaagaattattagctaaataaccatggtactgtttgttgaaaaaaaaaaagaaaaaaaaaaaaaaaaaaggccccta

SEQ ID NO: 183757 - DNA, 307 bp, Zea mays
  Clone ID: MRT4577_9916C.1
ataatgttatttgtggaatacattatctccttaaccaccctctacagctgggacacccgcaaagcggcacaaccgacgggaaggcaaataacagcctacaacaacccggatccggcccccaatgaccaccaatacccggacaaaaactggaacccctggccaaccccaaaccagggcccaaaaagcccgggggaaacacaccgggtgaacgggaaaaaaaaccctaacggggcgaatccaaaaaaaccggaaaaacggcagccccccaaaaccgaaagggaccaccctgggccccaacaacaaaacc

SEQ ID NO: 183758 - DNA, 129 bp, Zea mays
  Clone ID: MRT4577_99170C.1
acatcgaaagatcgtgggaggtttgttactcgcgaaagcgtacaggccgcccaacatgtactagttgtccacgttcctatctctggacgacgcggttagaaggaccgtgttttctgcgagaccagaatt

SEQ ID NO: 183759 - DNA, 2099 bp, Zea mays
  Clone ID: MRT4577_99171C.1
ggtccggaattcccgggtcgacccacgcgtccgtaaagctgttatgtttattatgattgtgaaagctaaactgtgaaaagttgatcaattaatgcatgttatttaattgatccctgcatgactgcatgtgtaccaatttttgcagccatgggattttcaagaagtggaagcggtcataactgtggtcaccagttaatgtggaataattcaaataacttccacggtcatcccaattctcctgtgctgtggcaaaatcccggatcatttgtaaataatgtaccgtctcgccccccagcacaaatgcatggagttccaagagcaccatcacacatgattgagaatgttcttccaatgcatcatcatcatgtgggctctgcgccagcaatcaatccgtcactttgggacaggcggcatggctatgcaggggacttgacagaagcatcaagttttcatcctggcagtgttgggagcatgggatttcctggtagccctcagcttcatggtctggagctaaatagcatattttctcacactggtgggagtcgcatggatccaactgtgtcttcagctcagatcagcgcaccatctcaacagagaggtcctatgttccatggaaggaatcctatggtcccccttccttcatttgattcacctggtgagcggataagaagcatgagaaatgactcaggtgctaaccagtctgataataaacggcagtacgagcttgatgttgaccgcataatgcgaggggtagactcacgaactacactgatgataaagaatatcccaaataagtatacctccaagatgctcttggctgctattgatgaaagtcataagggcacttatgactttatttacttgccaattgattttaagaataaatgtaatgttggctatgctttcatcaacatgaccaatcctcagcatatcattccgttttatcagacttttaatggtaaaaagtgggagaagtttaacagtgagaaggtggcatcacttgcttatgccagaatccaagggaaaacagccctgattgctcatttccagaactctagtttgatgaatgaggacaaacgctgccgccccatacttttccactcagatggtcctaatgcaggagatcaggaacctttccccatgggttcaaacatccgagccaggtctgggagatcccggacttcttcgggtgaagaaaatcaccatgacatccagacagtcttgaccaacggtgacacttcttccaatggagctgacaattcaggtcccaccaaggatactgagtagctgaactgcagcttgctgcatcgctaaccacaaaggcccaagttattactttttgcagacctattttcagttctagcccctcccttcccatttcgattttgtttgttaagtcctcccgatctgtatttattaacttgcatgatgcgggtcaccgaagacttaggctgctgcagaagttttgtctctggcgggaagctatatgcaagagggtggtaccggttcgttccccagaatctatgtgcttgttaacctgaaggccgagaaaggcgaaaaggcgcagggagagcctccagattttggtcgctgtaagaattaaccccatgttgtacagctggtcccagtaatttgtgctgaggggagagtgaaggagtcatttgatcagtttttagtggtggtgtgtggagaggaagagtcttgcctgcttttcctttttgaactttcttttgtgccttcacctgtgttacattttgagtcgagggctcctcttaaattgtgtgcagaggggctcgattttgttaccccagaacaaggcgcatgtgcgtcggcgtcgtcttctgccaccgtatctatcgaccttatgtacatcttcatctatatatagtatgagttttgatgtcatctatttcttggatgtctcacaaggttatttatttgtatctacgtgtctgttatgcttgtggtgtgtaaagcctctgtgaatcttatgcttggttgcttactatgtgagcatgaatgcaagctgtgagcgtgtaatccttgttcaaatccagagtatacaaacaattagctattgttggtatactctggatttg

SEQ ID NO: 183760 - DNA, 595 bp, Zea mays
  Clone ID: MRT4577_99172C.1
gccggccggtccgggaattcgaccgttcacagagaattgaatcatggaaggagggggtagcaacacgcccttctaccgcggcaacagcaccgcactcgccaccaacccttctgctgctgctgctgctgctgctgcgaatggggcacagaaaggggacagggaggctgccatcgatgccgagatagtgagggttaacgacctaccagctcatagttcctacgccatacaccgcatgaaggtgctaaacaaacttcgtcatctgctgtccatcaagaggactacatctcaagatgaggagctcgaacttctcttcgcaagcctttcaatctaaagttttcgaagtgcaaggagatcccgttacttgtctgtatcataactcataaattgttcgaaactttgattgaggatgtggcgtgctctgctcctctaaacctggacgatgtggaatggtgggaaaaccccccctactattgtgttgtttgtgaatgtaccgttgtaaccacaagtgaacttgctgtctcggacaagaattattagctaaataaccatggtactgtttgttgacttctaaaaaaaaaaaaaaaaaaggccccta

SEQ ID NO: 183761 - DNA, 1282 bp, Zea mays
  Clone ID: MRT4577_99173C.1
tgttatgtcgttacctctcatagcatgcttccttatagttatgatacagacaagtaacgggatctccttgcacttctgaaatataaggaagcatgctatgagagcccgtcacttgtggttacaacggtacattcagaggggggggaatagtagggggggttttaccaccattccagatagtcacaggtttagaggagcagagcacgcgacatactaaatgaaaggttggaacaatttatgagttatgatacagacaagtaacgggatctccttgcacttggaaactataaggaagcatgctatgagaggtaacgacataacagtagagataggcgtcgggctcgtccccgccacgatgtcgtggaagaacaccttgaaggtcgtgaatccgctgtcgtcggccgccgtggcgccggacgcgagcgcggcggagcacagcagcaggaggaggagcgtggtggtggggccagctttttttttttttttactgtaccatatagaagtcaacaaacagtaccatggttatttagctaataattcttgtccgagacagcaagttcacttgtggttacaacggtacattcacaaacaacacaatagtagggggggttttcccaccattccacatcgtccaggtttagaggagcagagcacgccacatcctcaatcaaagtttcgaacaatttatgagttatgatacagacaagtaacgggatctccttgcacttcgaaactataaggaagcatgctatgagaggtaacgacataacagtagagataggcagaagagtgggctcccctagcagggttaaaatactggcttatcaaggatacactttagattgaaaggcttgcgaagagaagttcgagctcctcatcttgagatgtagtcctcttgatggacagcagatgacgaagtttgtttagcaccttcatgcggtgtatggcgtaggaactatgagctggtaggtcgttaaccctcactatctcggcatcgatggcagcctccctgtcccctttctgtgccccattcgcagcagcagcagcagcagcagcagaagggttggtggcgagtgcggtgctgttgccgcggtagaagggcgtgttgctaccccctccttccatgattcaattctctgtgaacggtcgaattgcctgtggtgagcgcaacgagaagggtgaagggacgcagaaggaactcggattctcggaaggttctagagtcccgccgccgctgcctcctctggaatcccgctcccggccagcctcgagggtaccccaa

SEQ ID NO: 183762 - DNA, 329 bp, Zea mays
  Clone ID: MRT4577_99174C.1
atcttggccgcttcgacaaggactccccgatcagggccatcgacttcggcctctgcgtctccttcaaggagggcgagccgctcatggacatcgtcggcagcgtctactacattgcgcccgatgtgctcaggacgacgtacgggcacaaggccgacatctggagcgtgggcgacatactctacatatttctcgccggcgtgcctcctttctgggcagagaacgagaacggcatctataccgacatcctgcgagggaagcttgacctctccggagagccatggccgtacatctcgttgggagccaaggacctcatgatgaagatgctcagc

SEQ ID NO: 183763 - DNA, 395 bp, Zea mays
  Clone ID: MRT4577_99175C.1
ggaaaggggagcatgtcctcgagcgctcccttttcgaatccaagaaagaaaggggggaggggtaaaaatgcgggggcaggggacatggccggcaaaactcaacccggccgcaacggacatgtgccgggcagagcaagccaaggctcaatccgaacctaacaggctgaaaccaatgtggatgtccacagtttccgacccaattgcttaaaaacacaccagaattggcaaaaccagaaccttccttaacacatctctctgaaccctgcacaacggaacgcttgtgttatatctcaccccaaagaaactctacaaatctgaacacagggggaggaggagaatctcgctcttgttcgcgcgagctcttctcggttatatataagggtcaaaagtagagc

SEQ ID NO: 183764 - DNA, 351 bp, Zea mays
  Clone ID: MRT4577_99176C.1
atttttaggacgagagagtacattacaaatattagtcgttttagcatttgaatagatttatataatatttaatatatgtgttttatatatgtctagatttattgtcatttatttgaatataaatataaaatttaagggctaaaacaaataatattttaggatgtagggagtatttgttttctccattacattcctgggatttttttcccttttgaacgggaaggtgaacctatttttaattgactgaaaacagaatctgaagacgatcagctcggcacacttgttcgtggggcggcagcccagagcatggagagtttgaaggccatagcggataggcttcaggttaggatt

SEQ ID NO: 183765 - DNA, 177 bp, Zea mays
  Clone ID: MRT4577_99177C.1
ggtcccggatcgcagtgccgggcccgacctacgcgttcgcgtttacgcagcacaggtggaggctatgagaagtgaagcgatgaagatcagagatgaattggaggcagagaagaagatgctccacatggctgtggcttggcgagaagagagggtacgaatcgagcttgttgactcaaa

SEQ ID NO: 183766 - DNA, 316 bp, Zea mays
  Clone ID: MRT4577_99178C.1
gccgcctccggcaggcacgggtacaagacgctggctgacgtggagggcgtggtggacgggtacgccaaggccaggctggcggtagacgtggtgtggagggacgtcgggtacgtggaggcgttcaaggagttcacggtggatgcggtggagttcgcggccggcccggtgcgggagttcgtcgagcgactccaccggaacggccagacgtacgtcgtgattgtagacccaggggtcagggtgaaggagacgtacgggacgtacgtacgaggcgtgcagcaagacgtgttggtgaagcggaacggcaggaagtaggtgg

SEQ ID NO: 183767 - DNA, 219 bp, Zea mays
  Clone ID: MRT4577_99179C.1
ctgcaatacgcattttacaaccacgaacgcgtgctcgctgtgctctaagccgatgcactatactggaagctgatgaggcgaccgtggcaaggtcgggatcactctcgcgttggcaggagctctgtccttggcttgggactgcaacggtaacgatgccgcttcggacttctaaatgtcacatgtacaaacagacagaggaagctacttcagagatcatac

SEQ ID NO: 183768 - DNA, 422 bp, Zea mays
  Clone ID: MRT4577_9917C.1
tcgaaaaaaaaaaaaaaaaaaaaaaaaaaaaaaaaaaaagggcggaacaatctaaaagaatccaaaataaaaaaaaaaaaacgaggcggacgttttaaaatggttctataaatgtcacctaaattgggtgggcttgtctcgtctgtgttccatcgtgcctgcctgggtaaatccctggggttgccttttttaaggggggtgcgggggatccccctttggcccgctgttttcttcgtcgtgggggccgtccccttggcccttccctgctgttgcgcctcctggctggcccctgtttcgccccctgtcggggccccttcggggccgcggccggggccgttccccgcagtgtgcccttttcgcttgccagttgggtcgccccctttccttgcgcttttttccctggctttcgtcgcggttccccc

SEQ ID NO: 183769 - DNA, 348 bp, Zea mays
  Clone ID: MRT4577_99180C.1
atggaggaggaggtagagtcatcctcggcggtggcccttttgctggtactggtggcgcccgtcgtggtgccgtcgatggcgctgctggtacgaggccagtggcgccgggccgcgccgcggagggaggagggagaagggattattatagatatcatgactttagagtcaggtctgagagaagacacacaccccatgggagctgaacttcgtgaaagcaagctgatgaacaagtacaatgagctcaaggaggcaggaaagcttgacgccttcatggaaagacggcggagtaagaatgcttctaaagatcattggtacatgccataccgatggaatggagatgttgcgtaa

SEQ ID NO: 183770 - DNA, 293 bp, Zea mays
  Clone ID: MRT4577_99181C.1
cacacacacacacagaacttatcatgatgtcatgcaccagaaccatcgaaatcagcatcttctattccagacgaacctgaatacgtaggacacaccatctaccttcagaacgagatcgtactgatcttcacgagcaaagtaaggtgacacaagccgaaatctgccacctacctgacacctttgggcaaggcctagagatgtctactgtatccggcgactgatgcgcttaagcacccctaggctcttgcacctgctagatcggctcttactcctgcctggaacatccacagata

SEQ ID NO: 183771 - DNA, 618 bp, Zea mays
  Clone ID: MRT4577_99182C.1
atgttcatctgtaggtgcaaatatgttcatcttgcaaggaggaagaattcaactgttgcctttgtcttctccacagtacccttaaacatatcattccgtaggggattggtgcaccagttgagggctcaatggtttcaactagtgacgttggtggcgtataccaatttgactactaacaaggattcattcagatgggacctcactgccaatgggttgttctctgttcagtccctgtatcaggcaattcttaacaatggggcggttagggataacaaggacctttggaagcttaagatacctctgaaaataaaagtttttatgtggtacctcaaaagaggtgtaactttaacaaaggataacttggccaggaggaattggcctgcatctgcaatttgctgggctatttggttaagcaggaatgatgtgactttcaataaatcttctcctaaatcttgtctgcaggtggtcttgggtgcagtcatgtgttttgtcaaggcagtgcgcatggtgtcgcagagctccatgaccgaggatgtcgattttgccagagaaatcgtcgtaacgagcacgaggaaatcggtccgaatcttctctggacgcgtgcttcaaggaatatag

SEQ ID NO: 183772 - DNA, 441 bp, Zea mays
  Clone ID: MRT4577_99183C.1
cccacgcgtccggtcctcaagccccaatatttggcgtagccagcacactgtgcttgcatccctgtgctctccacccactggatcctcgacctttcgctgttctgtccattgttgtaacttcaacactattcatctatcgttcttgtgttcttgtgcagttgagtggtgatcaaatctgaagattcctttatccctttatggattggtttattccttttctgattttctgtccagtattcgtatattgcttggatttattatcctaggaattcgttctgttcttagggctcctctcattgttgtgaaatcaaaaccgaagatttcttctgtcagggcccaagagggctgcggccaggacctgtcagggcccaagggggctccggcaaggagcagcagcaaggagcgcaagtcaaaggataagaagattagttgagattatct

SEQ ID NO: 183773 - DNA, 565 bp, Zea mays
  Clone ID: MRT4577_99184C.1
ctcgtcgggaacgattggtagtagatctttttggagtaggtaggtactcgactcgccggtcccctttcgttcacgggatgatgccggttaatggtttcgccgtgcgcgtagatccactgtaaaggggtcctttgggcctgccgcctacccttgcgttgcgtcgatcatctccctccatggatgctctcgacagttttgggtctccgctgctttatgcagccgtctctcgaaggatgacctaaatcctcttaattttttttttgtaatatatgctcgtcgacaatcatactttttaattgatgcggtggatccatctcccgtctggtatgctacacgattatatgggatgcggatgtgttatctctgctccaaaagaggaggacgctagaaaatttaggtgttgctaacgcgactaagactaaaaatttatgacacagtttaaaacaacttgtagctataaaataagtaatagatgttgaaaaataccttatttaatagtcatcttgattacaatccatttacaaccaaatgtcataggcgaataaatcggaaaaaaaaaaaaaaa

SEQ ID NO: 183774 - DNA, 397 bp, Zea mays
  Clone ID: MRT4577_99185C.1
cggatgggataaagaaaatagttgtgcatacccttattgcattttcctttgaaacaaacaactgcccggatttacaaaagcgggaaaaatgttggttattaaatggctttaactacaaaaccagttaaaaaacaaggccgatccaaccatactttaaagcttgcgcaatccctccattccacataacataagtagagcccccccaccaacacaaaacaaaggcttcgttgcagctggggcaatctgcatttagggggcctgaacctcctcgttgtcctccatttttttgaacaaacatgaaaaaaggcgccattgccccaagaaaaccaactggttctttaatggccccctcctctcccgagccctcggcattgccctccttcatttttggaatata

SEQ ID NO: 183775 - DNA, 402 bp, Zea mays
  Clone ID: MRT4577_99186C.1
cctgtatgcgcaggccaccaaggctgtgtccctgcggacgccgttcgagggcgacgaggcggcgcccagggttcccacgctgccggcgcggctcgtcagctgggcagggccgggggacgcccggaagaagcacaagaagattctgcctgcccctccggacgatgctgctccggagcctccaccacagtcacctgtagccacccctgcgaaggttggcttgtgggaccagtttgaggcttatttccgtcctgtaacactggctgatatcgaaatgttaagaccaaagctcccattcggctacagcaatgtcgactcatgtatgctaataccatttctggggagtggcaaggaatcaataaaccaagctgagacatatgacgtggctgtggctgaaacaacctc

SEQ ID NO: 183776 - DNA, 212 bp, Zea mays
  Clone ID: MRT4577_99187C.1
aaatgaaagcacctgacctttacacattcgatgtaattacgggcggcgacttcggatgatttttcgttgagcgaaattaagcgacggccgtgcatgaactaggaaaaagggggctttaaatgtgctagacaatactcaccgcctccattcctgtgcctttgaaggtcaccgcttttgtaacctgaatattcatttgcagagtggcgtccttt

SEQ ID NO: 183777 - DNA, 209 bp, Zea mays
  Clone ID: MRT4577_99188C.1
tacttatcactctttatgcttttaccaatctataaactctctcgggcctgtttcaatccacgggggcaccggcatcttaaacaaccataacatctcaaccctcacgtcacatgcattttccggtcaatacttgcacaaactaaataacttacaaatatccaacactatgaaacccctctaattctacgtcaacctccacacacaataca

SEQ ID NO: 183778 - DNA, 268 bp, Zea mays
  unsure (1)..(268): unsure at all n locations
  Clone ID: MRT4577_99189C.1
gaccctaccttcgccaatgttacctatgcggcttccaanaataaatgaggccggcgcttctcctgctttggcaatacctacttttcatcatcacaacttttctttgtcatcctttctcttatcttttgaaccttttacatcttgtagcattttcacttttatctatttatttcgtaccatctttcttaaaaaattaaatttttatttttatttttaatttttaatattactattattttttttttttttttttatttcttttttattt

SEQ ID NO: 183779 - DNA, 446 bp, Zea mays
  Clone ID: MRT4577_9918C.1
ggggggggcgcataatatatttaaagcttccaggcaactttggggaaagctgaacccaaaaacaagatcaacagttttcagcagacgggcagccaccccaaaggggcccatacagattatttactatcaactagagaccaggaccaagccccatccttaaaaaaaagaaggggacagctagggacaaaagggaaatgttgattcaaagcaaaaaccttactaccaatctagggctttttatccttaagggggcccttgggaatcttcgataggcccttttcatcgaaaaggggaaaaaactttttaagttaaggcatagccttctaaccaaaagcataaaccttggcctaaaatttctaaaacaaaactgggacagggtacagggccccaaagacaatttaaaacagggtcaggaaagttgcaacacctcccgagaaactgaaaaa

SEQ ID NO: 183780 - DNA, 447 bp, Zea mays
  Clone ID: MRT4577_99190C.1
tggcgccggcgccaccttcttctcgggcatggatacccgcgccacggcccgcctagcaaccaccgcagtggcggtggtggtggccgtcgtcacggcggcggcggcggcgtcggagcgcgacttgcggaggtccccgatcgcggtgaccggcttggaagccttccagctgcgcctcttcttggcggcggtgtccgcggcaccggcgccgccgccctcgctctggttgcggcgcaggcggcggtagacccgcacgccctcctcgtccgccggctcgtcggcggcgccggcgctgaagaccttgacgccgcccctgacctcgtccatcttcatccgcgcctcccacaccgacgacgacgacgacgacgccggtttggcgccggcgctcctggtggactgtaccgacacgcgccttcgttcatcggtggcggtactggatgccgtgcccct

SEQ ID NO: 183781 - DNA, 2178 bp, Zea mays
  unsure (1)..(2178): unsure at all n locations
  Clone ID: MRT4577_99191C.1
gcctcctttctgcacgccgcgcgcctctccagggggtgcgtgcgggagctcaaacagatgcgccagggggacggcaccgtcatggtgtcccatttcatggtcgagctccaaggcctgcgctccgtcgacggcgaggacccgcccaggtactccacctcaaccccatctcagggggattgggggcggcgccctatcctcnagcacaacacctgctacaggatgcggccgggcgccgcgcagcgctgtgatggcacaccacccgacgacaatgacgacaaagtcgatggattccccaaatgtgagaagtggatacgcaatgacattgttgacaccaaggagtccaagacgacttcatggttgaagagattcatcgggcgtgcgaagaagcctgcaatgacatggccattcccctttgtagaggagaggctatttgttctgactatacaagctggagttgaaggtttccacatttacgttggtggtcgacatgtgacatcttttccttatcggccggggttcactcttgaagatgcaacagggttatttgtcaagggtgatgtagatatacattcagtttatgccactgcacttccttcgtcgcatcctagtttttctcttcaacaagtccttgagatgtcagaaaagtggaggtctcggccactaccaaaaggccccgtttcccttttcattggaatactgtctgcatcaaatcatttcgctgagcgcatggctgtgaggaaaacatggatgcaggctccagaaattaagtcttttgaagccgtggctcgattctttgttgcactgaattcaaggaaagaggtcaatgtaatgttgaagaaagaagcagaatactttggagacattgtcattttgccatttatagaccgctatgagctggttgttcttaagacaattgctatctgtgagtatggggtccagaacttgactgctgcaaacatcatgaaatgtgacgatgatacatttgtgagagtagatgtggttctgagacgcatcaagttgaacaatggtgacaaaccattatatatggggaaccttaacctcctgcacagaccattgagaactggaaaatgggcagttacagacgaggagtggcctgaggatatctacccgccatatgcaaacggaccaggctatgtgatttctggtgacatagcaaaattcatcgtgtcacagcatgccaatcagagtttaagactgtttaagatggaagatgtaagcatgggcctatgggtcgagaagttcaattcaacaaatcctgtccaatattcccacagctggaagttctgccagtacggttgcctggagaactactacacggcccactatcagtcacccaggcagatgctgtgcttgtgggataagttggtccgtggtcaggcatcctgctgtaactacagatagcagagtgaagctaaggattgctggacgctgtcctctcttcatcataccccagccaggtttaggtcggttggctggtattttctttttcgacacaatcgtagtgtagtaggtgttgttgctcctccgtcgctggctcaaatatgagctaaatgcatgggtgtgcggtaggagattgaagatttaggaagccccaaccagttggtattgttttttacacgatctgtattggtccaattgtggcgttggcgtccttgttcttgtaattgatccaattttgatgtagtaggccagattagagggaatattccagatcagatgtacgtctccgttcttttcttatagtaataactagacacaatttgccctgaaaaaaaaaaaaaaaaaacggccaaaaaaaaaaaaaaaaagcggccggtactctaggaatgagacggattgaagtggattgagatgtattgggagagtttttgatctattggggatttaaacactctttaatccctccaaactacttcaatccaagagtacccaaactaggcctgaagatttaggaagccccaaccagttggttattgttttttacacgatctgtattggtccaattgtggcgttggcgtccttgttcttgtaattgatccaattttgatgtagtaggccagattagagggaatattccagatcagatgtacgtctccgttcttttctnatagtaataactagacacaatttgccctgatctttgcaggatccttctgc

SEQ ID NO: 183782 - DNA, 769 bp, Zea mays
  Clone ID: MRT4577_99192C.1
gcacgaggtgatttctggtgacatagcaaaattcatcgtgtcacagcatgccaatcagagtttaagactgtttaagatggaagatgtaagcatgggcctatgggtcgagaagttcaattcaacaaatcctgtccaatattcccacagctggaagttctgccagtacggttgcctggagaactactacacggcccactatcagtcacccaggcagatgctgtgcttgtgggataagttggttcgtggtcaggcatcctgctgtaactacagatagcagagtgaagctaaggattgctggacgctgtcctctcttcatcataccccagccaggtttaggtcggttggctggtattttctttttcgacacaatcgtagtgtagtaggtgttgttgctcctccgttgctggctcaaatatgagctaaatgcatgggtgtgcggtaggagattgaggcttggtttgggtactctaggaatgagacggattgagtggattgagatgtattgggagagtttttgatctattggggatttaaacactctttaatccctccaactacttcaatccaagagtacccaaactaggcctgaagatttaggaagccccaaccagttggttaatgttttttacacgatctgtattgggccaattgtggcgttgggtccttgtcctgaattgacctccaattttgatgtagtaggcccaattaaagggaatattccagatcaaatgtacgtccccgtttttttttaatagtaataactagcccc

SEQ ID NO: 183783 - DNA, 412 bp, Zea mays
  Clone ID: MRT4577_99193C.1
gggggggaataaagctgcctgcagtccgccgataacaatggaggatcggctaccactatcatgtccacagctcctgtctttatatcaccgggcgtggcctcactggacctggcgggcaccgttcacggctgcaacttgctcggggggggggagataacctggggctatcgcccccgcaaggtaatggacggcgggcgctgactcaacctgacactggaccgcactttctggtcctgcttccaaaccatgagcgagtacctgttctgcaagatcgacatgcacatcaatctgatacccagctactgcgaggcactgtcaccaccttctacctgtcgaacacaggcgactcgcactactagatcgactcagagatcctgggcaacgtgatcggggagccctactcgctgcacac

SEQ ID NO: 183784 - DNA, 211 bp, Zea mays
  unsure (1)..(211): unsure at all n locations
  Clone ID: MRT4577_99194C.1
gaggcctcgattctccaaggttctccttgtcgacttcgcgcgcnnatcggaattcgtcacatttttccagtatctccttgatcatgttcatgatttttccaggctatggtcacttcagggtcagaagtcatgctaccagnntcagcaataagctttcctgtnctcaccagnncgaagaaggttttgaaaacatcacccgccgatatctccc

SEQ ID NO: 183785 - DNA, 265 bp, Zea mays
  Clone ID: MRT4577_99195C.1
gtgacacacggttctcctggacattcttacgtgccaactattgctgacgaagcaagtggcttaggaataatctgctgatgtctgcaatacaggaccttccagcagcgcacttcaatcacactaagaaccggaatacgatctgacatcatgcgctctaagctcacgcggggagtctgtaaaatccattgtctatataccgtgagcgtacggattggacttatacactcagttctgagaagtagaaaggctgaccaatttatcatat

SEQ ID NO: 183786 - DNA, 383 bp, Zea mays
  Clone ID: MRT4577_99196C.1
atgaagggcaattgctacccacctcactgcttttctttggactcctgtctaatgctcgggggggctgttatctcaagggatgggaatactgacgaaggcatcataaacaatacactctctatacatggtattaactgataccgacttagatatagctgcaatttaaactacctaaacactagaatcttgcctgcttacaactcctctagaggacatgaaacgggagctttttaatctaactgatcaacatgtaaaagaagtgcctagctgatagtctacttgtgaatctcttatgtcaaaactcgtagcatcagacaatgcatgccttagatatgaaaaagaatacggcgaattttataatgaacttgaattacagttgtcaa

SEQ ID NO: 183787 - DNA, 518 bp, Zea mays
  Clone ID: MRT4577_99197C.1
ttatacatagctcgctcactctccgtggcaagtatggcagtagctcgatcattcaatacaaagaaaaacacaaaccagaagttccaccacctgtactaagactagctaggacgactcaccagaaaggagagcaactgctctgttcaccaaattacatgacttcagtaaatcaccgatctatttttgcttctgacttgaaattaagattggatgaaccgaattgtattgctgcactcagttcaaaagaaggcaccatgctttgaacagtcagaagctcagaaatgttcacaatgcatacaactcttcaatcacctgtttacactgtcaatggacctcccgcttctggctgcttcctcacctgtcctgatcttgccaacgctgagttccagcttgatatctgctccccccttgctgccagttactgggagtaagtctgaaaacggacaggaaggtgtgtcagttcagcttgatatcaaaggttgggctcgtggcggcgtccacgtcgagcggcctggtgc

SEQ ID NO: 183788 - DNA, 329 bp, Zea mays
  Clone ID: MRT4577_99198C.1
attcggctcgagggctgagccacaatttatcgtgagaacatctgttttcccagacagtccaggtgatttagaaatgggcctagcacgtttgcatggttttcatatgctatgaacgaacagtgtcatatggcttgctctggtcattccctgcttgggaagagcatgtgctggacagactatattgggacaaaaggacctatgtgatgggcacatctctattacttactgctattatagggttacccgaggaatatgaaactctgttacgctgcttcagagtaggtgtctcaagaaagaacccaccaggacattgaaaaggaatcgtccaa

SEQ ID NO: 183789 - DNA, 619 bp, Zea mays
  Clone ID: MRT4577_99199C.1
ccggccgggaaaaaaagaccacgcctgaaagctttgaagagtataagcttgacctctacaataacgctggagtacattattgtatcagcagcatctcgctcgtagccatgatgacgacgagaaaagtggccgcggcgggaggcggggaggcggaggagatgaagcggaggaacgccgagctcgagagggcggcggcggaggcggcggcaagggaggatcggctgcggcgggagctggaggcggccctggcgcggctggccgtggccgaggaggccgaggagcgcctgtgcgtgcagctcggcgagctggaggccgaggccgtggagcaggccgtcgagtaccaggagcgtgtcagggcgctgtccgagcgcctcgccttccttgacggcgtgctcagatcgtccgggatccggggcttcgccgccggcgtaacgacgatggattaaacaatcgagctgtaccgtcatcggtgtatgtcatcgccgataaaaccggctgctcctcgagtatcgatgacgggtgtgtagagctgtacattttgttatttctatcctcaatattgattaagtgtgtatattgtccggagctgtatattagctcgagagatgtgctccattca

SEQ ID NO: 183790 - DNA, 376 bp, Zea mays
  unsure (1)..(376): unsure at all n locations
  Clone ID: MRT4577_9919C.1
agcggcacgaggaaacggtcaacagtactgggctcaatccagcccgagccagcggcacgaggaaacggtcaacagtactgggctcaatccagcccgagccccttgtggtttgaaaaacccctttaagagtctgcagtactgtttctctgtgccattgacaattgcaantagacccttccccattctattctttacaacccgcgatccccgacggtggatggcgacaggccgagctcccgcgagctcgtactgaccggaataggcaacggctagtccttcccttagcttgacaccaaattcaaccctgcacgaccatttcccctcacttaattgcaaggttcaagctcttaatcacactgcccactgtcacacccgg

SEQ ID NO: 183791 - DNA, 409 bp, Zea mays
  Clone ID: MRT4577_991C.1
aatacggcacgagggggtccgaaatcgggtagcctacaccgctacagctagtagagcccgctctgccagtcataatcccactaatgaagaagcctgccttcgccaagctcgcataccggaccgacgaggccggcgtggcttcaaaggcaaagcctgccgccgccatgccgaaggcgatcagcgctggtgcctcccacccgctttagtttgatatgagcaaggcagctatcacgacgctaaaggtgaggaccggcatcagctctctcgcgaccgccaaggatgatgggtgacaagcacggggcgcctctgcccagccgcctagcaaaagaagcagtacatacagctcccaggggccaagaccaaggacaagctagtgaggggagagcgcttggcacactatcggacgccg

SEQ ID NO: 183792 - DNA, 184 bp, Zea mays
  Clone ID: MRT4577_99200C.1
aaccaatttgcttcgaggaactgtctattgttctagaggcatcacaacattgatggtgtgggctatgagaatgttaataagttatacactaagcgtggggagtattggctgatgccagtacttaccataaattggaaggttgtttgctaaatctaccaaataaatataaagggcagccgttata

SEQ ID NO: 183793 - DNA, 174 bp, Zea mays
  unsure (1)..(174): unsure at all n locations
  Clone ID: MRT4577_99201C.1
tacgactcncatcgtcgcatcgctcagtgattcctcgctctctcctctcaatcatcgtcagtagacaggcctactaacctagctaggaggaacagacatgatgctcagctcgcgactcgcgactcgtcgagcgtgagagatctcgtctcgcggccactctctctacggatactc

SEQ ID NO: 183794 - DNA, 875 bp, Zea mays
  Clone ID: MRT4577_99202C.1
acctcgagccggccgggaaaaattcaaaaggcttgttggcctcgcgtcgcgtctcggtccccttgccgcggagtcgccaccatcggcatccagccccttcccccagcagcagagcagtctccggccgcagccatggcgccgcccatctccacctccgaccccgcgctccccaccactaccacaaccacctcgtcggcccccaagtcgtcgtctcgccccttcctcgccccgctcgcggcctccgcgcgctccctcctcgcctcggcgcgccgctccccggtcaccacgctcgccgccgccttcttcctcctcgcgctcgtcatgtacggcgaggacgcccgcaccatcgccgagctctccatcgacgactacctctacccggacgccgacctctacaacgtctccggcctgccgcccctcgcgctgcccccgctcacctgcgacctctcccgcggccgatgggtcttcgacaacgtctccgttccggcgtaccgggagaaagactgcaccttcctcaccaagcaggtctcctgcctcgccaacggccgccccgacgacatgtggcagtactggagatggcagcccaacgagtgttccctccccacgttcgacgctcggagattcatggaggcgatgcgtgggaagcgcctcatgttcgtgggggactcactgaaccgcaaccagtgggagtcgctggtgtgcctggtgcagcccatcctgtccaagggcaggaagaagatcgtcaagcggggctccctcaacaccttctacgccaaggagtaccgcgccacgctcgagttctactgggcgccctttctcgtcgagtccactctgacaacccaacttcacagcatcaaggaacggatcatcagtcc

SEQ ID NO: 183795 - DNA, 903 bp, Zea mays
  Clone ID: MRT4577_99203C.1
cccacgcactgacacgccggacccaaccgacgccaacaacaccgcgttcgtcgccgcgggatcgggctgggcttgttggcctcgcctcggttggtgccctctctgccgccgcggacgagagtcgccaccaccaccaccatccagccagccccttcccttccccagcagcagtctccagccgcagccatggccaagccaccgccgcccacctccacctccgaccccgcgctccccaccactgctacaaccacctcgtcggcccccaagtcgtcgtctcgcccctccccccgcccccggggcctcctcgatccgctcgcagcctccgcgcgctccctcctcgcctcggcgcgccgctccccggtcaccacgctagccgccgccttcttcctcctcgcgctcgtcatgtacggcgaggacgcccgcaccatcgccgagctctccatcgacgactacctctacccggacgccgacctctacaacgtctccggcctgccgcccctcgcgctgcccccgctcacctgcgacctctccagcggcagatgggtcttcgacaacgtctccgttccggcgtaccgggagaaagactgcaccttcctcaccaagcaggtctcctgcctcgccaacggccgccccgacgacatgtggcagtactggagatggcagcccaacgagtgctccctccccacgttcgacgctcggagattcatggaggcgatgcgcgggaagcggctcatgttcgtgggggactcgctgaaccgcaaccagtgggagtcgctggtgtgcctcgtgcagcccatcctgtccaagggcaggaagaagatcgtcaagcggggctccttcaacaccttctacgctaaggagtaccgcgccacgctcgagttctactgggcgcccttcctcgtc

SEQ ID NO: 183796 - DNA, 2536 bp, Zea mays
  Clone ID: MRT4577_99204C.1
cggttcatttcgaaaaaggtataagaagccgccatgacctccaagatcactgactacttcaccattagaccctgctggttagaagctcattagtactacatacattgactcattaaactaacgttagtaagcatgactgcagctatctctgaaggcagtcaaaatagatgtttatgagtttttctcaagggctgggaaggctaaagtaacttgtctctgtttggtcattatgctctaggatccttcaacttgacatcacagcaatcgttgaggaggaggaggacacctggaactcgattctttcctgtgccgccactgatggcatcctttatttgcgtcaaggatttccctcaagatttatgcatgcatgcgtggcacaaatttctttgctctcctaagtgggttggtgctgcaacaatcacgcgtgtagagacatctggtggttgatggtttagtggcttatccatgaaaaaggaaagtggaagagggagccatgaatatatatagggtagtgagactgctcactggtgcttcagagacttattaggaccccagcatgccaatatacgtagatccatttgtgaaagtttcagcaaccggaaaaaagagcacgtcatcacaacgctttcagtggagagctactacagtaccccgccgaaccgacgccgacagctgccgcctgccggacccaacaagaaggaaccaagcctacaaaatcacaactccacgttcgtcgccgcgggaggatcgggctgggctggcctcgcctcggttggcttcagctgccacctgccgcgcggccactatccagcctccttcggtccttccccttccccagcagcaggctccggccgcagccatgcccaagccaccgccgcccacctccgacccctcgctccccaccaccaccaccacctcgacccccaagtcgtcgtcccgccctgcccccgcggggctcctcgatccgctcgccgcctccgggcgctccctcctcgcctcggcgcggcgctccccggtcaccacgctcgccggcgccttcttcctcctcgcgctcgtcatgtacggagaggacgcccgcaccatcgccgagctctccatcgacgactacctctacccggacgccgatctctacaacgtctccggcctgccgccccttgcgttgcccccgcctacctgcgacctctccagtggccgctgggtcttcgacaacgcctccgtcccggcgtacagggagaaagactgcaccttcctcaccaagcaggtcacctgcctcgccaacggccgccccgacgatatgtggcagtactggagatggcagcccagtgactgctccctccccacgttcgacgcccggagattcatggaggcgatgcgcgggaagcggctcatgttcgtgggggactcgctgaaccgcaaccagtgggagtcgctggtgtgcctggtgcagcccatcctgtccaagggcaggaagaagatcgtcaagcggggctccctcaacaccttctacgccaaggagtaccgcgccacgctcgagttctactgggcgcccttcctcgtcgagtccaactctgacaaccccaacttccacagcatcaaggaacggatcatcagtcccgagcggatcgaggcgcacgccaagcactggaaggacgttgactacctcatcttcaacacctacatctggtggatgaacaccgccgacatcaaagtcaggagacccaactcgaggtactggtctgagaacgacgaggttcccaggattgaggcgtatggtcgggtgttcaagacgtggtctgattggctcaatgacaacatcgatcctgcccgcacgtccgtcttcttcatgacgatttctcctcttcacatcagcccacagaattggggaaacccggacgggatcaaatgtgtaagagagacgcttccatatcagaactacagccaacccctggatctttaccatgacatgcggttgtatgacctagtgatcaaggttgccagctccatggagaaggtcccggtgtcagtgatcaatatcacaaagatgtcagattaccggaaggacgcccacgcgtccgtgtacaccatccggcaagggaaactgctgacgccaaagcagaaggcagacccagagaaattcgcggactgcatccattggtgccttcccggcgtgccggacgtgtggaaccaaatactctacacgaggattctttcaaaatcaccatggcgttctaattttagtccccctccgtcccagtccacacctcttcctccccaatgattggagaatgtaggattatcctttttgttttactttttaggttagattgagtataggttagcggagaaaggaaaatggatgtgctgattactgatggtatgtaagaaggttcagctgaagtgtaagttagttgtgagtcagccaattcaggaaacaacagcgatctagtacaaggtgcaccatggatatgatactatactatacaccaagtatatgccactgcgttgctatggaatcattatatctatatgttcctac

SEQ ID NO: 183797 - DNA, 367 bp, Zea mays
  Clone ID: MRT4577_99205C.1
taccctcgaggccggccgggaacaacttgggcgcggccggattcgtataggctagcagcacatagtaacaagctcgcgatctgtgcgcccaccaccaccaccgccgggaggagaggaccgaccgaccgaccgaagatgcggatgagctgcaacggctgccgcgtcctgcgcaagggctgcagcgacgcctgcaccatccgcccctgcctgcagtggatcgacagccccgaggcgcaggccaacgccaccgtcttcctcgccaagttctacggccgcgcggggctgctcaacctgctggccgccgcgcccgacgacgccgcccgcccggccgtcttccgctccctgctcttcgaggcctgcggccctc

SEQ ID NO: 183798 - DNA, 922 bp, Zea mays
  Clone ID: MRT4577_99206C.1
cccacgcgtccgcactaatcaaatgggaggtctaataacatctttgagtagcaggactatgcggccagtcttcacatcatacatgagttctcacggatcattggtgagctcccctaaagatgttattagtaaaaggaatacatatagaaggtcattttccatctagggtgaatgagcgttctatatgtttgcatagtgtgccatcacacttatcttctggtgctctaaattctgggaacttgttagttcacgatcagctcaggattcccttggctccttgagggcaatgtaatgttagttgaacaacacctttacgccgaaagtttcagcccacgcgtccgctttgaccgccgcctcccttcccctccgctactgctcctccccaccccactcccccgcaggagcggcggcggcggcggcgaggtcgtaccccacatcggcgagcggcggcggcaccgccggaggcaaaggcaagatgttcgggcgcgcgccgaagaagagcgacaacaccaagtactacgagatcctcggggtgcccaagtcggcgtcccaggacgatctcaagaaggcctaccgcaaggctgctatcaagaaccaccccgacaagggcggtgaccccgagaaggtccggaccaccccctctcccctcttgcgatctggccttgatccgatctggcgtgatccgttgcggtagatcgaggttctcggcagccttcgcgtctggtagatttacctcaggaagggttgcatgttggtcttgatgtttaggtttggattcctcgtcctcggtagattcgttgatgcttctgtaggtaacaagccgcgattggtagttcctgttgcatgcgctggtttgtgggtggtcgattcgcggtcatgtgtaccatgattgcgaccttagttgcgtaggggattcgcgaga

SEQ ID NO: 183799 - DNA, 472 bp, Zea mays
  Clone ID: MRT4577_99207C.1
gagccctggaggcgcattgccttatcttcttatgcgtgccttaatttttaaaaaaaaattactgtttcgaacacataatatgcgttggagactctgaaacactgttgcaccaggaacctaacttcttgctatattgaaccaaacaagtgctatgttatgctatgcatacccgacatatttcctgacaaccaagaaacataataccgtcccgggagagatgatgccactctcccgagccgaatattatgcgctgtaaagagcaaccagaaactgcgcgaattctctcacgccaccgtgttaaacgcggacaaaactcccgggggttcttgtgcttccatccagagactgcacaagcacaactacttccttgatcgcgttatacgtgctggactagttccctacttttttgttagatgcgcgctgaacacaggtcctgggtagcgcaacacccattctcacggaccttaacttg

SEQ ID NO: 183800 - DNA, 436 bp, Zea mays
  Clone ID: MRT4577_99208C.1
ccggccgggaagaccgatcggtcattctcctctgatatcacaataaccggaatcatgaactccaacaactccgttcagcgcttcggaaaaaataagacggctactgctgacgcccattgcaagggcggtaaggtactcatcaagaggaacggacgacatctccagttcgctcagcctgagattctccgcttacaaggcctacgaacatctcctcggaggtggccttgacaagtgcgtaaatgtagaagagcgcgttagagtatcggaaggtggccaggtgacacaggcctacgtgtatgcgacacagctatcgtcaagtccactgatcgactactaccagaagatcggagatgatcactcgcaataactctcctcaggaagggtcgcggacagtgcgaccgaagcctcctcgttgccgacaaccgacggatgcgag

SEQ ID NO: 183801 - DNA, 459 bp, Zea mays
  Clone ID: MRT4577_99209C.1
ctcatctgtggcgagcaccgtctgcttccttgtgcacttcactctgcactgcagtctgcgcacacccaaaccaccccgccacacaaagagcaaaaccctctttctctgcccctcagtcaccgccgcgaacttgcgtcttgcgatcgagggaggaacccaccaaatggctcgcgtggagaggcagccgcggaaccctagtaggctcgcccccacctcccacccggcgccggcgcttccgacgacgccggctgctcgccgccccggcacgccacggaacgctgcccagggcacagtttgtgcaacatgtgtttgcggttcaggaaataatgcccgctgtcactgcaagcaagacgcccgatccagacataaccaaacacaccacggtaatgatggaacagccacagccgggggaattgcaaaaccagactctcaagataagctcaagatggctacaatttc

SEQ ID NO: 183802 - DNA, 347 bp, Zea mays
  unsure (1)..(347): unsure at all n locations
  Clone ID: MRT4577_9920C.1
gtccctcagtctcctccctcctcccactacatcacaccacgctccctacctcgccgtcgccggtcctcgccatggacgccgccgcgatggagtccctcatcctggagctgcacgcggtggaggcctacaagttcggcgccttcgtgctcaagtccggcatcacctccccgatctacctcgacctgcgcgtgctcgtctcccacccgcgcctcctctcccgcgtcgccgcgctcctcgnngctccnnctccnncctccanncgcgccccctacggggcccttccctcctgcggcgtcccctacacgggcccctccctttcgcctcgtgctctccgtcgcccgcagcat

SEQ ID NO: 183803 - DNA, 104 bp, Zea mays
  Clone ID: MRT4577_99210C.1
tgagagcgcaacagcagcacgagtgcttcgagctgatcatcctggtattaagcgacgactggctggtatacttcagtcgctcacgggtaatggatcactgcgac

SEQ ID NO: 183804 - DNA, 1968 bp, Zea mays
  Clone ID: MRT4577_99211C.1
tcgaggccgaaagggaaaaaaccatttttcctccgttccattcttctctcctcgcctcccctcgcctcccctcttgaaccctccgccgctccgaggaaaatccgatttgaattgaaaatcatccggagacagagatcttttcttcctcgaagctatcttctctgtcgactcgatccatagctgctcgcgtccctgttcctcgccggctggcaagtggcggcgacgggacgaggtcttcatcgcctcttcgcgagcgacgatcacccactagtttggtcggtctgaggcacatgatgatggccaacgcgaagctccacaagcaggccctgctgccgccgcggagccccttcccgacggcggcgccgtacgccgaccgcggcccaatcgcgcggccgcaggttggctccacgcaccaccgccacggccaccaccagcgcacgtcgtccgagagcttcatcgaggagcagccgccgtcgtggctcgacgacctgctcaacgagccagagacgcccgcggcgcggcagagcggccgggctgggcaccgcaggtcgtccagtgactcgtttgcgttgtttgacggtggagctgctggtgctggtgcttacgccaatggtttcgaggggatggggagaggaggtgggcaacctgcgccgtggggcggtgtgcaggagtactatgccaagctggccccgattgggagggcacatggccggccgtgggagcaaggcatgccgaattcggcgggcttcaggcatggtggtggcctgccaatgcccacaaaagataaggttggtgggcatcatgggccaccgaaagtgtcgagggagcatgaccatggcatggacaagagaactgatgatgctggccatgatcaaaaggttggagccaaggagggtgtgccgccgaagcatgcacagtcagaggcggacaacaagcgtgctaaacagcaatatgctcagaggtctcgtgtccggaagctgcagtatattgcagagcttgagagtagagtccaggcattacagtcagaaggggtagaagtgtctgctgaaatggagttccttagccagcagaatatcatgctagacctggaaaacaaagccttgaagcaaagagtggagagtctagcacaggaacaacttattaagcgttttcaacaggagatgtttgagcgggaaattggtcgtctcagaacaatatatcagcaacagcagcaacaacaggctcctgctcttgttcgtagtaacagcagggaccttgatgtgcagttcgccaacttgtctctgaaacacaaagaccccaacacgggccgggatgctctctctgggcctcttcgtacttagttctttccatccttccgttcttgtgggttctatcagtggccaccactgtgtctgtcatctccaccaagaaaggagaagtgcacttggattgtgtgaaaaacaccggaaaaaggctaatagctatggatctgatgtttattatttcgggatatgcacctggcggtcatcctcagctcgcgtccattggtgatgctcgaccagtcggcggtgtttagggtttttgtttttagctagatgcttttcaagcatcattgtaccatttttcatgctagggttctaatctgttactacccccgttttcctgaactgtgtgcttcaagcatcttagtcatgtttggattagttctgcgttatcagtgcctcagtggaatgtggagcactaggcagcatcaggtaagttgctttggagatgtgccacatccttgacaactgcatgttctgctattatttcttagtactcaataagctagtgcaaatgaggtattagcgatcttcagatttcaggttgttcttgatgtactcctatgaatatatctcaattgctcaacgtttcctttttatgttaaaatttggctccataattgtatattttgaatcaagcagtgctaaggtatggttgatttaattt

SEQ ID NO: 183805 - DNA, 615 bp, Zea mays
  Clone ID: MRT4577_99212C.1
aaaaaaaccgaacagtcttttttttttttaagctggaaaaaacaaaccgacttttttttttttttttttttctagggggacccttaaaatggaaagcccccgggggggaaggaaaacccctccaaggggccccccccatgggagggaataaaaacccaaaaaaaggagagaggaaaaccttttcaaaaaaaatcgggaggggaaacgtttttacaaaaaacgggatcaagagggtttttttgggaaaacggggggatttatggagagctgaaaaaccaataatggccccctacatttttttttttttcaccctacccatattggggctaaaaaaaaaacgaataaaaccccccccccggggcccaaacccgggggggagggccccgcatcaagcccccctaagggggagctgcccccgaaaaaggggaaacaaaactttaatcactcgaaacggccccccccccctttataaggggaaaatataaaatagcttcaaaccccaaaggatgggggggggtggaatcccctccaacgcgcgccggggggggcctctcaaccatcgccaaaaaaaagggtccataaacgcgcgctacagggaccttaaatcagtctttt

SEQ ID NO: 183806 - DNA, 796 bp, Zea mays
  unsure (1)..(796): unsure at all n locations
  Clone ID: MRT4577_99213C.1
ggatgatggtgttagaatacgcagccaatgggacactctatgagcatctccacgttgagggatttgatcatattgattggaatggtaggatgagaataattatgggagtagcatactgcatgcagtacatgcatgagctcaagccttgtataacacactctgacctacagtcaagtgccatattgttatccaaggatggagctgcaaagatagccgacatgagtgtttggcaagaagtaatttccaaagaaaagatgcccaagaatgacgacgccagtgagcaccatgagccaatacgtgctgatccagctgggaatgtatgtagttttggtctactcatgctggaaatcatgtcaggaaagcctccagattctgaacacgagggctctcttgcgaacttagctatggagtgcattaaggatgaccagagtatatcctgtttgcttgaccctaccttgactactcacaaagaaaatgatctagatatcatttgcgagttgatcgaggactgcatccagagcgatccgaaaaagagaccaagcatgagagaggtcaccactaaattgcgagaagtgctagcgatttcaccggaggcagcaacgccgaggttatctccgctttggtgggcagagcttgagatactttcagttgaatcctaggaagaaacatgttgatatnggtatggttcttgcagcaacactgaggtcctgtgcgtaccgtcttgcatcttgtactcttttgttgcgagtttctgttttctgggcgatttcggggaatatgcgtggtacctcctccc

SEQ ID NO: 183807 - DNA, 1176 bp, Zea mays
  Clone ID: MRT4577_99214C.1
cattgggtacctcgaggccggccggggccattagctgtcgctgggccggcgcgaaaacgtttcgctagccctcgttcccgttcggccttgacaaccccaccccaccccacccccaagttccgaacgcagaggatcgaaccgaatcctccgcaactcgccgccgccgggaccgaccgacccggtcctatcgatcgaggatgtcgtacgcctacctcttcaagtacatcatcatcggcgacacaggcgtggggaagtcgtgcctgctgctgcagttcacggacaagcgcttccagcccgtgcacgacctcaccatcggcgtcgaattcggcgcccgcatgatcaccattgaaaataagcccatcaagctccagatttgggacacggctggccaagaatcattcagatctattactagatcatactacagaggtgctgctggtgcccttttggtttatgatattactaggagggagaccttcaatcatctcgcaagttggttagaagatgcaaggcagcatgcaaatgctaacatgactgtgatgctgattggaaacaagtgtgatctttctcatagacgtgctgtcagctatgaggaaggtgaacagtttgccaaggagcatggtctggtctttatggaggcatctgctaaaactgcacaaaacgttgaggaggcattcattaagaccgctggtacaatatacaagaaaatccaagatggcatatttgatgtatcaaatgagtccaacgggatcaaagttggctacgctgttcccaactcatctggaggtggtgctggctcgtcctctcaggctggtggctgctgcagttgagtggtggcagcaagtcatacaaatgcacaaggttctccctgcagtatcttgatgtttgcctatagctggacccggatgatttgttctttcagccatcatgtttcaatccataagcaaatcatcttcagtgtttaactgtccttttgcaattcacgattactgctccctatgtgtcttctgtaaccaaattgaaatcagttttatggtattcatttgttcaacatgtatatatgcttctctggctagtcatgttttctgcaaccctatctcaagttgaaaattggcagtgctggacaatctctccttgactgcattacttgattctgtaaagacaatcttcacgatt

SEQ ID NO: 183808 - DNA, 1278 bp, Zea mays
  Clone ID: MRT4577_99215C.1
cgcgtgggcgctcgccgccggccggcattagctgtcgctgggacggaaccggaacgtttcgctagccctcgttcccgttcggccttgacaacccaacccgaccccaagttcccaacgcagaggatcgaactgaatcctccgcaactcgccgccgccgggagtccgggaccgaccgacccggtcctatcgatcgaggatgtcgtacgcctacctcttcaagtacatcatcatcggcgacacaggcgtggggaagtcgtgcctgctgctgcagttcacagacaagcgcttccagcccgtgcacgacctcaccatcggcgtcgaattcggcgcccgcatgatcaccattgaaaataagcccatcaagctccagatttgggacacggctggccaagaatcattcagatctattactagatcatactacagaggtgctgctggtgccctttttggtttatgatattactaggagggagaccttcaaccatctcgcaagttggttagaagatgcaaggcagcatgcaaatgctaacatgactgtgatgctgattggaaacaagtgtgatctttctcatagacgtgctgtcagctatgaggaaggtgaacagtttgccaaggagcatggtctggtctttatggaggcatctgctaaaactgcacaaaacgttgaggaggcattcattaagaccgctggtacaatatacaagaaaatccaagatggcatatttgatgtatcaaatgagtccaacgggatcaaagttggctacgctgttcccaactcatctggaggtggtgctggctcgtcctctcaggctggtggctgctgcagttgagtggtggcagcaagtcatacaaatgcacaaggttctccctgcagtatcttgatgtttgcctatagctggccccggatgattcgttctttcagccatcatgtttcaatccataaacaaatcatcttcagtgtttagctgtcctttatacttgtgcaattcacgattagtaccctatgtgagtatgtgtcttgtgtaaccaaattgaaatcagttttatggtattcatttgttcaacatgtatatatgcttctctggctagtcatgtttctctgcaaccaagttgaaatttggcagtgcttatatctgcgaacccgaggccttgctcgacaatctctcgctgagtgactgcattacttgattctgtaaaggcaatcttcacgattactgcccaatgggctattttttgtaagccaaactgcaaccgggtttattatggcatttttttgtt

SEQ ID NO: 183809 - DNA, 212 bp, Zea mays
  Clone ID: MRT4577_99216C.1
ttgggttgatttatgtgcttggattgattgctgttatcagcgtcgcgtctccacgtggacgggagtgttacggagaggctggggcgtcctgagaaggtatatagtaataccggtatgaggattaaggaagacgatgagtggactaccgttaattcctgggtctaatgacaattgcgtaggagtatagctcgaatcgtgttattaccttcgag

SEQ ID NO: 183810 - DNA, 458 bp, Zea mays
  Clone ID: MRT4577_99217C.1
ttttttttttttttttttttttttttttttttttttttttttttttgttttaaataccgggcaaaaaccccccaaaaagggggaattataacaattatattcaaaaagggcccgccaattcagcccccctgtttattattttcccccggaaattaaccaacaaaaaagaaattccgtttagcactcccacggacaattccagggaaccccccaagcttattggacaagtttttaaaaacaatttggaaaaccttttgggaaaacccattggcccacacgggccctttcccttgggccaatcccagaaataaagcaaggggtaagggccaccactatgggcctttttttgaaaaaaatttgggaaaaaaaaaaggaccgtacaaagggggtttaaaaaaactggaaacaaacacgagcccttaagaagaggttggacgggcttggccgaccaactccac

SEQ ID NO: 183811 - DNA, 989 bp, Zea mays
  Clone ID: MRT4577_99218C.1
ccccgcgtccgcccacgcgtccgcccacgcgtccggtaatggctgccacaagagccctcaaaagggtgatcaccaaaaggctttcagtgtcataaattcgctggagatttggaagcttttgaggaacagagagcatgttcttgagatgttgaagcttaagatcaaggaggaagctcttagaacctatctttcatcatactcgtcttcctacaagtcgttgagccttaaccagctcaccaccatgtttgatctcagcgagcagcatgcccacagtattgttagcaaaatgatgatgcatgaagagcttcaggctagctggcaccagccaacaaagtgcaccgtgtttcacagcctggatcaaaccaggcttcaggagctactcttccaggttgcagaaaaaatatcggtcctggtggagacaaacgagagggcatacgagttaagaactggtggtactcttgaggggctaccgcccaggcgcaggggcgaggctcaggattcatccaagtggcaggagagctttgtcgcatcacaggggcggcagggtggtggcaaccggtttggatactccggtagaggtgcagcatctggtcaaagtggtggactccagaggggcaggggcaatcatgtttcccgcgggggatacggtggcaatacacgatttcaggatgcaagtgcacacatggtgaacctgaacagggttggtagggttgttagtgtttagaagtgcgtaaatttttgaagcacctgccctttccataattacaaacttcctgttctaagctcagtcatccaactattttctctatttcgttgtaagagtttggtactgtcggggtttgattagtgatagatccggctatcaaaattttggtcttttttcttcgactatgaacaaataatatatagaattttctatgtaaatttatattcttgtttttagcattgaaaatattaaaataaataaaaataaattttaaatccgttct

SEQ ID NO: 183812 - DNA, 512 bp, Zea mays
  Clone ID: MRT4577_99219C.1
ggggattggccgtcggagaccgacttgtcagtggacgagccatggctgggttttatgagcaacggcaatgagcttggcgatgtcgaggggacgtcgccgtgggacggaacaacagactggctgctggactaccaagattttggcatgtgcagctccaactcggtggacgattcaatgttccgcgcctcaaatggattgaacttctaaatgtcggagaaaggctgtccaatttcaagaaatagggaggaagacagactgcaagtttgagcgcactgcacagctcccagtatagaaaatagatacaacactttcaagaataagattgtgaaaagagagagagaggcatggggcatatcttgaccatagaatagtgataccttgcccttaaaagtaaggggtttgtattgttagaaacctaatgtttctcggtacgtgaagctgaagaactagacccaaatgttcgaaccatgcaaggcatcctatcctatgaacaaagttagggtgttgcagct

SEQ ID NO: 183813 - DNA, 280 bp, Zea mays
  Clone ID: MRT4577_9921C.1
agccaaaaggggggggggctttttaaaaaaaaccggaacttttttttctcactacagggggccgcccgccccccccaaattgcaattgccccccaagtccataacccccttatgcccattggagggtttttaatgtcccatacaaaacatgttgaaattgttaatttagcatttttgcccttgggcccccgggacttttttattttaaacctaagggggccagcccgataaaacccgccccccgcacatttttttttgggggtgccccaggtttgccccc

SEQ ID NO: 183814 - DNA, 411 bp, Zea mays
  Clone ID: MRT4577_99220C.1
acattgaacctaaatgcgtgttgtaccgccacatttaacatgcattactgtcccaatctttaaattgcccattgctcttggcgcgcccgaaacaggactcattgggtgcccaaaggtacggagcattgtattttgtctctggaactaaaactggataaaattccttggtaaaaaggtcgttgatcttcaaattttctattttgagatagggaaacccaacatgtcattcccactgtttggggtttcaattgctgcaaaaagcctccattaacaccttttttgtgtttccctctccaacctgtgtggaatcatatgggcctttcggagcgcttataataaacggattggggattgtgagattaacccttggggatatctttcaagaccttgtttaaatcatgcatatcagac

SEQ ID NO: 183815 - DNA, 415 bp, Zea mays
  Clone ID: MRT4577_99221C.1
ggggttccctgggttggaaaccctcaaattgggtccccttccttttttaaaaaggggggggtgggtcagccctcctttgggaggggggtttggtaatttcattcccttcccgggcaaaatcgccccctttgttccggggttggccacagggttttaaggcccccccattgggtggggccccgggggcttttccccagggggggcctaaaggtccccccccaatttggtatccgggatcttttccaaagttttcgggcaggggtgggttttgccaaacttgaatccccccaaaagcccccgggttaaccccgggggggggtccccagcccggggggaaaaaaacccggggggaacgaactttttaaaaaaaaccccggcgcctttattcaacaaaacctaaggtttttgggggccc

SEQ ID NO: 183816 - DNA, 459 bp, Zea mays
  Clone ID: MRT4577_99222C.1
gacacattgttctgcgatcatgcgttcaggagagcgtgatcctcaactagccgttaacaactgggctggatgccctgcaagagcagacatgtaccatgtatctggcatgtatctccaggcataggcctgcctcatcatcactggacctgctagagaaacatggggcctgccttgctagggctagactgacatgctctaccatggattaccatgctgctactgtacttcctgaatgtgcgcccattacatacatttatgaggatacgaagaccggacatcctgtagagagctaccacatttaaatatatacactgctcaccatatgcatctgcagacaggactacacagagtggtgatacacgtactacatgacaacctcatcagaactcaagatatgggtgcctgctagggatatgcactctacaaaactgggccacatctgtaggggcacataagctc

SEQ ID NO: 183817 - DNA, 392 bp, Zea mays
  Clone ID: MRT4577_99223C.1
aaattctttcagtcaaggatctttgactattaacaagctacctgaaaaaatattagaaaacaattagaaatgaaaaaggcaaaaaaaatacataaaatacagtgaaaatttagtagaggtaacaagataacttgcttgatattttgtctgtttcaactttcaacttctcatgctggcagcctatagtatctccttgtgctcaaggtggctgatggcatcagtgtctaatgtcacattgtggacagtgttgcaaatcattggattagttttttgtataaacgtctagaatgcatcctcttggatatagtttttgttcttttttaacataagaaaggttgaggcgtgatgcttgattgattcgtttgcgtaatgtgccagaaaaagtggttttg

SEQ ID NO: 183818 - DNA, 751 bp, Zea mays
  unsure (1)..(751): unsure at all n locations
  Clone ID: MRT4577_99224C.1
ccggccggggcccctctccccctacccctgcacgcgcgcgtcccaacaaccacaattgggtgagagacggagacggccatggcggagtcgcagacgtgatcgccgagcttgcaccttgcagtgggttggtttcgcttgaaagagagcggataggatagctgggtaagaggaggaggaggaggaggaggctcagttcagttcgtgggccggtcgatccaatccggcattacttatcgatcgatcgatcatcatggcgtaccttcggaacaagtcgatggagttcctcaagcggttcgaggtgccagccaagaacccctcggaggacgcgcagcgccggtggcgggaggccgtcggcactctcgtcaagaaccgccgccgccgcttccgcatggttcccgacctcgacaagcgctcgcaggtcgagacggagcgccgcaacatccaggtccgtccgtcccgcccttccggcgaacctgcattgcagcacgcactatttaaatttgtttccttctccttctctccttttttccttttggattggaagtgatcaatgccagctgcttccgcgccgcaaggccgcagtgttgacattctcatctgaccgcgatctctggctttgttcatccgacgatgcatgtccatggatggcgatgttcattattaggagtgttttgtcagtaaaaaaacatgttgagacagatcttatgtgtatcctggacgcacacggacgacagcaattttattctgtcnc

SEQ ID NO: 183819 - DNA, 201 bp, Zea mays
  Clone ID: MRT4577_99225C.1
gacgatgcacgcacgcgtacgcaagcatgcattatatacagtccacgcatgcgttcggaacgagagcgaccatctttactcggcgcagataacggatctttattttagatcatcacaagctctccacgacgtcatgcaggaagatctttatgtaccttgttccgatggggtacgactaagaaacatcgggccgacatattt

SEQ ID NO: 183820 - DNA, 614 bp, Zea mays
  Clone ID: MRT4577_99226C.1
ggccgctttttttttttttttttttaacgggcaggcacgaatcttacagacactaccggttccggaattaatggttactggcatatcagcctgacggcgactaactgatgggccaaggaatacaaacaatgctatctggcgcttgcagcagcagccggcctgagacagcagcccatgcctgcacgagcacgaaagaaactaaacggcggctagccgggagagagagctgtattctctagttgtacgtggcacccctaggtcgcttggctcttgtttttactaacccacggatgattagctcttgccgagggcggacacatgaacactactcgtggatgactccggcccggccgacgtctataagggaaccgacccaaggcacgcccttggtactcccactaccacttgaagagcccacacccgcaggacaccttggggctcatggactcgccgccgaacgcaccgcccactaggataatgccgccaactatgaaccctacggatctgtcgtcgatggggcccaggccgtcgattattcggcaacacgcagcgtcatggtacacctcgtactacatgctcaaggacatgatgaccttcagcaccagctgcacaga

SEQ ID NO: 183821 - DNA, 590 bp, Zea mays
  Clone ID: MRT4577_99227C.1
ccgggtcgacccagcgttcggaccgactctgggctcggttgtttcctgctggaaacgacctgactgtactactatggacatgagcacaccctcggctccaccgagtgcccatccgccctgtgtacacatcaccggttagagccagacaacagagacgtgtccttctactttcctactaacagcacactgataatgatgttctgctcatcaatgaagaacgctatccacaaataacaccggtgagttgacattgatcgcactacctacaacaacctgatgaggcttttatgacaggtcatctgatctgtgacaggatactttaagcttgaaggtgctatgaacgatgatgtgaacgagtaacgaaaccaacctggtgccctacccgaggatccacttcatgctatggtcctacgattcaatcattaatattgttttggctaccacgagcagctgcacgtgagtcgaaatcaccaacatggtctctagaggcatactacatgctgatacagattccacccctgccgtgagccggacatggaatgctgccgcacggaccgaggagatgagaaagcacaggacgagaacgctaa

SEQ ID NO: 183822 - DNA, 276 bp, Zea mays
  Clone ID: MRT4577_99228C.1
attgataccaactagcagcatacatagcgtagtacactaacaacatcttaccaccaatggcggccgggatttttgccctacttgccctccttgctctttcagcaagcgctgctaccgcgactattatatgacaatgctcacaacaatacctctctcccgcgacagcccagagattagaataccctactatacaatcctacaggctacaagaggccatcacatgaggcatcttacgggcgctagcattgactgtccaacgaccatatgccctattgc

SEQ ID NO: 183823 - DNA, 396 bp, Zea mays
  Clone ID: MRT4577_99229C.1
tttccttcctcctctgagttcatgctttcaccctcctccctatacaaagcttggtttctttcgatggttttgctctctctttcctgtttgtctggccttttgttcgcttttccaatggatcgtttgctctccgatgacgattaaaaattactttcgttcttctgaagctgcaatgtggaagaacaatctggagacctgaactgaggagattcgatctcactcgacctatccttggtttcatttcctgaatttgcaggttggttttgttagcgtcctgttggtgaattctggctgatgcgctttcttgttgcgcactgcgcagctctcgagagaactgtttgttctgcatctggagttgtagatagcttagcaaaaaaaaacacaattttaacgtgt

SEQ ID NO: 183824 - DNA, 387 bp, Zea mays
  Clone ID: MRT4577_9922C.1
aaaactcccaacctcagggcccaaacccaacatccaaatttaccaaggcttccaaacccttttccaaggttttccaaatggaagaacaaaccccccccctggtgggtttgcccaggggcccttcctttaaaagaacccccaaaggtctgggtcccggggaggggcccccggcaaaacccaaaaggacccggtattggcccaaccaaatgggggggaccctaacggcccgacacccttttggccggattaacccctggaaaaggccgggtccccaaggtatttccccaacttgtccccggcccaaagccaaaatttttatcccagggggccccctttggggccaggggggagccaccctttgccccccaaggcgggggtccgggcccc

SEQ ID NO: 183825 - DNA, 298 bp, Zea mays
  Clone ID: MRT4577_99230C.1
gaaacaaaaaggaggccactatggcacacacaagtgaccacggtttagcctaattttacctaaggcattaaccggagggaccacttttttacttattcacaatggcctggtacctggaaggttgaaagggtgggggacaaccggcctaaaattcttaacgggagccccaaaaattggtcctggcataaaaacttttacttgccactggtcatcaataaaggtatgttgtcacctttgaggggaatcccgcccacgggtttcctaggggtttttttgacgggtagatttcctaagaatt

SEQ ID NO: 183826 - DNA, 414 bp, Zea mays
  unsure (1)..(414): unsure at all n locations
  Clone ID: MRT4577_99231C.1
ctcgagccgattcggctcgaggaggcacacgcgcgatacgaaccagcaggcaaccatctgccgagggagaattggagccctagctagcggaataggagacggcggcgcgctaccctcctccatctcaggcgcctcctccatctacagcgcctcctccatctccggcgcggtggcatcgtcccgctcggcccctaataggagatggcggcgcgctatcctcctccatctccggcgcggtggcatcatcccgttcggcccctcctccatcttcagcgcggcggcgccagcagctggcgtgcagaacttatttggtgatcttttggcccatctctgctgataccgacaaagtatgcatgatgttgttgtcaagggaagaggtgctggaagcaaggatcagagtgctngaagtgtgtg

SEQ ID NO: 183827 - DNA, 342 bp, Zea mays
  Clone ID: MRT4577_99232C.1
ctttagtcggccatctgaagatagaactattccattaagtgttattgctgagcagactaagctttcaatcagtgatgtggagtatctccttatgaagagcctctcggttcatcttattgagggaatgttgacaaggtggagcacacatgtgagcaattggttaaggctgggttcaagaaaaatgaaataacatacaacaccttagaaaaaaaaaaaaaacacaaaaaaaaaaggaaaaaaaaaaagaaaaaaaactaaaaagataaaaattaaagaagaagggaataacaaccaaatggggaaaaaaagacggaatgagcaaccacagtctaaatccttaat

SEQ ID NO: 183828 - DNA, 289 bp, Zea mays
  Clone ID: MRT4577_99233C.1
cggtaccggttccggttccacgccacgcgtcacgggtgacatggtccaaagtagcccgcgtaatgtatgtattcttatcttatgctcagtttctgtaacttggtctttatgagacttggcgccagatattattacttgccaaatcaatactaaacatgctactatggtcacaaaaagggagaagccctgctgttctttaggctcaccctctgttaacaaccaaattttgacagtttgcacggtggctgccccgtcatcaaaggccaaaaggggtccgcgactaaatggt

SEQ ID NO: 183829 - DNA, 875 bp, Zea mays
  unsure (1)..(875): unsure at all n locations
  Clone ID: MRT4577_99234C.1
ggctgccgcttccggcanaacatccaggagcagcagcagctaccagctagctctcgcaatgagcatgggcacgcccacctcgtggctgttcgcgtcggacaactcgcggtacagcacccgggcgcggctgctcttcatgggcctctccttcgccatcggcatcctcacgttcctcctctacctcgccatctggtacctctgcagccgccgccgccaactccgccgccgtcagcgcggcgagctcttcgcgcccggggtgggcgacacggacggcgaccacggcatgagcgcggacgcgatcgccgcgctgccgacgttcgtgcacggggcggaggcgccggcgctcgactgcccggtatgcctcggccaggtggaggccggggagaaggtgcggcggctgcccaagtgcgcgcactccttccacgccgactgcgtcgacgcctggctccgcgcccactccacctgccccatgtgccgcgccgccgtcggcaccgcagccgccgccaccgccaccaagcagcaggccgaggtggcggccgtcgtcgtcgtcgtccccgtcccgtccccgccggcggaggcgttgccacctgtgtagtgtggcgtacgtctgtcgtgtggatcgatgcgaggagatggaggaccaccgcgcgccgcctgggccggctgggaatgcttgaagctgactgatcgcacgcatgattggagaacagcaacggcgagttgctacaacagtgatagacacagcacagcagtgctatctttagcttagctagagtggtaacgtactaggatcgtatcaccatcgtacgtatctggctgcgtgttcacatatagaggcttattattatattagttaattaattaattgattaatt

SEQ ID NO: 183830 - DNA, 316 bp, Zea mays
  Clone ID: MRT4577_99235C.1
acgcgacgcgagctggccattttttttttttctcgaacgaaactcaaccactaggatcaagcctggggttgcctacggaagcaggatggtctgccccatgaaaaccaccgggtaaagggggcatactagccccgtggagaggaactatataccgatcatgtccatggttgcgtcaggcatgtatgaagtgctggcggaacttcctagcctgatcacctgctccgcactgtgaacttgattgtggacactataacacagagcggcactcgccaccgtctctgatacaatgggaggctattgcctgtccgtcgactta

SEQ ID NO: 183831 - DNA, 509 bp, Zea mays
  Clone ID: MRT4577_99236C.1
aaaaacccaaccccagggaagaaattaaaccagttaaaaaaaaggaagcatattaccccatacaaaaaattctaaaaagcccccaacagggtacaaaccaaaaataaaagttttgggaaaaagccccaaaggccccaacccctctttttacaaactaaaaggaacgggaaaacccccccccttgtacccaggtagaaacggcccttaaaaaaagggggggaggaacaaaaccttttccaggccccaaaccttttttacttcctgggaaaaaaattggcaaagggagggaaaatgggcccttttccacacagaaaaaaaggggggcgaggggggaaacttggggtccgggggaaaaagctaaaacgggtggccccctggtttaagggcccccgggttttggccccacccagaagccgagggggcccctaaaaaaccaggggcagggggcacccccaaaagaattttggccgggggaaaaacttcaacgggagagggaattttttgggcaa

SEQ ID NO: 183832 - DNA, 239 bp, Zea mays
  Clone ID: MRT4577_99237C.1
tactttttattattttttttttttttttttttttggtttgggtttaattttatttggggggaaccccaaaccaaattgaccgccgaaaaaagttttgtggccaaaaacttagccacaaacacattaaacatgcgggaaaaatgctttcccaaaccctacgacgaacttacataaataaggggatctaccacaaacggcccggcctttgtctaaagcgacacatggtttaacccctccct

SEQ ID NO: 183833 - DNA, 141 bp, Zea mays
  Clone ID: MRT4577_99238C.1
cgaggcctgctgggaacgggacttctaaaaggaactatgtctggaaggctgtggtccaaggccatttttgctggctataagcggggtctccggaaccaaagggagcacacagctcttcttaaaattgaaggtgtttacgcc

SEQ ID NO: 183834 - DNA, 1018 bp, Zea mays
  Clone ID: MRT4577_99239C.1
cgcgaacggccgccctttttttttttttttttttttttttttcaaaaacaaacaaacaaacaaacaaacttacatgaacaaatgggtctcccttcgtcacattattctacacccaaactaaaacaatattgtatgagtgcaacataatgactgctacccactaacccagccactccactgctgtctcaaaaaagaaagaaagaaagaatagagtaactacatttatcgacaattaagggtgtaaaatagagagatcggagtcatcgatctcagtaatcatatcaacaactgaccagtcaagctcctcacaaaccggcgtatattatatacaagatgaaaaggcacgccattaaaaataaataccaataacaattggatcatcatgtcatgtaggggcgctgggtggtcacagggaccttcagtgtcgtcttgggatacacatcttccagcaccagttagcaggtccaggctctgcatcacttgcatttgctttgcttgctctcacatgacatgcccatctgtgctgtcagtcagcctgtgtctgttttatgtcaggcaacagttctccatcattgctaaaaccacctgcctttcttcatggctttgagctccatcactaaccgctccctctgagcctccacctctgcatactgcaagctcatgttcagtaaccgttccttcatatctcttagctctccttccaattgcaaaatcctatcggtattgccctccttgccgttcctcccgcagcaggttgcccctcaggcatcggactcttctgttgagctctgtacatcttgttttcctccaatgcctctgcgagcttcgtttccaataactcaatttttgactgaatggctgcctggttatctcctccaagctcctgctttccaaggctctctttaacgtgggacatttgctcaaatcccttttccatagtttgaactcttctagtgagatcctcattttcctgctcaagagattgtatcttcctctggtactcactgtttgatctctt

SEQ ID NO: 183835 - DNA, 177 bp, Zea mays
  unsure (1)..(177): unsure at all n locations
  Clone ID: MRT4577_9923C.1
tggcaactgccgatatcgcagctttattttgctctacctggaaacactactggnagactcaagacantagctgagggtgttcgcctcattgctgaaagggggcaatgcgctgctacactgctagctcttggatatgctgagtctactcctgctgactctgtggctctatgcattgaa

SEQ ID NO: 183836 - DNA, 269 bp, Zea mays
  Clone ID: MRT4577_99240C.1
cccctccgcctcttgttctctctcgcctctggttgggagagctctcttgaagcctcgagaatcgactcgacgttgttcccccaggtcagaagatgcgcgacgatattagctctaggaccgtaggaggaggcggacctcgaaggtcccgccggctaacgatgagaaacaccaccgacaacgagctctctagacgactcaaggacctataaaacaacggaggtcaccaaccgcatgtccgcgggagcaagaagactgccgtaatccaccac

SEQ ID NO: 183837 - DNA, 382 bp, Zea mays
  Clone ID: MRT4577_99241C.1
ttatcactcgatctggaaggggaagctgttggcggttggtctgaaggtgcaggacattggggaagtgaaaggaagcagagaggttgcgagtggtggcagcacatctggaggaggacaaactcagagagggaagcgacagtcagggtgggggcaagggcagaggtggaagaatggccctggagaaggatgcctctggaatctggatcatgatgtatagataaatcaagatcacagggtggaccagactctaagaaggatctaattatccataaggatgggaatagtcaaaatattgcagcacagactttcacttttcgtgagctcgctgcagccactaagaacttcaggcaagattgccttttaagagagggaaggttttggt

SEQ ID NO: 183838 - DNA, 459 bp, Zea mays
  Clone ID: MRT4577_99242C.1
gagccggccggcagccttcttaaaatttccccttttccccaactggacacgcgacaaccccccctttcctttctttcgatacccccggcttccccaaaatacgacgcggaattcccgccctgggcgccggcgggaaggttcttcttctgggcggcgccattctggggggtttcttttttgtcgacgcgcgcccccgcgggcacccccagacgcccctcgtgttctttttcttcgtcctcaggggggaaccggggcccaccaacccgacgccggtgaccaccacaaatcgggaccgttctccgcgttcggggccttgggccgcaccaaatacgccgccccgtgggggtgccctccctccagttggaggggggcggcttgttcgcccaggaacgggccaaggacatactcttcgtcggcttcgggctcctcttttggttttgttgggggggccttaccgcg

SEQ ID NO: 183839 - DNA, 505 bp, Zea mays
  Clone ID: MRT4577_99243C.1
attaccacaatctcactcataaatcttgccaaccattgccagatctttaatcttcaccatgatctcccggggcaattctagtacgagctcagacaacggctcctccatgcagttgtaggacttcctgccaatgatggtgaggaaggtaggggtggaggggctgattcaggagctatgcaaagggttccagctgctcatggagcctaggacaggcaagatcacctgccagagcctgaagcagaatgcggccaggttcgggcttggagaactccatggtgatgagctcccggagatgatcagggaaggggatcttgacggggatggggcgctggatcagatggagttctgcattctcatggtcagattgagccctaagctgatggaagaagaggcacacatgatgtttcaatattgatgtaacttgatccttgttgcttagtacaacagaacagtgatctttaatgtcaatttggtccaaaaaaaaaaaaaaaaaaaattcaggcgg

SEQ ID NO: 183840 - DNA, 295 bp, Zea mays
  Clone ID: MRT4577_99244C.1
cggagaggacgaggtgacggacggagagggagacgactaacagacgctgctgacagagtggcgcacgagaggagaggagagttccgaaccccccttctccgctgtactgtacatgagctgctgacgtgtgtcggataagtagtagtagctggcgtcccggcgggtgctggaaagaataataataataataatgtaacgaaagatggccgccttgaggttgagggagcgaccgagcgtgaagcaacttggccgccatggacaatacaattgggacacagacacaccggtcgtctcc

SEQ ID NO: 183841 - DNA, 706 bp, Zea mays
  Clone ID: MRT4577_99245C.1
aagaaggaccccaacgcccccaagcgcggtctctctgcttacatgttcttcgccaatgagaaccgtgagcgcgtccgagacgaaaacccaggcattgcctttggtgcccttggtcgtaagctcggtgagctgtggaagggattgagcgacgccgagcgcaagccatacgaagacaaggccgccgccgacaagaagcgttacgaggaccagaaggccacttacttggctggtggagatgacgatgaagaatcttcctaaatatctttttcaatatttctttcaactccaaagagacgagaaagaaaaaaaaatcatccctcagtgtatgattatatttcattaggaattttttcctctggtcgtcggtctgatggttcttgtcttgctcttacctatgatatcgcttgcatagcctatgctaatggctatctctttgacacgtttctcttttattaatctctggttcctacggtatgggctgacggggttctttgtattctttccacgtggttgttacttctttttatgtgatgccagttcgttttcttagttacggttgcgcgaggggtttttagtcaaatatggaaaatctttgtgcttttcgtctgatctcatcgtccgattcatgtaattcgattgcacgcctacgaaaactaagtgtctaggaaaataggagacaaagtcagaagaaagcagatgaaattat

SEQ ID NO: 183842 - DNA, 465 bp, Zea mays
  Clone ID: MRT4577_99246C.1
ctctcgccctgtcagcatcttgcgcttcagactcgcccaccgatctggcaactggaattcgctcccgcacttctagcacagcaagcgtgtcgtcgtaagcgggccaacgtaccacacggagacggtgcatcctagcgcggaggcaaggacaagcgcgaggacggcggcgacaaggagcaggcggcggcggcttcatcgacaggcgaaggactttatccaccatatcagcaagaagatcgaggaggtcagagggttcagcaagcccacaggctacgtgtgcggcgtggacatcccggacatcaaacttcctacagccgacctcatcgtggacctgctcatcaaaaacccgaaccgggtccgaatccccctcgtggacatcgactaccttatggacagtgactgccacaagctggtgccggacctaatcactgacgccggcaccattcatgcgcaccgacaggagac

SEQ ID NO: 183843 - DNA, 739 bp, Zea mays
  Clone ID: MRT4577_99247C.1
gactccctatcccatccatcacagctagctagcgtacagacgaataatctcttcttcacctcactagctaacaccagctagcagctcgatcgctctgtcctgcaataatggccgctcgctcctcctcccagcagctggtcgcggcggcggtcctggcagcggcgctgctgctgctggcggcgggggccgggacgccgtcctcggcggagatctgcgccgaggcgacgtctctcggtggcgccgcgcctcgggtacgcgacgggcagagcggcgtctgcctccgcggcgtgctgcaccgacgtgcgctcgctcaacagccgcgcgtcaccagcagcggaccggcaagacacctgcgactgtctcaatagcatgacggaacggctcggcggcggcgacagcatggtcaacgccgccaacatccccggcaagcgaggagactccatccgagtgcccatcagacccagcgccgactgcaccaagatcaactgaccgatgggaccacactggaggaagctcactcgtagcatgacagcctactcgggcatcaccacaacgccgacgtccacccaacaacatgctctagatacgcgagcggcacagcatcatactgggacataatgcccaacaagaacttgcgcccactagagatcactgcggcgagggtccctccgatccatgccatgcgcgtctactcctacctgacgagacatgacgaatgacggacgctaggagagcagca

SEQ ID NO: 183844 - DNA, 189 bp, Zea mays
  unsure (1)..(189): unsure at all n locations
  Clone ID: MRT4577_99249C.1
cnttcnctccncccgggacnccaaaacccacggggggatatgcagcgaggcacggacagcgccccgcagggcacaacggngaaccacacacccgagnnanagcnagccacgancacaacaaacagnngccncnggaagcaacaaaaaaaacnncacngccanccgcnaggcaacancaaaaacaaagac

SEQ ID NO: 183845 - DNA, 510 bp, Zea mays
  unsure (1)..(510): unsure at all n locations
  Clone ID: MRT4577_9924C.1
gctcagcacacaaggacacccaaaacgcgtcangtgagagaggcgagggaatccctccccctcccgttccaattcctttcctccgctcgcggctcgcctcctcgaccgacccccccaaagcggcgctctccttttcggccattgcgccacccgcccacaagcgattcggattctcccccccacatcgtcctttccaggttgcaggcttaaatggagaacgatgttgagaaaaataacatggtgaaagaattctatatcccaacctatattttcgtgccagagtctccagtggagcatgcatctcagatacctacttgtccggtgattgtttttgtcaacacaaaaagtggaggtcaactgggacgtgattgattgtcacataccgtaagcttctcaacctgcccaggtatttggatctgcttgatgaagctccagacaatgtcttgcacagactatacagcaacctggaaaggctcaagcacgtggtgacactcttgcttctgaagtcta

SEQ ID NO: 183846 - DNA, 522 bp, Zea mays
  Clone ID: MRT4577_99250C.1
cccacgcgtccggaaaaagggaaacaaaccaagctagacaaaagaagaagggtactagctagctagctagcttagctatgggcaccatcgtcgacgctgacgtcgggttcgcggtgaagaggacgagcaggtcgctggtgccgcctgcgtcggagacgccgcgggagacgctgcggctgtcggtgatcgaccgcgtggcggggctgcgccacctggtgcggtcgctgcacgtgttcgccgcgggcggcgacaagaagccgcgcctggacctgcttgacctgcgctacttcacggcggacctgagcccggaccacatcggcaaggtgaaggcgcggtacctggagtcgactgggcagcgctgctcggcgttcgacgtgtgcgtggcgcgcacgtggcaggcccgagtgcgcgcgctgcggctactcgacccggccgcgcccgtgcacgtatgcttcttcgccaacacccgtcacctgctgccggcggcggcgacagtcgggttctactggaactggttctaca

SEQ ID NO: 183847 - DNA, 492 bp, Zea mays
  Clone ID: MRT4577_99252C.1
ggctctaaagggatatttccaatgctgaaaatatacaaaattcatcatcgcgcacggggcggctgctgggcctcgcccgcgatccgccgggggttggcctccgcgcccgcatggccggggctgtgcctgcgcggccgtgcgccccgaaggccgccgcgcccacgcccactagggctgcttgcccgtgccgccacggggcccagcagccggggcgccccgcgcccgcgttgggcaaccaagcagcccgtgctgctaggggccccaacgctaccctgccgggagtcgcggctgccctcctgttggtgccgcggggaggctcgcgtctgaaccgacgaggccgggtgccgccacaccgcgaggtgccccgcccgggctgccggtgccccgccgccgtggctgggtcgctcggcggtgggcccccgtccgcaccggggtcgccggagccggggacgccgtgcctgcgcaacccgcgcgcccgcactggcgaggggc

SEQ ID NO: 183848 - DNA, 1737 bp, Zea mays
  Clone ID: MRT4577_99253C.1
ttgggtacctcgaggccggccgggaattccatcggtcgtgaaaagaaaaagggaaacaaaccaagctagctagagaaaagaagaagctggtactagctagctagctagcttagctatgggcaccatcgtggacgctgacgtcgggttcgcggtgaagaggacgagcaggtcgctggtgccgcctgcgtcggcgacgccgcgggagacgctgcggctgtcggtgatcgaccgcgtggcggggctgcgccacctggtgcggtcgctgcacgtgttcgccgcgggcggcgacaagaagcggcagcaggcgacggcgacgccggccaaggcgctgcgggaggcgctggggaaggcgctggtggactactacccgttcgcggggcggttcgtggtggacgacgcggagggcggcggggagacgcgggtggcgtgcaccggcgagggcgcctggttcgtggaggccaacgccgcgtgctcgctcgaggaggcccgccacctcgaccaccccatgctcatccccaaggagcagctgctgccggagccctcgccggacgtcaacccgctggacatgccgctcatgatgcaggtgacggagttctcgtgcggcggcttcgtggtggggctcatctccgtgcacacgatcgcggacggcctgggcgcggggcagttcatcaacacggtggcgacgtacgcgcggggcgccacgtccgccacgcccaagcccgtgtgggcgcgcgacgtgatcccggacccgcccaagatgccggcgcctccgccgcgcctggacctgctggacctgcgctacttcacggcggacctgagcccggaccacatcggcaaggtgaaggcgcggtacctggagtcgacggggcagcgctgctcggcgttcgacgtgtgcgtggcgcgcacgtggcaggcccgcgtgcgcgcgctgcggctccccgacccggccgcgcccgtgcacgtctgcttcttcgccaacacccgccacctgcttccggcggcggccacggccgggttctacggcaactgcttctacacggtgaaggcgacgcgggcgagcggggaggtggcggcggccgacgtggtggacgttgtgcgcgccatccgcgacgccaaggcgaggctgggcgccgacttcgcgcgctgggccgcgggcggcttcgaccgcgacccctacgagctcaccttcacctacgactcgctcttcgtctccgactggacgcgcctcggcttcctcgaggcggactacggctggggcaccccgacgcacgtcctgcccttctcctaccacccgttcatggccgtcgccgtcatcggcgccccgcctaagcccaagcccggcgcccgcatcatgaccatgtgcgtccaggagcagcacctgcccgagttccaggagcagatgatgagccagcaggccgcctaggcctagctagctcctgatcatcccatcaccatgttcatctatatcgtcatcgtcatcatgcatgcggcgtgcacgtttggaatatttgttaatcaatcaataacggtgaggtgaggttgctattgtatgaagtagtagtaacacctcaacaacaacaacccaatgcaatgggaactcgcgtgtaatttgctccttcttcttcaaatataattccgcctcaattgtatgtatgtatgtattacggctgtccgtctgtctgcctgtaaaaactaaagctttttttgtttctttatgcagctggcttttttttaatg

SEQ ID NO: 183849 - DNA, 519 bp, Zea mays
  Clone ID: MRT4577_99254C.1
agaaacctgtgccagataaaagcaacacagagaaacagaagccagcaaacaaacccaagacattgaggtgctgctctgctagcgtacgtgctacagcatgtcacgtaaggtacacgacgacgacgacgacattgaacggagggacactagacgaagtgatcactagtgggtgcatgatctacttctttattatgtgccagtctgatgcatgacacacacgtagctaggacatctctgctacgacggcgctgctgctgctgctggcggcgggggccgggacggcgacggcggcggtgagctgcggcgaggtgacgtcgtcggtggcgccgtgcctcgggtacgcgatgggcagcgcggcgtcgccctccgcggcgtgctgcagcggggtgcgctcgctcaacagccgcgcgtcgtctacggcggaccggcaggccacctgcaactgccttaagagcatgacggaccggctcggcggtggcttcagcatggtcaacgccggcaacattcccggaaagtgcg

SEQ ID NO: 183850 - DNA, 204 bp, Zea mays
  Clone ID: MRT4577_99255C.1
ttttgggtcgacggggcgtccgccgacgcgtgggcggggactaagccagccggtggtgccattatcacagaggccatgatcacctgctacgagaacggcagttgctagggcttccctgacgctctggacgtcggatagtgagctatcctgcgacatgtttttttagtcctaaggagaaaaccatgtacttcactaacccctccg

SEQ ID NO: 183851 - DNA, 437 bp, Zea mays
  Clone ID: MRT4577_99259C.1
attaccttttgcttcactgttgtctcttacattggcagattgtatgatataatagatagacattttaaccatatgcgattctcttgcaggttgttatgttgctccttaccataatttttgctgtagtccatagtggtatggcaagcctacgggaaagtggtgagaaaatagtgggggagcgtgtttaccgtgtgctgttcgctggaatttcactgcctttagcagttactactattgtgagtccttggtgctcttttcccaaaggcagatatacctcaatgattaacaaatcttactgtgccttatacagtttccatatcttttcaggtatacttcataaatcatcggtatgatggtactcaattatggcaagttcagggaatcactggcattcatgagcttctttggttctcgtcgttcatttcgttcttctttct

SEQ ID NO: 183852 - DNA, 598 bp, Zea mays
  Clone ID: MRT4577_9925C.1
ggtttctcgaccgtacggggacaggacatcagtgcaactgtgcaagcgaccgccaccgcattacccggaactgcccagatcttcgtcgaatcgtcgggccctttgctggcgacgagcaaccacagcttgcaatggcacaatagtgacatcttgggaaacaatgaaacgttttgtctatatcaatgatgattcgtgccggtattcctactgtgacaaccggatatccaataccaagtatactctgtggaattttctcccgaaaaatttatgggagcaattcaggcgtttcatgaatcagtattttctactaatagcctgccttcagttgtggtcccgtgtcacccctgtcagccctgcaactacatggggtccacttatcatcatcttcattggttctgcttcaaaagaggcttgggatgagtacaataggtatctttctgacaagaaagcaaatgagaggaaaatatgggtggtaaaggatggcgtccgcatacagatcaaagcacaggaggtacatgttggagatttagtgtggctccatgagaatgatgagataccatgtgatcttggtctcattggcacttctgatcgacaaggg

SEQ ID NO: 183853 - DNA, 1836 bp, Zea mays
  Clone ID: MRT4577_99260C.1
gctccatatcccatccatcacagctagctagcgtacagacgaataatctcttcttcacctcactagctaacaccagctagcagctcgatcgctctgtcctgcaataatggccgctcgctcctcctcccagcagctggtcgcggcggcggtcctggcagcggcgctgctgctgctggcggcgggggccgggacggcgtcggcggcggtgagctgcggcgaggtgacgtcgtcggtggcgccgtgcctcgggtacgcgatgggcagcgcggcgtcgccctccgcggcgtgctgcagcggggtgcgctcgctcaacagccgcgcgtcgtcggcggcggaccggcaggccacctgcaactgcctcaagagcatgacgggccggctcggcgattgacctcgaggcgggggtcggcctcctggagggctgagacggctggctgcgcgtcattctcttcctcttccggtgctcgtgctcgtgctcgtgctctccgccctccccctccgccacttcgcgcggaacggaacccaggccgccgccgacccagccaccgctaggcgtctaggcgaccgcgcggcatggtggcgcttttacactacctatgctagtttgcctgatgctacatttccacgatggttaagctgactatgatagcgcgtgtcactgatggccttccattgtcggagggattagatgatagtcgggatctcaaagatgctgacttctacaagcagcaagcaaaactgttgttcaagaacttgtccagagggcagcatgaggcgtcaaggatgtcaattgagacaggaccgtaccttttccactacatcattgaaggccgtgtttgctatttgactttgtgtgaccgttcttatcccaagaaacttgcattccagtatctcgaagatctcaaaaatgaatttgagaaagtcaatggcagccaaattgaaactgctgcaaggccatatgcatttattaaatttgatgcattcatacagaagaccaagaaactgtatttggataccagaacacagaggaaccttgctaagctgaacgatgagctctatgaggtgcaccagatcatgactcgcaatgttcaagaagttctcggtgttggtgaaaaactagaccaggtgagtgagatgtcaagtaggttgacttcggatactagaatctatgcagagaaggcgaaagatctcaatcgccaggcattgattcgtaaatatgcccccgttgctattgtgattgggatagtggtgatgctcttctgggtgaagaacaagatatggtgactggtgccatcttgcgatttcacagttatcatgctggaaccagctgagttgtcttgtcttccctcgtgcaaccatatgtttgatcgtggtcccaaaaagaaaagaaagatggctcgatggtttatcccgcatctgccgattcaagcgactactttagctatcaaaagcaaaaccacggtagtagagatagccttggaactgcacatttctattaactggacatgtataaatagttctcgtgagcgcacaccatgtaatcgtcgaaattcatccatgtgttgtgacattttttgagcacagttgaacatgtggtggagcctggaggcaggtcattctcagcccaaaaaaaaaaaaaaaaaaaacccaccccatacaacgcgatattatgacgtaataggtgagagggctattgcataataggtggacctagctaggagaaacacaacatgaccccattatgggtcttattcagtcatcatcatcgaagagacaaaggtcctgtttgtggttcttaaaaaaaaaaaacaaaaaaaaaaaaaaaaaaaaacaaaa

SEQ ID NO: 183854 - DNA, 513 bp, Zea mays
  Clone ID: MRT4577_99261C.1
atggccagagtacgctcgactacgagggtgacccgtgaaggggaggagactgaagccactgagatagctccgatctccgaagtcatgagacaatcgggcctagttgtgacggagggagccattgaagaaggtgcacctgctgccgaagctgaacaagatgttgaggaggaaaacgctgatgaagaagaagaggattataacattctggtcccgtcaaaacccagccacttggattttgaaaaatctactgtgtctgaagctgatatgcccatcatgatgaagttgggctacttcggagaagctgaaaagaagcttattcgttttgccgaggaagaaaccacttcgaaaccgaaagatgatgaagtggtagttttcaaaagctttttcagagcaggattacggtttccgctgaatgagataattggagaaattttggataattatgaaatctttcttcatcagttgacccctaacgccatcgttaggctcaggattttcatctgggccctttga

SEQ ID NO: 183855 - DNA, 463 bp, Zea mays
  Clone ID: MRT4577_99263C.1
attggccactgaaaaccagatcattgctatacgaccactatacaataatacagccatggcgaaaaggtataagtgcacagtggacaacacgatacaaagggacttgccacactcgaaccaaaccagatctgcagcgacctatatcacactactaggagggacaccgaggccttgttcaggcagtatggctcacggagtgcccccaaatttaactgccaacagggatcacactgctacaggcatattaccaaacaaaccactttccagatcacattgattaccgacatatggacagcagctaacactagctactatcctataggaacataaactctgcttgactgtcctttactattaccgcgcgtgggcacttccataatgtgagcaactggacccttcgataggccaaaagcccataggggcaaggtatcacgaatgagctgcatgatcaaagacgctgtcc

SEQ ID NO: 183856 - DNA, 502 bp, Zea mays
  Clone ID: MRT4577_99264C.1
ctatctttttttttttttggtcttcctttttttttttttttttttttttttttttttttttttttttttttttttttttgaaaaaccccaaaaatccccgggggtttggcaaaaatttgaaccccccaaaaaaaccggcccgggtggtaattccccgggggaaaacccccccccccaaaaaggaaaccccccgggggggttaatttatccaaatcccccaaagttccggggggttcccccattcgggccggggaaaattgggttttaaaacccccccccccaaccctttaggttttttaactaagggcaaaacgcgccccccataggggggccgccccttcttttcaaatccccgggggggcaaaaaaacaacccttcactttacgggaattggggggcggaaaaacccctcccccggcgagggcccgaaaaagttaaaaccccgcccccccccccgggttttctggggcaggcaaagtttaccccccccccaaaataaccc

SEQ ID NO: 183857 - DNA, 396 bp, Zea mays
  Clone ID: MRT4577_99265C.1
atgccaaatgagagtgttattgaagccatgatcaaggggcttcgaccaggaccaacaacacaatattttactagaaaatctccacaaactttggagaagcttctacaaaagatggacgaatatatcaaggctgacaacgactttcgacagagaagagaagaggcctgcagatactccgagatgactaggggcatcggaggaaggttccaccctagacatgtcatgacgattcataaccctagctcaagtgatgatagaggcaatcatactcaagggcatcaacacagctctcagtcatcaggaacacaacaaagctccttcaggccaccagctccaagagaaacaatggaaaaagaaggacaattgctccttcaaatcataccggctaacccatga

SEQ ID NO: 183858 - DNA, 393 bp, Zea mays
  unsure (1)..(393): unsure at all n locations
  Clone ID: MRT4577_99266C.1
gccgccctttttttttttttttttggtaaaactgtaagaacatgattattcttcactttcagctttcgactcaggttgtccggtgagggtgactgctgaagctcctcgacctcaactaggactaggaatctctgacgacggcggcacgacacatgctcgccgggccacctcgtccacgaacgcttggatatgcgcgtccgaggacccgccgagcgccacggcctcccgcgccgccgcgctccacctcctggcgttggcgagcatcgcgtcggcctcgggccccgccacggcggcgtctaccgnctcccgcacggcgtcccgccgcagcggcccgcggaagcggaccccaatcctgagttccttcaccaagaacttggcgtcagtgcactggtc

SEQ ID NO: 183859 - DNA, 499 bp, Zea mays
  unsure (1)..(499): unsure at all n locations
  Clone ID: MRT4577_99267C.1
ggactataaactattgggtagttttactatagcaggagctaaatgtttgtacaagtnaatcataaagcataatctggtgatttagacgcttgcaagaagcaagagacgtgtgtgctgttttatctatctagattctagatcgagctatcaagcctattttatcttggaaaacaaggaggagtgtgtgggtgtggctagctactaaacaatccattctcattcctcgttctcaaacaagtaagggtacaacaattaacttgttcttcggcgtgcagctgctgctaggatgaggtgcttccgcatctgctcagtctggtagttggacaggaacttcatgcacataggcggctccaccttgaagatggccagcagcgaagacggcagcgcccagagcccatcgccacagatcaaaccagacgccaccacgaccgacagcaggttcgctgcctgcttgttccttctcctccacaggatgactaggaggctccccaggcacatg

SEQ ID NO: 183860 - DNA, 490 bp, Zea mays
  Clone ID: MRT4577_99268C.1
gtgtcgctgtaatagtaggaatacgtcactttttagatactgcgcctatgaacaactttatcttcctccacaggtaatcgtaatgatacccagattctctcccacagccagattctccccacagccagattttcagaaaagctggtcagaaaaaagctgaaccaaacaggccccttgtatactatccctttgtagaaaatataaaaaaaaggaggggacacgaacgcccctgttgtttaaagaaaaaaacacggattgtacttttgatgtattctagtcctggggattccaatcctctatctcacgtttactgtatactgaactattcacaatgtatacatggggttgaagcaaagagtcatgatgccttgtagtaaacctttatttccctgttggatagtccaactatcagcctttcatcccagggcagtatcgaagttataattgagtcgcacccacgcgtccgcggacgcgtgggcggacgcgtggg

SEQ ID NO: 183861 - DNA, 728 bp, Zea mays
  unsure (1)..(728): unsure at all n locations
  Clone ID: MRT4577_99269C.1
gtgatggattctgcagatcgcccttagtcgcggccggtccgagggcgccggcctctnacagcctggcgaagaccgacatagctgcccctggcggcgtgcgatccgctcacatcccctcgcaacggccgcctcccgcccgattgcccctgggcacgtctgccggctcccccgttccgggggtgcgctacgtgccgctttncagcgggagcccgtccgcccgctccctgctgaccccgcaccccgcgncagaggcggctggcggnggggcgctcctccgctcctcgctccctgctcgctgcgctcgcncgctcgnctgcggcgngcggcnccngccccctccnnggcgccncttcggncctcccccgncccccnggctcccgccgcnnccccctccgngcccnnngcccgcccnnggccancaacccgccccgggcccccctgccggcgnnccccccttcgccccccccccctgncnnnccncccccccccccccccccccccccccccccggccnccccccccccccccccccgccgcccccccccccccncccccccccccggccccccccccccccccccccncccccccccctccccccccnccccccccccnncccccnccccccccccccccgnccgcccgcgcccccccccccccccnnccccccccccccccccccccccccccccccccccccnccgcccccccccccccccccccccccc

SEQ ID NO: 183862 - DNA, 1649 bp, Zea mays
  unsure (1)..(1649): unsure at all n locations
  Clone ID: MRT4577_9926C.1
ctagttctagatcgcgagcggccgccgcctcagcgtggtcttgtacaatggcggaggattctggcgccatcctccgccacatctcctccgtcaaggatatggtcgacaaggttaatgaagagattgaacaaaacatacagaagaccagggaaatagaatcagagatagtgcaacattctgaaaccgaaaagcactatctcaacaaggagtctgagttgacaaaagaagtatcagttactgagtttgaactcaatggtcttatccaagtggctgtggcagagggaaatttggagttccagaaagttgctcacgatgtgattcggaaaagagtttctgataagatggaaaaattcatcaatgaatctatggggtttcaagccaatatgctcaaaagttcaaatgaggatttagttctcttactgaatgaaaaaagttcactggaggatgaaagtgcgaaattgaaagtgaagataaacagtatacatagttcatccaaggaatacattgcagagattcttgaggaagtgaatacagaaaattcagttctggagtctgagctacggtacatgatttcggaatataaggatgtccaaaaggatataaacaacctgaagattctgtttagttcaagcaattcataggacaggttcctcgcgtcactgcaggattgccactgacatcaagacgacaggaataaataccaaattcttcagtaacttgataggaatggcttgtacaggcttaatttatggggactttgcttgatatgttcgaatctcccttaaatatcttctttaggatgtcgcttcctcactaccttagtttaggtcacttttataaacgtaaacactagcaaactcattagttcacagattatattaatcagcaaatattaaaatcatttagtcaaatggactgagttctattttcttgcaaaatactatatccattctcgaatatttgtctctgactagtttttttttcatttagtcaaatggactgagttctattttcttgcaaaatactatatccgttctcgaatatttgtccctgactagttcttttttgaactaaaacaaagtcttgtagtcctacatgtgcgcgcataaaataatataatcataaggctggtttggtggactcgaaaataaaggttatccatggagtaagaatctcctcgctgacctaagtgtgcgaggacaacatgcattgcggtaacacagacacgacacatggtaatagtcctgcagcaagtgaagcttggcctcagataatcgagccaacgaacgagggacataataggaatctggatgcttttctaggaatccggatgctgagaaaatctgactgtgtagagaatttaagtatcatgaagaatacatgcggaagaagataaaatagtctatagggtttatattgtagaaagtaacagtttcctattattggaatgactcggccgattttgttttcaagtttattttggacggttttgactanagtggttcttatataagcggattaaaaagctgggcgtttggcagtctgcagcagtttctggtggccatagctgaaaacaatggtgggtccaggatttgaaacatgagtatccaaaaaaaaaaaaaaatttgcggcctcgagctcagctttgt

SEQ ID NO: 183863 - DNA, 344 bp, Zea mays
  Clone ID: MRT4577_99270C.1
aataatttttttttttttttttttttttttttggtagtttttttagggacagtgacctgagggcagacaacccaatcaaggtgcccgtggaaaaccagatccgggggagcacccatgcgacagacagaacataaccgccaatgggggccacgcacttgcaaacaaaatatcctgcgggagtgggggagtgtctgacgaggtgtaacaaagaggggtcagcatctcaggaggtgctagtccaacaagcccagcatttggtgggggaagacccggttcaacacaaaacttggatttaaggcttgccaaaagatgtaggtagcatataatggttcaaggacaggggg

SEQ ID NO: 183864 - DNA, 385 bp, Zea mays
  unsure (1)..(385): unsure at all n locations
  Clone ID: MRT4577_99271C.1
cttattctagacgnggncgccggtggggggtggttcttntccgctgcggggggggggggggtcccttttgtctgggtgctgcctcttcttcgtcgcgccttcgtcgttgtggggctctgctctgtcttcgccccgcgctgtccctttttttttcttcttctcntcntcggggggttgggggggctgtcccnnttgcggctgttgttttgctgcttgcttgttcttctgttgcgctgtttctgtttggtgtgccttctcttgctgttgttcctgctctcgctttttttgctgggctctgcggctgtgcccttgtctgncctgnccttgcctgttgttgcntgccgtgctggtttttctgttcttcctctcttcttgctgcctctcc

SEQ ID NO: 183865 - DNA, 488 bp, Zea mays
  Clone ID: MRT4577_99272C.1
gtatccaacacaaagacaagacaacgctacacgagggcattatggtttccgccatgaagctgtccgtcaccctcgtcctcctcctctcagggctcgtggtgttcggggagatcgcggacgccaaggccaaggcgccgtgcgccgtggtgtgcttccagggaggccacatcacctgcgacaactaccccggccaggagctcgacgggtgcgactgcgagtgcgcgccggcagacggcaagggctgcgtgctacacctcgacgacggcgtgacccacaccaactgccgcacgcccaatatgtagctgaattgttggtttgagtttgagttcaataaggctctgcaagtttgttgtcgactgtaacgaaaatgttcgcgtgtctctggtttggcagtgtaatttaactttacacgcttcgaataaaatttccgaccataatgtgttgaggctcataaaagtacgcacaataatattagagattttacagcg

SEQ ID NO: 183866 - DNA, 442 bp, Zea mays
  unsure (1)..(442): unsure at all n locations
  Clone ID: MRT4577_99273C.1
ggaataccggggccgacccactcatacatctatcgtgccccttgttttgcatttaattttttaaaaaaaaaaaaaaaaaaaaagggaaagttaaatttaaaaaaaggaaaggaacaaaaaaaaatcataaaaaaaaaaaaataataaaattggccgccccctttaaataatccaaccttacttccccttccatccaactttttatctcttctattattccccctaaattcaattcacttcccgcctttttacaacttccttaacttaaaaaaccctttctttccccaactaaatccccttacaacacatccccctttccccaacttcctttttaactaaaaaccccataccatattctcttccaaaaatttccncatccttaatttttatatttaacccccccttttttcttccccttttatcccctccttttttttttttt

SEQ ID NO: 183867 - DNA, 457 bp, Zea mays
  unsure (1)..(457): unsure at all n locations
  Clone ID: MRT4577_99274C.1
ccgggnaaaaaaaaaaaatagcgatgaacgagggagagaatgagacaaagagaataatgcacgatcgcacgaccatggcggagcaactacaaggtgcttccaagctgcttgcaggtgctgagctagtggcaaaaggagcgttcattcctacaaccgcgcaatgaattggtgcctgttacggccacgctagtcaacaacctagccgggcagcacaaacggggaggacctctacaggtacaagggcatcaaaggcatgcgcatatactaccgcgacgccaaagacctcgatgctgtgcagaaatccggtattgcgctaatcctagacaccgacaacggctgagaagtactgggccatctgccaaggagcgcctatgtcgcggactcgtgggtgcacagcaacatgcgcccctactaccccggcggcgtataaagaacgacacggcgggcaacgaggagc

SEQ ID NO: 183868 - DNA, 757 bp, Zea mays
  Clone ID: MRT4577_99275C.1
cgggttatttgcacaacaacacaagctgccagcgtctgtctacatcactccattggtctgtgtccatacgcctttgtactctagcagccgccgagcgcccgagttgtggcagctgcaagctgccattcgcaccaagccaccaactaaccagctcccgagtcaccagtccccacctgcggcagctattgcccattgatacgaggtggtgacaccgacgtccggttagggatacacgacgatgtccaatgccggtggctttgcgtccattgttcgctctgtcactgactaccaaccgtgctactatggacacaagcatgctagtcggagcgtggagcgtgtgcccagcatgggatggcgtcccacgtcctaagagtcataggtgtgatgccctaatctaatcccaagtaactaactcaatcttctaatataatatttatccactaatcctaaccctgagcctatctctatgggcctccgtgccctaggttgccgccccatgacatttagagcctacaaaaatgttttaagtgcctcaaataaatagttttttatttttggaaaaaagaaaaatactcggaaaaatacgaaaaattatcggagacttctacggggtatgttaacatgtttcaaacaccttttgtacttaaaaacattatacagcggtatgaatgcaacacactaccacaccaagttcacacttatgatctgttttagttgataaaaaaataaaaccataatgcgtgattctagaccactc

SEQ ID NO: 183869 - DNA, 430 bp, Zea mays
  Clone ID: MRT4577_99276C.1
cggacgcgtgggcggacgcgtggggtcgagcacatggagaagaaagagtggtagaaggttccgccggcaaggatcttgcccatgttgccgctcgggattcaattagggacctggagggtttcgtcctggtgtggggtcgacgcaccttgcttcgctgggtgagaatttgggatgaaggtccgaacaattgatcgtcggaggccgattccgccgctggaccgcatcccatcgtggccggtcctcaccaccacttaatcactgcgcgaggtcacgagtcatctgaagagcaagttggtacctggaatctcaagtcccagaagctgatgaggaagactgtgacgatggtgatgacaagtactgagtctagcgatgcgccagtcatctttccatggagattacccttgctatttctgatgtactttgataatga

SEQ ID NO: 183870 - DNA, 326 bp, Zea mays
  Clone ID: MRT4577_99277C.1
agcatcaggaagggggaggcaataaactgggatatacaaaatgaactcatagggatttaagggacacttcttacactcggggagggattagtactggagggtgctcttttattgcaatatctatgccatttttttttagtcaaagctgattggagggctttatcattcatatatgggggagacatattattgcacttgcatcacctgactagtttgtatggaaaggcaggcattaggcatgcataacattatgggggcatcaagtatactattgagacacagattcgtttaagttggagtgatagaattgaaatctaccatttttt

SEQ ID NO: 183871 - DNA, 204 bp, Zea mays
  Clone ID: MRT4577_99278C.1
cacgcactatgaccatgcgtaattcttggaacacagccactctcgggcgacggacgcgagacttaatcgatcataatcgagaagatataagaagaaactaccacaaacaaaggtgaatccagcatgacgcacatcactactctagcttagagagcccacacaattaccgacagctggagctactcccggacccctcgtatgaca

SEQ ID NO: 183872 - DNA, 154 bp, Zea mays
  Clone ID: MRT4577_99279C.1
atgacccacgcgtccgatgcgtctggactactatactacaacgccgcgtaagagtccgctaccatcgcagtcaacatagacagaacatcatatcaaggaggcaggagccgttcccaacccatcgagaagagggtgccctcgcactgtcggaacc

SEQ ID NO: 183873 - DNA, 188 bp, Zea mays
  Clone ID: MRT4577_9927C.1
gccggttcccgggcgccacgcgtcgcccgtgtactcagatgagaacttgcttatttacgacacacgctgcgcttggtgactggactcgctgtggcgccccccacaaacaggcgggcgctgcggctagcccacaccacacgttcattccaccgtactgctctctatatgctcggctacgccctatctgc

SEQ ID NO: 183874 - DNA, 862 bp, Zea mays
  Clone ID: MRT4577_99280C.1
cccacgcgtccgcggacgcgtgggcggtaaagtcccactaggctagacagacaagccttgctcgccggagatctcccgctcgcgcggcgcggcccctcgctccgcgaccatggcctccgggcaggactcgtcgggcaccacgctgataattcggcacgaggcggatccttcggccacgtcgactgccggggcatcgtcgcagcagcagtcctcctcgggcgtcggcagcgccggtggctcccttttggggaagcccgtggctccggcggcggatcgcaagtcgaagaaggggacgctgatgcagatccagaacgagacaatatccgctgccaaggcgcttaaccccgtcaaggtcctgccccagcgcaacaggaagaagaagcccgtctcctacgcacagctggcccggagcatccacgagctcgccgcgacgtgcgaccagaaaagttcccagaggcagctcgtaaatagtgtgttccccaagcttgctgtgtacaattctgtggatccttcggtggctccatctcttctcatgctccatcagcaatgtgaggacagaaatgttctgcgctatgtatactactatctggcccgtatactgtcagataatggttcccagggtttaagtgctgctggtggcatacccacgcccaattgggacgctcttgcagacattgatgccgtcgggggagtgacacgagcagatgttgtaccgagaatagttgatcaactttcagcggaatcctcgagtgatgatgttgagtttcatgcacggagacttgctgctctgaaggcccttacctcctgttccactagcagttctgagatgatggaaaagctaaaatgaattgtgtttggcatc

SEQ ID NO: 183875 - DNA, 632 bp, Zea mays
  Clone ID: MRT4577_99281C.1
ctgtgcggcgctcaggcggctgtttgggacgaagacaaatgcccgcctccgcctccccgtctccggcctcgtcgttgcctgccctgggcagccgcccgttgctctaccagcaaattcacgcgtgacagccgcgtgtcagtgaggaaccccctgatgatcaggaacctgaagaggaatgctagaagctcctgcatgacatgtccccgggacatggctgcggaggaacctgatcgccatcgaattcggtatcatcatgtgtatggcgacgtccaagctgtacccgctcatcaacggcaacagcctctcgaggttcttcttcatccagcatcggccatcaactggtccacttccccacgcccctcgcccgacacctccactagatctgtgatgagactagcgacctgcgacctgggcctgttcatcgagctcaccttcagccagatcgaattacagggcatgactcgacgactacttcaagaagtgaagcgtgtaagatcctatccatcatccctgttgctgcgctgcgatgcattgcgcgtgtgctcgccgcaatcgaacctttgatgtatagggctacgattctcttccaatgtaatggatgatgctacttttgcggttcaatataaaatcta

SEQ ID NO: 183876 - DNA, 405 bp, Zea mays
  unsure (1)..(405): unsure at all n locations
  Clone ID: MRT4577_99282C.1
gcaggtggtgggcaacagtgctagaatactctgtgctgaaatatagcgcgatggctcgctatctcagttgagtcatttagcggcgatgattgagtaataatgtgtcacgcatcaccatgggtggcagtgtcagtgtgagcaatgacctgaatgaacaattgaaatgaaaagaaaaaagtattgttcctccttaaaaatgnggccccttaaaccatccttttaaggggccaatttccccttttagggaggggattcaaaatcccttgcccgggntttaacaaaaacctgctgggtaaacccccgaccccccccaaccccaaatttctcccaaatttttttccctttttgccccctttccggcctttctttttggggggccccccctccccctttttgcgccctttt

SEQ ID NO: 183877 - DNA, 460 bp, Zea mays
  Clone ID: MRT4577_99283C.1
tttgggctgctttatgtgcttggagaccccggtacctttagcctagaagtacactctcaaacgaatcgaagaggaaggagtttgattccgacacggaaatattggtactccataaggaattaaaaattaacgccggtggcaggctactcctataaagtaacggctgtggactatataagcttaataagtgcgaaaagtctgatcctaactactcaagattgaagaaacgaaaaacggcgcctgagccagtctccgcatctcgcccgcagtcgcatttaaccggttactcgtcgcgccccgctgaccacactcagagagtcggcaattacgcttacgcgattacgcggtacgtacctccagcgagaccacgcggcgccaactaccccctccctcaccgacgcgcctcatctaatcatctcgtcgcaagacgcgaggtctcatcgcatagtagcgacgaacg

SEQ ID NO: 183878 - DNA, 275 bp, Zea mays
  Clone ID: MRT4577_99284C.1
ggtggctaaaccagaaacctattggaactaatggggagtattggcgcataatgctacttaaaatttgctgaactttggctcacgctatggatttagactaccacggggccctacatgaataggctcttatcaaaccggccaacctatcgatgaccggtttgtgttgcgtgctatattaccaaagaaatttcctaggcatcgacactgcgaggggcttggcgcttttctcccaaaaacgcctgaatgcatctctagctaaaccaaatataaagccc

SEQ ID NO: 183879 - DNA, 110 bp, Zea mays
  Clone ID: MRT4577_99285C.1
atgagagcgaggaccttcttgccttcttgttcgtatgcagctcaccccgctgttcttgtggttatcacctccttttgccttcaatgctgccgcgttacaacaggatctga

SEQ ID NO: 183880 - DNA, 1183 bp, Zea mays
  Clone ID: MRT4577_99286C.1
cctcgaggccggccggggccctatatcctaaccagaatcaaacggggccggccccaagcccctcctcgcctcctcggccacgcatggggaacgcgcggcgccccgccgctgactcggcggcggcgtcggaccgggaggtcggatttgcgaagctacatggcgagtgcttcgagtactacatgcagacctactccatcgttctaggtcgccatagccgccgtcgcagcaagggccccgtcgccgccccgccggaggccgacgacggcgtcgacgtggacctcggcgccctcggagcaggcatgaacgtctcccgccgccacgcgcgcattttctacgacttcctgcgccgccgtttcgcgcttgaggtgcttggtaagaacggctgcctcgtcgagggcgtgcaccacgtccccgggtccgcccccgtcaagctcgactcccaggacctcctccagatgggggacaccaagttctacttcctcctcccctcccgctccgtcttcgacgccggcatcacgcgccggtcatccgccgttcagcgcgcgatcccgccgcctccgtctgatgatgacgaggatgaggatgaacatgaagaggccgtggcagcggcgaagcgtcggagggacggttataacggatcaaaatcttacagggaagcagatgatcaactattgcttcagttggaagagaaagatgtcatctcatctgctgctactatcttgtctgatctctgtggacctcaggaatggatttctataaacaagcttcatgaagtgatgtttgataagtacggcggtatgtggcaccacagcagggtgcgaaaatacctgacatccgaagactttgcggaggctgaaactgacggcaggctatggcatggacttgcgttgctgctgagaaagtaccctgagcatttcgtgatcaacattaggaaaggtgggggcttgatcactgagttcgtctctttggtctcgctacagtcttgagaatttctcaaaacacactgcagcaaggcggtggtgttgtatagctccgagtattcttttgctaccttttgtaaaaaaaagagttagggtaaaagggatttgtgcttaagtatttggctattagccaagttataagagtgaggctatacaacagtggtatcttattaataaaaaaaaaaaaaaagcggcctattttt

SEQ ID NO: 183881 - DNA, 646 bp, Zea mays
  Clone ID: MRT4577_99287C.1
cctcgaggccggcctggccgggatgagaaccggaggactcgacgaggaggaagacacgtgacgcctgcgcttgtgaccccaccatgcacgacgaggaagaactgcgcatggtcaacctcttctcgcgtcgaccgctcccaacactactgctgcttctatattggatgatcccgccgaagattcacaactccaaaagcagaacctgctcctcctgtaaggacgacaacaacgactcccgcgaggataaatgtatggtgatggacatcatgaacaagactgccgataccaaaatggtgacgaacatgcgacacgtgcttcgccgatattagaaaaacttcatagaaggaactgatcgctgatcacctagaatagtgctgctcgctagacaagctaactgatggatgtatgatatcatgaagctgataatatagaacatggtgacattttgcttgagttggacttctgaactattaagcccagatactctggatgtactgatttatagtgctttgaattaaaggcaaaatgcctgttggcttgaagtgacatcgtctgaaagaacaccgataacgcgcatacagctcgcaagctcccagtttggccacatacagtgatttgtaacggagaagtggatgcactcatgata

SEQ ID NO: 183882 - DNA, 465 bp, Zea mays
  Clone ID: MRT4577_99288C.1
cccacgcgtccgcccacgcgtccgcccacgcgtccagatacaagttaccataaatatattgataccgccctataacaaattacaaaatcaactttggcaatctccaattagcatttgttattaggacgggggtgctccattacatgtaaatggaacattaaactactcacatttacacaagtcgaattggcgtacgtcaaacaagaaggataccttgcatttttaaagaaagggttgcatgcctaaaaatcatccaacatcccaggggaaattcacgattgccaccttatgttacagtcccaagggacgggcatttgacgatccaacataagaacattgctttttcgcatgttctggaaccaatttcggaacattgtttgctgggactccttttaattcgggagggtttaaattgaaaagggggggcaggaagcggccatttggaaaacaaatcttaggatctcg

SEQ ID NO: 183883 - DNA, 442 bp, Zea mays
  Clone ID: MRT4577_99289C.1
gaagcgggggctctaataatattttaaactttgcccgaccacacgtagcggtacagcgaccaaattaggatacacacattcgtgagcttttctcttcaggacaggcagaaaacaaaacacaactggcagaattgagtgtatatattacacaagcattataagctctacttgcagtccagtctactgtgcgaaggcattactgtttcgacgctggcatcaaccggagccttgcctcagaagctctaccggaaccattctgtttggatagacgcgcctgaagatcactcccattcgccaggctgtagaactccacggatccagagggcagcgcagggtaacgccgctggcaagacgtcacgagccttttgattgactgaaggtacttgcgagtgtgctcgccattcatgatgagggcgaccctgcaagcgcagaccttatcttg

SEQ ID NO: 183884 - DNA, 272 bp, Zea mays
  Clone ID: MRT4577_9928C.1
aaacgccaaaaaaatgaccttaacacaacctttttttttttttcaacattaaagccacccatgaaacctgaaaagagacccataaaacccttaccaggttggcccccctgaaaaaaaacccgtaggaaatcaaaaaccaaccgtcaatgctgttgttaacacctgttgggttttgaaaaaaaaaaaaaaacaatagggctccaaaaggggagcccccctccataataaataaagggagcaaagcgggggctcatccaacccagggtatactg

SEQ ID NO: 183885 - DNA, 327 bp, Zea mays
  Clone ID: MRT4577_99290C.1
ctcggcacgtaactgcacagcagcataccggcggtaactgagaggccctgcggcgatggggaataagcgagcggcggccgtgagtgctccggtccccgcgctcgcctccgagcccgagtcggaccacttcagcgactacggcttctacccgcagcttctccacttcccctgcgagggtgaggcgaagcgaccgtggggcaggcgccagcgccaccagcagtctgcgcagttgaagcccttgtactccgcgcggatcaagctacagaagcctatcgtcaagaagcaccaccgacagcagaaacaggaggatcgccgtcggtgctggag

SEQ ID NO: 183886 - DNA, 348 bp, Zea mays
  unsure (1)..(348): unsure at all n locations
  Clone ID: MRT4577_99291C.1
nngtaanttggaagagccaggatttgtcatagtatggaacagcacatgacagacggcaggcatacttcacatttggggcaggtgaattacacgccgggtccgggtggaaggctagttccaactttggaggagggatggatctccacccctggcaattggggatcttaggcaacagggccaaattcatccatttaagaccggtaaaaaattgagggagccgcatcccacactcccagacctactctcgaacaggatgggcactgttaagcacctgatggattaaggcacccagctcggaaggccctacaggggcgacccatacattccactggctaaaccactcgtggt

SEQ ID NO: 183887 - DNA, 264 bp, Zea mays
  unsure (1)..(264): unsure at all n locations
  Clone ID: MRT4577_99292C.1
cnccanacctcntcttcttcttcctnctcctcctagcacagctagcgcctgctccccttcgccngtgatcatgtcttgcagcagcggnaagtncgactgtggctccagctgntcctgcggcagtcatgcaactgcatgtccnctaacgtggagaccgcngcngccagnnncatcaagaccncggtncncgncgcgccgannaccanggtcagngnggctgcttcgaggcggcnntcgagggnngnggngngactgcaanacttt

SEQ ID NO: 183888 - DNA, 826 bp, Zea mays
  unsure (1)..(826): unsure at all n locations
  Clone ID: MRT4577_99293C.1
ttgggtacctcgaggccggccgggggatgttatcataccagcactaaagcaccggatcccatcagaactccgaagttaagcgtgcttgggcgagagtagtactaggatgggtgacctcctgggaagtcctcgtgttgcattccttatattatggatggcatggcaacctggattcagagaaccagtaggtactgaaaaaacaatccaaaatgaccgagtattcactgcccaggccacccatcacatgctcgtcactgcaatactgccttcgtgcctccgcctcccaatctggcatggcccatgcggcagtggccagtgggcctcagttcttcctccgccgctagccccttttgaaattttctgtctctataatttcttatagaaaagtgaatcgatttctgtgatttttttataaaaaaaattccggttacagaaagacagtgacggagatacgaaccaaacagttcccctcccctggcacagcgacaccctggatgagtgatgtgtgatgcgtcggtgctctgctgcctgcctttgaagcttcgcaagaatcgcaacagcaagcgtagcggggacaacaagccggtccccgtggtcccggggaaggggaagggaacctgcacagtggattttgaccatctgttttttatgagaagtttcaaaaaaaaacagaaatgtttgacatgttcaaagtacataataacagacctaattaagtgcacatttctcgcttgtttaatcgaatattaagaagancaaanatgacgctggtcnaagtctgaacggtgaaaccgtgcatacctgtccgttgttgccgactgtggcg

SEQ ID NO: 183889 - DNA, 651 bp, Zea mays
  unsure (1)..(651): unsure at all n locations
  Clone ID: MRT4577_99294C.1
ttgccgtgacgcttagcgtcgctgatgctttcctgccgccctggtcagcaactgaagccggagtacgacagccagcggcaaccaccggtgcaaacttgggcgatgcagatgagaccttacaacctagcttcttgccaggtgtaagagcagagcggccaccagtagccaccgcgactgatttgcgttgccggcgacgacccttgggtgtagctgacagatcgagaggctgcccaccatccacaggtcgcgtggttggagggaccttggtgcatgccttgtccatggttggtgtgttggagctatcatcgaggatcaccagtgccagctcacgcggtggctcatgctcctcactgctatctttcttgcctgcgacgagtgcttcgccggagctgtcagcggtcgtggccatcccctgcccgcgaagccggcgacggcgcttgggcttcaaggatggtgctcggctttcgtccttgtcttcaggcggtgtcgaaggatagccatccttcggcggcctgccccggccatgcttggcatctaccaccaaagacccaacggaagccgggttgcacgagccggcctcagtctgctccaccgggagcttctcggcagcgttcttctcggggttgcgctcgaaccgccccgcaangtttc

SEQ ID NO: 183890 - DNA, 352 bp, Zea mays
  unsure (1)..(352): unsure at all n locations
  Clone ID: MRT4577_99295C.1
gagagcgagcacaacgaccgaccgaccgaccagagcgacgcgaaagaacagccgcaaaccgnaccaccagaaaacgcaccgcagcaccaacccaagccgcaacgacaaccgccagccgcgcccaacgacccgccgacgagaagcgagcccgaggccggcgacagcgacggcgncggcgacgacggacccgaccccacagaagccgaggaacgcgcagccggaggggacgcacacgccgaccgagcccaaggacagacaggaaaaccagaccacgacgacaaacggacgccacaagcaccgcaccaaccacgagcacaagaaggccacccgccacaacaacccggggcacaac

SEQ ID NO: 183891 - DNA, 416 bp, Zea mays
  Clone ID: MRT4577_99296C.1
aattctacgagggcaggaaattaattagaaaacagttggtactgtacttaaacaggagaaccaattgccgcactagcacactttgagaacattacacacaacacgaagtcttacaaacaaaattgttgattttggacaatttgctgcggatagtcatggctctgacgaaacgaatgaccacagtatacttgacggtcgaacctttcatgcttgagatgcatttctttgaagggatggcttcactcttttgagggatcataaacttcttggcttcgtagtcttttacatcagatttaattgcatgatagaaaagcatgctgaaatggagctttactgacgaaagggacaagtgctatgcaagtctgtgttgttgattgacaaaactaaatccattgattttctattcactcattgag

SEQ ID NO: 183892 - DNA, 151 bp, Zea mays
  Clone ID: MRT4577_99297C.1
cggacgcgtgggctctaaacctttagtaaggctgtgtctgttccagcacaaacacaacgcaagaggttgcagatgtcagggaggtccggaccaaccttgagctgcgtgtcaagctagaactgcggcaagatgtccccatgcctatagacag

SEQ ID NO: 183893 - DNA, 470 bp, Zea mays
  Clone ID: MRT4577_99298C.1
aaattaaacaggggaaaaagaattggacagccgaaactgttgcaaaacacaaaaacatacttttggggaaaactgaactgggaagtttattccggagataaaaaacaaacggggcatgaaaaatgacgccgggaacctatagactatggcaccatgtctttagtaaaccttttggataggcgatttatatacttgatagaccaatccaggaggaatataattgcgtatgcggatttgaaatgtcttgttaggggtctttaaccggtatgggagctgaagtggcacacgtgacggctgcagtggctgtaccaattttgtaactcgctgcagcttacattggcccaaagatattatggaaatgccgcttcccgaccaactagggcggcacgcagagctaccaagggactgacctcaatggtgtatcacgcttgtgggtgctcggtgccagagaagggccctagacctggaca

SEQ ID NO: 183894 - DNA, 242 bp, Zea mays
  Clone ID: MRT4577_99299C.1
actcagtgtagtctgacacagacataggtgttgcaccagacaggaccccactagatctaagcgtgaagctgaagctctgtccctattcccccaacccagctagcatgaatgacaccaacagatcctcatcagcaaagcatttggctttgtcctgcccaagtgggatgcagactgagtgctgtacttgtagcgtccccagagccgaactcactgcagttcatctgaacaacatgagctcctgg

SEQ ID NO: 183895 - DNA, 1064 bp, Zea mays
  Clone ID: MRT4577_9929C.1
ctcgtcgacgagcagacaatagcatactgggaagataggttgaggagttggggctatgatccactgtttcttggtgtggtcaagctttcagaagaaatccagctacggacatttggagaaggacaaacaactgtagttgttggtccaagcggcgttgggaagtccagcctgatcaatgcactgaggtgtaaccaggacatatcagaagaagatccaatacataaactagttgaacagaatagtaaatggtttggtgaacagcgtgttggaactgtgtccaagaaaagtggtaaaggaaagcacacaacgcgccatgtctcgttgcttcctatagctagcggaggcttccttgctgatactcctggatttaaccagcctagtttgatgaaagtgacaaaaaagagtcttgcagaaacatttcctgagataagaaaagcgctgaacgagaacgagcccaaaaaatgcttatttaatgattgtgtccacctgggtgagcatggatgtgctgtgaagggggactgggaaaggtatccatactatctccagatgcttgatgagatcaaaattagagaagaaatccagctacggacatttggaacaaaaagagaaggtgatgtcaggtacaaaacaggtgtcatgggggtgaagcaagcagagcctcgtcttgaactcaagaagcacaggagggtgtctagaaagaagattaaccaatcgattcttgacgaaatcgaagatgatgttgatgacctcgatgatgactaccagtttgacgtcaagcagcgttctaggaaatgataatcttttttcatctgatgatctaacggcatgaaggaacctttgggtgctgtacacagttggttttgtagtgccaccaccatgcccttgagcagtatgctgatcactgtaagtagaagcgtaatggccggaacccggggtgtcttgacgttgctccagacgtttttctttgcggtagaacgttaagggcatgtttggaaacataatttttttagtatcaagataataccgtgatggcaacgactgctatacaagcagtctttctatgc

SEQ ID NO: 183896 - DNA, 663 bp, Zea mays
  Clone ID: MRT4577_992C.1
taattccggtgagcgagaagtcacaacctgaacaccgtaagttgtgccttcatgcctattacaaagaagttactataaaagggatttgtgtgtgagtttgaccaattggattcctgattgatttatcagaaccaatacatgcaatgctacatcacaccatattttaaaagttcattggaaatttcaaaggtagcaacgaggtgcaacggtcctccgctgagcgactttgttgagagtcaatttctttaggagcaggtaaaccgtcttcatacagagagatctgccataaaggcactattgtctcgaaacacttcatgcactttgatccgatactgcttgaagaaaaggcctaaaggtgaggacaggaatgctccaagggaagatgcatgtaaggtcacaaatcataactctcaggtagcggatcagccaaccgctggatgtgttccatgatttatttatttcagtggtttacaaagtggtatgtacggtgcacacgccctccaaagttataatttctctttagttatctccttacgatttctttgatgcttgtgaaaatgcgaaggcttgatgtgaactatggtgccgacaggatatgaatggccggacaatgcggcacttttcttttgcaccaaagaatctcagaccatcatgctgttcttt

SEQ ID NO: 183897 - DNA, 454 bp, Zea mays
  Clone ID: MRT4577_99300C.1
gtgcgagtcatccttctatgatgggcaatggttatgatcttctttatgctcttttcagacgattggcgacaccgggaggaggttaaattctctattggtacgcacagccccttttcaatgacaggcgcaagctcccaaagactgctgacccgcgcctgcaggggcacctacctacactgggactctaccagccacttgccatggcatcaatgagcatccagtcagaggctgcatcactcccactcatcaccgacgtcatgactgctatgacataccttgcaaaccaaatatatcaccctagcttagctctcgcatgcatcaaagcatacggcaacaaccaaccaaagccgatcctgaacagcatgaaggccactatccaagaacgactatgcaaccagctctagccacacatcaccgtgcaccgaccgaaccatctaacccatagagcaaatac

SEQ ID NO: 183898 - DNA, 440 bp, Zea mays
  unsure (1)..(440): unsure at all n locations
  Clone ID: MRT4577_99301C.1
cagaagttagatatccagagtaatcagaatgagtaagctgagacatcagtgcaagcacattgttgaaacctctcattttagctctagggtcaagtataaatgcaaatgcatatagcaaaggaattgtaccccaatattttaagaatttgtctttcattgggacaactatatgtctaagcaagttatcattctcatacatgttcatgtgcttattaatatgaagaatgtggtgcaacattaaaggtgatgtagggttaaagaagcaaagacagagggattagggtttagggtttagcgagttcataccttagctgaatgtcggagcaccagtttcgtcggcgattaccaagaacaacgcagatcaggacagagaagatccagcgacggcagatccagggacacagagacagancctggtngaagaacagagagactttgag

SEQ ID NO: 183899 - DNA, 175 bp, Zea mays
  Clone ID: MRT4577_99302C.1
taggatagtcaattctaaggacgatatggaagataagacaaccctacatcagccaaattcctttgattaaatgtgtgagctggtttatatgcatgagtgtgatacttctcaggcaagatgtgttaagaatactggggactgtaggcctatggtaataataaacacgtatttgatg

SEQ ID NO: 183900 - DNA, 295 bp, Zea mays
  Clone ID: MRT4577_99303C.1
gcgacatagttccccgatcgaagcagatgaggtccactgtgctgtactgctgtgcggcaatcatggaagcaatccaccttgcctacgtgctcgtcttgctgttgcccatcctgtcctccgcgtgccgcgccttgtgtcttttttaggagtgcttcttatacaaagggccctacaaatacccggtgacgacactgcgcgcttacgcgcgcgcgggtgggatgtacttgtaccagcaccaagtcacagggcggctttttttacggggtctatgtacctgacgtcatcatgagcggac

SEQ ID NO: 183901 - DNA, 143 bp, Zea mays
  Clone ID: MRT4577_99304C.1
caacccgaacgctgtcatttttggtcttttgaacgaaggctacaatcggatccacacatgtaccgatgggagctagcgcatcagactggctttataagagaggcttaaaacactccgatcggctgttcaagacatctgacacc

SEQ ID NO: 183902 - DNA, 456 bp, Zea mays
  Clone ID: MRT4577_99305C.1
agctttccttcctcctccccgtccctaaagcggccggccactctctctctctctctctctctccaccctaccgtccgtcccgtccctcacctcaccaatctcgcgcacgctccccaatgacccaatctccccgaccctgccactgccagcgccagctcctccctgccatcccagtcccagccacgtatcgcttcacgggcggggcagcagcagaaccagtgctccgcggctgatgcgcgcaaccaatgccggcgctcgcgtccgccaacatggcccgagccgccgacgccgccgtcgcgctcccccccctcctcactgcttcctcctcctcctcctgggtgaccacgccggcggggtgcgctttgactacgcctcgctgaccctcgggagcctgaggctgctgggcgacgcgcaccttaagaacgggaccatccgcctcttccgggacctcccggt

SEQ ID NO: 183903 - DNA, 288 bp, Zea mays
  Clone ID: MRT4577_99306C.1
caaaccaaaaataatgcgtagatggatctcaccaaagaaggaatctgacgctacctctgtgcgcagaccatctcaccctccatctagatactacagttcaccagctgcactaggtattcgatccatatctacagatggtaaaatcagcgttgtgaatgatgcacctttattatcactaaaacaaccatatggcagcaacttgacacgagaagcaacatctgcacagtctgctccatcgcctccacaaaaatccttgttactaggtgcacaaagtgcatcaagaagcca

SEQ ID NO: 183904 - DNA, 209 bp, Zea mays
  unsure (1)..(209): unsure at all n locations
  Clone ID: MRT4577_99307C.1
gcaaaaaatcgggtgggctcttaacagtgtttgttgcgaaattccnaaacattaaattgcacagttctccagagagctttaataattctttttgcctgaatatcaataattccaaatcatgcaactcttattgagaagctgcatccacttacaagatctggatataccttatccaggctcctattattattatccccacccgaaaacca

SEQ ID NO: 183905 - DNA, 235 bp, Zea mays
  unsure (1)..(235): unsure at all n locations
  Clone ID: MRT4577_99308C.1
cgcttgaaaactactcctacaacatgctcaacacgatcaaggacgagaagagggctgtcaagctgccggcctatgacaacaagaagatcgaggacgccatcnacgcggccatcagctggctggacaccaaccagctcgccgaggcggacgagttcgaggacaagatgaacgagctggagagcctattcaaccccatcatctccaagatctaccatggcacttatgaacacatggt

SEQ ID NO: 183906 - DNA, 431 bp, Zea mays
  Clone ID: MRT4577_99309C.1
cccacgcgtccgcccacgcgtccggagggaacgtgacgagatggaggcgaggatgatggaggagcgggaggcggagcgggaggctcgcctggcagatcatcagaggatggcggagatgttccagtacatgcagagccttggcgccgcacagggcttcgctccgccacctccattgttccctgcagttgaccctgctatcttccatactcctggccaatctggggcgacatgcaacaaccctcatgaagggttcagcccaacgcagcaccagtcgaactcgccacctccatgagagttatgtttctagtgtttagacttcagaacttgcgttcaatacttatgttcttgatacttatgagacttatgaacttgtgttgaatagttatgtcagagctcgagacttatgagacttatggtctttatacttatgt

SEQ ID NO: 183907 - DNA, 311 bp, Zea mays
  unsure (1)..(311): unsure at all n locations
  Clone ID: MRT4577_9930C.1
cggttccctaccattgtctgggaggagtgtacaagaaaaattttggcggaccaatactaaaggtggaaaagaatnaacacactgttgacatattagcatggtggaaagcacacaaagaagaatatcctctcttgggccagctagctcatgatgtcttagctatgaaagtgtcaacagtagcttcagaatctgcttttagtgctggtggtcgtgtactcgatccatcatgtactcgccttgaccctaccatggtagaagcactggtctacaccaaagattggatagctagagcaagaaacggttccaaggct

SEQ ID NO: 183908 - DNA, 365 bp, Zea mays
  unsure (1)..(365): unsure at all n locations
  Clone ID: MRT4577_99310C.1
cgggaaggaaggagaagaagacgagtgtcaagtgaacctgaaacttgcggtgtcactggctggtagcctgagtgtgagtgagtgatcgagctagctgagctccgatcctcgctagctaggataccgacataccacaaganttcttaacacgtccaggagtgacagccacaacagatcgatgggctttgccaccganctcaaggccttcttactgtcgaagacagaagaatggggcgccaccagataacacgacgnccccagtgcgnccacctntcaaatgcgcgcacagncctacgtatatggtgatnagctggtnngaccccngaatacgatnngtnggtcacactggggctatactctggata

SEQ ID NO: 183909 - DNA, 208 bp, Zea mays
  Clone ID: MRT4577_99311C.1
cgggcgcacgttttttgtatcctttatagcgatccacgcgttcgtccacgcgtccgtccacgcgtcggcgagcagggcctaattacgtttttctgcgccgataactttgaaaacgtgtggaacagggaaaatacattgtcgccggactcgatagtgtattggcgataagacctcatacttcctccgaattggtcgtgacaatacgcgg

SEQ ID NO: 183910 - DNA, 471 bp, Zea mays
  Clone ID: MRT4577_99312C.1
ttttttttttttttttttttttttttttttttttttttttttttttggttttttaaaacaaacccccccaaaaaccccgggggggcaggtaaaggccgcccaaaaccggcaaaaaccgggggggggcccggggggaagggcaccccgggagaaaattggggggccgggggctctttgaaaaaaggacaagaaaagcgcggaaatttttgttcccttgggtctccgcccaaggcccccaaaaaaaccccggaaaaaaaaaccccgacaaaaaaaaccccaaaaagaaaaggggggccccagggaaaaggggggcaaagggggcaacaagggcggcccgaaggggtggaaaaagggaaaaaaaggagggcccccctgggcctagcccccaaaaccaaaaaaacagggaaatcccaggcccccaaacccccttaataacccaaagaaaaacttgcccgacggaaaattaccggg

SEQ ID NO: 183911 - DNA, 375 bp, Zea mays
  Clone ID: MRT4577_99313C.1
acgagctttggcacatgaacgccatccagtataaccaagttttttttaacctagaacatcataataatactgctgatacttgaggactgcgtacataattatggcacatattagctgccctcacactagcaaatcaacattacggcttatctatgcgggccaaagacaatcatagaacaaggccactagctcgtattcacaaattaacatcttgacaataaaatacacactcctttgcataggacttcctttggcacaaacataaatatacctgatactggggagacaaatacatttcttactaattttatgaaatgcttattgcatctatgttcgtctccaactagcaacgccaaaacattttttttcttgcgg

SEQ ID NO: 183912 - DNA, 273 bp, Zea mays
  Clone ID: MRT4577_99314C.1
gacaatgaacacaattattcctgggcgggggaacaatagtttacatcatggtacaaaccgaaaaccagcgtgcgctcacatgcatccggacacctaaaggtcaccggcggcgccttcctcacttgccggggacgaacttggtggcgtaggcccaagcgttgttgttgacggggtcggcaatggggtcagggaggttctagagcgggtccttacttgagaccatggcctggacgaagaatgcgaacatggacaacattgcaaggcggcccttct

SEQ ID NO: 183913 - DNA, 438 bp, Zea mays
  Clone ID: MRT4577_99315C.1
atgacatactttgtttttttttttttcttccgaaatccggcaaaagaaccaacagcgcaaacaaccgctataaaaagatccaacatcagggcgggtccacggggccaaacgctaggcgccaaatggctccaaaggccacacgcgggggaaaaacaaaaagacaatatggccttgaccgccaacagactcaagaaaaaaccccggatggttggttacagtcccaaaacagaaattaaacccaaagaactggaacaccccccccaaaaacccgaaaatgaaaaaaaaaccacccggaaaaaacaaaaaccagggggggggccctttcttattctgcgcaaaccctaaaaaatcctgggaagcaaaatcgcagttacccttttgaccagtttttacgggcaacagggggggaaggatgttccgaaaaaccccgcccgccga

SEQ ID NO: 183914 - DNA, 396 bp, Zea mays
  Clone ID: MRT4577_99316C.1
gggttattgtaactgggtgtatttatagctgggtacatgtggtttagtacggtagagttcactgtttatgagaatagtggcgaatgaattgtctgactcagttcgaatagggaaattataagcaaaatataggacaagagtatttttggagttttctgaaatttgaactatgcttaagggttgacatggtttgatagaggatattttgataagaattttgaaacaagaattgtcgaaatatgagtttggacggaggagttttggattttataatcataggaaatagaaaaagaaaaggaaaaaaagaatattccaaaatttgaatatttggagatatttgtaaaatcatgtatttttgagcggagtgtcaggaattatttctgggctattcatgag

SEQ ID NO: 183915 - DNA, 497 bp, Zea mays
  Clone ID: MRT4577_99317C.1
gggggaaaaacggggaacctttgccttggttcgccctcaaagggggggggtggggtttttcaaaggggcccaacccttttgcagccccaaaaagcaccctttttttccttagggtttaacttaaaataaagcctggcggggggaacagcacccatcgatccccaatccatgctgggtgatgcatgggtctgctggagcccagggtgaacacaggactaacaactggcacagagggacctttaatcaaaaacacaggtggggaacaacaaacccgggacgaacgaagataaaccctttggactaggggaaacaacacgggagcgaacaggataacttgggcgggcgggccccaccggttaattcctccagttcccgggggagttgccgtaaccccccccacgggtgccacccccgtagcccccgccaccaccaccggagccgccgccgccccaccgtagccgccgccaccgccgtagccgccgccgccattacggggc

SEQ ID NO: 183916 - DNA, 533 bp, Zea mays
  Clone ID: MRT4577_99319C.1
cttgcgatagatcacacaaccgcaccacacgtaccggactctccgtgctatgtcattcactcactcgattcgctctcttcagatcttgactggtcactcatgataagggcgtctcggaatggacagttatcgcctccgacatgtgcaacaactactgctgctgcaggacggacgactactccgacattgtcaccatctgcctgcaccaacaacaacaccaacaacaacgcctgctccgacacccttctgatgacgaggaccccctggcttacataacctaatctctattagttgcaggaatctagcagaactctcttcttcactgcaattactcttgtccccgaggcccttacctgcgacgaaccatctaggactacaaggataccccgcgcttatggttgtgctatccctctactacgatagcgtttgcctctcgggacatcccgggaccctactcatgctatactgcgtggcctcactttatctgaatgcgcgtatatgtacccatgcatgaatgtgagacgcgtgtggat

SEQ ID NO: 183917 - DNA, 371 bp, Zea mays
  Clone ID: MRT4577_9931C.1
acgacgaaggtcgcgctgctcgatacgttcacgtggcaggacggcatcgcggccaactacaaggcgaacggcttcacggtgtcgaacaccgacaccgcatgcaacctgaaggcaatggtccaggccgccacgcagtacggcgtcgcgaacgcgacggcattcggctcgtcgctgttctgctcgcagcagacctacacggtcgcgaacgcggaccagacctacatgttcgccgacacggtccacccgacgacgcacctgcacgcactgttcgcgcaattcgtcgaacagcagatcgcgaagtcgggcgtcggcaagtaagccacgcctgaacgggccgccgccggcacgcgcaacgtgcgggcggcgcgatt

SEQ ID NO: 183918 - DNA, 465 bp, Zea mays
  unsure (1)..(465): unsure at all n locations
  Clone ID: MRT4577_99320C.1
ttcaagagggatgaggcccactctccgcttgcactgcgaggtacttgctcatctattccgcttatatacacctctctttttttttggcattaagcacccttgttgtgggggtgggggcgcatttctcttcccnccactccccaaactctataaggcaagaaattttcaatgatgtctataccttgatactcttctgggtcacattgctctgtacattttgtcatagccttgtccttttatgtgtccctttttttacatacaagatccttgcactcgacatatgtagtttgggatatgtgtggactattgctctggttctattttcgacgatccttttagctctgtacattcacagcagggtgcttataacccaccttggtgcacgggggcatctaccctctacgtttttgtgcgctatgtttcttgactctataccatttttccctcactctgggacagtttaca

SEQ ID NO: 183919 - DNA, 851 bp, Zea mays
  Clone ID: MRT4577_99321C.1
ccggccggggccctcgtttcccgccgcacggatccaaaaccctagcccctcggcgttttcccctcccggcgacggcgaggcggcggagatgatgcggcagcagcagcagcttccacctccgccgcagcacccgccgccccaagcctcctccgccggcggcggcggcggcggcgagttctaccgcggcccgccgatgcggcagctgtccgcggcgtcctccaccaatctcccgcccgactacgccgcacacccggcccccccgtcacagcagcagcatcagcctccttacgacgcttatggtgacagttttggtgctaaaaggatgcggaagcctgtccagcgacgaacagtggactacacaagcagtgttgtccgttatgttcaggctcgcatgtggcaacgggacgctagggatagattcacattgcagccaactccagcagctgtcctggatctttaacgaattgcagatgttaccgtctgtcgcatatccagacaacccctcaacgagttttgctgccaaatttgtacattcatcaatcaataagaaccggtgctctattaatcgtgtcttgtggacccctacaggccgtcgacttatcactggatcacaaagtggtgaatttacgctatggaatgggcaatcttttaactttgaaatgatccttcaggctcatgatctacccgtgagatcaatggtttggagtcacaatgaaaactggatggtgacgggagatgatggtggtgcaatcaagtattggcaagtaacatgaacaacgtcaaagtgaataaacagctcatagagaatcagtttcgtggtttaagtttttccagggacagacttgaaattc

SEQ ID NO: 183920 - DNA, 326 bp, Zea mays
  Clone ID: MRT4577_99322C.1
cacctgtatattcttttttcaatggggggtttttgggcaaaggcggacgaatttgtctttaccagtaaaacatagctcggcctggggaataaaatcccgcccccaactcattgttgaaacaacacctgatctagattccccccgggctaggcagcttttgcgcctggacaagaaaataccacccccccgtaaccgttgctggaaaaaaaaattcctttgatgcccctgaagcgttccaccttctggggggcatgggcgaatcgcccgttcttggggcgaacactgaacttggggaccgggaaacgagccttatctcggcgggggac

SEQ ID NO: 183921 - DNA, 652 bp, Zea mays
  Clone ID: MRT4577_99323C.1
gccggcccggctttaaaataaaaaaaaaaaaaaaaaaaaagtgaccgccaggacagaaccaaaaccaaccaagccgtcgcgagctaatatatttcctctgcctggcacctccctccgtccgcccatgcatagcaatcgagaaggacgtgcccgcccaccactgacgttgcgtgggctgaccctccttggctgctaacaatattgatgccgtcgtgcgtgggcacttacttcgcgaccgaccggacggatcgctaccaactagctggcgtggctgcctacctgactgacgtacatgaacaagcaacggacacggacccgacccacgactgattgctgcgcctgactgaaggggtggatacaaaccacacgcgactgtctgtgctggctgagcaacgaccggaaccccccctacctatgactctcgatcaacgacaagaagtcggtctccctccccgctgtctggcacccgcccacatatatcactgactgaccctggttgatgtgcctgccggctcctccaagggacacgtggtcgatcaagacgcacaccaaccagctggctgcggccggcgcacgcacggccacccacccaccaatgcacgcgcgagcgcggcagcaagcacgaccgcgcgcacaagaaagaaggctcact

SEQ ID NO: 183922 - DNA, 485 bp, Zea mays
  Clone ID: MRT4577_99324C.1
cttatccccttttatttgcggaactgatatgagtctgtatctccacgccgaaaaccttgggtgtaaggttatctctttcatcctttctcactctgcctagagatcgtgaccctcatagtaatcgctccttttgcccatgacctagagggaagccacagtgatggcaccgaaatactctacgcgcatgcatatgtgtttgattagaaggagaagacgaggttacggcgagatgacgcgagctggtgcggtcggcggctccggcagttgcgtaggacgagaagaaggccggcgtgtccgtgactgtccaccccccccgcaaagacaaggcgctagtgacaccgaccgtggaggcctcatcggaagaaaaaaggaggaggttcgtggcctacccgacgcgtctgacggggacacgaacgcggtgcggtacgccgcgcgcttcacaacagcgctcgaggcaatttacacgcgcgtgagcgccacgatcg

SEQ ID NO: 183923 - DNA, 1003 bp, Zea mays
  Clone ID: MRT4577_99325C.1
cgggcgctggagctgcatctgaacaaaattttttcattacagattcgaactccgcacgctgtagcaccccatgtaaatagtttaatttactgttgcccttgcatgtataggggtaaggaaaaaggaaagatgctattcgctacagtactagaccatttggcagctctggttttacagtgcaaacatcatggtatcttcttcggtaggttctaaatcaacactactttattgtctcagtggcaatcttgattccttcttttctaatcacgcatccatctgtacatcctcagtgtaccattggaaaaacatcgcacaaaaaccgtgctccaaggtacttctgggaaaaaagatggaagcgaaaaaaagaagggaaacaagctccaggacatggatatcttcatcttcaggagctgcacacagggaagtgctgaaacaagctccaagccatggatatcttcatcttcaggagctgcacacagcgaagtggtggttcactccacttggtggttgcaccatcctgtttgtgtggtggcaagacatcactatggaactgaggagcgccttctcaacatcctcagaggcttctctccttagcaaacacatcacatactccatcactgctttatcgcaaggcagtgtgatcctcccatcacttgtgaacccaaactcttcctgcgacagcttcaggagctctacaaacactgccgtgtggaggtaagaaagggggatctcaaaccgcttcccatcagaagagtagacgatgcagttgcccttccctgcaactatgctgctgcaagatgggttgatttcctttctcactactgtgacccttcttcgcccaactgcacccattccctgcatcttcttggacaactgagctagcttcttggagctgatcattttgctaccggtctttgcctaacaaggagacgaactcctgtctttgagatggaatgattagaaacgatctgagttgtctgtcccggccggcctcgagggtacc

SEQ ID NO: 183924 - DNA, 2205 bp, Zea mays
  unsure (1)..(2205): unsure at all n locations
  Clone ID: MRT4577_99326C.1
acgagtgtacaagcttttttttttttttttttttttttttttttttttttttgatcggaatctggaccttttccacgtcattgccactacggcggtcgtcggcagcgctgcggccgccacccactgcggcacgcactaatccttcctacccttgcgtgcttaatccttcttccattgccttatctctccttcctcagtttaatcaccagacggccagccctagcgagttcatattccgctcctggttgtccgtccatggccgcgtcgctgcttcgccgtggcgtcgtcaccagccgccggcgatgcccggtggagatgctgcggcggctggtctcgtccgaggcggcggctgaccgggcaccgtcgcggccgccgccggagatgccgccgttcgaccaccggccccgcccgtatgccgggctgggtggcgccgagatcttcgagaagaggaaggcggtgctcggcccgtctctcttccattactaccagaagccgctcaacattgtggaggggaagatgcagtacctgtatgacgagcatggaaagagatatctcgattgctttgggggcatcgtgacagtgtcgtgtggccactgccatccggatattgtgaatgctgtggtggagcagaccaagttgctccagcacacaaccaccatttacttgcaccacactattgtagagtttgcagaggcactcacctccaaaatgcctggcaatctcaaggttgcgtattttgtgaattctgggaccgaagcgaatgagttggcaatgttgatggcccggctgtatagtgggaatctcagtatggttgcgctcagaaatgcatatcatggcggaagtgccggtacgattggattgactggtttgcagacgtggaaatacccaattcctcagggtgaaatacatcatgtcatgaaccctgatccttatcgggggactttcgggtctgatgctgcagcttatgctaaggaagtcgaagaacacataacttatggaagttcaggaagggttgcaggcttcattgcagaaacattccaaggtgtgggaggtgctgttgaactagctcctggatacctaaagttagcttatgacattgtgcgcaaggctggtggcgtttgtattgctgatgaagtccagagtggttttggccgtactggcagtcattactggggattccagacacaaggtgtcattcctgacatagtcaccatggcaaagggaattggcaatggcctaccattgggggcagttgtgacaactcctgagattgcaagtgtgttagctcaaaaaatccaatttaacacatttggtggaaatccagtttgttctgctggtgggttagctgtgcttaaggttcttgacaaggagaaacgccaggcacattgtgctgatgttggatctcacttgttggagcgtctaaaatcgcttcaggagaagcacgaaatcataggtgatgttagaggaaggggactgatgcttggggtggaactcgttacggacagaaaggagaagacccctgccaagtcagaaaccattgaactgtttgagaagctcagagatctcggggtactagttggaaagggcggtctgcatggtaacgtcttcagaataaaaccaccgatgtgcttttcgaaggacgatgcagacttcttggtggactccatggactacgcaatgtcaaggctctgaaggaacatgctctgagttgacaatgtgtctgcgtggaaacaacacttcctgcaaccgcaagatgcatggcctgaaatgaaactgaaaggcagatgatttaatgggcatgctccccgggtggtatgttggtggtgttatggtgaagtttaatagtccccctcccccgaataaattgatgaaaggggacagaacgtcttgcccagcttgtgagttgtttgtagaagaactgcagttaataaatagaacagcgagcgagcaagcgtgatatcaatctgcatacggtcattttcatttattaccagataagttgacaaaaaaaaaaagctgccgactgcggcactgcatgagcccggccgtgtgtggagtctctcgtcnaggttcgggtcgggtgagtcggctcctgtttggtaggcagatccaaagagaggccaaagagtcatggctcactcaattttttataacctttttatacctaatgttaaagatagaaaaaataaagttttgggtaggctt

SEQ ID NO: 183925 - DNA, 744 bp, Zea mays
  Clone ID: MRT4577_99327C.1
aattgaggctgtgcagtgcttcttctgagttctgaccgatccgggcggctctctgctgcatgcaatcgcaaaatcgctgaagcttgacgacgtacgattggggcatatggaaatggatcctgctgaggcatggaatgcttattgcgagtcgtttgagctggccaactggacaccaactgcggcacaagtttgtgctccagctgctggcctccctcaccctcttctggagtatgcgtccatcgacatcgacatggacatggacatatttggtgcctgctgcagccttcatcgtcagcaagcacctgtgcctgcatcagctgcattatctatgggagtcggggggcatgggcagcaacttgctgctgactacaattccgtagaggattttaggggcattgtgaacactgttagacaagagggtataagcgtggataggccggtgactaacgagtttaggactgatgagaccagcctgatgaaaaagaagatgcatagataccctgcgagccttcaaggtatctctgaaagctatacccgtacccgcggtttgtggccatcggcccttaccacatgaaccaaacccacctcaagaaggcggagaaggtgaaggccgcggctacctcctgctacgtcgaagaatgtggagaggaccgactgggagaatggtacaccgcggtcgcctccttgggaggacgatgctcggcgcctctacgacgagaatgtcatgggaagaatcacctctac

SEQ ID NO: 183926 - DNA, 733 bp, Zea mays
  Clone ID: MRT4577_99328C.1
ttgggtccctcgaggccggccgggccgggcttccattgccttatctctccctcctcagtttaatcaccagacggccagccctagcgagttcatattccgctcctggttgtccgtccatggccgcgtcgctgcttcgccgtggcgtcgtcaccagccgccggcgatgcccggtggagatgctgcggcggctggtctcgtccgaagcggcggctgaccgggcaccatcgcggccgccgccggagatgccgccgttcgaccaccggccccgcccgtatgccgggctgggtggcgccgagatcttcgagaagaggaaggcggtgctcggcccgtctctcttccattactaccaaaagccgctcaacattgtggaggggaagatgcagtacctgtatgacgagcatgggaagagatatctcgattgctttgggggcatcgtgacagtgtcgtgtggccactgtcatccggatattgtgaatgctgtggtggagcagaccaagttgctccagcacacaaccaccatttacttgcaccacactattgtagagtttgcagaggcactcacctccaaaatgcctggcaatctcaaggtaaaagtactgtctgtctgggtgcagccataacacgcaccatttcatttatgtttttggatcctgcaggttgcgtattttgtgaattctgggactgaaccgaatgagttggcaatgttgatggcccggctgtatagtgggaatct

SEQ ID NO: 183927 - DNA, 504 bp, Zea mays
  Clone ID: MRT4577_99329C.1
ggtggaactcgttacggcccacgcgtccgcccacgcgtccgcggacgcgtgggttgaactgtttgagaagctcagagatctcggggtactagttggaaagggcggtctgcatggtaacgtcttcagaataaaaccaccgatgtgcttttcgaaggacgatgcagacttcttggtggactccatggactacgcaatgtcaaggctctgaaggaacatgctctgagttgacaatgtgtctgcgtggaaacaacacttcctgcaaccgcaagatgcatggcctgaaatgaaactgaaaggcagatgatttaatgggcatgctccccgggtggtatgttggtgttatggtgaagtttaatagtccccctcccccgaataaattgatgaaaggggacagaacgtcttgcccagcttgtgaactgtttgtagaagaactgcagttaataaatagaatagcgagcaagcaagcgtgatatcaatctgcataaaaaaaaaaaaaaaaaaacc

SEQ ID NO: 183928 - DNA, 363 bp, Zea mays
  Clone ID: MRT4577_9932C.1
actacgcgtaggccagggtcggccgatctattggacacaagatttctctggctctcactctaatcgacgggtcacgcacagcggcccccaaagtgcgcgtgctccgcaacggccgacaacatcctgcgtgcggtaccagcggcgactcgcacgtgcgaagatgctggggacatccaccggacagctgctggtcatactcggggccggctccgacatgatgaaccccagagctattgcgcagactgcgaggacggcgggacgcgcgactgtacgagccattaagcgcgtcatatgggctggccaccagctgggcgagagtttgggtcagcagggagccacccagcgttataatgagcttaaaga

SEQ ID NO: 183929 - DNA, 242 bp, Zea mays
  unsure (1)..(242): unsure at all n locations
  Clone ID: MRT4577_99330C.1
cggtccgtgaatntacccgggtcgacgccacgtccgtccgtggcacggcgtgatgganntatctcactnccctttgagaaggtgtcgaactnccaggctcatctttactctccnttcaccacgtgggtnngccagggagtagccgcctattcaggaaccaatcaaaacntcattgggctgagtgcnncttgcagaatgaagtnntgatcaacgctttgccaagggggctcgttcnncaacag

SEQ ID NO: 183930 - DNA, 538 bp, Zea mays
  Clone ID: MRT4577_99331C.1
gggggggaaaaaacattacccttccttcccccaatttgtctcccccgggtttttaattaccaaaattttttcccaatttggctaaaaaacctcccttggaatttaaaccgggcccccattttcccggaaccccttttccccacataaattcccaatcccctcccctttttgcccgggaattttttttttttaaaacctttgcctaaaaaccccattgttttgtttttccaaaacttaacccggggcctttttaaaaggccccaaaaattttttttttccccccttttttaacttccctttccttacccttttaaccccccttttcctttttccccgggggttggttttttttttttgaaccccttaattggaacaaattttccccttcttttggggccaacatccctaaaaaacttctttaaaaaggttcctttttgcccattctttaaaaaaattttttaatggttggcccttttattttgaaacttttttttttaaacccccaatttcccccccctttttttttttttacaattta

SEQ ID NO: 183931 - DNA, 277 bp, Zea mays
  Clone ID: MRT4577_99332C.1
attccggaacgcagttccaaagggacggtgagaaatacattctgtttcttaataaattaaaatatcagtctgaagttacaattccaggcactggctactggcgcgcgtgaacccaaagggggaacggagcctttttttattccaggggaggaggctaaacccttattttcacctttcaactccaacaggacacgaaaatttttttttgttgttcccccctttgaagaccggaaaaataagccgggggaaacacccgtttctcatactgttgagcaca

SEQ ID NO: 183932 - DNA, 208 bp, Zea mays
  Clone ID: MRT4577_99333C.1
gaatgtggcacgcctgtactagacatcttgacagatatgagcttgtaagcagacacactatgcgagtcgtcgtgagccctagaagaggcgccatgaagacgacgacatactggatgtatgaacactgatctggcccactatatgagcgagctgggctattgaaggaagacaggcgcattacgaaagcctattctgacgatcctaatga

SEQ ID NO: 183933 - DNA, 234 bp, Zea mays
  unsure (1)..(234): unsure at all n locations
  Clone ID: MRT4577_99334C.1
gcagcttcctacagagaaaagtggagctctttccatggttctaattccgatacaacctacaaaactattgcacaggatgctcctgtattgtatggaaaattcacaatagcgtgtgaccagttncaatgcgaattttacatacaatacaggagcatcctgtgcaatagttttgcagtggggatctggaaaaagaaccaaggagggcgctccactgatatctgattgatgcagccg

SEQ ID NO: 183934 - DNA, 232 bp, Zea mays
  Clone ID: MRT4577_99335C.1
cacaactattgtaggatggtcacataccatgtgaggaaattgtttaagacggtagattagtatttattacaactgaataatacatatgcatgacacgtgaattttggttccgattttaatggccttattacctctgcgtgcacatgaaggcagcggggatatgtggtggccatgcgcactacctaagggtgcgcattacgatctgatgtgtgtgacactctatgccgatgga

SEQ ID NO: 183935 - DNA, 603 bp, Zea mays
  Clone ID: MRT4577_99336C.1
aattcggcacgaggcctcgtgcctccgcacgaggggcggccgcgagcgaaaccaacgacgccacccaaaccggcaaatccgcctcctcccccacgcctttcgccgctcggctgactcgttcgcgttcccaccccactccgacttaaccgggcgcaccgtttccggtgggcggcatcctgcgcctttcgggtcgcgtccgcacgcgctggggtggtggagggagtccgggcgccttttctcgcgtgtcccgagggttgggctgagggagaagaggtccgcagcggccatccatggcggagatgcgaccgatctacagggagcccggcaagccccggcggccgccacgctctcacggcagtggaagtttctcagttccgttgtgggaaaagaaattttgcactgatgcttgtgctatcccctgggctaaactgtgtgagaccaagagattgatgtctctgtacaaaagcgttgttgattgggatgactcagctgcattagaagccttcaatgacgcaaaggcgcgcttctgtgctgtatatcatggccaacgctacgatatccctttgtccgacccaaacatgtttattgatattgtcaacccag

SEQ ID NO: 183936 - DNA, 277 bp, Zea mays
  Clone ID: MRT4577_99337C.1
tagactcactcctccctcattgcccgcctcaatattgtttggtggtgttgggcaaagagtaattacattgtattccttagagaaactacatgtaaaaatgtcctttacctgtatctcccaactcagaacaagtaggtaaactgttttcaccagggtccgcctaatttcaacacttgagaccctgcctcaaaaaacccaaaacaataacaactaggaaagtctacctacattcgcttggtttaaaggtcattgacaatagtttaaaggtcattgacag

SEQ ID NO: 183937 - DNA, 469 bp, Zea mays
  Clone ID: MRT4577_99338C.1
ctcgtttccagcctgtattcgacaacctcctaaaatgtacaggtaaacccaaatagtttaaaggaaaagaccctaggttacagccaaacaattctgtatactaatctgctgattgatgcgcttcaccaaagcaaaaaaatttcactctcatggaaattaattgtgacccgataattgctcaaaggcataaagcaatagcttcaagttacgagctttatcgatatcatgatccataaaaagtattgtatcatctgcatatgtaaatatatgaaagtaagcaagacaattatcttcctttgtctcaaaggccgtctcccacgtcttttatcgtttgcctactccttttgtgcgatcatggctcctgtgcatagccaatggttcacgccccggccatcgatccctatccatataacttatgcagtcgcagtaagattctagatcctatcaacaatatttcctatttatgaag

SEQ ID NO: 183938 - DNA, 200 bp, Zea mays
  Clone ID: MRT4577_99339C.1
aagggagacatcataatgtttacagcgtctgcacggggggctgggggaaaccaacgcaacgatatctcgtgtggggggaggcgaagatatgtgcaactgaccacgctgtatagtcgatgctaacactaggcacggtgcggagaagaaaaatgtcgtcatagcgaccgtagggacacactactaatagaagaccacaagat

SEQ ID NO: 183939 - DNA, 311 bp, Zea mays
  Clone ID: MRT4577_9933C.1
aaaatcttccaggtctaagaggctcgacaaatttttcaacatgaaaatcttgatgcttacaactccttgaggtaaggcaaggacatgcataccactacaggatcaagtaatacggcatacaacttggaacttgtttgatatcaatgtagcctgcagcatgctgttaaaattgtacctgcgttgcatgaacatcgcacttgttttgtggaaacaaatgcaagctgagaaaaaacctaatatcgtccatttcccgcactcgacaggattttgctacaaccaaggcttactagcggactcaaataccctactct

SEQ ID NO: 183940 - DNA, 467 bp, Zea mays
  Clone ID: MRT4577_99340C.1
attctattgtcatgtaaatttttattcagctactactttgagattaagccacttgtgggacgcagggaaagaaattatgaagatcaatgtgaacagatatgagtggcatgaattttttccacaagtcaagagtaatgctggcgctattcttgctgtatgggctcctataattcttgtctattttatggacacacaaatatggtattcggtattctgtactattttcggtggtatgtgtggtattatccatcatcttggtgagattcgcacaatgggaatggtgagaagtcggttttattccttaccagaagccttcagtatgtctctttgtcctcctgcaacaccaatacagagaaagggaatgttttttagtttcttggagaagagaattttcaagaaaataggtaaagatgaaagatattacccaagaaagtttgcgctggtttggaacaatataataagtagct

SEQ ID NO: 183941 - DNA, 340 bp, Zea mays
  Clone ID: MRT4577_99341C.1
ttttatttttctttttttttatgggggggggttttttttttttttttggtttttttccaaaaaaaaggcccttttttccataaggcagcggggggcacaggttccattcccggggaaatgtccattcctaagggaaacacccgcggattttaaaataaggggggagggcaggcaaaaccccaaattaaaacccgtcccaaacatggggggcaccccaacgggaagaaaaaatattaacggcgggcaatacgccaagaaaatgcccaggcccacttttttcagaaccaaagggggggcaaacttaaggccccaaggtccaaatgggtttgtgacaaactta

SEQ ID NO: 183942 - DNA, 1883 bp, Zea mays
  Clone ID: MRT4577_99342C.1
cttcgaaataatgacctcaaccaagatgatcctatctcggaggttgaaactgaggccaatgatggtgacgagagcaagttacctttgcagttggcaattgtgggacgtcctaatgttgggaagtccacccttttaaataccttgttgcaagaacagagagttcttgttggtccagaggcaggcctaacaagggactcgattcgggctcagtttcaatttgatagtcgaaccgtgtatttagtggatactgctggttggatggaaagatcagggaaggagaaagggccagcatctttgagtgttgtgcagtctaggaagaacttaatgagagctcacattgttgctcttgtgctggatgctgaaaagattgctaagtccaaaagtagcatgaatcatccagaaatcgtgatagcacggcaagcaatagaagagggccgtggactagttgtgattgtcaataaaatggatctccttagagataaccaaacactgtttaacaaggttatggacgctgttcctagagaaatccagacagtcattcctcaggtgacaggaataccagctgttttcgtgtcagcgctggaggggagggggcggattgctgtgatgcgccaggttatagatacctatgagaagtggtgtttaagattgtcaacatcacggctcaaccgttggttgcgtaaggttatgagcagacattcctggaaagattcagctactcagccaaaagtcaagtacttcactcaagtgaaggcacgaccaccaacatttgttgccttcatgagtgggaagactcagctttctgatacagatattaggttcttgacaaagtccctcaaggaagatttcgacatcgggggaataccgatacggatcatacaacgttctgttccaagaaaagcttatgcaaagcgcaacaacacaaggaacactggccctagggttgtcaggatgaaaacagacaaacggacagcggtatctgacccagccctgtcatagagggtgagcaccagtatcagccgcctaacctgaagaagggaggtcatgtttcgcgtttgagctatatatatatatatgcttctcatggggaaacgggaagtgaatgtttttctgactcgggaagttatacaaagctatgagctagccggtccggctgcctgcaccgcatgctcaagaagaagaatgactgtaagaaacaagcccagcaattcgaaggacagcatcacttctcaacattgggtgcaaggtggtattgatgagcgtcaagcactcaagttcaccccagaactccagatcagatgaagagttgtttttttttcttgcatccctcatgtttatgtaagtagagggactctaactctcatcagaggatgacactatgagttggagcaattttctgtttatttcctcaaacgctacacaatgccatacccttctaagggttgagatacatacttatagcccaaggggctgcaacatatgcttactagagttgcgaatatgttgtcctacaaactgcactaaccactaggtgttgttgtactctagtcaaaagaaactgcagcaagctgctgtcctccaaaagctagaaaataaaaagtagatgcctgcagcacgttgtccttgcagttaaaagactgttgttgtgctgtctgccgcagtcgttgcagtcaaaaactgctgttgctgctgtccaacagcagccggcctgtgcggactgtcctccacacgaagaccacatagcttattccatcacactttgtattggtaagcaaactgtttatggtaagggccagttcatctgctaaatgataataaaatgagcatttaaacctaaaagatagtgtgatttgtatcacaaacaaaagtatctgactacaccc

SEQ ID NO: 183943 - DNA, 749 bp, Zea mays
  unsure (1)..(749): unsure at all n locations
  Clone ID: MRT4577_99343C.1
ggtaccctccgggccggccgggtcctgctgtcccctctgacagcagtctagctgcagatatgggaggaaccctagctaggtgcctctccttttctatccatcctcctgcttgctgatcatcaagttgactcggcagccctatccaaagcgcgcgtcctggttctccgacgacgtcatcgcctccactccacacttgcacagactagtacaggtggtcactcagcttccagtgcacttgtgacagcaacagtctcccactaaatcaaagcaaagcaaaaaaggaaggaagaggaaactggtgtctgatcagacagagttgggagggagaaagaaccaacagccatgcatgacgcatctacagtacatggctcgattattggatcccaaagcgatagcaccggccgggcaagcataataaaaaaacaagggtacccctgctgccctcgcctttccagctctctttagccgggtagtagttctcctctctcatcgccttttttatatatataattcagatcacaaggctgtaacaatgatacgggnggagatccggaaagcatgcgcgttttaagatcgagcacggtcgttagttgaacaatgacctattgctgctgtcgcctctgctgatctgtattattaaggctgcgagttctgacctaaccggcatgctttcagtggaagccattagtttccaagaaagaaagaagaaaaaaaagctaggtatatatggttatgtatagccgctggaa

SEQ ID NO: 183944 - DNA, 212 bp, Zea mays
  Clone ID: MRT4577_99344C.1
agcgatggctggagcctgggcactgatcatcgacctcgcggttttcgtcccggtcctggccgcgcggtcggcgtctgcaggcggtggagccgcggcggtggcggagatctgcatgaagactccgtaccccgacctgtgcaccaggtacgggggggggaagccaggggccacaacaccaaaaggtaggtgctcctgacgaccgcggagcccgc

SEQ ID NO: 183945 - DNA, 971 bp, Zea mays
  Clone ID: MRT4577_99345C.1
ctcggagtgggccggggaaccacaaattaattatcgaccatctccgctattccgctcctactccggtggagtccacctccactcctccagcgagtcaccactggccaccgccacctcggccccgctcctcacgtagtcacgttgtcatccgtccacactgcacccgctcctctccgtctccccaacagtttcattcttcgagggggatcgcttgtcggcggggaagcaaagcttagttcttgacgcccaacctccccgttgcctattcgcctcaggaatttgggaattatgtctctttgaggggaatcaagggacttgcttttacttgtctgggctccatgtctaagtgggagccagtcacgtttcaggaatctcttagctttgttaagaaagtaaaggcacgtgactacatgctatacatatcattgctcgatgtgctcaaccggaatgatcaaatccctctgcaagcttacagcgagctctcgcttctgtttcagcatcacgaagatctgttagcggagctgtcgaagttcaggcccctcccatgcccaaacaacgtttatacacacggctcgatttggatgatcatattcctcatgccttttctgctcctgagccttgtcctcgccttgagaagccattgaagtgtttcctgctccatagactgttgcgagcctaaatgatttgtcgtagcactaacacctagttgttgtatatagatatatggatggggttctatatcctgtaatttctttatgatctccttgtacgctcgtgcgcacggaaataatcgtacaatattatttcagtcgcggcagtctggcagtatgtaaagcctaaacagagatcgtttgacctcgtccaatcggaaattcagctttgtacagagaaaaaaaaaaaaatttaagtaaactttgattagccgcaacgatgaaccaaaaaaaaaaaaaaaaaaaagccctcctagggcc

SEQ ID NO: 183946 - DNA, 490 bp, Zea mays
  Clone ID: MRT4577_99346C.1
gtattaaagcatgtaaagctagacctgagtgctcaagaacctggcaacgctgagttcaaaaaaagaactagcgcgcgacccgtattccgagaattgcgcacgctagtttgacacctcaacgaacagactcacactactatcaggtttaaactactgtccgactgaaatcactatctcctcagaaacatgacgtgcgcagggctaacagacaacactgaataagatcgaatatggccatgacccttacaagcaggtacagctacggaccggccggcttcacccaccaagatcaaaggcacttgatcatggcaccgatccctcggctacttgagacgacgacgcacctgggacccatactatcctgtctagcagaagatgcagaccttgtattacagaagcacccacgagatacacacggacagctcgagtgccgagggcaccaccttgccggtgacatcccgtggacgactcaagggttggaggacagcca

SEQ ID NO: 183947 - DNA, 464 bp, Zea mays
  Clone ID: MRT4577_99347C.1
tcccacgcgtccggcttttcgcgcggctgaactaccgcgaccgcgccagcatggcctcagcgtgccgggcttggcgagcgctgggctcgtcatcctgcctgtggagcacgctcgacctccgtgcacaccgctacgaccgggaggtggcgtcatcgcttgcctcgcggtgcgggagccttcgtcggctacgcctgcgcggccacgaggcagcagaggccgtcccggccctccgcgcgcatggtctccgcgaggtggtggccgatggctgccgcggcctcacggatgccacgctcgctgtcctcgccgcgcggcatgaggacctccagagcctccagatcgggcccgatcctctcgagcgcatatccagtgacgccctccgccacgtcgctctttgttgctcccaactccgccggctgcgcctatagggtcttcgtgaagctgacgcggatgccgtcggagcgctc

SEQ ID NO: 183948 - DNA, 338 bp, Zea mays
  unsure (1)..(338): unsure at all n locations
  Clone ID: MRT4577_99348C.1
tcgagccggccgggccggngattcctcactgcccctagctcccgcaactgtcgcagccactcccacgctcgcagccatgccgcccaagctcgacccgtcgcaggtggtggaggtgttcgtccgtgcgaccgccagccagagacccgcaccgtcttggcggggccccaagatcgctcccatcactcatttccccaacaagatggcataggaggtttcctcggagacgtcagccgactggaccgccatgcataccaacgtcaagcacatcgattataacctataggcgaacatcaaccaccgcaacgccgttttagcttttatatcttgcaagtattgag

SEQ ID NO: 183949 - DNA, 236 bp, Zea mays
  Clone ID: MRT4577_99349C.1
tcgcttcatccgcgcgcgcgtcagagactcagtttccatgcatatacgtgcgccttcgtcagcgcgcatcgacgtcacccgagcgcgctacactccccatcgttcacagttcactgctcgcgcgtcgtgcagacaccacaccatggcacctgccgcccctgctgccacgggcgctgtgagccccgccgtcaccaatggcggcgtcatggttgcagcacgctccgtcaggctgggcc

SEQ ID NO: 183950 - DNA, 176 bp, Zea mays
  Clone ID: MRT4577_9934C.1
gcagtcctgatacaacctcagagcccaagggtcctggggatggggcagaggaggacgagtccaacactggaggccgaggtccctggccttgtgagaacttgacccctttgctggtggctgggggtgtggccgtggccaccatagccctaattcttggtgtagccttcctagcccgg

SEQ ID NO: 183951 - DNA, 206 bp, Zea mays
  Clone ID: MRT4577_99350C.1
tttcggcttctcctccccctccagatccggcgcaggttcttaaggatctccgctcattccatacgtggatcaccaaatccaaatcacagccacggatctagacaaccgctgcttcgcctactgactcacacagaccacatacgaccactccatccacaacaataacatcacatacctccaggtcctatagtacaagatcaaactca

SEQ ID NO: 183952 - DNA, 1811 bp, Zea mays
  Clone ID: MRT4577_99351C.1
ctcgaggccggccgggaagccccgcaaaacccctaaaccctagctccccacccccagcctccccgcggcttccagcgattggaggcgaagcagccgccatggcgatcctccttaggcgcgcgtcgctgcggcgcgtcatcgccttcgccgccgcctcctcctcctcctcttctttgcactctgagatttataagcaaggggtttgtggatccatgtttcattgccgagagttcgcatcaaaagccaaaaaaaagaagtcaagtggaacagactccgatgaggagagtatgtcaaagaaagacttggctttacaccaggctatcgatcaaataacgtctgcatttgggaagggggcaataatgtggcttgggcgttcgcaaggccttagagatgtacctgttgtgtctactgggtctttcgctttggatatggctctaggaactggtggtcttccaaaggggcgtgtcatagaggtctatggtccagaggcttcaggcaagacaacacttgctctacatgtcattgcagaagcacaaaagaatgggggttactgtgcctttgtagatgcagaacacgctttggatccagctcttgcagagtcaattggtgttgacactaacaatttgctcgtctctcagccagactgcgctgagcaagcactcagtcttgtggacacactgattcgaagtggatctgttgatgttgttgtagtagacagtgtagctgcgcttgttccaaagactgagcttgatggtgagatgggtgatgcacatgttgctcttcaggctaggttgatgagccaagctcttcgcaagcttagccactcactttcactttcgcagacagttttgttatttattaatcagatcagggccaaggtagccacatttggatttggaggaccaactgaggtcacttctggtggtaacgccttgaagttttatgcttctgttcgcttgaacatcaggcgtattggttttttaaaggaaggtgaagagacaataggtagtcaggttgctgtgaagattgtaaaaaataagcatgccccacccttcaagactgcacagtttgagcttgaatttggaaaggggatatgccgcagttctgagcttttagggcccttttttttttttttttttgtccaaaagactggcggtgcatattatagattcaatgatatgagtttcaaaggtaaaaataaccttaaatcttaccttactgaaaacaagagtgttgcaaatgatctggagacgaaactaaggagattgatgggaaccgaagcacctaaagagcaggaggcagaagacagttcgccgagtgatttgcctgaagaggttgtcacacctgaagcatcctcagaagaggatatgggagtcgtaatcgaggcttgaccagtgatctgacgtgctggcaagcgagaccagaatttctggaagttgttcctgtaaaacaatatcttgggtcctgaagtcaccaccgtttggatcgacatgcctgtggtgttctggtgatctcatcatagcagacttcagtctttactgtgcttatacagtagtgcagcaggaagagaattcacattgtgtgaaatcatggtgatatctgagaggtggaagttgtagtaagccgggaagggtgaggtattgtggtccgtggcatttaaacttcagtaagcaaacgccgtgtatatatgatgtgcacattttgaaaccgggcattctttattgactgctgctagatttacattgagctccctccacttccaatacctaccttttttttaaaaaaataaaaaaaaaaaaaaaaaagcggcc

SEQ ID NO: 183953 - DNA, 565 bp, Zea mays
  Clone ID: MRT4577_99352C.1
gccggccggtccgggagacccacaaccagtgcggtcgtgccaaaaaaatatacaagagccgatgacccccctttcaatccccagctctcagaacccgtgttcgccaccagatcctcgcgccgctcgccgcctggccatggcttgtcttcaaactatggtcatgccgtggggcacaaagacgggaggtcgagatgtgaggggcggctccgccgtggttgcgtcatgcagccgagccatcatctccagagaaaagaactggggcgtcgatgtcgtgtttggatctcggaagcatgctcgatcgggcgcgtgaggcttcggtgcagctacgaatcctcaccgatgatcgcctccgccgcagaactccatgatgccgtgtgtgtgtgtgttgggggggtgctatgcagtgtaatcactagtgagtcatcctctcctacgctgtagctcttctccgcttcgggtagctgctgtgtgcaggggcgtgccgagacaaaatgaggccctatacaaactattgaataaaaaactctttttactaaattaaaaaaaaaaaaaaaaaaggccccta

SEQ ID NO: 183954 - DNA, 1912 bp, Zea mays
  Clone ID: MRT4577_99353C.1
gcacgagggtcggtcaagcggagtgtacacagcaagcgccggcccgcgggcgctctcccgattcccgtgacacccggtagttggagttggagttggaggagcccggcatgaggacggtgatcggctcaaaagagcggaaaaaaaaaaccctgagtcccgcaaaacccctaaaccctagcccctcacctctcgcctccgccctcatccgcgcgacttgcagcggttggaggcgaagccggctccatgacgaccctcctcaggcgcgcgtcgctgcggcgcgtcattgccgccgccgccgccgcctcttcttttcaccctgagagctataagcaagggatctgtggctccacatttcattgccgagagttcgcatcaaaagcaaaaaagaagtcaagtggaacagactctggggaggagaacatgtcaaagaaagacttggctttacaccaggctattgatcagataacgtctgcatttgggaagggggcaataatgtggcttgggcgttcacaaggccatagagatgtaccagtcgtgtctactgggtctttggatttggatatggctctaggaactggtggtcttccaaaggggcgtgttgtagaggtatatggtccagaggcttcaggcaagacaacgcttgctccatgtcattgcagaagcacaaaagaatggaggttactgtgcctttgtagatgcagagcacgctttggatccagctctcgccgagtcaattggtgttgacactaacaatttactcctttctcagcccgattgtgctgagcaggcactcagtcttgtggacacactgattcgaagtggatctgttgatgttgttgtagtagacagtgttgctgcgcttgttccaaagactgagcttgatggtgagatgggtgatgcacatattgctcttcaggctaggttgatgagtcaagcccttcgcaagcttagccactccctttcactttcgcaaacaattttgttatttattaatcagatcagggccaaggtagccacatttggatttggaggaccaactgaggttacttctggtggcaacgccttgaagttttatgcgtctgttcgcttgaacatcaggcgtattggtttggtaaagaaaggcgaagagacaataggtagtcagattgctgtgaagattgtaaaaaacaagcatgccccacccttcaagactgcacagtttgagcttgaatttggaaaggggatatgccgcagttctgagctttttgaacttggattgaagcacaagcttatccgaaagagtggtggttcatattatagtttcaatggtaaggctttcaatggtaaaagtaaccttaaatcttaccttactgaaaacaagagtgttgccaatgatctggagatggaactaaagagattgatgggaactgatgcgtctaaagagcaggaggcaggagacagttcgcagagtgatttgcctgaagagagtgtcacacctgaagcatcgtcagaagaggatctgggagccataattgaaggttagccagtgatctgatgtgctggcaagtgggaacagaatttctggagcagttgttcctgtaaaacaatatcttgggtcctgaagtcaccaccgtttggatcgacatgcctgtggtgttctggtgatctcatcatagcagacttcagtctttactgtgcttatacagtagtgcagcaggaagagaattcacattgtgtgaaatcatggtgatatctgagaggtggaagttgtagtaagccgggaagggtgaggtattgtggtccgtggcatttaaacttcagtaagcaaacgtcgtgtatatatgatgtgcacattttgaaaccgggcattctttattgactgctgctagatttacattgagctccctccacttccaaaaaaaaaaaaaaaaaa

SEQ ID NO: 183955 - DNA, 437 bp, Zea mays
  Clone ID: MRT4577_99354C.1
cccacgcgtccggtgattttcctcttttcttttgcaagttgattgcttcgtcgggcaggaattctgcgttcctcaagtaagcacagcacgattcgtgtaagcggatttttttttcctatcgatttcttgagcgcggtaattagttgttacgattagctagctccagctgtcgctgccttgctaggagcggaattctttcgttcttcctctagggctattcgcagttcgcgagggtttcttgatatgggtacagataagctttattttgtcagtttagttgagtagttagcctgtgagcgccgaccagtatgtaatcgttgtcctcctgactgatatccctctgttcttgttggaaggcgcaggttcatatacgagtttaatatacgttggtaggaaatttcgattacatcacatttaaatattcattgatggattga

SEQ ID NO: 183956 - DNA, 143 bp, Zea mays
  Clone ID: MRT4577_99355C.1
cgatcacatagcgcaccatgctcagattctcagtagcgcatgactgtaaatgtgtaacgtgagtatgacgaggactcatcctatcatcggtgcttgatctatgccgacagtgtcgtctcgtatcgcagctcagcagagctgtg

SEQ ID NO: 183957 - DNA, 1128 bp, Zea mays
  unsure (1)..(1128): unsure at all n locations
  Clone ID: MRT4577_99356C.1
gcacattcttgcaataccccccccccccctcaaactatcttcgctcaagtatgtttgaacaatgactagttggcttctctctgacaagcacaacatcgtcctgaagtttcctgcttctgacaaggcctccaagatgaggaatcttgatgcctcgttgcttccgcaaaccaacaagaatgttcagcagcaaagtgaagtcgatgtgaagcttgcatcaatgctctatgaagctttacttagccttagagaacagataatggaggagtgtaacgaaggattcaatgcgtatcacatattcaaaacagacacgttgaaggaaatgagtatccgagtaccgagaacaaaagaagagcttttggatataaacggcctcggcaagacaaaggtcaagaagtacggggaccgcttgcttgcaaccatcgaggacttcctcagcaaacacccaaatccaaggagaaacagcggcggaggtggcggcggcaacgagcactccgatgcggcaaagaagcgaaggggctccaccgccatctctgcagcgagttacggcgacgatgacttcgacgaacgcacgggccagcagtccaagaagcgcgcggccaagacgcgaactgtctctgcccacggcccccgctgcacggacgccgatctcgatgggcctgaggtggtggaggtggacggcgagctgcgcagcgtccggaagcccgtggcgtatggcaatggcagggttcttcccaagtgggcacccctctaacttattccaggaatttgggtacgtcaagtagagtagagtaccgctagggaataggaatgtaggcttgcacatatgtaatctcccaggttggctcgtgcacatgcagcgatgcagtgatgtcaagggttttctgtgatgcagttgtacattggaactgtggcgtcgaatgtacgtccagctggtacacgcgtcaaggacatacgagaccaggagcaagagttccgttgcttgcttccgtgggcagcatcgcgatcgcagtgtcggccacctgttgcccgaaacatcttggatgcaggtacatcttcgcacgcgtgtaccatcaagcgaccaaacttgaattaacatcatcgccatcatcatccgatggctactgtngt

SEQ ID NO: 183958 - DNA, 326 bp, Zea mays
  Clone ID: MRT4577_99357C.1
cggcaccgcgcggcctcgatttccccttaaacagcacataggaagcaggcggcggcgatggcatggcgggcgagcctgtctcggagcctaaaggagatccgcgtgctcttctgttaggtcctgcccggccagccccgctggccggtgtgaggggatggttgtgtatatgtggcagggctggcctgcactgcgttgtgctggctttgcgtctctggtgggcgggcggggggttctgtctgtcgcgtgcgcgactgtggttggggctcgtcgcgcttgctggcgcattggtttttccgttgggcgcggggcgggttcccgcgtggccc

SEQ ID NO: 183959 - DNA, 450 bp, Zea mays
  Clone ID: MRT4577_99358C.1
ggaaggtaaaacataaacgtattgtgtgttttttgtggactatgttacgagcacaaaaatcaatctaaagggcacataaaaatacggaataacctgatatctgacaccagttgatagaaggattaggctcgatcttttgaaaggtaagtcgattgaggtggagatctcgacgttgatgatccaaggctccgaacgaattacaagagctcgatgttgatgatccaaggcttcgaatgaattacaagagcatgaacacgtcaattaaacatctaggtacattctttggagggaaattagcaagtgactgcaaatgtaacttatattgtttattgacttgtaagggcaccacagtgaagcgaccagaaaaccttgttaccattgatgggccttattttgcacttgattttttttatgagaaaagaatgtatcaacttctctgtgtacaacaac

SEQ ID NO: 183960 - DNA, 1748 bp, Zea mays
  Clone ID: MRT4577_99359C.1
gggtaccctccgagggcccggccggaaaaaaggagaatcggggccggccgggcaggcccaaaaccctgccaaacccagtacctcagtcctcggttccccaccatggcgtccctcctcctacaccgccgccacggtgcgcacccacgcgccgccgccgcggcctgcgctcgcctcctccgcgccttctccgcgctccccgacatcgatccctcggcgtcctccaccgcaagccctagcccggccgcgcccacctccacctccgcccgcgcctccgtgctcgacctccagctcgccgtccgcgccgagtctgacccagcccgcatccactccctcgtcgcctccgcgctctccagccatgacatgccgcgcctccacacctcgcgccagctcttttccctggccacttcccgcttgatccgcctccggcgcgccgacctcgccgcctcgctcctcgacctcctccttgcctccaccccgccctccccgggtctcctagcgcgggcactctccctctacccgggacccgacgacgcgctccgggccttctcctcgtctccccccgccgcccgctccgacgtctccctctcggcgctcctttcggcgttcctccgcgccggccgcctcgatgacatcaagtccaccattaccctggcggaatcctcccacggggtcgcgcccggccgcgcctcccacaatgtgctgctccatgcattggtcaagaattctgagcttgctgctgcccggaagctgctcgacgaaatggccaacaagaagttgaagcaccgccctgccccagacatcatatcctacaacactgtcctcgctggttactccgtgcaggatgatgaggatgagtttgggaagcttttgaaggagatcagcttgagcaacctggagccaaatgttgtcacttacaactgccggatacagtggttctccaagaaaggcgagacagtcaagggggaggagctgcttgatgtgatggaatcaaaggggatagcgccaaattacgttacctacaatgctctcgtgcaggggtactgcaaggagggaaatgttggggcagctatgcgtgtgttcaagaggatgaaagtgatgaagaggcgggagggaaggagtgatttgggtgtttctgcacattcacaggtatatgtggtgctgtttaggagtttggtggagaaagagaagcttgatgacgcgctgtggatttgtaagagctgctttgcaatgaaggcagcaccaccgtttgaggctgttaagggtttggttgagggtttggtgaaggcaggcaggtcaacagaggccaaggatgttgttgccaagatggagtttcttgtgaaaggcgatgccaaacttgcttgggggaaggttgttggtgaactttcttttgaagagggatcaccgaatttgaatccatgatttgctagaggcatctgtgttacttctcattaattcatgcattttggagtttgaatgatgatggtgaagaagataggtgttcaacgtgggatccaatgttgccttcttgttgtcactggactgcattctgcaaggtttgcggttagatcaggatgtaatggatgctccgtttacttcaaaacttgcttaattttatgtcttgtaataatattcgaaatgatgttaaatttttaacatttgttgaagtgtttagggcatcatgatagatgatacatctactatctatcattgtaacatgcttgttgtaatgtgtatttcatgcctcatca

SEQ ID NO: 183961 - DNA, 252 bp, Zea mays
  Clone ID: MRT4577_9935C.1
cttgagactggattgtatgatccatttcactcaaagccatcggctaatattactgacaacaacagggaaagtcatgaacaagctgaacttaatattgccagtgctagtagtgctgctgcagccgacacttcatgcagtcatctgcagaccattacagattaccagtttcagtcgcctgtcagctgtagcgattgacagtatgaatgaacaaattggtattgctaagatccatgctattgatgctacagttag

SEQ ID NO: 183962 - DNA, 370 bp, Zea mays
  Clone ID: MRT4577_99360C.1
ggttcagcaagagctcagggaaaacccttgcattagatagatgagtagtcctccagagttcacctaaaaagaagagcttaggggagagcatagttccaaaaagttggcaccaaaagaacaaaacaaattggaagtaaaaaaattataacttatgctagcttttttaacctatgatgccctgctcacttttttcccaggctaacagaaaaagattctgagtaattctgtaacagcttcatgatgttctggaatatacttaagcactagaaagtttgactttagttcgatttaaaatagcacatgatgcgcagcttttttgagagaaaaatgaattttggcccgagggcctacccggattttaagtaatttt

SEQ ID NO: 183963 - DNA, 587 bp, Zea mays
  unsure (1)..(587): unsure at all n locations
  Clone ID: MRT4577_99361C.1
cggatttttacttcaaaacagcacccttcgctagaaataccgcatttcatcaacagcacagtacttggggaattcatctaaacttggacactcaaacgtctatttactttccttttatcctttaaccatcatacaattcataagtgagttctatttttgctctgtatttatttcaactaatggatcactatcaacttatcaatttgcacctataacagcttgatgccatttagattttctttgcctccagcctttgttgttgaagggcaagcctggtgcattggtgagaattttctccctgcaataccaggtcatggattcgaagcagcctctccgcatcgggtgcaaggcttgcatcggtttatccctcccctagatcttacttatgtgagagcctccaacactgngtctgccctctagcatttgttgttgtatgttttacatatatacagtccaatagttgtagcaagtttcttgtaattttcttccttttttaacatanatttctttcattttccattttttctcgaaagcgcangggaactgcgccttanatatattaagaagaggaaaaaggtctaaataga

SEQ ID NO: 183964 - DNA, 686 bp, Zea mays
  Clone ID: MRT4577_99362C.1
cgccaagactagtcatctctcagttatggttgaagttttcgaagttgctccatcaatcttcatggtagaactacaaagagcagcaggagatacttcagagtataacacgttcgtaaataactactgcggcaaattagatgatatcatctggaaatttccaactgagaagggaaaatcaaggataccccggttatcaaagtctcattcataatctagttctgtgtgttatcaattactatggacttaagtggatatatttgcagagtgtatcgcgattggattatgatattctaagggggtgtttggtttctagggactaatttttagtccctacattttattccattttagttgcaaaattgctaaatatggaaactaaaactctattctagtttctaaatttggcaatttatagtctagaatggaataaaatgatgggactaaacattagtctctacaaaccaaacaccccctaagtgtagctcttcgagtagtatatgtttgtatattcagagtccccatgtacaaagaggccgttttaattgaggtttccgtacctcgattccctgtgcaaagttttcatcgatgttttagactacaacacatctgtatattttgtcgagagcatcagtttaaaagacaccaccaaaatatcatgtgtttgttgccatctagtgtcattttgc

SEQ ID NO: 183965 - DNA, 1176 bp, Zea mays
  Clone ID: MRT4577_99363C.1
actagctcgagcgtgacctgttccaccggctagtccacgacctcgcccaggacccagtgcccatgcgatgggtgatcgcgttctggctctggctcgagtccgatggccaccatgacttcatccgccgcgtctccgcgctgccaggacccgttgtgctgcggttcgtcgaggaggccatcgagtgcctccgcggcctcgcctgccggggccacgggcctgcggccggcaccggcgacggcgacggcgacggccgcgagaggcggtgcctaccctgcacgaacgcgctcctgaccaagcccatagacgatgcgggctacttcgaagggcaacgcgagattttggatggcgtcaggtatcagtacaggaccgtatgcctcgccgtttgtgatgtcgacagcaacatcaccgcttgtgtgcccactaacactagcggcggcgtgcttgttgctccgccgatggtcggctcccctgtcctcgccgtcccgacggcggcatcctttccactaaatccgatggcatcgccgtggatccctttgaagagccccccgccagatgactaccgctccctatttatcaccttctccagaggctaccccattagcagggacgacatcgtggagttcttcaactcggcttcaacaccatgcaaaataggcctccaagagtatgtgatgtctggccttgactccgccataagaaggttaccatctaggaagtactttgttctgaggacatgtcccgatagtggcttttatgatattgccaggtcatatatagctaactaaaaggctggctactaggcgtacgggccatgcgtggagacggtgatgatagagaaggtggcgccggggcagctgccggtgtacggccgcatggtgctgcgcagcgcggcgatgatcccagcggtgctgaacgggcggcagacggccaagttcttgatcaaaggcaggcacctctgggcccgggtctacgtccccagctccaggctctcctacgcgtgatgattcccagccacctacagaccacaagccggccggccggccggggtaagagcagagctggagctcttacactaatgttacccacttacgtgccatgcctaggccagttggccagggtaagctgtggctagagctttactgaactttcctcgtcgaaataaattaccggagtgtt

SEQ ID NO: 183966 - DNA, 361 bp, Zea mays
  Clone ID: MRT4577_99364C.1
ggtacccatcgagccgtccgggcagaggctgctaccatataaaggagggcaattcatgcaataagccgctgttcagagttgaagaaaccaaacaccaagtcaggaaagctctctccttagagctcttgtacatagtacccaagcattgccggtatattgcaaggcatggtatattaggagccaggggcaatgatatcctatttttccagtccattcatgttgctgaataagtatttttgtgaatctgttttgttgccggaggtaacaaaatatctgttcatgttttttttttctgtattcgttggaagtgtaccgatggagctatatgctggtttatatgcatcaataatcttgtttggat

SEQ ID NO: 183967 - DNA, 953 bp, Zea mays
  unsure (1)..(953): unsure at all n locations
  Clone ID: MRT4577_99365C.1
tttaccgttaaacttgagcaattgtagctcactgnaggtgctgaagcttgattgcccaagattgaccaccctccaacttttggcatgcaccatgttgcaagaggaggaattagaatctgcaatatccctttgttgtgcgttggaggtccttaatgtgcattcttgtccaaagatcaatgctctggattttggccgactccgtttggtttatcccagtctgaagcgcatccagagcagcctcatttcataatgcggaggctactaccatattaaggagtgcaattcatgcaataagcctctgttcaggtttgatgaaagaagcaagtcgggaaaagctctccttgatgctctttgtacatattacccaagcattgccggtatattgcaagccaggggcaacgtggtcctatttatccagtccattcatggttctgtaataagtactttttttttgcaaatttgttttgttgccggagatagcaaaatatctgttcatgtctgtttgtctttgttccttggagtgtaccaatggagctatcagatgtatatgcattcatcaataatcttgttttgatctaggatcttggaatcgctttgctaatgcgatctggggtgtagttttgtacaactttaattgttcgcagattttagcgagtgttatgaagcttaactgatctaaggtgtagttttgtacgactatgtttaattgttcgcagattttagcgcagtggtatggagcttaaccaaaaaaaaaattggtttctagggcctaatttttaccttcgacggaatattctaatttagtctctaaattgctaaatatgaaaactaaaactctattttagttttcgcatttggcaatttaggaactaaaatggaataaaaatatagggactaaaaattagtgcctagaaaccaaacacaagtcaggaaagctctctcctagagctctt

SEQ ID NO: 183968 - DNA, 639 bp, Zea mays
  unsure (1)..(639): unsure at all n locations
  Clone ID: MRT4577_99366C.1
cgttggagttccttaatgtgcattcttgtccaaagatcaatgctttggattttggcagactccgtttgggttgccccagtctgaagcgcatccagagcagcctcatctcataatacagaggctgctaccatataaaggagggcaattcatgcaataagccgctgttcagagttgaagaaaaaaaggggatgtttggtttctagggactaaaaattagtgcctagaaccaaacaccaagtcaggaaagctctctccttagagctcttgtacatagtacccaagcattgccggtatattgcaaggcatggtatattaggagccaggggcaatgatatcctatttttccagtccattcatgttgctgaataagtatttttgtgaatctgttttgttgccggaggtaacaaaatatctgttcatgttttttttttctgtattcgttggaagtgtaccgatggagctatatgctggtttatatgcatcaataatcttgtttggataaaaaataaaaaaaaaaaaaaaaaaaaaaaaaaaaaaaaaaaaaaaaaaaaaaaaaaaaaaaaaaaaaaaaccncccctcaaacccaaaatttaaacccccttccaccgaggcccaattctttcgccccctttaaagga

SEQ ID NO: 183969 - DNA, 369 bp, Zea mays
  Clone ID: MRT4577_99367C.1
ggataaccagatttatagtaccggatacccatttgcacatgatattgttggtctcctggaagggacactcgacaacaatgggtgcaaattttttaaaaaataaccgtgcaccataaataagctggcttaccgatttctggttcatatgtaccgtgagttcatgtgtgcgccatttcttgtttaactactgtgctgccccagagtacatatatttttttcacacacatcaattctccaaattctgctcctctctttctgctcacaagaagaattactcgttaccccctctgattttaatgggctgtgtaagctacactaaggcatgtactgtgtggcgcgtacatacatgaaattcagctggcgtgggag

SEQ ID NO: 183970 - DNA, 1560 bp, Zea mays
  Clone ID: MRT4577_99368C.1
agaatttgagcattgtagaactgaacagcagttctttgtcctgcctctggctggctggttgcacgctcgatgacattgttaagactctcatgcccaaatctgcaacatgtcaatcttgatggctgtgatcaccttcaaagtgcagcattctgtccagtgggtcttttttccctaaatctgggaatttgtccaaggggggggggtcttcacattgaggctccaaatatgtctatattggagctgaagggttgtggtgtgctttccaaggcttccatcaattgccctcgcttgacttcgttggatgcctctttctgcaggcagcttgtggatgattctctgacttgtatgtccgaggcatgtcctctgattgaacatcttatcctgtcatcatgcctatccattggcatcgatggattgtcttcattgcattgccttcataagttgaccttgcttgacctgtcttatacatttttgatcaacttgaagcctatttttgacagttgtccacagttgaaggtgttaaaactttcagcttgcaagtacctcagtgactcatcattggatgccctttacagagagggtgctcttccattgcttgttgagctagatctgtcctactcacccatcgaacagaatgcaatagaaggtcttcttgcttgttgtagtaatttggttaatgtgaacttcaacggatgtacaaattttcaagaattggtgtgcgaatctggggatagcggttttgtggatatgccagttgactcttgtccacctagttcaccaatcaagaatgaagagatcagtgagcaacctggccgtctgcttgaagttctcaattgtactgggtgccctaatatcaagaaagttgttattccttcaatagcgaactttctacatttgtccaaaattaatcttaatctttcgaccaacttgaaggaagtggatttgacatgtcccaatcttttaacgttaaacttgagcaactgtagctcactggaggtgctgaagcttgattgcccaagattgtccaatctccagcttctggcatgcatcatgttgcaagaggaggaattagaatctgcaatatccctttgtagtgcgttggagttccttaatgtgcattcttgtccaaagatcaatgctttggattttggcagactccgtttgggttgccccagtctgaagcgcatccagagcagcctcatctcataatacagaggctgctaccatataaaggagggcaattcatgcaataagccgctgttcagagttgaagaaaaaaacaaggggatgtttggtttctagggactaatttttagtccctacattttattctaatttagtctctaaattgctaaatatggaaactaaaactctattttagttttcgtatttggcaatttaggaactaaaatggaataaaaatatagggactaaaaattagtctctagaatccaaacaccaagtcaggaaagctctctccttagagctcttgtacatagtacccaagcattgccggtatattgcaaggcatggtatattacgagccagcggcaatgatat

SEQ ID NO: 183971 - DNA, 407 bp, Zea mays
  Clone ID: MRT4577_99369C.1
gcttaaagaagcgtttgcagcaaagtacctttgcacgggtggcttggaagtttttaggacaggctgggagccacaaaaccggaccggaggagggttggagaggagccggttttgtttgtggctcctaaactagcactttcagctcatgtgactttcagctaatggcctttggtatctgtgggatctctctgatcgcaaatggcatggggacctccagctcatgtgacgccttcaaattgctacggaagtttactccaaaatatatcattttgttactttatctgttctaaatttaaattacaagcggatactaatataggacggaaagtctttttgttgacaacttggcatccgtagaccctaaacccgtgtcattatgtgcttttgtttagggtttaggctgcatg

SEQ ID NO: 183972 - DNA, 222 bp, Zea mays
  unsure (1)..(222): unsure at all n locations
  Clone ID: MRT4577_9936C.1
gacgtacctggctaaactcgaacgacccaaaactatggcgtggaagacgtggcagccatcggactgctcctttcaaacaagctgcaagcgacaatgcacgatgaacgactaacgggattaggggaaaaacttttcttcctgcagccggcatataagggggaccggggcccggggcatccaccggcagccggcccgtngcttgagccggcgacggcgtcacct

SEQ ID NO: 183973 - DNA, 3560 bp, Zea mays
  unsure (1)..(3560): unsure at all n locations
  Clone ID: MRT4577_99370C.1
tgcttgccagcaaagatcaggcgctgctggtccggtggaatgccctccttgtcctggatcttggctttgacattatcgattgtgtcagacgactccacctccaaggtgatggtcttgccagtcaatgtcttcacaaagatctgcatcccacccctgaggcgcagcaccaagtggagggtgctctccttctggatgttgtagtcacccaaggtgcgaccatcctccagctgcttgccgccgaagatcagtttggttttgatgcggtgaaatttagtcctttcatgttattttaatttagtctttgtaaatggtgtatatgaaatctaaaactatattttagttttcgcatttggcaatttaggaactaaaatggaataaaaatatagggactaaaaattagtgcctagaaacccaaaaccaagttttcgcattataaaatggaataaaaatatagggactaaaaattagtccctagaatccaaacccaagtcaggaaagctctctccttagagctcttgtacatagtacccaagcattgccggtatattgcaaggcatggtatattaggagccaggggcaatgatatcctatttttccagtccattcatgttgctgaataagtatttttgtgaatctgttttgttgccggaggtaacaaaatatctgttcatgttttttttttctgtattcgttggaagtgtaccgatggagctatatgctggtttatatgcaccaataatcttgtttggatatagactagttctaggaaattggtgcttcaaaaacaagagagcttatccagtttgtcattgcaatgccacaacttgattgatgtggatcttactgagtgcgagtcattaacaaatgcggtttgtgaagtatttagtgatggaggtggttgccctatgctaagatcattgatccttgacaattgcgagaatttgagcattgtagaactgaacagcagttctttgtcctgcctctctcttgctggttgccgctcgatgacattgttaaaactctcatgcccaaatctgcaacatgtcaatcttgatggctgtgatcaccttcaaagtgcagcattctgtccagtgggtcttgaatccctaaatctgggaatttgtccaaaattgagtattcttcacattgaggccccaaatatgtctatattggagctgaagggttgtggtgtgctttccgaggcttccatcaattgccctcgcttgacatctttagatgcctctttctgcaggcagcttgtggatgattcactgacttgtatgaccgaggcatgtcctctgattgcacatcttatcctgtcatcatgcctatccattggcatcgatggattgcctgcattgcatcccctgcccctcgcagcggctactctacaggtctagcgactctttcgccatccatagagggaggaggcgcggcggagatggtgggcggtggcggcggcgggccgctgcggcgggtgggcaagtacgaggtgggacgcaccatcggggaaggcaccttcgccaaggtcaagttcgcgcagaacaccgagaccggggagagcgtcgccatgaaggtgctcgaccgctcctccatcctcaagaacaagatggccgaacagattaagagagaaatatccataatgaagcttgtcaggcatcccaatgtcgttaggctacacgaggttttggcaagccggaagaagatatttataattctggagttcatcactggcggcgagctattcgataaaattattcgtcatgggagactcagtgaagcagatgcccgcagatactttcagcagcttattgatggtgttgatttttgtcacaagaaaggagtctaccatcgagacttaaagcctgaaaatctcctccttgattcccaaggcaatcttaaaatttcagactttggactgagtgcatggcctgctcagggatctttccttctacgtacaacctgtgggactccgaactatgttgccccagaggttctcagtcataagggatataatggcgcacttgctgatacatggtcatgtggagtaattttatatgtattgttagcaggttatcttccatttgatgaagtggacctgactaccctttatggaaagattgagagtgcagaatattcattcccagcctggttttcaggtggtgcaaaatcactgattcgtagaattcttgacccaaatccagagacacgaatcaggatagaagagatcagaagcgatgaatggtttcagaaaaattatgaacctatcaaagaaatagaaaatgaggaagtcaatctcgatgatgtcaatgcagcttttgatgatcctgaggacgataatgaggatgctttcgaagatgaaacaggtcctctaacacttaatgcattcgacctaatcattctttcgcaaggattgaatcttgcagcgctctttgaccgcagacaggactgtgacaagcttcaaaatagattcttatcacgcaatccagcaaaggttatcttgtcaagcatggaggttgttgcgcaatcaatgggatttaagacacacattcgcaattataagatgagggtggaaggtctaaatgccgacaagactagtcatctctcagttatggttgaagttttcgaagttgctccatcaatcttcatggtagaactacaaagagcagcaggagatacttcagagtataacacgttcgtaaataactactgcggcaaattagatgatatcatctggaaatttccaactgagaagggaaaatcaaggataccccggttatcaaagtctcattcataatctagtgctgtgtgttatcaattactatggacttaagtggatatatttgcagagtgtatcgcaattggattatgatattctaagtgtagctcttcgagtagtatatgtttgtatattcagagtccccatgtacaaagaggccgttttaattgaggtttccgtacctcgattccctgtgcaaagttttcatcgatgttttagactgcacatctgtatattttgtcgagagcatcagtttcttagacaccacctatgtatcatgtgtttgttgccaactagtgtcatttttgtaagatctaacttgtgatatacttggattgagtggtatggttgaaaagagtgaaagtccattaaaaatgttagtggtacaaggcccctccgaaatagcccgaggggcggttgcggccgtggaccaggggccctaggggaagagcaacccggacggggtgtttggtttctagggactaatttttagtccctacattttattctaatttagtctctaaattgctaaatatgaaaactaaaactctattttagttttcgcatttggcaatttaggaactaaaatggaataaaaatatagggactaaaaattagtgcctagaaaccaaacacaagtcaggaaagctctctccttagagctctttgtacatcggccgccgacccaccgatagagggcgaatgtccacaacaaaaataaaanagantaaagggtggacgctatcaggattaggcgaggcagcgaggtaagctctttaag

SEQ ID NO: 183974 - DNA, 387 bp, Zea mays
  unsure (1)..(387): unsure at all n locations
  Clone ID: MRT4577_99371C.1
cccacgcctccgctttaagcacaaaatattttttgctgaggagatnncagtgatgagcacattgatttttgtaatactttaacaacccctgtgcagtgcaaaaatttgtggaggcaattcaaggctgaaactgaatatacagtgactcaagccttagctgctcaggtatctccacatttccattccaccagttaactgatatgtgtgctattgacaccttgtggatttcatctcaaaatccctctattttgtttattactcaatactcatgattttcttgggaagtgggactggttcacttaattagagacgatctatctgctaaacattactgttgccttgatcaggaagcaaataagaagaacaacaactggctaccacctccat

SEQ ID NO: 183975 - DNA, 146 bp, Zea mays
  Clone ID: MRT4577_99372C.1
gtgcattgttctgtcgtcatgagtgctcgcgtacgtcagcttatcgttcgcctcgatgtgcagagcgcttcgcaagcacagtgattggttaccaaatcctgacagtcttaagctctctcagtctcagcatttcagttcccagattc

SEQ ID NO: 183976 - DNA, 354 bp, Zea mays
  Clone ID: MRT4577_99373C.1
ggagcagggtttaagggagccaatgcaagggcctgattgcaacaatgggtacattacattcaacaaaaaactggtggaaagcaaaagaaccatggccggggaaaaaaaaaaaaaaaaagggaaaaagggaagaagaaacccagccagccaagggtgcacggggaccccaaacaaaacccaacgacagaaaccacccatgggacttgcttctaacttacgcaggagctagcttgcttgctagcccgcgggggggggcccgggggccccgtctaatttcttcccgggggcttgttggcgaaaaaacttacccactgggttttgttgatgttgtcaaaacccatgaccccggggaag

SEQ ID NO: 183977 - DNA, 265 bp, Zea mays
  Clone ID: MRT4577_99374C.1
aaaggccccaattaaccccaccttaattcggacccccgaaaaaaaaccaacaacccagggggggattctgaacccaaaaggggacccaaaaaaccgaggaagggggcctttaaaaaaatcttttgcccggccaaaggttccgggatttccaaaaccaaaaaaaagggtgggggctttaaaaaaacgaaaccgggaaacacccgcccaaaaagggagggagaacctggggaaaaccctaaaacttggcccgggtgtttccaaaggg

SEQ ID NO: 183978 - DNA, 221 bp, Zea mays
  Clone ID: MRT4577_99375C.1
gggggaaaaaagacccattttcttttttggacaagttacatggaacagggtctgtttatacaacaggggtagatatgatgaaatcgaattcaaggacagggggtttttttaggccaaatagcgaaacattttcctgggtggcttggcccgctccaaaaagtcgcgttcgatgagcgactcgatccgttttttgaacaccacgggattcggaataaaaccgg

SEQ ID NO: 183979 - DNA, 436 bp, Zea mays
  unsure (1)..(436): unsure at all n locations
  Clone ID: MRT4577_99376C.1
tgcattttatgtgagagcaacaagagcgtacattataccacagtggctgcattcgctacaagggacggtatcatcaaagagaattggttgagtgacatcaatgggcgctgatcaacgaatgagcaagcattgggctacaacaagcggttgatgaaagcgctgtagaacaatccaagtaggccactcacaacagcaatacataggcacatttaacgatacaaaccatctgatcgcagtaggcacaagcactgacccacctagccgaggtgaaccctatacactacttggaacaacatgtggttgcatccaacgcagttgcttgggcgtacgtacatggatactaacaagagcaacagatgcaacagtttctaccagcgctcagtcaactagacatggtgaaccctatagnctacctacaacaggaacaacctgtttc

SEQ ID NO: 183980 - DNA, 540 bp, Zea mays
  Clone ID: MRT4577_99377C.1
cccagcgtccgcccagcgtccgcccagcgtccgctagttctagatcgcgagcggtcgcccttttttttttttttttttttttttttttttttttttttttatttttttattatttttttttattaaaaaaaactacgccacaacaaaatataaaagaaaaagaaaaaaaaaaaaaaaaaaaaaaaaaaaggaaaaaaaaaaaaaaaaaaaaaaagaaaaaaaaaaaaaaaaaaaaaaaaaaaaaaaaaaaaaaaaaaaaaaaaaaaaaagagggcaggaaaaaaaaaaaaaaaaaaaaaaacatgaaaagaaaaaacaaaaaagaaaacagagaacagaaaagttaggctgggaggaaaaaaagggggagaaggtgggcttaaaaaaaaacaaagcccggaggggaaatagcaaacttggagatgggtggatttttttgggggaccctagggttagatcgggagcggacgggttagaagaaccaaggggacgcacgggtgcaagcaaaggaataacacttctaaaggggcacctaaattc

SEQ ID NO: 183981 - DNA, 244 bp, Zea mays
  Clone ID: MRT4577_99378C.1
ccacgcacgcgtccgaccacacgtccacagaagctcaaatactgatctcaccagaccatcacaacatgccaaacgcaagcgcaccgagggtctcggcggaccagctttttactttctggctatcactcctctgcgctgtcgccggcccggccgccgcgcagaactgcagctgccagccaaacgtatgctgcagcaagtttggctactgcggcacgaccgaccagtactgcagcgacgggtgcca

SEQ ID NO: 183982 - DNA, 413 bp, Zea mays
  Clone ID: MRT4577_99379C.1
aggtcttagagcattcttgtatagcaaaaagggaactagcttgatgcgccctattaaatccctcagagtgcacatgctagcacatctccacacttaaaacgataacgagagacgatcacaaacaattcatgtgttcgaccaagaccgggtcttgcttaaccaggcgcaggatcgggtcatttattgtgaccccccgccttacccaccttggcgccggtgagctccttaattgtaagactctggataactccaacagcaacaacctgaatgatgtcacgttcaacacaccttccaaggggaggatacactgaaaatgtttccaccaccttgggcttaacccgtataatattatacataccaggatgaccgttcttgaggaacttagggtcattctcaagctgcttgccagaccg

SEQ ID NO: 183983 - DNA, 643 bp, Zea mays
  Clone ID: MRT4577_9937C.1
ggcgattgggttcctcgccggccggggggaacattcactcacaggtcgtcaatcacaacagcaacaatgggtctcagccactttgcactcccctgcggcgaacactacgtcgagatgcgagatttctacaaggccgtcctcgcaccactgggctacgagttcaagtttgaagctcaaggacctacaggcgcatactactgtgcgtttggcgaaaagaacaagggtcctgacttttggcttggcggcgggggcagttctcttaagaaatacgatggcaatatggagaacagaacgtgtcctgttcatttcgccttcgatgctgagaatccgaagcatgtcgatgagtggcatgaggctgctatgaaagctggtgctgttgataatggaaagcctgggccgaggaattacaggcccgggtactatgctgcgtttgttctcgatcctgttggaaccaatgtcgaggttcttcacttgggttaagggatttgaggttggtgaagcgtcgggaggactacaaggaacttgaacgcgtataggcacaacagtgctattaccataccaactgcatcctagtagacagctttatttgttacaagataacaagattgaacatcccaaaaaaaaaaaaaaaaaacccgcggcc

SEQ ID NO: 183984 - DNA, 240 bp, Zea mays
  Clone ID: MRT4577_99380C.1
caccccctcacgatgctatggagcctccgcgacttccgctgaccgtcctgctaacgcgctgtcggtctacatcgctcggacactgctacgcgctaggcgttgacgactgcctggcgagcgcgacactcttgctgtgatctcatgcggttcagcagcctctcactagacatgctcgcgtacacctgcacactgtccagggcagccttcgctcgcaagatggtggctgacgactcggcggag

SEQ ID NO: 183985 - DNA, 451 bp, Zea mays
  Clone ID: MRT4577_99381C.1
aaaccgcccaacccctttggggaaaaaccatagaggcggggctccgttgatgtcatcatcgggggcaaaaaaacccctgttaattccctaggggttttttccgggggggggaacattttaaaaaggggcccagtacctggtacctgctcgggacaacaaaggatgcaatccaaaatccaaggacccaatcagcacccccttttagggatgcaaaggggcccggttttgtgccatttttccccgccgtccgggtacccgtaggggccccccggggtgaacaatttttttttaccaaaatgttccattgggcgtggggatcatccggggaaaaccccgcccacgtgggggtagagtactcgaaggggttgggcgggacccgggggaactttttcacgtccttgtttttgctcgcgtcccccgggtcgatgcccaccaaaaaaatgtccccgta

SEQ ID NO: 183986 - DNA, 439 bp, Zea mays
  unsure (1)..(439): unsure at all n locations
  Clone ID: MRT4577_99382C.1
ccggcgngaccganccgngcgcgngcagagcgngagngagcgncggcggagaaggccacagnccacgcccccacggcgagccaggcgacgaagagcagccccgncgngcacncgaggccgaggggcccgccaggcgccgccgcgcncacgaggcggccccggancaccgncaaggccanccagcccgagaaggcaacgnaccaggcggggcagcccancaacggcgaccccaacancggcagccaggagacgccgggcaccccgagcccgcacgcggcgaggaaccccnccaaccacccggcccaccgcaccgccgagagcccgccgcngcggggcgacgaggccggccacgcgcacggcnacccccacgaggggcccgacgcgcacacgggcccgcaccgcagcacgcccgagcacggccaggacggcgcgcncggcg

SEQ ID NO: 183987 - DNA, 340 bp, Zea mays
  Clone ID: MRT4577_99383C.1
ttatttttttttttttattttttttttttgtttatttttagggataattcgggttatcccataaagaggcgtgtgtaaacttggacaaaaaggacctaacagtactcacagaaatagataaggggcccaaaaaaaatttgaaacacaataaaaactggggaaaaaagataggcccactgcacccaatgcgcgccgggggacatgtcctaaaagtggttaaaggcctccgggtgctgctgaattggggggcgaatgttcgcttcgatggttaggttatagggcatcgtttcctcacactccaccaatttgatgaagggggccacctacaagggggggggcg

SEQ ID NO: 183988 - DNA, 325 bp, Zea mays
  Clone ID: MRT4577_99384C.1
ttttctttcacgactcgctcgcccgcacaccggccacgggggaatccgggggcggttgtgctagtcatgcataccggacctccccttgccccttcgtttcgttccacgccagcacctatgaacttgggccagatcttggtgttccgctatccgcacccgcaatggatagcttgaagacaccaccgtacccgtatttggtctgtggttgccgttcggcttcccgtatgtgggctgagcgcatccttcgctagcgtgggactcttacagggcctactcctggggcggtgaacccggaagcttctgtcaactgctctctgacttacac

SEQ ID NO: 183989 - DNA, 373 bp, Zea mays
  unsure (1)..(373): unsure at all n locations
  Clone ID: MRT4577_99385C.1
ctcgagccggcgggctccnctacgcctcactcccccctcccaggtgctttcaggtaagtcggcggcggcgatgacaacgcgcttcaagaagaaccgcaagaattgcggccacgtgtccgccgggcacggccgcatcggcaagcacaggaagcacccgggaggtcgcggtaacgccggtggcatgcaccaccaccgtatcctcttcgacaagtaccatccgggctacttcggcaaggttggcatgcgttacttccataagctccgcaaccagttctactgccccgcggtctacatcttagcgtctctgttctatggtctctattctataatcccacacaagaagaaattttttcatggttttcccccccccccc

SEQ ID NO: 183990 - DNA, 482 bp, Zea mays
  Clone ID: MRT4577_99386C.1
aaatcccaaccgcattacggggggggattaaaccaggggcccccccaaaaattttatttaaggggccaatacccaccaacgggggggggaccggaaaaaaaacaagcagaagcccagcccgggagccccctacgggtggggaaaaacgggccgaaaaaatcagcaacccaaggcccaaaattggcccagtcatcacccccaacggggaacagggacctccgtgaccctggaaaacacaataagaaatgtcctgagccgttacctgttacctaaaggtactaaaaacagggggggggggtggaattgcaaaggcctaccctttgttgttgtgggggggagctttacaagtccaaaaaaagccgtcagggaagcatgttgaagggcccctccccgtcaatccccgggggttgggggggggtccgggggataacttaaagggagtcccccaccccggggacttaccaaaaaagcgttgggggggg

SEQ ID NO: 183991 - DNA, 963 bp, Zea mays
  Clone ID: MRT4577_99387C.1
tgttggggtagctagctagagagagcagcaggccagcacagcagcatggggaggtcgccgtgctgcgagaaggcgcacacgaacaagggcgcctggaccaaggaggaggaccagcggctcgtcgcctacatcaaggcccacggcgaaggctgctggaggtcgctccccaaggccgcgggcctgctgcgctgcggcaagagctgccgcctccggtggatcaactacctgcgccccgacctcaagcgcggcaacttcacccaggaggaggacgacgtcatcatcaagctccaccaggtcctcggaaacaagtggtcgctgatcgccgcccagctgccggggcggacggacaacgagatcaagaactactggaacacgcacatcaagcgcaagctcatcgcccggggcatcgacccacggacgcaccagccggcgagtgccgccgcagttgcccccgccgccgccgccgccgccgccgcgcaaagcagctttcgccaccatggcgacgacgaggcggtggcgcggcgcagctgctcgcgagacagcggctgcatcgcggcgcacagcagcgacgacgacgacagcacgtccgggtccctgccacaccaacatgctgtcggcggcatcgacctcaacctctcgctaagcccaccgacgagccaaccgtcatcgccggccgccgccaagggagttgtagctagcggatatggccaagggagtgagagctagctgtacctcctctgcactgccacgatgatggttgtcaattgttgttagctcctcctcctcgtcttatgttcttccatgcaggccggaagatcctaaagagaacgtgtgcgtgcgtgtgagaattaaactcgtgtctgttgttcacaaaaaaaaaaaaaaaaaagggctgatcgggcgctctaagatttggccatgccccatgcatgaggaaccctgcaggggccctcctactttttg

SEQ ID NO: 183992 - DNA, 621 bp, Zea mays
  Clone ID: MRT4577_99388C.1
aacctcttgctcgtccggagcgccatacacaaacagatctcccccaaatacacccgacagcacctccgctgtctgatgcatacctctgcgaaaacactgagcggcagactatcaccctcgatgcggaatatgctgacaccattgacaacggtaagggcacagatacaggcaccaagatgtcctccccccacaacagaaaagtctcatcttcgatggtgaacattgtgaagactgacacacgcttgctgactacaaatactcaaaaggagaacacacctccaccttgtgctccgcatcatggaagacacgatgatctttgaggataccctgatcggaaagactatcactctcgatgatgtagtcctctgacagcattgacatcgccatggacgaacattctcctagacgagcgcatccctacgaatcacgaaaagcttcatgcatttaccgaaaaatacatggatgactcccgcacgcttacccactacaatatctccaatgacagcaccctcgcatcttgatgatgcgccacaagggatgcatgcagatcttcatgaagatgctgaccgagaagacgatcacgctccagatatattcgtcgaacatgatggataactgcca

SEQ ID NO: 183993 - DNA, 481 bp, Zea mays
  Clone ID: MRT4577_99389C.1
tggctctggacctttgggctgatttagtgcttgtttagtgcttgaaatttcagtgagtcgtccttcagcacacaaacgagtattatgtgcgcgcggcttcctcgaagccctggtggtggtgcatgcagtggtggctctaattttaggtgagtctggtcttggctatttgctgacttatgtaattacgctgaggaggaagattagggagtttaaggaggagaatgccatttccggatttatcgcttgcgaaggagagcccgctcccggcgccgtctatactcccgtacttcctaacgatattcctacctacgctatcgacccgctcgggagggaaatcccggcctggactatcggcggtacgaaggccaaggtcgactgcgtcgagctgctcatccacgtcgtcacgtccgtcgtctaagacgccgtatagtgccgtaaggagtctggcactattgtgtcgtataccaagtcctgcgtaatc

SEQ ID NO: 183994 - DNA, 711 bp, Zea mays
  Clone ID: MRT4577_9938C.1
cattgggtacctcgaggccggccgggatatctatttccctgttgtatacataaaaaaatctaattttaatgctttatttcgtacaaaaaaaaaaaaaaaaaaaaaaaaaaaaaaaaaaaaaaaaaaaaaaaaaaaaaaaaaaaaaaaaaaaaaaaaaaaaaaaaaaaaaaaaaaaaaaaaaaaaaaaaggccaggcaaaaaaaacgcctggttccttggttcctggaaaaaaccgagtttttttggccccacaggggcagggaggtctggaaacggggaataaaggtggggtggggtctaaggtggaagggggggaaaaaacacccctgcccggggggaaaaaaacccccccgcgaaggcccccgctttcttttgtgggcccccgaaaaaaaaggccgcccccaatttctccagggcccggggggatcccggggaggccccccccggctgcacttgggggggaaacggaaagggcacccccggaaacgggtgatcccttggaccgacccccggggatgggatttttacctacccacccggggggggggggggaacaaaaaaaagcgaggccaagcgggcggccaaacaaaggaattgggggggggggggaaaaaaaaaaaaaacaaaatcctccagttggctaccccccccggaaggttggccgcaaactttggggcccgggaacaaccgggggccacccggcgggtgggt

SEQ ID NO: 183995 - DNA, 231 bp, Zea mays
  Clone ID: MRT4577_99390C.1
acaaaaaccacaacatttgcgaaggggaggtgtatctaacaagaaacatttccaatacaagaaattttactgctccatctattaaataccattacgcaccgtttgacgttatgcacctttcataaatcaacgccatacacatcctttgaactgttcctacgggcagaaaccagtcacatcctattaaaataaaactgcaccccaacatgtatatggtcttatatcattctc

SEQ ID NO: 183996 - DNA, 281 bp, Zea mays
  Clone ID: MRT4577_99391C.1
ccaaactaacctttattgtggttccaattttccgtggtcattattaggacttggggccccaccctaaaaaaaagccttggtgccttattccaacccccggccattggttggttcttacaaaaaagcttgttggttcatgaaacagcttggggggcgggaagacagcccttggggggccaaggttgaacccccagaacccccagacaaccaagcgccttttaatcaaattgacggggcccggccgggtcacttccggttggcagcttccaggacttgggacc

SEQ ID NO: 183997 - DNA, 860 bp, Zea mays
  Clone ID: MRT4577_99392C.1
gcgtgaaagggaaagagtgaggaagttgatgtattatctgacccgggaggccacccggattgaaatcggcactgaggaagaggaagctagaacccacgcgtccgcggacgcgtgggagagagaagaggctgaaaggaaagctaatcttgatgctattgctgaaaagcagcgattgagagagatagagttggaggagaaggcaaaggcgaatagggagaagctcttaaaggggtctgaggcaggtgctgctccctcttctaataaatatattcccaaatttaaaaggcaagatggtcttcctgcacgacaggatgcacccccaccccgccaagatggccctcctccgtctactgaccgctggcgtccatcaagatattcctcaacctcttcgtcaacctgggggcgggcacataactgatcctttttttttattttgctgactacatttataattttggagcttgtctcataggctatcgcaccttaccgttcactatactccatgcatattgtcggtagttgctgactgcattttatgatgtttttattggttcatatatttgttctcatgtctttggatgttgatgtctggcacgagttccgttttgcagttgggttgtgatacggtttggttgtctaactataaagtcgtcaattatcgtatcttgtacccaaactaaaaaaatactttcctgagtaacgattaagacaactgaaacacgggctactactcgattaaaattctgataaatgttctgttctctgtagctgatggcagtcagatgttatgcggtattgtttgattgttccctatattgccaataaaaaggtttgcacattgacagttgaaatgaaacttc

SEQ ID NO: 183998 - DNA, 1340 bp, Zea mays
  Clone ID: MRT4577_99393C.1
ccggccggggagcaccaccctctgaccggtgaccgctgtgaagtcagtcagcttcagcaccacgagcacgatggccctcgcgctcgccacgaccccactcgcgcatctcgcccttgccccgccctcgatcttcggctcccaatcctcgctgctgctgctcccgcgccgcgcgtcgcccgcccccgtctccctctctcaccgccgcatcatcgcggccgtcgcgaccaaggaacccgagctcggcggcggcggatcgggggccggcgacggtgccggagggagcggcggcggcagcgacccgaggggaggagggcaggaaggagacggggaggaagagaagatggggcagggcctgtccatgtcgcagaaactcaccctcgcctacgccgcgctcgtcggagctggtggtgtaatgggatatatgaagagtggaagccagaaatccttggctgcaggaggcatatcagccctggtcctgtacgtcgtccacactcaactcccagtgagacctgtcctcgcatcctcgatcggtttaggtatatcggccgcgctactgtcagtgatggggtcgcgcttcaagaagtccgggaaggtattccctgccggcgtcgtgtcccttgtatccctggttatggtcggaggctacttccacgggatcttgcgtagctcgcacgcgtgatgcagcctgtggtcttttctgttccgtaatgcaatttggctccccctttgaactgtttctctgtttcacttctcggtggatgttttgtatccgttctcaactttagttcatcttttgtgacagtgggcaataataaccaataagcatgtgagagctgatagaggtgaagtttaaaaaaagtgaaaaaaaaaaaaaaaaaaaaaaaaaaaaaaaaaaaaaaaaaaaaaaaagactgagtacctaaaaatcctcggcccacggctccatatgcgccctggtcctgtacgtcgtccacactcaactcccagccagacctgtccttgcatcctcgatcggtttaggtatatcggccgcgctactgtcagtgatggggtcgcgcttcaagaagtccggaaaggtattccctgccggcgtcgtgtcccttgtatccctggttatggtcggaggctacttccacgggatcttgcgtagctcgcacgcgtgatgcagcctgtggtcttttctgttccgtaatgcaatttggatcccctttggtgccttaaaatctcatggaactgtttctctgtttcacttctcggtggatgttttgtatccgttctcaactttagttcatcttttgtgacagtgggcaataataaccaataagcatgtgagagctgat

SEQ ID NO: 183999 - DNA, 586 bp, Zea mays
  Clone ID: MRT4577_99394C.1
ggtaccctcggagccggggtggcgtggccacttgttattaggtcccttcccttccgttccgtgcccactcttgctctgtataacatgcatgccgccctgcaacacctcttctcacgactggaacagagaaagatctatagagagttaaacagcgggagacctgcgaattatcaaccctgattccatggagagatttaattgcatcaagctgcaccagcatcctaacacaaaggagggcttactctgtggccgcggccatggcgaaggaagccgcacggagggccgacgggaacaaggctgcggctgcggtgaccatgaccaagcgcgtgatgggcaacaaggaagtcaacaccgctgccgctgcggcagagcagaagaaggcatggctgccggaccctgtgaccggctactatcgcccagcgggtagccccagggaggtggacgcggcggagctgcgcgccaagctgctgactgattaatcaaacagttgttttgtcgagctcgagcatgggtcgttgtctgtctaactataactagtttgtattgctttaagatccgtgctcgttgatagcccgtcttaggagtg

SEQ ID NO: 184000 - DNA, 803 bp, Zea mays
  Clone ID: MRT4577_99395C.1
gaccctcggtcggccgggaatggagccaccgccgtctacagccacccgactatgtctccttgagttcccctggcgctcgcctccatctcctacctcgcgatggttcagctgctccagcgccggccgtcgtccatgcgcttgggcctgggctgcggcgaacactgctggccgtgcggctcctgtgcctggcgcgctctctagctcccatgacactgtcgcccttcatcaacgtgcccagggctgatcagtgatgatctcatgtagctgctccgtccaagccgccaatttccctcgacggttttgtcatgtccagacgtcgctgcttcctctcggtctgccatggatgcctctctgtcgctgtttgcctctgcaccgctgtagcaagttgcacagtcgttcgcctccttgtgtccctcaccgtcgacacttccatgtctccaacctcatgcgctcacttcatcgacgtcgtgcactgctactctgcgccaccgttcgagatcatgtcgcgcccagtggctcgtcgttgatcagttcgcctgaacgcatcctcctgttagcaacctagttgggagagtagacttggggaagaagaagaggagagttcgtagatgagttagtgcaattttgcttacaagctaactgcctctcaactctctccagactccttacttattacaagcctttggactgactcatgtgtaccactctgggccggcgtaacgttttgttgggcctcctgttgcgacggcccgtttccccagtgcgcactcctgctgcctctggtgtactggtgctgacaatcc

SEQ ID NO: 184001 - DNA, 288 bp, Zea mays
  Clone ID: MRT4577_99396C.1
cggactgtggtggacagtgagggccggacagagactacagtaacccgacacgaagcagatagcagtcctaggggtgatccagaatcaccaagacctccagccctggatgatgccttttccatcctggacttattcctgggacgttggttccggtcccggtagccttgttaaccctcagaggccttcaagtcctttccacctctcacccattgcccaccattaataagcttagcttctcttgccacctcaggggcttggatatgtggaatagtgaactggggccatgtc

SEQ ID NO: 184002 - DNA, 603 bp, Zea mays
  Clone ID: MRT4577_99397C.1
cgttgctgtcggggggtgctctttggtgtacttttaataaaatgatgtgcagttctcctgcgggaaaaaaaagaaacaaaatatgcagcaggtcgaggcctaggcttacgacagggcaacccgagtcgccgttccaatttgttttgaccgttgatccatttctaaccatttttgaacatgccaccgagcgaggtatactaagttactaacaaagctcggggggcgacagacaaggctgcaaacctcctttacgctgacgatgcacccgtcgtattatcaccaacggcaagtgatgttgctgcattcaaggaaatcattcaccgctttggccaggtaaccaaccttaacaacagtttgatcatgccaaccagatgtagtaacattgaagttcaggagttcttgcagacttcaggctgccctttcaaagatcttggtttgcccctcactctcagacgcttgaagaaagtacactgccaaccactagataaagcagcaggctgcctagcacattggcaagggagactcctcaaccatgaaggacacattactcttggtgaatctcctcagcctatctattttctaactgctctcaaccctctcatg

SEQ ID NO: 184003 - DNA, 326 bp, Zea mays
  Clone ID: MRT4577_99398C.1
aaggacccccccgggcccgacccgtactgaccggcctggcccacgcgccctttcgtttgtgccgacaacggagggacctggggagggttgggtggcacttcacgtgggttttcccaaagagaggcgccaccatgctgaggattgctggcaggctgaaccagagtgctcatgattgaaggatagagtgtcgcggcttcgttgagggggctgacatatgccttgaacgccctcagtgtgaaaagcgggatcccacatgtgggtgacgaaaacatccttcacacccacagaggtggcgaaacttgccctcactctctcggagaaagaac

SEQ ID NO: 184004 - DNA, 865 bp, Zea mays
  unsure (1)..(865): unsure at all n locations
  Clone ID: MRT4577_99399C.1
agcccctcccctctctgcctgtcccctacacatctcatctcattcccccacctcccgtcccgataaggcggacagcgaccgcgcgcgcgagagagaagctcccggctcgcctcctcctccctcccctgtctcctctcccggctccatccatccagcgggaggagagggcaggcggaggagggacgaccgccgcaggccagaggccgtacctacctacctatctatctatctatctatctaagccgccggaatggactcggagcactggatctcgcgcctggccgccgccaagcgattctacgcggcgcagctcggccacgccgatcgggcggggatggacgagctggacatggacggcgacgagaacgcgggcaggcccgacttcgcctgcccctactgctacgaggaccacgacgtcgcctccctcgtcgcgcacctcgaggaggaccaccccttcgagccccacgccgcgccttgccctatctgctccgaaaaggtttctaaagacatgcttaaccatatcaccatgcaacatgggtacttgttcaagaatcgccgcaggttgcgcagatttgctgttccaggcagccagtcgctctctctgctgagccgggatctacgtgaagcccatttgcaggtgcttctgggaggtggtggacataggtcgagcaacaataatgccacaaatatttcagctgatcctcttctgtcatcatttggccttagcttcccaacattagatgctgaggaaacatcaaaattgtctactcctgctcagagtgatgtaccagtgctaaaagagacagctgctcggnncgtggcggtcaagtattgactcgtcgctcacaggggaagaaaggagcag

SEQ ID NO: 184005 - DNA, 530 bp, Zea mays
  Clone ID: MRT4577_9939C.1
aattcggcacgaggccctcgtgcactgccctggcgacacacacaacaggacccgtcacaatcgagcgatgcgagatggtcgccaatctcatggctacgaggtgatgggtcgggctctcggccgtagattgtcgctcgacaacgctcccgagggcaccatcggcctgccgatcgatgtcggagacggggagacaactacatgcaaggtgtctaatgctgctggcattgagtacatattaacacattgaggcagaagcacttcgggcgggaaacgactgctacatcgtttagattgctactttgatttaaccctaccacttgctagtcctttgtgcggcggagctcttcattatcaccctgacgggatgcgggacccattgagactcaggcaagggtgtgtcatgcgtgcgccggcgaccccggtcccaggtgccacgtgaggggggaggagggcccacccgctctaacgaggtgtggaccgcgactcctgggcggagatgtcagatgacaagactgcaagagccgtggact

SEQ ID NO: 184006 - DNA, 679 bp, Zea mays
  Clone ID: MRT4577_993C.1
cggacgcgtgggctccgcgcccgccgcgaacgccaccacccactcccgagcgtcacccctccttaaccctagctgccacaacatcacgaaaggaccggatcttggtgagctcgagggtacatgacgcggttcttcctatcgcggcaggtgaccaggacctctatcccctccttgatggaggtcggggactgggatggaggccagggactcgacggcggtgggcctggaggtggcggcaaaggcctcggcgtcgacggccgcggcggtgcgcatttctcggctcgttcattcttgtgccctccttcgattacttcatttcgtcgcgtcccaaatcggtcgatggaaaatggaatctcgatggcttttgttaaatctggattgctatgcatgtctagcgatgcacttggatttttggtacagtgagattggtagccgcacatggggaatctcgatggcttttgttaaatctggattgctatgcatgtctagcgatacacttggatttctggtaccgtgagattggtagttgcagatggatacagggggccttagtgaagtggcagcagaagacctgaatatgggggtggacacatcttctcatctggacgttgaagcaatgtcttcagttccttggtggtggtcggttaatgcttctttggaacagttgttctggcattta

SEQ ID NO: 184007 - DNA, 1004 bp, Zea mays
  Clone ID: MRT4577_99400C.1
ctgcatgccaagtcgcccgtccacccgcgccataataatctttttaacggcgctgcgccgagggtaaacgacgacgacgacgacgacgacgccgatgacgcggtgggggacggcgacccggtccggcctcggtggcgaataataaaagctccatccctcactcctccttccctcccccgtctgtcccctacacatctcattcccccacctccccctcccgataaggcggacagcgaccgagagaagctcccggctcgcctcctccctccctccctcccctgtctcctctcccggctccatccatccaccgggaggagagggcagcaggcggaggaggccacacctacctacctatctatctatctgtctgtctaagccgccggcatggactcggagcactggatctcgcgcctggccgccgccaagcgcttctacgccgcgcagctcggccacgccggcgcagatcgggcggggatggacgagctggacatggacggcgacgagaacgccggcaggcccgacttcgcctgcccctactgctacgaggaccacgacgtcgcctccctcatcgcccacctcgaggaggaccaccccttcgagccccacgccgcgccttgccctatctgctctgaaaaggtttctaaagatatgctaaaccatatcaccatgcaacatgggtacttgttcaagaatcgccgcaggttgcgcagatttgctgtttcaggcagccagtcgctctctctgctgagccgggatctacgtgaagcccatttgcaggtgcttctgggaggtggtggacataggtcgagcaacaataatgccgcaaatatttcagctgatcctcttctgtcatcatttggccttagcttcccaacattagatgctgaggaaacatcaaaattgtctactcccgctcagagtgatgtaccagtgctaaaagaggcagctgctcggccgtggcggtcaagtatggactcgttgctccaagggaagaaagggagcaa

SEQ ID NO: 184008 - DNA, 138 bp, Zea mays
  Clone ID: MRT4577_99401C.1
ttacaacgcagcacgggtgtcctgacgggtcaacggtcgacgcaggcagcgtggaacacgtgcgtgaaggctgacatcacacgcctccgctccccgacgcgtgcagcgtcaaggcacacagggtatgagggagagtcg

SEQ ID NO: 184009 - DNA, 572 bp, Zea mays
  Clone ID: MRT4577_99402C.1
ccgaaccttgcagctgccctagtaggctccaaaatggatacacgaacctaaacaagcctcttttcaatccttggtgcggtgcctcgggccatgaccaccgccatcaacagcgactgaagcggcgaggggagctggtacccgtactgccacccgcactaccggtaccactacgggtacggctgcttgcgcggctgctgctgctgcctctgcctgttgctcaccttgctggtgatcttccttgtggtcgtcgctctggccgtcgtgctggtggtgaagccccgggaaaagcacctcgaactgaaccaggagctcgagcaggacctcctgcaggacttgctgacgacctccccggccacggtgcccgccggcgcgccctacctctccctctacatctcgctgatcttcactgtcgtgaacactgacaaggaagggcatccaggtcggcaccacggacggcgacacgatgtaccacgtcgtgccccatcggggtggcggtcgtgcccggggtcgagcacgccgtgcacaagacccggctgatccagagcctggtcaatgaccaccgcattaacgag

SEQ ID NO: 184010 - DNA, 153 bp, Zea mays
  Clone ID: MRT4577_99403C.1
ataggatgtatcacgccggccgttgagcagggagcttcgaggctggccggcattctgcgttagacgcgcggactgatactatggcacacggccttgttgcgcgaacgccttaacaaggatcggcgctgaccaattgcgcagacccccggtgcc

SEQ ID NO: 184011 - DNA, 460 bp, Zea mays
  unsure (1)..(460): unsure at all n locations
  Clone ID: MRT4577_99404C.1
tntttatttttttttttttttttttttcctttgggtttttttagttttttttggggctgaaacccatcttaaaataaaaacgggagagcggttttttagaccgattttgggcggggccaccctggataaaaggattgacatcagaacaaaaacgtggccggggttcacttccctcaggaacacaaatccttttaccccccggggtttgtggttggtaaaaacccacaattgttgggggggaccccctccgggggttccccggcggtttgtttccgccaccccactgggcccctttcccttggggggaaaaaacgcccccaaaaggggggttttttcccttgggccggcccccccggggggggacaaggggcgggggctggaaaattcccgggggggggggccttttccacccggtttcacccccaggtttttttgggggatgggagggcccccccccggg

SEQ ID NO: 184012 - DNA, 151 bp, Zea mays
  Clone ID: MRT4577_99405C.1
tacaattcgcacgtacatcaagtctgctgtcgagcatctaccgttgcactgctaacccaagagcggccagcggacggaacccatggcgaaaaggaagccagcggaagcagcgaaaagcccacgccaccttccaatcccccccaaattccct

SEQ ID NO: 184013 - DNA, 258 bp, Zea mays
  Clone ID: MRT4577_99406C.1
gttggagccataagagaagtaaaagaagagaccgggattgatgcagaatttgttgaagtgctggccttcaggtaacagctggattctggtcccagttcttctgacatttatctagtactgacctaccaactatcttctcacacttcggaatatgccaacaacaccaaaaaggagatgtattgtgcaacagaatatgtgcagacatttctaactcatatctagacaaccaaaaaatggcagtgttttgcatttcctttc

SEQ ID NO: 184014 - DNA, 760 bp, Zea mays
  Clone ID: MRT4577_99407C.1
tcgaggccggccgggccggaaccattaatctcgttgacattgacatcctatctcctctctatatctaggtattgccttgccgtgtccatctctgcagcaatggcttctgatgccgccggcgccggcgccaccgccgccgttgccgccgccgttctcgccattctggtcgtatcttccatggggcatccaaacaaagggccattatgcagcgagtgtgggtcgctgtgcaatacgaactgcactgcagaggctgccaactccacaacctgcagaagctactgcgacaacgacaccacggctgcccgggaggactgcgaaaggcaggtcctccaggggtgccaggcggcctactgcagctacggcacctgcagccgggactgcaacttggaagcccagaacgcctgcctttctatccatgacgactatacagattgccaagcatgcaagcaaggtatgttccagtcatgcttccccacctgccaaagcaactgcaacagcacctgcgtcaagaaagaacatggatgctgagcgtttgatgcgagatgcgatgcgatctcggacaatatgcatggaagacgattagctacgtatctatcttgatttatataaccaatggtgattggtgatgaataatattgatgagttcggtcaaaaaaaaaaaaaaaaaaggcccctagggctctaagatatatgagcttgggttgtctgggtttataataagaaattcaaaagcaagtctttttaagttggagagttttgc

SEQ ID NO: 184015 - DNA, 745 bp, Zea mays
  Clone ID: MRT4577_99408C.1
ttttcctggcggctcctccactgggcctgctagggcccaactcgcccctcgtcgcgcttggcctcggtaaatcatggacagcgcctccacctgctcaatctcacccctgcgttcgtccatagacttgctcaccgagccacccacctttgtgcgcaatcgatcgatcctgggggggggggggggggatgctcagctcgccggcgcttgcgctttgctggccgtttataatttcagcaagccacgttataaatgggtcccacattgactcttacgaatcactttcattgttcgttattaagctcggagaaggtgtttttcataccttcggcacatgaccttcatttgtttcgggatctgagcttgttgcaaaaaaacgaactaataccgcaaggggctacttttgggggtctctttcttttgaaggtccttaaaacactaagataatggttgttttctgaactatttctaagtattataggtacctctgccaaaagcttctttggtgaattgattaaaggcaaatgtacaagctttgggttgccatcacaaagggaccagggacaaagccaaagaaagccaaagccagtctcctcgggtccgtttgcccagctaacgaaaggaatagacatccttacccctgccctgtttaatagtttaaatatataggcttaaggatgccaatgtaatttttccaaagaatgtactctgcgcctataaataaaggaatagtgctatgcctttaggg

SEQ ID NO: 184016 - DNA, 401 bp, Zea mays
  Clone ID: MRT4577_99409C.1
gatcacagctagtgaacttctgacactgactctccgtacagcaccacatccgccacgtgtcaaggccactctaacactgtggtctccaatcggttgacatagcacgcaagatctggctctggccctagcggtcctcctgctcgaggcgaccgccttggtgcctaatgataacgcatacagctgctagcaggactgctacgatcggtgagccaacgtcattcaggaggatcctgactgcacaagcatctcgaaccaggcctgagggatcatagtaataggcgcagctgcaggtgagccggattaatatagtcaggcttcatcggcgcgagatctcaagtcaacatcaccatagatactcgctgctctgtcacacacataaccacatgcatattctcttgacc

SEQ ID NO: 184017 - DNA, 1317 bp, Zea mays
  Clone ID: MRT4577_9940C.1
cggacggtgggcggacgcgtgggtgtcgcggaggaggcggtggtgccggcgcccgcgagggaggtcgtggtagggtacgcgctaacgagtaagaaggccaagagcttcctccaacccaagctccgggggctcgccaggaaaaagggaatcttgtttgtcgctattgatcagaaacgcccattgtctgatcaaggtccatttgacatcgttcttcataagttgactggaagggggtggcagcaattgctggaggaatatagggaggcgcacccagaagttactgttcttgatccacctggcgcaatagcaaacttgcttgatcgccagtctatgcttcaagaagtatctgaattggacctcacagactgtcatgttctcttctgcaggtaaagtacgtgtgcctaagcagctattcgttaatactgatccctcatcaataccagctgcagttaggagggcaggtctctctctcccattggtggcaaaacccttggtggcgaagtcccatgagctatcccttgcttatgatccaacttcactgaccaaacttgagccccccttggttcttcaggaatttgttaaccatggtggcgtcatgtttaaggtgtacattgttggggatgcaataagggttgtacgtcgattttcactcccaaatgttgatgaaggcgatctatcgaacaatgctggggtatttcggtttccaagggtctcttgtgctgcagccagtgcagatgatgcagatcttgaccctcgtgttgctgaacttcctccgagaccattgcttgagatcttggcacgagagctgcgccgacgactgggtcttagactattcaacatcgatatgattagggagcatgggacgcgagatcggttttatgtcatagacatgaactactttcctgggtacggcaaaatgcctggatacgagcacgtgttcaccgacttcctgctgagccttgccaagaaagagtacaagagacgacaaagctatagctcgctaagctcaggcgaatggtgataagcgaggagactactcggcggggcatgtatatgtctatcatccacgatgcgtgcgtacagatgtacttgtgcatgacgagagataatgggtcgtagaagcggagggctgttgtcaggctataactaactgtggctttacatgtgctaactgttgatgcttcagaataaattttgtttgggtggatgatggctctgctgaaatcgagctacttgtagaacttatgactggaacctcgaaataaacggagaatttggattacccaaaaaaaaaaaaaaaaaaaaaaaaaaaagaag

SEQ ID NO: 184018 - DNA, 877 bp, Zea mays
  Clone ID: MRT4577_99410C.1
cattgggtaccgcttttcgaagaaacttggcaagcttttccaagaaacctagctagctagctagtaagaggcacaggccggcaccatgtcgcaccaccattcccaccacaattctcattctcacaaccgtacccaccaccactctcactctcactccggaggaggtggaggcggcggcggcggtggcggtgccggtggaggcggaggcggagtggctaaatgccactgtgattgctcacaccatgatcattcaccgccaaggcaaccgttcttcccgccaccgcagcttccaccaccacaaatctttcttcctgcaggaccaccgctccctccgcctgggccgctcccatttccgccaccgatattcttcggacctccgccgccacccccgcccccgccaccgttcatgtgcccacgaccgccaccatgcatgtaccggaggtggtaatggagataaaagttgatatacacggtgtgcatgtgtttgtgccaaagcttctcgtacgtggtgttcgagtttctgtcaccccaaataagaaccgagctcttctccggatagaactatcttcacagggttccctgttcaagttaggatggcacgcatcatcatatctcggaaggaagccctcggggagtcttctccatgtatgggtggagttttgaaagaagtcattatttctagttcttgttcaagttccctacgtactagatgttctcgttgatgcgtggattttatacgtgtacttgttctcttgtgctttccaccggccctgatgtcgtcccgttgtaaccgatgttcgtttgtgtttcaatgtgtctttggtttaatgatatgttgtgtgtctgctttccttctaagaaaaaaaaaaaaaaaaaa

SEQ ID NO: 184019 - DNA, 288 bp, Zea mays
  Clone ID: MRT4577_99411C.1
gatgaatgcaactgctggactctcatatatcacgtgaccatctccagtctttgcttctgcaccaaacaaaaaaaatttactagatctatgaaataatcaacctaataaccgagccactgcctcacccctatcataacacacaagaaccacctaaaacatgctagtctatcatccaaatcacaacaaatatacatacttacctcaccaccaacaaccaacacttacatagtcgaaaacaacacaccttatctcgatcaatccaagatgaacaccatcactcactacaga

SEQ ID NO: 184020 - DNA, 404 bp, Zea mays
  Clone ID: MRT4577_99412C.1
atgggtgacaccactcaccatattttagacaagactgaggcgagccaaggctccgaatcacgtactctgacaaatggatctcttatgcctctcgactatgccgatccactagaagctgtgtaccattcccctgaagacgtgcctgaagataacacatacaacaacatatatgcaatggcatcaaactgcacaggcaaggaagccgccgaatcacacgaggaatgaatgcggcagcattgacatactagagcattctgattggtaatgagcacagaggctaccaagatctaacaatcgaaacctcaagaataggctatctgcgctgacaagctcagcgtctcagcactacatatgttcacagctgcaacactcccttgctataatgaataccaccaagtacctgc

SEQ ID NO: 184021 - DNA, 475 bp, Zea mays
  Clone ID: MRT4577_99413C.1
ctgggggaatcgaaaaacttcatcccacagataatccaaccttgttttacagcacgccctcacacattacaatttttaaacaaagcgggcatttgaaacaaggggccctcccctggcgggaaagagtaatacttttatgtaaaccacccatgccttccagatacattatcaccacatacacccaccaccataccaaagggggatcgccaatcaccacatgggtccccccaggggggtaccaggattcattccggggtgcccagcaaaaataacttatgaaggaatttggcacaataagcccgatcaaattttggaacctaagctgccttccaagcttttagggtgcaagtccttttatcactttgagaaggacccctccgaaaataaccagcaacaagcattttagcgaaaagttcgacttctgagttttaacagcttttgaaagctggcctttagcctgggaaggccccacaac

SEQ ID NO: 184022 - DNA, 317 bp, Zea mays
  Clone ID: MRT4577_99414C.1
tttgagcttcacactatcagggtgtccgtgagcttctctcttccatgtgcgtgtgtgtatgagcagcactagacagtgtgtgctttgctagtgtgctgagcgcaagtaacactagcacgtagctcctccaccggtcgtgtatcagtgtactcgagtgctagcgagtaattctgggctaacaattggcatcagagcctctggttgtggtagccatggccggtggtaaaggagtgcagcaacgcaccacctcgggtggttcccagtcgccggctccggaggagcggcgagggcgcagccgctccaggcgcggccatcgc

SEQ ID NO: 184023 - DNA, 417 bp, Zea mays
  Clone ID: MRT4577_99415C.1
cattgggtacctcgaggccggccgggactagattctctaataccgcgtccctgcgacatgtcatcgttaccatcatacaaccgtagtccatctgatatcgagcttcagtatcgtgaactcactgttctaccaggcgtggactgaggacaccctcttccacgacaagttgatggcctggacagagcttctgctagcgcgcaatcacctgcgctggataatcagagctacatgttcggctcctactaacgcaggaagtcctcgacgccgatctccaatgtcggcatgaacgcgacaagactctgtggcacgtgctcaacgactacgtcgtcgaacttctcggagaaaacgtctagggagtctgctacaaccaaggctacggagatgaaggagcgcactgcatctggtgttcaagctgct

SEQ ID NO: 184024 - DNA, 299 bp, Zea mays
  Clone ID: MRT4577_99416C.1
ttttgaaagagcaaacatggggagaaaagaacaaacacggcgtcatattaacacaggacttaatcctacttacaatgaagtgctacctacgggggtactttcttataccaattcctacctcagaacctctatttgtgtcatagctgtggagaggcatcctcttatttaagcaactgctacattgcgggattagtgatctaccaggccatgagtagttcaagctttcttggtagctcttagtttgatgtgctaacgaccctgttcctgacgaggagctccctgatcaacaggaatgttgg

SEQ ID NO: 184025 - DNA, 264 bp, Zea mays
  Clone ID: MRT4577_99417C.1
aaaaaaaaaaaaaaaatttaaaaaaaaaatttaaaattaaaaaaaaaaaaaaaaaaaaaaagaaaaggtaaaaaataaaaaaagtaaaaaacaaaaaaaaggacgcccattcttaatgttccaatcttacaaccccttccatccaaccttattactcttttatagggccccctaatttcaattcactgcccgttctttcacaacttcttacctgtaaaaaccttgtctttccccaccttaatcttttttaaccacatccccttt

SEQ ID NO: 184026 - DNA, 391 bp, Zea mays
  Clone ID: MRT4577_99418C.1
tgttgtttttttttatgattaccggtgtttccccgcgcgccctgattatttaatattttgagaaaaaaaaaagtgagaattcaaaaaaagggttcaggtgcaatggtatgaaatgaggggataaatgcacgaggggaactgaattgctaaccggtgatcgacatatatactgcaagatctataaacatttcggggattgactaaacggaaatactgggctagaggccatgatactggggggacagagcataggcctccgggtgcatgccaatccgggggggatttatatattaaggggagggaggccggggttatgagggcgcgggcctcaaggctcactcgggtacggggggagcctagaagggtaaggaaagtcttagcaatggatggg

SEQ ID NO: 184027 - DNA, 145 bp, Zea mays
  Clone ID: MRT4577_99419C.1
tttttttttggttttttagtaatataccctaaagctccatgtctccaatattttttcttaggccaatatcctttgtcacaaacacacatttattgcgtcagatctttcttctccctctatgaccaaaaaattttcctttacaatt

SEQ ID NO: 184028 - DNA, 1455 bp, Zea mays
  Clone ID: MRT4577_9941C.1
tttttcctccagcccaagctccgggggctcgccaggaaaaaggaatcttgtttgttgctattgatcagaaacgtccattgtctgatcaaggtccatttgacattgttcttcataagttgactggaaaggggtggcagcaattgctggaggaatatagggaggctcacccagaagttgcgtgggcttgatccacctggcgcaatagcaaacttgctagatcgccaatctatgcttcaagaagtatctgaattggacctcaccgattgtcatggatggttctaagaacctttctaaaggctgatttcatcatcatggtgcagttctcttctgcaggtaaagtacgcgtgcctaaacagctattcattaatactgatccctcatcaataccagctgcagttaggagggcgggtctctctctcccattggtggcaaaacccttggtggcgaagtcccatgagctatctctggcttatgatccaacttcactgaccaaacttgagccccctttagttcttcaggaatttgttaaccatggtggcgtcatgtttaaggtgtacattgttggggatgcaataagggttgtacgtcggttttcacttccaaatgttgatgaaggtgatctgtcgaataatgctggggtatttcggtttccaagggtctcttgtgctgcagccagtgcagatgatgcagatcttgaccctggtgttgctggtgcgcgttgcttgtccatttttttttgtccttgtaggtttttccgttgtattagaaaacactgtaggcaactgattttctaacatgcccctatcagaacttcctccgagaccattgcttgagatcttggcacgagagctgcggcgacgactgggtcttagactattcaacattgatatgattagggagcacggaacaagagaccggttttatgtcatagacatgaactactttcctggtattcaatctgacgtccttgagcatgcacaacccaccctttttttggtactggtaacctctgcctgtaacattttagacatcattgatctaaggatctcgtgtttaatccaattttcactatagctaaaagtcttcaaactagttcacggcgcattgctgacactaatatgaaacaccaaagttgggagacactcctgtgtcatcatgtatagtgttcacagtgcatggccaatgatgatatcatgtatactgtttcgtggatgtaccgaacgaacgtgatgctagtgctgtgacaactctattttatcaaggaaaaatgccttgggaaaatggaattcccttgaaaaaacagggttgtcaaactagctcttatgccgcctatttttgtcctgaccaatcgtttgtggtcgcagggtacggcaaaatgcccgggtacgagcacgtgttcaccgacttcctgctgagccttgcccagaaagagtacaagaggcgaccaagctatag

SEQ ID NO: 184029 - DNA, 450 bp, Zea mays
  Clone ID: MRT4577_99420C.1
cctcgaggccggccgggttttcaatcatgcgaaaaattctttttaatattttattatgatacgcaacgtttttgcacacaaattatatgagactaaaaagggtggacgtggtagaaaacctgaaggtatggatgtgcttattgaaccaattagtgaagagttggctgcagcacaaatttatcagaaaataacaagacatgagttgttgcaaaagaaactcaaagaagatgaagaattattaaataaagagctcaatgaacgtggtttacatttatggcgaagttaaatttttaaaaaaacttaatttttaaataaaatttctagtatactacttgaggcatgtaatggttgaaggaaatgcttgttgacattttacgcgtaaaaaaataaaataactgtacattagttaaacaacattttaaaacgaaaaaaaaaaaaaaaaaagcggcc

SEQ ID NO: 184030 - DNA, 383 bp, Zea mays
  Clone ID: MRT4577_99421C.1
cggacgcgtgggtctcctcaccatttgggctcctgccgagagctcaccgagctcggaccgtcgaaaggcgcaagcccggtggacatgccgaataacacatgcaagctctgctcccggcgcttcaccagtccccgcgccctcgccggtcacatgcgctcccattccctcgtcaaagctcatgctgaggccgcggaggcagcgaatcggctgatctcttctgcatcctccacgtccaccttcttcatcgccgccgacgactaggacgtcatctcgaagattcccacttccacccacggactctaatagaatccgaatcgcagccttctgttactcgattccagtttatcatatcgcgaaagctagtctgaatacacctcatcgta

SEQ ID NO: 184031 - DNA, 303 bp, Zea mays
  unsure (1)..(303): unsure at all n locations
  Clone ID: MRT4577_99422C.1
ggccgggnacaccggcaccgagcccgcccgcggngggcaaggcaccnacgnaccgacgcgacaggngcngcaacaaaacgcaccagcaccggacgcagaaagccagaggcaaacccggcagccaaccgacaacagcgagcaaacaaccaaccaacggggggcgacaaacccggcagaagaacccacaacagcgacaacagcccacccaacccacgggggggggggaaccaaaaggagcgaaaccggcagagcagccagaacaacaaccgcggccagacaaccagccgacaacggacgaacccg

SEQ ID NO: 184032 - DNA, 381 bp, Zea mays
  Clone ID: MRT4577_99423C.1
cccacgatacgaatgcagctatcttgtccttaactacgatcccaaaggcactaattctgacagatttgaagcgcggcggccacaccaccaatgtgatgactactttacgcgatgactgctctaccaagggcacgtgtaactcacgctttcacgctaggaccaactttactttgtactcaacccgctctactggattccctacttcataaacaagaatgttgacgagccctctcctactaatcgttcaccttagatcatgatcttatagacacaagctatgacgaacacaacatgcagggactgcccggccatacgatcaaaaaggggaaccctggcgcactgcggaggacacctagtggaccgcgaacctgccccaaccgt

SEQ ID NO: 184033 - DNA, 267 bp, Zea mays
  Clone ID: MRT4577_99424C.1
ggctcaggaccacatcaatatttacaagtggtgggttcctttcaatctgttccaccaggtagttctcagtcagaattcttcgctgctggcgccgagtgggcccaccaccaggacatcatagttaaattgaatgatatttggcagcaattcatgctgcgcaggatcaagtcaacaggattcaataccatctcatctgcttcttctaactggtgctgctgtctctccttagctctcggctcagaaagaagaacgcagccccagctctat

SEQ ID NO: 184034 - DNA, 902 bp, Zea mays
  unsure (1)..(902): unsure at all n locations
  Clone ID: MRT4577_99425C.1
ccgggatacgaacacaactcggctcgagagagatcgcatacgcctgcctgcccacccacctccccttttccttcctcggcgccgccgccgccctcgtcttctcatgcatgggcgccgcgtacgggaccgcgaagagcggcgtcggcgtggcgtcgatgggtgtgatgcggccggagctcgtcatgaagtccatcgtgcccgtggtcgtggctggtgtgctcggtatctacgggctcatcatcgccgtcatcatcagcacggggatcaaccccaaggccaagccctactacctctttgatggctgcgcccacctttcctccgggcttgcctgtggtctcgctgggcttgcagctggcatggccatcggcattgtcggtgatgctggagtcagggcaaatgcgcaacagccaaagcttttcgttggcatgatcctcatcctcattttcgcagaagcgcttgctctctatggtctaattgttggaattatcctttcgtctcgcgctggtcaatcccgggcggattaagtgcaccaccattctgtgattaccgcaccgtttattatgctattctgagaggattggaactctattcccttgtctagtttattcttgttaccatgtattaatgtaacaatctgtagctgatggaaggtgacttccagtcatgttttggttttggtggtgtcgagcagaggttatttatttttgggttaaggtcggagtcggacggatgctcttgggctaagtggatttaattttatccttgctgaataaagaacacggaattgtagccaaataagaacgtgatatataaatatttctttcccactttgctggatgcctggattttcaaannaaaaaaaaaactaaaaaaaaaaaataaaattttatcttttataaaaa

SEQ ID NO: 184035 - DNA, 694 bp, Zea mays
  unsure (1)..(694): unsure at all n locations
  Clone ID: MRT4577_99426C.1
atgcggcagtagtattaagctggacttgtgctgttctcgactagcatcaagaaggtagagaaggagatcaagaagatggcaaagaaaatcagtgacctttgtggagatgttcgccgatctgtgggccaatggcttcagtttgctaggctaaatttggctcagttggttacaatgtcatggtgactggaagctgccatttgtgaatctgtggtctataacttatctgataatgtaccggttgaacatcatcctggactatccagatccaaacacacacacattctcagatgcatttcggaagggtatataagtttgatcttggtgctttaaacgagaatgttgaaggttaaatgcataatcccgagcagtgaattctgctcaattaaaaaggttactgatttctagggctacacttatgtttcgttaactgctaaaaatgttgctgatttcataagcaacattgggaagaactatgttgccattatttcaagtctagattctgggaagaggagggtaattgatgcatccagcgnggaagaaggggccttcccagccagatccttctttgacgtgccgctggccatcaccgcgacctccgtcgcatcgccactctcgctagctcgaggtcgtcacaatgnggaagaaaggctgcaagatgaagacacacaagcgggtttcgagtgacagggaaaga

SEQ ID NO: 184036 - DNA, 273 bp, Zea mays
  Clone ID: MRT4577_99427C.1
cgtcacaacatcggggcgctgaggcggccgggcacctcaaggggatggacgacgagaagaggatgggcggtctcgggatggaaaagggcgagggcatgggtagtgccatgggtgattctggcgagagcagggggagggtatgatgatgactattcgtgacagtgaattcctgggacgtgggggagacaaggattgcgtcctgtggaggttgtgcttgtgagacgggattgttctctctttttattcaggtgtctttggccgtgtttcagtgac

SEQ ID NO: 184037 - DNA, 593 bp, Zea mays
  Clone ID: MRT4577_99428C.1
tctaatgctctgcgggtatataagtttgatcttggtgctttaaacgagaatgttgaaggttaaatgcataatcccgagcagtgaattctggtatcttctaacagctaagcatataaagagatcaaaacctttagtgaaacccccctctttcttttaataaaaatagtcttgcaatccaaaacaatgtgtggtatcacccatatctttccaaattgtgggaaatggattgcatcaattaatctatgagttttactatattgtgctctaactaaccgagcatctttgttaaacttatattatgtagtacctcacctactctaattatgtggtgacttgttgcacttgcagctcaattaagaaggttactgatttctagggctacacttatgtttcgttaactgctaaaaatgttgctgatttcataagcaacattgggaagaactatgttgccattatttcaagtctagattctgggaagaggagggtaattgatgcatccagcggggaaagaggggcctttccagccagattcttctttgacgtgccgctgggcatcaccgcgacctccgtcgcatcgccactctcgctagctc

SEQ ID NO: 184038 - DNA, 109 bp, Zea mays
  Clone ID: MRT4577_99429C.1
acggacgaaagggggaaatccactgtctgcctggcgcggcggatcggacggagccagctacacatcctgacgatgtgatccccagcccacccagatttacactgccatg

SEQ ID NO: 184039 - DNA, 804 bp, Zea mays
  Clone ID: MRT4577_9942C.1
attgggtacctcgaggccggccggggcaaatgttttttgcttttttggatgctcctcacggcactttgggattttcttcttgagagtaatctctttttgcaaagaggccgccaactcttgtaccatcacggcgtcggagggccagtcgacctctctgctcgcgaaaaatggcggcggcagcggaaggtttggctgcctacagggcggtgctgcgggcggcgcggcggacgttcgcgggcgaccagctgatgctgaaggagtctgcggtggagatccggcgccgctttgaggaccaccgtggtctaaccccgggctccgacgatgcagcgcgtgccctcgccgacgcccgcgaggcggcgcacttcatcacccatatgatagtccaggccacacgcgcaccctccggatccttcgttgtgaagcctgagagtgttcatgctggagctacactggaagttccttccgaggagatcctttcaaagttgaagtaggggaagcgctcggctgtcacaagcattgctgaagtaggtgaccatctgcatgctagtaaaataagaccagtttgcaacggttgattcttgtgttgcatactggtgcacttagtagcttcacacttttgcttttattattattattattattactgagagcatttagcggcaccaaggtaccggtgtcttcgatgcaaagtagtgtgaaacggctattgaggtttttgaaaatcgactgtatgatgaggaattatgcaaataggaaaattgcagtgccgtggacttgatcaaaaaaaaaaaaaaaaaagcggcc

SEQ ID NO: 184040 - DNA, 230 bp, Zea mays
  Clone ID: MRT4577_99430C.1
gtcctcgatgtggagattttggcgtcacagccatgcatgatcacatggctggatgtatgaaacaaaaggtcgatatcgctacacttaatgcgtagtattgtcgcccacaatgttgatattgccagttgcaactcggctccgaccatgcttatataatgggggacgccttggcatcaaggatggcattggctttctatggcaggacatggccaaacctcctgcccatgcac

SEQ ID NO: 184041 - DNA, 337 bp, Zea mays
  Clone ID: MRT4577_99431C.1
aagccctagcctcctgtgtgtctctgctaggtgacttgttcctcgcgccgccgccgcgaccctggagcgggaggaggagcagtggcgccgaccaaggcggaggggcccgtgatcggcatcgacctcgggacgacctactcgtgcgtgggggtgtgggagcacgaccgcgtcgagatcatcgccaacgactcaggggaaccgcaccaccccctcctacgtcgggttcacggacaccgagcgcctcatcgcggatgccgccaagaaccaggtcgccatgaaccccatcaacaccgtcttcgatgccaagcgtcttatcggcagaccgttttctgatgcc

SEQ ID NO: 184042 - DNA, 527 bp, Zea mays
  Clone ID: MRT4577_99432C.1
gttgtcctgtacccagttcaatcatattcttggtcttacagaaaccttggagaggccggcctttgcccaactcacaggttgttcctacagttgtcaatggaggaatcatggcattctactttgtcttatggggtaaaggacttcttgcttgtggcccactagtgtatgtatccagttctcttagcaccgtgattttttcacgtagctgcatggtctatggtgccgtgcatttatgccagggaatatctagttcaatcaccacatatgtgcaatgtttaaaccatgctgcgagctagtggtcatcagatcattgtggaaacaatttacacttgatggacatcaactgtaggacatttctctggccgtctggcgtccttatttgttgacctaacacatgttagtcattgtgacttgagtgctgcagacatgaatttgcatgacttgattttttcttcgggggcttctagggatgtgcaaaacgaaatttctattatcattaatcacaaggacgagcaggcctgatgcag

SEQ ID NO: 184043 - DNA, 753 bp, Zea mays
  Clone ID: MRT4577_99433C.1
ccggccgggatggaaagttcctccgtcgtgcccctgccctccgctcaactccagtcacgcgcctctcctccggattgcaccctgcttttgtctagcctgcttgtagctcgccgtcgacctccccgtcttgtccctccctcgccttggcgccactgcggactcgactggcggctgggcgtggtggatacctcgctggggtgcggtgctgctgccaagccgccgctcccatggctgtggtgagctctggcatatccgccgtcagtgaacctggggcactgctgtcgttcctcgctgccatcctagctcggaatccacggtgtgatcccaggcgaaccgacgaaggtgtagatcgggagcaggggagtaatcgagctcgcgagtcctcggtgcggcgaggattcctcgctaaaatcatttcaccgtcgcggaggagaaacggatttcgccgccgcggtcaaatcccgcgtgcgtcgcatacaatccttcgtttggtggtcggggacattcgctgcatctcctgggatgctcccatgactgcgccgtggtcaatttgggagttggggcaccggggattcctcgccgtcgctgcgcttccaccgccgcccgcagctcaccgtggacagcttccctggcgccatctctgtctccgagcgaggacacgtgtcatctgaaaagcaagttggtacctggatttctcagtctcaggtcaagaacaggtacccgcagatgaggcgcgtggaagatgctgtgatg

SEQ ID NO: 184044 - DNA, 1327 bp, Zea mays
  Clone ID: MRT4577_99434C.1
gccggccgggtgccggccgtttttctgccgcacactcttccttatcttctcctggtgacactcttcttcctcccccgcgctgtgcgtccttgctccctcggcgcccctgctcccatggcaccgcgcccctctccagccatggccgcgtctcccctgctccggttcatctgcgcgcgtcgcaccgtcgagttccgcgcgtcccaagcttctccaccgtgtcggctgctcctccctgcgtccatctcccatggcgccttggagtcccagctcggcctccttcctgcagccggttgtggttgcccctcctgcagctcgccgggcacgctcgccagcttccaaacacgatctcatcatcgtttcatgcgtcagcaagaaatcccaagtgttgggtgaagacggagccagcagcgtggtgttcaccgagtgcgcgacaaaaagctcgaacaagtcgtcgagcgtcatactcgtctacgccaagccccccaagccgtgaagacactctggtgttggccacgtgtcacctgctcgacaaaaaggaattccatgagtatctagtcaagagtagaaattgtgtgcatcgctcgtcagacgtgtgtgatcgaagacatcaaccgaaaaccggcatcatgtgtaacacccctggtgtttatattccgctcgacaacgagtatgaatttaagcacgtaatcagtggataaaacggatgccaaaattttcttcacctatcgcgattttaatatcgcatctgttccgtttgtcgcgagttcgacgtcgtttttatttattcggactcttcctaaattttcgtgatgttcggaacatagctgtttcgaaaaccggtgcgtccggtgagtatttaaaattcatcgctcgcgcgaatacaaattcggaagcccgactcactcggacgatttttatactgggcaaattagtttgaactcggcggttaaaatgttcgagacaaaataatttgtatcgcgcattgtctgagaaaaatcgtgcgtgaggttataatccaatttattcttcagcacgctgtttcgaagacaaaatcacgtatacgttcgcagatattgtttcggctaatttcggtcggatcacgccgaacaaattattagtgccgaaatcagtttatttcggtctgtcgtttcttgtctagatccaaatcttcggatataaataatgggtagattcatctgactacggagtattcactaaatcaaatcttatccaaatattgtggtcaattttattttggttcaactattttatacatcttttaaaccataattcgggaacctgtgtttatccatatctgatgttaatg

SEQ ID NO: 184045 - DNA, 613 bp, Zea mays
  Clone ID: MRT4577_99435C.1
aacccgcatccacatcactcatccacagctcgcagccgtattcctgtctcgtatcctctctcgccgctccgatggcccgcacgaagcaaacagcaaggaagtcgaccggcggcaaggccccccggaagcagctggccactaaggctgcgcgcaagtcggccccggccaccggcggcgtgaagaagccccaccgcttccgccccggcaccgtcgcgctccgcgagatccgcaagtaccagaagagcactgagctgctcatccgcaagctccccttccagcgcctcgtccgcgagatcgcgcaggacttcaagactgatctgaggttccagtcctccgccgtcgcggcgctgcaggaggccgccaagcgcgtcactatcatgcccaaggacatccagctcgcgcggcgcatcaggggcgagagggcttgagcgcccgtcgtgctgctcgttgttgtagtgttactagaagtagatggtggcattcgtttcgtggcttccttatcctgtaggagtaatgttctagatgtcttggcttcagtgcaatggactgtgattgctcatttctgaaatttatcaaaaaaaaaaagaaagggcggccgccgacaagtgagctc

SEQ ID NO: 184046 - DNA, 812 bp, Zea mays
  Clone ID: MRT4577_99436C.1
gccggccgggttcccgaactaagtacagttcatcgactctatatcgcttccacaaaaaccttccgaagatactcatcatggtctcctttacagccggtcttgtcgccttcgcgactattatgggcgtcatcgctgcccctgtggatggccccgccgacgtcactatctcgaagcgcagcagccctaacagctcgggcaccaacaacggtttctactaccagttttggactgacggccagcgtggcaccgcaacttacacaaacaaggcggctggcgggtactctgtgacatggtcgggcatctccgatatgacatctggcaagggctggaagtctgcacagcccaggaacattacgttcactggcaacgtcaaggcacaaggcaacttctatctagctgtctacacctggtcgcagcacggcgaaaactacattctcgaggactacggctcgtacaacccgtgcagccaaggcaaaacggttggcactatcaccagtgatggcagccaataccagatctgcacggtcgaccgcggaaacaactacattcagaactggtccatccgccagaacaagcgctccagcggtaccgtcaccaccgcaaaccactacaatgcgtatgctgcgcacggcttgaaccacaaccctctcagcgaagccgcttatcagattgtatcgactgaaggatttggaagctcaggctcagctgacattacagtgtcttagtcgttatattatcactattcgtttctacaattcagactgtacatgttatcctagcccagaattttactcttacactatcatttgacg

SEQ ID NO: 184047 - DNA, 593 bp, Zea mays
  unsure (1)..(593): unsure at all n locations
  Clone ID: MRT4577_99437C.1
aacccgcatcccacacactcatccacagctcgcagccgtattcctgtctcgtatcctctctcgccgctccgatggcccgcacgaagcaaacagcaaggaagtcgaccggcggcaaggccccccggaagcagctggccactaaggctgcgcgcaagtcggccccggccaccggcggcgtgaagaagccccaccgcttccgccccggcaccgtcgcgctccgcgagatccgcaagtaccagaagagcactgagctgctcatccgcaagctccccttccagcgcctcgtccgcgagatcgcgcaggacttcaagactgatctgaggttccagtcctccgccgtcgcggcgctgcaggaggccgccgaggcgtacctggtggggctcttcgaggacaccaacctttgcgcccgtcgtgctgctcgttgttgtagtgttactagaagtagatggtggcattcgtttcgtggcttccttatcctgtaggagtaatgttctagatgtcttggcttcagtgcaatggactgtgattgctcatttctgaaatttatcaatgaacttgttctgaaaaaaaaaaaaaaaaaaggggnncttgag

SEQ ID NO: 184048 - DNA, 804 bp, Zea mays
  Clone ID: MRT4577_99438C.1
tcaaaaacccgcatccacagctcgcagccgtattcctgtcttgaatcctctctcgctgctccgatggcccgcacgaagcaaacagcaaggaagtcgaccggcggcaaggccccccggaagcagctggctaaggctgcgcgcaagtcggccccggccaccggcggcgtgaagaagccccaccgcttccgccccggcaccgtcgcgctccgcgagatccgcaagtaccagaagagcactgagctgctcatccgcaagctccccttccagcgcctcgtccgcgagatcgcgcaggacttcaagactgatctgaggttccagtcctccgccgtcgcggcgctgcaggaggccgccgaggcgtacctggtggggctcttcgaggacaccaacctttgcgccatccacgccaagcgcgtcactatcatgcccaaggacatccagctcgcgcggcgcatcaggggcgagagggcttgagcgcccgtcgtgctgctcgtcgttgtagtgttactagaagtagatggtggcattcgtttcgtggcttccttatcctgtaggagtaatgttctagatgtcttggcttcagtgcaatggactgtgattgctcatttctgaaatttatcaatggacttgttcttgcaaagatttgccgtctgttttttacttttggaagacgtcgaacactgattgccgtgcaagcagctgatacgatcccttgtgcaatgttttgatgtaaatgtactagtaaaacgatttgatttcaaataaaaaaaaaaaaaaaaaaggaaaaaaaaaaaaaaaaaagcggcc

SEQ ID NO: 184049 - DNA, 742 bp, Zea mays
  Clone ID: MRT4577_99439C.1
cggagtacccgatccacatactcatccaagctcgcagccgtattcctgtctcgaatcctctctcgccgctccgatggcccgcacgaagcaaacagcaaggaagtcgaccggcggcaaggccccccggaagcagctggccactaaggctgcgcgcaagtcggccccggccaccggcggcgtgaagaagccccaccgcttccgccccggcaccgtcgcgctccgcgagatccgcaagtaccagaagagcactgagctgctcatccgcaagctccccttccagcgcctcgtccgcgagatcgcgcaggacttcaagactgatctgaggttccagtcctccgccgtcgcggcgctgcaggaggccgccgaggcgtacctggtgggtctcttcgaggacaccaacctttgcgccatccacgccaagcgcgtcactatcatgcccaaggacatccagctcgcgcggcgcatcaggggcgagagggcttgagcgcccgtcgtgctgctcgtcgttgtagtgttactagaagtagatggtggctttcgtttcgtggcttccttatcctgtaggagtaatgttctagatgtcttggcttcagtgcaatggactgtgtttgctcatttctgaaatttatcaatggacttgttcttgcaaagatttgtgtttcttacttttgtaagacgtcgagcactgattgtaaatgtactagtaaaacaatttcatttcaaaaaaaaaaaaaaaaaaaaa

SEQ ID NO: 184050 - DNA, 322 bp, Zea mays
  unsure (1)..(322): unsure at all n locations
  Clone ID: MRT4577_9943C.1
ccaaattccaatcgctcaaaaacnncgtgaccaggggaaatttttcttgtttcacacaanacaaaaacgcccaaaataccttttccgagctgctaaacatgggagtactacccgnggcaaaggaaaacgacactctggctgtggcgaaaatcaaattcggagacaacgataccctatcagctataacaacagcaatggtaaaagcgaacaatcccttccaaataactgacgtggatggttaatacactgcaaatccaagacacgaccctaatgcacaacctatagaggttgtgtctgaaatatcaccacttgaagctgatgt

SEQ ID NO: 184051 - DNA, 588 bp, Zea mays
  Clone ID: MRT4577_99440C.1
cccgggctgagcaattccaatgttctgcaccgactgctaggttctgcagttattgagataggtgtcagctgggtgttgacaccgaatccacaatccggtcgccgctttgcaatgggaagcgtgatatggatctccagtacttgctcataatcgtaactgctatggggtcttcgcacctgtggaccagaaacagagaaacccaatggttatttataaggcctgcatcttcactacaaaaaatatcctgtagccattatgcataattcttatatggaattctgaaatgatgctaacaagactatgatgaagaccggataaaaccaaatcttgattactgttttaatatagctagccagtaacagtaatgacgatttagccttggtgacgtaacttcttatggtttgaacataacggaaacatgcatcgtgcaactgttatgcgatgaagcgtgattgatccagcactcgaaggataagaccgttaatggtcttgcacaacacagggtgtgcatataagcactgacgtcgaaccatctgtactagatgaaagaccagctattcttactctatactcatgtggcctacacat

SEQ ID NO: 184052 - DNA, 789 bp, Zea mays
  unsure (1)..(789): unsure at all n locations
  Clone ID: MRT4577_99441C.1
cgggaaaaaaaaacaaaaaaaaaaaagtaacccgcatcccacatcactcatccacagctcgcagccgtattcctgtctcgaatcctctctcgccgctccgatggcccgcacgaagcaaacagcaaggaagtcgaccggcggcaaggccccccggaagcagctggccactaaggctgcgcgcaagtcggccccggccaccggcggcgtgaagaagccccaccgcttccgccccggcaccgtcgcgctccgcgagatccgcaagtaccagaagagcactgagctgctcatccgcaagctccccttccagcgcctcgtccgcgagatcgcgcaggacttcaagactgatctgaggttccagtcctccgccgtcgcggcgctgcaggaggccgccgaggcgtacctggtggggctcttcgaggacaccaacctttgcgccatccacgccaagcgcgtcactatcatgcccaaggacatccagctcgcgcggcgcatcaggggcgagagggcttgagcgcccgtcgtgctgctcgtcgttgtagtgttactagaagtagatggtggcattcgtttcgtggcttccttatcctgtaggagtaatgttctagatgtcttggcttcagtgcaatggactgtgattgctcatttctgaaatttatcaatgaacttgttcttgcaaaaaaaaaaaaaaaaaaaaaaaaaaaagaaaaaaaaaaaaaaaaaaaaaaaaaaaaaaaaaaaaaaaaaaaaaaaaaaaaaaaaaaaaaaaaaaaaaaaaaanggggggggccg

SEQ ID NO: 184053 - DNA, 410 bp, Zea mays
  Clone ID: MRT4577_99442C.1
cccacgcgtccgcccaagcgtccgcccacgcttcagcggtcgcatgagatcggcctcattcaccatcaccacccgcaccagacactagcatactcgaccactgatacagtgaggggagcactccgcagcgattgcccgttgaagcgcccatggaggcaccacctactgtggctacagcatcccgcacatacaggcgctggcacatcgtcgcctgcaatggcctccgcgccgtgatgtggatctgggttttccacacggctaagcaggatcgggcttagctcttgggtttgcgtcatccctgggatggacatgatgaccactctcatggtcatggacacaggcatgaagcatcatcatcggcatcttcacatttagttccgtactggctgctgacgatactttgcatgttc

SEQ ID NO: 184054 - DNA, 380 bp, Zea mays
  Clone ID: MRT4577_99443C.1
aaaaagccgaaatcaagctgatagggcaactaggaggaggattgcctctgagatgcctaatgagcttactctagattatgttaacatcagtgcattttccctaccagcaataaggacaaaggaattgatagctttgatcggatcgaggcattacattatgttattcttagagatgtcacatattgccatgccctacataaggcccgctatcagcaaagtgagctgtgcggcgcactacttctagtcgctaatgattgaaaagaggatagggctgattttctcaggaattagacaatcactatgctgaaaataagcttatacggctttacctgcaaagtcttgagactcactacaggaactgaatgaatgacagttaggtt

SEQ ID NO: 184055 - DNA, 243 bp, Zea mays
  Clone ID: MRT4577_99444C.1
cggccgacccacacgaccggtcccatcccatcccactaccatccatctttttttccacccaatccatccctttctgccgatccaattcaaattaacacaaacaaccccaccctcccttcaccaaatctaacttaaaataaaaaaatcattccctcccacctaaccctacttctcctttaaacctaccaaaacaattacctcacccacctctattcctacctccctaccataaattaatttctt

SEQ ID NO: 184056 - DNA, 527 bp, Zea mays
  Clone ID: MRT4577_99445C.1
ccgagcgcccacgcgttcgcccacgcacccgaggacaatgattttcaattttttgaaagcgcaggaaagcgctgagtgtggggctcttgcctaaaaacagagaggggacacaacaagagggctatattaggtcatgctcgacatataagtcctaaaatatgtctgacgttgacaaaaagaaaaaaacaatacagaataagagcctatcgcccactttgacctacaaaaggccgaagcatgtgttgcctgtaccagatgtcaggctccattttcaactcatcaatggctttctgattaccatggaaattggtcctgcttggtgaaattccagcattccataaaccggttggcagctttgaatatgcatgccacaatattataaacgtactctgtgtcgtatataaaatatctatttaatgccacggtctgattaatttgcactgaggatctccctctgttttctgacctaggccttctaacatcttggacttatgcagctttcatctttgctttaatgtacatgtctt

SEQ ID NO: 184057 - DNA, 172 bp, Zea mays
  Clone ID: MRT4577_99446C.1
aaaaaataggatttaccaactttttttttacaacaaagggcactcaaacccgcccgacttttttacagacacttttttacccaaaaaaaacaccagaacgttcctgggaataaaacttacaacgccaaatttgttgaaaaggaaaccatgtcacttaaaacatgctcaaacc

SEQ ID NO: 184058 - DNA, 722 bp, Zea mays
  Clone ID: MRT4577_99447C.1
cctcgaggccggccgggacccgcgtcactcaacttccattaccctaccgccagcacaccccactccactccgctcctaccactcgaggcatcatgggcctcgacaccagctgcggcacaggcggcggggggggcctcctcgtggctgtcgccacctccgccgaggagctgggatgcaactatcatgtaccggcaccggaggtgcactgtatctcccaggctgtcatactgatggactgcatcgactaccccctcaacgtgatgatggagcgccgtccggaacctgacagctgcggcaagaccaacagccgacaggccagccccctgatactggctctgcatctgctccatcggcggctccaactctaaaaacctggaactttcgcccatcatctcaaccaagtgctggtgcatcatcccctacagcatcacgacctacaccgactgctccaaggggaacatataacctacatcacgcacgacaacgaccgcctgatccatcgaccaaccattcctccgtcgccgccgggcggattatctatcgtcggcatgatgatatctattcaatctacgatgagatgaaccatgactactgtgtgactgctatgcactactaaataaatactactgcgtgtgaacacgtacgattgcatgtgcatggtactatgtacgtacaacgtcatccatgtatgtgtgtgtgacgtaggatacggacaaatagag

SEQ ID NO: 184059 - DNA, 359 bp, Zea mays
  Clone ID: MRT4577_99448C.1
cgttttcagcattcagaaacacaccaagcgaagcgcactagcaacaacctaacaacatgggctaccaagatataagccctgcttgcgcttctagcccttttagtgagcgcaacacatccgtacattattccacagcgctaactcgctcatagtgccattattccacaggtgctaccaccagttacttaaatgggattagaacatacagacgtgcaagcctacaggctacaactagagcttgcggcgagcgtcttacaacaaccaatttgccaaatgcaacaacaatgcttggcacatctaaacctacaaaccatcagaacgcaacagcaacaacagttggtgacatcactgagccacct

SEQ ID NO: 184060 - DNA, 608 bp, Zea mays
  Clone ID: MRT4577_99449C.1
ccgtggggccgaggtggctgccagccggccaatgtctaagcgaggcggagcggcccaggcggcccgagcctgggggagcgcgcagccggccagtggcggcctcgccggcggcctcttcccgggctcgcagtaggcccgagtcgtcgccgggagctcctgggagcagcgtccccgccctgctcccctcgctcccgcctcttgcggccccacggcccctcagcgcccgcccccggctccgcccgccgcagccgcagcccctggcgctaacggtcggtaacggcccgcgcgcgccgcccgccgggggctcgcgccagccacgagggagcgtccgcggcccgcgcgcccgcgcggcggaggagaggtgttaagtgtgatgcttccataatacatttggatgctgtcagctaagttcacttctgaactaaggggttcctccaaatgttggctgaaattcatcccaaggctggtctgcaaagtctgcaattcataatggagctactgtactggctattggaaggaggagattctgaagataaggaggtaaaacctgtttagaaattaaaaatgagttacgatttaaagaaaattcagatgactcattgtgagtg

SEQ ID NO: 184061 - DNA, 575 bp, Zea mays
  Clone ID: MRT4577_9944C.1
ggcgctaaccctcgctaaatcggggggggggcgcgacgaaccccgcagcacacggggctcatcctccctcgcctcggccctgcgagacgccaccgccgcagagccgtcgccatcggtcaaaagctggatcggtgcgcctgacgggttcgacccctgtagggagctggtgcgtgcggcgggggacgtgaggaaggtggtgccgggccggatattgtccttgcgaatcctgccgctgtccgaccggactgtggtggttgccgggaacgtgcacgggcatattgggttctgggatgtggatcgtctcgtggaggatgaggatggtgatggtgtagacggggtattcgagtattttcctcacagggggtctgtagggggcattgtgatgcaccccgctatgttgcataagatttacagctctagttatcatggtgaaatttgtctcatggatgttgagaaagagaactttaatacagtctacttgtgtgactatcccattttctcgctttgtcaagcaccaaatagtccaagctctctatattttgccgagggaaatgaattaaaactttttgatgaaa

SEQ ID NO: 184062 - DNA, 556 bp, Zea mays
  Clone ID: MRT4577_99450C.1
tttttttttttttttttaaaaatcgttggtgtcacgggcaccgcacaagagcatagctctgccatttattcccacagatacgatataaaacgccatacaaaacatttccagtcgatccataggaggaggccctagcacgtcacggtggacgagaccggccggaacccgaactgggtgctccaggcgtagctgaaggtgacgccctgccccggcgcaagcggggcgccgccgttgatgaggcacaccccgccgccgatctccttgagcttcgccgggtcgacggacaaggtggtgttgaagcccttgcagtccaccttcacgtcggactgggcgcagcggcaggtgttgcgcaccgtcgccgagtacaccggcatcccgtgcgcccacttgcccgtgccggactgcgtcaccacgattgtcgacagcgagcagccgccgccgcccgcatcactggagttgatgctggtgaagagcaccaagcaggccacgaggatcgcggccggctgctgctgctgcttcccgtccatttctttggagtcggtcctcgtgccgaatt

SEQ ID NO: 184063 - DNA, 477 bp, Zea mays
  Clone ID: MRT4577_99451C.1
gggtttgtttgttttttttttttttttttttttttttttttttttttttttttttttttttttttttttttttttttttttttttttttttttttttttttttttttttttttttttttttttttttggagaccccctttaaggcaaaggggggggggggggcccaaaacaaaaaaaaaaccaccccaaataaaaggactaatctaccatgagggaaaagggggcccttctaaaaccaaccccacccataaacccacaggtggaaaaaaaaagcaggtgagccaaccaaacggggataccccggtggttaaaaaaggggggcccggcccccgtggaacttttaaaaaaccaaaaagcggaaagaaccctggttccccccccgccaaaaaaacccccaaagtttttgcccttgggccccctaaagaaaaaacccctccccttttaaacccccaaagggccccaagtttttcttgtggg

SEQ ID NO: 184064 - DNA, 403 bp, Zea mays
  Clone ID: MRT4577_99452C.1
taaaacacaataaaacataaaaacaaaaacaaaaattaaacataaaaaaaaaaccaaacttacatacagaaacatatcaaccacataactctcatataatatactcctaaattcaattcacttcaccctccatatacaacctcttaatctaaaaaaacccttccattacccatcttaatcaccttgcatcacatccccctttcaccaccatacatactaactaccacgtcctcacctatcttccttcccaacaattgcacaccctcaattgctaatgcgactcccactgtactctcgcattaatcaccctcgccatagtggttacgctcaacctgaccattccactctccatctccctatcgactcatcctttccttttcttcccttcctttcttctcacgtt

SEQ ID NO: 184065 - DNA, 488 bp, Zea mays
  Clone ID: MRT4577_99453C.1
attcggctcgagcacccaccacttcccttttcctctctcctgtcctgtcctccacaccacacgcgggcacgagagagacacagggagagaagagagctcgtgcttgcatttccattgccggcgcctcttcctgtgatcgtcgcagcatcacgaccgcaccgcacccttgcgttagctctgtcttcttgtcgtacgtacgtttatttctttgcttggagctagcggtaaaggagatatggtggggaagagggagcgggactgcaagaacccggtgcgccggaccacgagcatgacggagttcgcgctcgcggcggtgatggaggaggacgacgaggaggcccagctgcccgacaacggcagcagcagcagccgtggcggtgggcagcaccagcaggactggctgtccgcgctcggcggcggcgccgccgcagcgcaggaggactggatcgcggcgtaccgcgcccgcgcggcgccggcaaaagcggggc

SEQ ID NO: 184066 - DNA, 289 bp, Zea mays
  Clone ID: MRT4577_99454C.1
ccttcttttttttttggggtttttataattttttttgggttattttttagcttttgatacattttatcctattgttggggcaccattgccgtaagccgagtaccaaaccaatgaacgcaaggagagaacgcgcaaaagattccaaggcccgagcacaaggggataacccgggcggcgcttaaaaaaaaaaggagaaaaacgcgagactttattgttaggaaaccagcccccccaaaaaaaaaaagggcccttccctcgtaaaaaaaaaaaaggcaggaagcccaccccc

SEQ ID NO: 184067 - DNA, 364 bp, Zea mays
  unsure (1)..(364): unsure at all n locations
  Clone ID: MRT4577_99455C.1
tcggcgatctagaactagtcggacgcgtgggcggacgcgtggngaaaaaaaaaaaaaaaaaaaaaaaaaaaaaaaaaaaaaaaaaaaaacgaacgcacaacccaaaaaaaacaaaacacggaccgtgcacccgcagcgcagttccaccctatccctaatgtggagttcagcacctaggcctcgctcatggtcatggcctgagccctgtgcctaaatggaaatcgcgttcacaatcccacaccccaaccgcatccggaacgcataaacatgaaaagcctgggcctgcctaagcctaataactaactcacactaactttcattgcgctcactctccctctcccgctttcgagaaacctaaacctgc

SEQ ID NO: 184068 - DNA, 483 bp, Zea mays
  Clone ID: MRT4577_99456C.1
cttcttggtcctcttcgaaaacgaatacattacaaggagaatgtttatttttcactatgtacatttttatatataaacattacataaacatacaacccggaggggggggaagggcaggcctaggcgaaaggggggggggggaaaaaaaagggcaaaaaaaaaaaaaaggggaacggcaacactgaaaagcggggaaattcaacccaaacagattgaacgacaaaaactcaaagctaatgcagtaccgggtatcaccctctcctgcccatccaactccctaaccttgacaagcccaaccaaaactcccaacccgaaaaatgcgcagagggaagaggcccggggtgccgggccccacattgaattgaacaacaacattggggcaagggtaataaaaccacctgcaacaactccatatccaattggttcctggacagcggtaaccctttgccccaagccgaagtcccccaggccgggagaaccacc

SEQ ID NO: 184069 - DNA, 375 bp, Zea mays
  Clone ID: MRT4577_99457C.1
gccttgttgctgtcgctgcgggccttggccgacgccgccgccgtcgacgacttggtctggacgcggatggcgtacagcgtctccacgtacttctgcacccgcttctactgcgcccgccgcgccgacttcacctgcgcttcggaggcgacggagtgcacttcatcagcttgtacatgagcgcctccaacagggtcaccacgtacacgatcacgagcatggcgcccttggtcacgatcgcgtacagcgccaacaccaccgatgcgagcttgaacacgctgagggcggtgcactccatggtctcggaggcgcgctcgggcttgcccgtccggcgctccacgaggaggcgcatgaccacgtcgggacgctgcacgcgct

SEQ ID NO: 184070 - DNA, 569 bp, Zea mays
  Clone ID: MRT4577_99458C.1
gaaaaaaaaattttttttaaaaaaaaaaaaaaaaaaaaaaaaaaaaaaaaaaaaaaaaaaaaaaaaaaaaaaaaaaaaaaaaaaaaaaaaaaaaaaaaaaaaaaaaaaaaaaaaaaaaaaaaaaaaaaaaaaagggggggccgttttaagggaccaaattttacttccccttttttgcaaggtaatagtttttttttgggggccccaaattaaatttactgggccgggttttaaaaccgtgggaatgggaaaacccctgggtttcccaaattaattccctttgaaaaaaatccccttttcccaagttgggttattaggaaaagggcccgcccggttcccctttccaaaaatttgcccaccctaattgggaatgggacccccccttttacgggcccttaaaccccgggggttggggggtttccccccaggggaacctttacttttgcaaggcccttagcccccgttcttttggtttttttcctttcttttttccccactttcgcggtttttccccgtaaagttttaaatggggggccccttttggggtcccattttagggttttacggcc

SEQ ID NO: 184071 - DNA, 280 bp, Zea mays
  Clone ID: MRT4577_99459C.1
cagatcgactacagagtacttttttcttatgatgactggcgtagaaatgtgtgatttgtgtgggcttttacatcttgcctaccattgcatgaaacattggagtttcttcaaaatgtgtgtgcatacttcttttgggaggtgggttgttttcttctggctattttctgagactcctacaggagccaaatttgtaatttagagacacttaattttgttaatcctgtctgggacacttaagtaacatctaaagcattattgctttagaatgttcacataaaat

SEQ ID NO: 184072 - DNA, 152 bp, Zea mays
  Clone ID: MRT4577_9945C.1
gcgagccatacaccaatttagggctgccccaaccctcacctactacattcacgaaaccttgcaccttctcaaaagtccagcgagcgaaagcagctccctcaaatgcacggcaacgactaatgcatcattgccaatcaccagaggaagagcat

SEQ ID NO: 184073 - DNA, 1187 bp, Zea mays
  unsure (1)..(1187): unsure at all n locations
  Clone ID: MRT4577_99460C.1
gtgttttcggccgtgcgctcgctggcgcaagccgcgcgaatcggatcgctgtccgcctctccatttcccctcgtccgcacacccgagcctcgcttccgcctcccacttcccaccaggccaccaccccgtccggcgatcccgatcgcgagacgagggtagcgagatcgagaggattgtcgcggctgccgggcggcgctccagttccgagtcgaggcgaggaactacacgtgtgatatctgcaactcatatggctgggacccacaagaagcgaatggaagaccgttttggtagttttttctcatttgatgaagattctgaaagtgaggacatatcgctggatgagttggaggaggaacttaaagagcacaagaactgtgatgtactagtaactattttaaccaatggtgaaaaacaacgaggcatggcaacattggttgagggcgacctaggccatactgaagaagctcttattcaaacccatatatgttcgataagctcggaaatcagaagcctccaggagaaatcctgggatataagcttgaaattgaagaaccgcaagttggttgagacaaagcttgctgggtttgttgaagagatagttgctcctcctggtttggtaaatattcttgttaatggagagtttcttttgttaggtaaatgagggttatgccagaagtctggagatccttagcagaaagttgaaatttgttcaagtggatccgttgattaatgcatcaaaagctctgaatgatattaagcaagaattggaaaggcttcgacaaaaggcactatccaagatttccagccatattatggagattttctttgctatgagaaaccctgggactaatatacagatattgcaacaaaatttgcttcagaagcacaggtatctcgttctgtttcttaaagagcatggttccgagacatatggtgatttgtgtgcatcatatgttgatacaatgaacaaggtgctgagtacatactttcatgtgtatgtagaagcattggagaagttgaagctagaaattggtgtacccagtgattttaatggacatgataccagtatcatcgatattataataagaggaagggagcatttgagaaatcatggtttcatgttttcgttaggtgaacgtgcaaatattctgaaggagattcatcaacctgncttggttccacatata

SEQ ID NO: 184074 - DNA, 698 bp, Zea mays
  unsure (1)..(698): unsure at all n locations
  Clone ID: MRT4577_99461C.1
ccggccgggctgtccccgccgcgcgagggccgcctcccctttctagaccccccaacggcgtcctctgcctcgccctccttcgcgtcctgcatgccagacaagtgggagccgtcgtcgtcgtagatgccggagtacagccccgacgacgaggacatgtgggagctggatctgaggggtggcagcggcggaggcgagaggcgggcgcgcgccggtgcaggtgctggggaatgtgacacagaggaagaggactccgacgaggaggaggtgcggccacggcggcaaacaggggtgttgggtcaccacgagcgggtggtccacgaccatgattctcaatgacggcgcagggtcactgtgagcagcagcgggccagccacacaatgcccattgtttgcaagatgttgagcgcatcaacagtggctggaatcttgcagcattcaagctcacaaaggtgacaacgttatagtggactaccccggaaaaattactgatggaacagtttttaattcaagctatgaaagagggaatacatacttggagttggagcaaacctgatttgtacttatatttcaccctatcaccctttaaattcaatcaattgcattgtcattcaaatattccggttcatcagagagtatttacaagcaataaatgcttacttcggagctctgaaaaaaaaaaaaaaaaaggggcggccctcn

SEQ ID NO: 184075 - DNA, 872 bp, Zea mays
  unsure (1)..(872): unsure at all n locations
  Clone ID: MRT4577_99462C.1
ccggccgggacgccgtctccagtccctcgctcctccgtccaacgccgccataggccacgcgggacaccagtgtcagacctgcgcgtcgtcgccaggcccttgcgccaccgaagttcttcgctcccctccgccccgcgctcgcgttctcgtgccgccgacgctccaccggcgccagatctgccttcccctctctcttcttcccctccctctctcattttgctgtggttttggcaaggcgacagctgacaccatggatttggcgcccggacgactaggcgacgccttaagaaccatagttccattgcactttccttcagcagcattagtttaggaatttcaaaaaaaatgcataatcacgactcggcacaagctggaaactcactagtttccagcaagatgaacatagttttatgttgatttgcagctttatttgttaaatgcaattgtaccttggcatattttctgcacacaaagtgctccagttggtttgttcacgtccatgtactgagcgttatggaactccactatgtcatcagcaacactttcttctgaatcttgcctgagccagatgtgaactggcatcggctttatctgatattcttgtgcttaaactttctctaattaactgcatgtcaacagattctacgtggaagattgatctttgtggagatggcaaaaggacacgaaagcaagtaggacaccctccccacgagaggatttcactgaacatgaaacatgagagcgccatcagcttatgccagatggcaaatatccccaattctncattgatgtcgcaaactatatacnaagcacaagnntatttttagctagcttatctttgatacactgctaccttgccatctgaaaggttg

SEQ ID NO: 184076 - DNA, 817 bp, Zea mays
  unsure (1)..(817): unsure at all n locations
  Clone ID: MRT4577_99463C.1
ccggccgggcagttgagaattcgctcctctccggccctcccccgccctggtgagcccctccgggcgacgtgtgtcccgttgcctttccttcgctcgacggccacctgttgccctcgcatggctctgcctgctcctgccaagcgtccaagctcccgctcgcccggcggctgcacgccgcagcgtctatccacccagatccgcacgatccccgctaatcgccgcaccccctacctcccatgcaacttctctagctcacccgcatcccggctcggcactgccttctccttgcacttcacttctgtatctagaccacctgatcacaattcgtcgtcagcgtcgcgccgtcgtctcagattgatgcaaggcgtgatgagaagctagaggcagcaactgcatatattgcaagaaaattgggtttcaaaccataccgataattttcttgcaagttgtgcagttgttgtctcaagcttgctgcctccctttgccaaaactacgaggaaaagcacatgttatattatcagtgaacacatcaggataaatcttaactgatatgtgttggtaatacacacatttaattggaattttgcagcatgatatatacagcagctattaggtaggcgttttgggtttttaggtcccgtttggttccattagtcctaagactaaagtttagtccagaaactaaacttaagttctatcctgtttggttntagagactaaatagattctaaacacattaaatgaagtacacaaagcctaaaatgcccctctccttattgcttgcgtgcggtgcagattctctatgcaagggtaatta

SEQ ID NO: 184077 - DNA, 708 bp, Zea mays
  unsure (1)..(708): unsure at all n locations
  Clone ID: MRT4577_99464C.1
cactcctatgggcgattgggttcctcgaggccggccgggaaactaaccctaaccattagcacctggcaaagcgattcgttgggagcagcagcggcgcaaggtgaggccatcatcgaagacctctcggcaccgctattgagatctcggtggggagctttggcgcaatgttgaacctctaggggcacgtccatggccttagcgggagtcacggcgcattgtgatcgagttgattccccgccatcgtcacaccgccgtcgcggatccgctcaacgccatgaaccactaaacctcctgcgtataccacgaagagccagtggccaaggatccgggtgttcagcaggtagaagttgctgagtaggagctcattgaagagaacgatccggttgaagagcccgaggaactcgcaggagaagcccctgagcagcagtcggttggtggaggttgtcagcattgcaaccactgctcaggcgaagatgaagctgtggaaggagacttccaggagttccaagactacgacgagttctaggtgtgggttagcggcaacccccagtcggctgcctggnaaggccgcggttatctacgtttcttttccgcactttgatttattgtaagaattatatggacgtctcagacgtatgatgtaatcgactatttcccttattaatactattttgagcactgtgcaaaaaaaaaaaaaaaaaagcggcc

SEQ ID NO: 184078 - DNA, 1941 bp, Zea mays
  Clone ID: MRT4577_99465C.1
tatgaatcgattgagagatgccagtcttcctgtcagtcattgagcccccttctttgtgtttggcggctccatccgaagaatagcttcgatcttatttggattagcttcgattccctttgttgagaccagacaaccaaggaatttccccttctttgctccgaagacacacttctctggattcaacttcagaccaacctatctgaaattagcgactgtctcctgctgtcacacccagttttagaaggcacaccgaatgcgaaccatgtacgtgccaggatcagttattcacgtacacagcagttacataacatggacatcatcacacagtgctcaaaatagtattaataagggaaatagtcgattacatcatacgtctgagacgtccatatagttcttacaataaatcaaagtgcggaaaagaaacgtagataacgcggccttcacaggcagccgactgggggttgccgctaacccacacctaaaactcgtcgtaatcttggaactcctggaagttttcttccacagcttcatcttcgcctgagcagtggttgcaatgctgacaacctgggggggggtttggtgtgtaaagcaagggtgagtacacatcaacatactcagcaagtatcctgtttggctgtaggggactacctttatgtggggataagtcaagcagttgcttttagttggtcaggttattacttactagtagaaagccaagttttagcattaacccaagttattaacccaatgtaccctttccaaacggaaagaataccacttaccagcaccataaccataaccagaaccatcaatctcataaccacctgtaccacaatgtctctgatcaagtaccactaatcattggagctcccttggccgctcataaccgcgagcacggctgatatatcagtttcataacactctgcagaggttgtgcactttacccacaagccgtgattcccattctgcccggagatcatgactctccattgatcactaccaaggggatccagcagggcatcactacgaagcttttacaaagattccccggggctgtagccacccgttaggtttcctaaatgcaccgcactcctccccaaggggcgaacccaaacttggcagagcgagccgcatacaccgagccccattgacggcacgacggctaagtgaactacaccccggatcctctaattattcagctaagggcaccccattccaccctcatggttgcactgttttcccgggcggtcatccaacgaacaggtccttacagagaggcactcgagaaaccactcgagcccactaatgtatcaccagtccaacatcataataaaaatgacaacatcgtatcataagtgttcacgtcatgttcattgattaaagtaaagcaatagcatgaatctaaccatagtagcccaaaagggaatcaagaactaagtaaatagaaagctagtcaatccttaggttgctcatagtatgcggggcagtgaattataaagtaaatgggacataataggtcagaggacacttgccttcaccaaacaaatactcagggtcttcaacctcgtagaactcgaagaacttgatctcaggagcagcggttcaccaaatcttaatcgttgattcctcgaagctcaggaatagatcgcaatcttggagatttggtataagatcgaacgagggtggtgcagatggtggctcaacggagcttcggtgcgcgggtgtaggtgttcgacggcgtgcgcgcgggagactcctccacacgtatgcagcgcggctgcgctcggggccgaggggaactgcgcggcggggcgggcacctacgcacagcacgctggggagtgcgcacacgagcacatcgcacccggcggggccgctggctgcaccggcacgggagcacgccagggcagagacgctgcgccatggggcaagcctcggccga

SEQ ID NO: 184079 - DNA, 1168 bp, Zea mays
  Clone ID: MRT4577_99466C.1
aggcaaaatagccgaacggaggatagtgttgccataacaattatgctcacaacatacttgtaaccatcgtacgtacatcatcacccatatcttgccacccacatcaagggaaaataaacaccatatctgacaaaaagaaacacatctcggaacaacgctcaaggtagaagcaaaccaaaaatgacacaaaaaatataaacatataacaaaaacgagaaaaatctgcacatgtttcctatactctaagctcgtcgaagggcttgcaaaaactgttcgtattccgggaatgtttctgcaattctttcaaccaggctgtccggaaacgctccgggctggggctgcagagcaggaagtttctgcatcaggggaataaccacctgctgtatgtccacgtcatccagagagcccaattcgatgtcttgggtctcttcatcaatgtctccttcctcgactgactcgcccgcagccgccgctagtgcatatctttccaggaattcctcttctgtttcttctctcgcatcgtcttcgtcatccgaatcctcatcatcatcttcggtgtcttcctcttcatcgttgtcatcaacatcttcagcaccatcatcatcatcttcattgtccccatcgtcctgaacttccttcagctgaatgcaagactccatcagtgatgcatagcagtcatgcaacaatttggtgccacccgtggaaagggacacgagatggttgatcacagtagatagcgtcagcacagctaacttgatctcggattcagatgacaggccaggattgaacaagctgcttgagacttgtgccaatgcagacgcccagatcgcaaaaccgttaccatcaacgttgttcaggacttgttcgatggcatcgggatagcagatgtagcacgaggatatcgccaacagcagtggtttccatagcccagcaggactgtcggatacagatttgaagcgggaaaacgctgcttgcgcaaaggattcggcaatagtctttctagtgtcttgtgctccaagggagaaatttggagcgtgcagcagtgtatggacgcacgagcatgccctccacgttgcggatgggtaagctgcaattgccctagtcacaaaattagagacgcggccgatgactgaactctcgcaaccattttcagactgcgacggaagcg

SEQ ID NO: 184080 - DNA, 154 bp, Zea mays
  Clone ID: MRT4577_99467C.1
aatagggaaaccagggcaccacgcacacaggggaacaacaacacaacaagccaaagacgaccgcacagaggacaacgaggacgaccacaaccacagacggagaagaaccgcgaacggcgcccaccaaggcgcagccgagcccaacacggcgaca

SEQ ID NO: 184081 - DNA, 1335 bp, Zea mays
  Clone ID: MRT4577_99468C.1
cccacgcgtccggcgcaacgtgtgtggaagatggcacggtaaaccaggaaccgatggccggttcgaccgccattgccgatcggaggatgaacaccagcacctaagaagatgtgagagaccgagggagagagaataagaacgccctgtgcggatctccctcaaacgcgagacgctgggatggatgacctcggggccgcgccgctcgcaaattttggcccgcgccttgggaatttctcgccatcgaagttaaatccgccgtagatccgttttcgccgtggccagaggattccgcgccgctaagcttgagaacgattcggtcgaagagcccgaggaattcgcaggagaagcccctgagcagcagtcggttggtggaggcaagtgtcctttgacctatctctgtcctattcattatttaattcacctcccgcttacacatttatgcctaaggattgactagcttttgttatccatgtccttgtttacctatctgggttggattattactgtttagctttatgctattgctcaactctaatcaatgaacatgatgtggttatctatgatacgctgttttcccgttcttctttatgatcatacttgtggttttcaaggggactcgagcggtttctcgagtgcctctccgtaaggacctgttctatggatgaccgcccgggaaaacagtgcaaccatgagggtggaatggggtgcccttagctgaataattagaggatccgggatgtagttcacttagccgtcgtgccgtcaatggggctcggtgtatgcggctcgctctgccaagtttgggttcgccccttggggaggagtgcggtgcatttaggaaacctaacgggtggctacagccccggggaatctttgtaaaggcttcgtagtgaatccctggccattcacctcgggagtgaataagggtcttgcaagcccgggctagagagggaatcacggcttgtgggtaaagtgcacaacctctgcagagtgttatgaaactgatatatcagccgtgctcgcggttatgagcggccaagggagctccagtgattagtggtacttgatcagagacattgtggtacaggtggttatgagattgatggttctggttatgattatggtattggtaagtggtattctttccgtttggaaaggatacattgggttaataacttgggttaatgctaaaacttggctttctactagtaaataataatctgaccaactaaaagcaactgcttgacttatccccacataaagctagtccactacagccaaacaggatacttgctgagtatgttgatgtgtactcacccttgctctaccccggga

SEQ ID NO: 184082 - DNA, 176 bp, Zea mays
  Clone ID: MRT4577_99469C.1
tttcttggtggactgcggatgtgtggggagggaaactgagtccttctgttggccttcatggaggtcactggtgaggagggtacaagggctgctgtagaattttgccggacctgtgtttggttattatactgtcagggcgtctcgccattttatatctgccattgtaccccttaatc

SEQ ID NO: 184083 - DNA, 905 bp, Zea mays
  Clone ID: MRT4577_9946C.1
ctaacgaacctaattgtatggctgttatagagatcatatatttatgtacgaaataaagcattaaaattagattttttttttatgtatacaacagttaatagatacgtttcctaatttcccgtgcatgcaaatgaaaataaactacgtgcatacaaggaatgagacgcatgcgcgagaggggctttatttctctgataccactgtcacacacgtaactcaccggcgagatcacccgagagcgtgagcagccacagtagagatcgagagggggataggatctcagaatagcttaaggaggaagaaggtgctcttccgctccctctgttttctcttctttttaataatttgttggctgccctcttgagttgctgaccgagctctatgtaggggatgcttgggccttagttgggatataacttgatgactgggcttaatagcttttgggcttctcttgggctccatttgggtcatgacattaccgctccctcgaaacacaacttgtccccaagttggggccgtaatgatgcccggatcccatggcctaatgatcaatacgacagggaaaatgaactccttgttatcaacaatgggtataggcttgctccatactggcattttctcaagcatgttgatgtggaccttaatgtactgactgaaacatcccaatgataatacgttgccattcagtgagtccattccgtacttctcaaaactacataaaattcctttcttttcttcaccaccaaaagcacatatatgatcatccaatgcagcaacagatgcatatgaaatagagaagtcattggtgcgagacccaccagtatgtctttctcaggagaaaaaaactagagatgataaccaggtcacactattataaccactaatcagtaatccatgctgcaagc

SEQ ID NO: 184084 - DNA, 1104 bp, Zea mays
  Clone ID: MRT4577_99470C.1
aggaaacttaacgggtggctacagtcccggggaatctttgtaaaggctacgtagtgaaaccctgcctattcaccttggtagtgtttaagggtttgatcggcccgaggcaagagggaatcacggcttgtgggtaaagtgcacaacctctgcagagtgttatgaaactgatatatcagccgtgctcacggttatgagcggccaagggagctccagtgattagtggtacttgatcagagacattttggtacaggtggttatgagattgatggttctggttatgattatggtattggtaagtggtattctttccgtttggaaagggtacatcgggttaataacttgggttaatgctaaaacttggctttctactagtaaataataatctgaccaactaaaagcaactgcttgacttatccccacataaagctagtccactacagccaaacaggatgcttgctgagtatgttgatgtgtactcacccttgctctacacaccaaacccccccccccaggttgtcagcattgcaaccactgctcaggagaagatgaagctgtggaaggagacttccaggagttccaagattacgacgagttctaggtgtgggttagcggcaacccccagtcggctgcctgtgaaggccgtgttatctacgtttctcttccgcactttgatttattgtaagaactatatggacgtctcagacgtatgatgtaatcgactatttcccttattaatactattttgagcactgtgtgatgatgtccatattatgtaactgctgtgtacgtgaataactgatcctggcacgtacatggttcgcattcggtttgccttcaaaaaaccgggtgtgacataagtggtatcaaagccgtgctgactgtaggaccgctaacctagagtagaatggtcgttctaaggaccatagacctctgtctctaccttgactttgatatcccttcaaaagttggtcataccgaccaaacctatgctttactatatattataccttgctaaaaaaaattgtgtttcattctgatccttcatttacttattacttgctggtcatattaattctgttctcacccttttgcttgcgatgtctt

SEQ ID NO: 184085 - DNA, 230 bp, Zea mays
  Clone ID: MRT4577_99471C.1
ccagcagatgtggctagtcgaagacaatacaattccgatgcacatacgttctggaagcacgcaggtacaccgaacaagtgtagaactgggcctggaaaccttgaatcagtcacaggccgatgctaatgttgaactacttccctggagttgagccgcaatcgtacgatggagcatcttgtgaacatgcggcactaattaatgcgagccgagaataatgtgggttccatcac

SEQ ID NO: 184086 - DNA, 568 bp, Zea mays
  Clone ID: MRT4577_99472C.1
ccggccgggacctgttctttggagctcgtggtcggtaactccaccgatgtagccacttcctcgcatttgccatcggcttaccttcaagaactggccaggactctgaaccgggacgcggtgaaggtcgttgtggctcgagtgcgcggaagaggccattgaagaccgtggaattgctcgctagaatacgttctccaccgtggtgctactcatctctatgggttcgggtctacgctacctagcgaccgtgaggtcacgagtcacctgaagaccaatttggtgaattacctggaatcgcaagtataaggttgtcagcattgcaaccactgctcaggcgaagatgaagctgtggaaggagacttccaggagttccaagactacgacgagttctaggtgtgggttagcggcaacccccagtcggctgcctgtgaaggccgcggttatctacgtttcttttccgcactttgatttattgtaagaactatatggacgtctcagacgtatgatgtaatcgactatttcccttattaatactattttgagcaaaaaaaaaaaaaaaaaatttgcggcc

SEQ ID NO: 184087 - DNA, 622 bp, Zea mays
  Clone ID: MRT4577_99473C.1
gccggccgttccgggcttttcttgtcttctccgcggtcccaccggtttggcttcggctccgacccgcgagcgcctgccgatggccgatgggggttggttcgcccaagatgtttgattgacaacttgctgaaaccacatttctatggaaagaacgagatcagtctagatctacttcgatgatgtgctccttggagcggagaatccccgagaaccacttcctcacccaaacaacaaaactgcacatattctggtgggatgcagacaagaatcacttcatttacaatgggagagaacgatccggtcgaagagcccgaggaattcgcaggagaagcccctgagcagcagtcgtttggtggaggttgtcagcattgcaaccactgctcaggcgaagatgaagctgtggaaggagacttccaggagttccaagattacgacgagttctaggtgtgggttagcggcaacccccagtcggctgcctgtgaaggccgcgttatctacgtttcttttccgcactttgatttattgtaagaactatatggacgtctcggacgtatgatgtaatcgactatttttccccttttaatactattttgagcaaaaaaaaaaaaaaaaaaggccccta

SEQ ID NO: 184088 - DNA, 311 bp, Zea mays
  Clone ID: MRT4577_99474C.1
attcggctcgagggtgaggtgtctatttctgtcacccaaacgcatcagagttgctaaatttggagctgaggcctgcggtgaatgagatcgtctcttttgtctcgacttccacgactttctttgggctgaggtctgcggtgaatttggagctgaggtctgcggtgaatgctattttcagcggtcttacttatttcatctcttactaggtgagtgtccgtgcgttgcaacggaaccgtataataacataataacttatgtatatatgtgtgttatattgttatagttatattcccgtgcgttgcgacggaagt

SEQ ID NO: 184089 - DNA, 2218 bp, Zea mays
  unsure (1)..(2218): unsure at all n locations
  Clone ID: MRT4577_99475C.1
ccgggatcctaagctccagccggttgcagcgtgtgtgagggtggtaaatcttctgtcccaccagtgttcacctctccccttcccaagtttgcccagtccctaggtggtgaccatcgtcagcagttagtccacctcgccgtgaccagagaacgatccggttaaagagcccgaggaactcgcaggagaagcccctgagcagcagtcggttggtggaggcaagtgtcccttgacctatctctgtcctattcattatttaattcacctcccgctttacacatttatgcctaaggattgactagcttttgttaaccatgtccttgttcacctatttgggttggattattactgtttagctttatgctattgctcaaactctaatcaatgaacatgatgagattatctatgatacgctgttttcccttctcttattatgatgtatgcttgtggtcttcaagggggctcgagcggtttctcgagtgcctctccgtaaggacctgttctatggatgaccgcccgggaaaacagtgcaaccatgagggtggaatgggatgcccttagctgaataattagaggatccggggtgtagttcacttagccgtcgtgccgtcaatggggctcggtgtatgcggctcgctctgccaagtttgagttcgccccttggggaggagtgcggtgcatttaggaaacctaacgggtggctacagccctggggaatctttgtaaaggctacgtagtgatgccctgctgggtcaccttggtagtgatcaatggagagtcatgatctccgggcagaatgggaatcacggcttgtgggtaaagtgcacaacctctgcagagtgtttgaaaactgatatatcagccgtgctcgtggttatgagcggccaagggagctccaatgattagtggtacttgatcagagatactttggtacaggtggctatgagatcgatggttttggttatgactatggtgctggtaagtggtattctttccgtttggaaagggtacatcgggctaataacttgggttaaagctaaaacctggctttctattagtaaataataatctgaccaactaaaagcaactgcttgacttatccccacataaagctagtccactacagccaaacaggatacttgctgagtatgttgatgtgtactcacccttgctctacacaccaaacccccccatccccaggttgtcagcattgcaaccactgctcaggcgaagatgaagctgtggaaggagacttccaggagttccaagactacgacgagttctaggaagtgggttagcggcaacccccagtcggctgcctgtgaaggccgcgtttatctacgtttcttttccgcactttgatttattgtaaagactatatggacgtctcagacgtatgatgtaatcaactatttcccttaatactattttgagcactgtgtgatgatgtccatgttatgtaactgctgtgtacgtgaataactgatcctggcacgtacatggttcgcattcggtttgccttctaaaaccgggtgtgacataagtggtatcaaagccgtgctgactgtaggaccgctaacctagagtagaatggtcgttctaaggactctagacctctgtctctgccatgactttgatatcccttcaaaagttggtcataccgaccaaacctatgttctactatatattataccttgctgaaaatcatgttttattctaatccttcatttactcatgattcattatttgctggtcatattgattctgttctcacccttttgcttgcgatgtcttctgatttattgtaaggactatatggacgtctcagacgtatgatgtaatcgactatttcccttcttaatactattttgagcactgtgtgatgatgtccatgttatgtaactgctgtgtacgtgaataactgatcctggcacgtacatggttcgcattcggtgtgccttctaaaactgggtgtgacagcaggagacagtcgctaatttcagataggttggtctgaagttgaatccagagaagtgtgtcttcggagcaaagaaggggaaattccttggttgtctggtctcaacaaagggaatcgaagctgatccaaataagatagaagcaattcttcggttgaaaccgccccccacaaagaagggggctcaatgactatctattngtctggcatctctcaatcgattcatatctagagtcgacccgcagg

SEQ ID NO: 184090 - DNA, 421 bp, Zea mays
  Clone ID: MRT4577_99476C.1
cccacgcgtccggccaaccgttggatacatcgctcatgaggccatggtctagaaggactagagcgtaaaggcagctggcgtgtggacatgcggcgcgaccaactacgtgacgcttgagatcaccatcattcatagagactacgatgcatacatcgtgaagaacctcatagatggcctagacaatgacaacagtactaataaggagatcgacgagcctgaacaacacgaccatagcaagagacagatcatgcagaaggatttgatctacgagaacattacatcgaaaggttcacatagacctcaagcagccatagaaggcaacatacgacctgagcattacaaggatgacctagactaaaataccgatctttaccaaccaagattgaatggacaaaatgtatgctattggacaacattgaat

SEQ ID NO: 184091 - DNA, 900 bp, Zea mays
  unsure (1)..(900): unsure at all n locations
  Clone ID: MRT4577_99477C.1
ggtaccctcgggcttgccggncacccgttcttcattgggtacctcgaggccggccgggacaccgccgccgaacttcgacgctacacccacaccctttcacagctctacgtttactctaatctcaccctaatcagtcaatcatcatggaggaggaagtcgcagctctcgtcatcgacaatggttcgggtatgtgcaaggccggtttcgccggtgatgatgcgccccgagcagtcttcccttccattgtcggccgaccgcgtcaccatggtatcatgattggtatgggccaaaaggactcatatgtcggtgatgaggcacagtcaaagcgtggtatcctgactctgcgataccccattgagcacggtgtcgttaccaactgggatgacatggagaagatttggcaccacaccttctacaacgagctgcgtgtcgcacctgaggagcaccccgtcctcctcaccgaggctcccatcaaccccaagtccaaccgtgagaagatgacacagattgttttcgagaccttcaatgctcccgctttctacgtctctatccaggccgtcctgtctctgtacgcctctggacgtaccactggtatcgttctcgactccggtgacggtgtcactcacgttgtccccatctacgagggtttcgcccttccccacgccatctcccgtgtcgacatggctggtcgtgacttgaccgactacctcatgaagatcttggctgagcgcggttacaccttctccaccactgccgagcgagaaatcgtccgtgacatcaaggagaagctctgctacgtcgctctcgacttcgagcaggagatccagactgccagccagtcttccagcttggagaagtcctacgagcttcctgacgtcaggtcatcacattggaaacgag

SEQ ID NO: 184092 - DNA, 262 bp, Zea mays
  Clone ID: MRT4577_99478C.1
aaattctacaggggttttcatatataaaggatgttcatcctccttcagaattttttcagcagcttcgttcaagagtctattcacagcttcgtcaacagcctcatttgttatcctaatcacatcaagagcgcccttcagggctggaccggcctcagggtcgtacggatccggagaaggagaaagctcggctataagtctttcacgttctgggggtcctacagatttccttccttcttataaagcaggacgagattcttcttca

SEQ ID NO: 184093 - DNA, 263 bp, Zea mays
  Clone ID: MRT4577_99479C.1
cccctgtttgaggggggctcctggggggggggggggggttttttcccccccaaagaccaaaacaaccctttttccccaaaaattaaaaaaagaccccaggcaagttttactggaaaccgcctgtcccaaggccgtaagcgggaagctgccgaacagttaccccccaaggcatgggaatggacaccggcggcggaaagctgccgaacagttaccccgcccaccaggacggaaagctggtgaagagcttcagccgagtggagccc

SEQ ID NO: 184094 - DNA, 320 bp, Zea mays
  unsure (1)..(320): unsure at all n locations
  Clone ID: MRT4577_9947C.1
atatattatttattnnntttatttttttgggggggaaaacaagaacaacccgcagcctaaaaaacaaagatttccctggtacaggggcaccccccatcaaagcctaggaaaccgggcaagggggcccaattaaggcctcgccgaagccccaagggcccaccccccgcctaggggcccacccccgccaaattttttccgggaaggccactccccccatcgggtgggtcacaaggcccccagagccaaaagcccccgtgttcccctcccggcggcaaaagggtcccccccaaggggggggccttttaagcctaagcaacccc

SEQ ID NO: 184095 - DNA, 1199 bp, Zea mays
  Clone ID: MRT4577_99480C.1
aaatttccatccgcaatctctctcgatcttttacgaaagcagtattcttttgagcaaatagtagttaattagtcgggcatgaagaatgcgagtgcgaggtctgagtaattaattaattaattgttacggtctaccttgggcgttagtatttgtctgtcgtcttgtctgacgcaaacagatagtaactccttaccactagctagcagatcgtttggacccagctgcttgttgtacgtgctacttgttgtttctttgattgacaaacgaatgaatcgatgacagtaactgattctgtctgaagaagatgcctgcttgcctgccgtgcctgcctctttgtgttgtgtagtgtgtgtgctgatgtggtgtgcatgcagaggatccatcaggtggtgcagcagacgtcgaggctgaaccaggccatgtcgtccgtgatgggggcgggaggaggcgcgtccgcgagggccaacatatccttcggtggattctacgatggattctgacggaacactggggaacagatgggtgtagctagtatacactgccgcgtactactggtggacgatgtaaataattattgggggctcttattattattattagaccttggtttaatgctacacagatacggacggacggatggatgggttataggtttattcaagttgatagtaactaaggggcatagggaagtcttaattagttgacaagttattaataactaatcaggcgcttcttgtagtcctcgaagaagcgcctgatttcagccaagcggtgaggtgggagctccttgatatcattgtaatgcctgtactcgggatcatcagcgcacactgcaatgatcttgtcatctgcctctccctgatcaatcatcggcataaggccgatagccttcgcacgtaggaaacagcctgggataacaggctcctgcattataaccagtacatccaaaggatcactgtcttcacaaagagtgcgaggaatgagaacaaggaggttgctgtgaacgactttctaccagcgagcgccgcttatgaagccatacagcactctatggatctgtatgctacatacatcgttgagggcctgaggaggtaggattctgatggctaggaaggtggggaggatgttgacgaaaaactgggagaccatttaccgcatggaacgagtaccgttattattttatttgtgtcgtgtatact

SEQ ID NO: 184096 - DNA, 130 bp, Zea mays
  Clone ID: MRT4577_99481C.1
tgtatggcctaaacctttatttgtgccattaggtaccttttcagatgatgacatcactcagatcgtctcaacaaacctagttgcttctctggtgcgcagcagagaacccacgagggtcgtgcagtacgct

SEQ ID NO: 184097 - DNA, 814 bp, Zea mays
  unsure (1)..(814): unsure at all n locations
  Clone ID: MRT4577_99482C.1
attgggtacctcgaggccggccggggcaatccattccataccattctccctagtctcccggactctccctccatccctccctccctaatcttctcgtccgtcgtctcccatggaacggctcatctccacgcccgccgcctccccgacccaaacccgtatccggggacccctttccctcccctctcggctgcgctgccggcccggcgcgatcgcgctggcgtcgccgctgcgccacgaggctctctccgccgcaccggaggaggcgcggagccagccgccgccaccggctgccgtcgggagtctgttcccaaaggcttgcactgctgcccttttcctattgatgacagttgttactagttccctgcactcgagccttcctgcctatgcatcgatgcaaccagttgccaaaactggtgggaggaggaggtctcttcacgacagagatactaagcagtggctgggctggttttttagctgggtgcttacataccttgtctgggccagaccatctggttgccctggcgccactgtcaattgggagatccagacttgagagcggactggttggcgccctttggggctgtggccatgatgcagggcaagtcattttcggcctgctcttcttgctactcaaggaccggtggcacatcgaggtgttccgtgcatggggaacaagagttgtaggcctgacccttctgatcatagnagccatgggtgtccgggaagcttcggaggtccagaagtcctcgctggtgctgggaggcgtggacaccagcagcatgagcagcaacgagcctctgcagcccgcttcagc

SEQ ID NO: 184098 - DNA, 1424 bp, Zea mays
  Clone ID: MRT4577_99483C.1
ctcgaggccggccggggcttgcattccttcataccattctccctagtctcccggactctccctccatccctccctccctaatcttctcgtccgtcgtctcccatggaacggctcatctccacgcccgccgcctccccgacccaaacccgtatccggggacccctttccctcccctctcggctgcccgcggccgcggcatggccgcggctgcgctgccggcccggcgcgatcgcgctggcgtcgccgctgcgccacgaggctctctccgccgcaccggaggaggcgcggagccagccgccgccaccggctgccgtcggcagcccgtgggagctgctcgggagtctgctcccaaaggcttgcactgctgcccttttcctattgatgacacttgttactagttccctgcactctagccttcctgcctatgcatcgatgcaaccagttgccaaaaccggtggaggaggaggtctcttcacgacagagatactaagcagtggctgggctggttttttagctgggtgcttacataccttgtctgggccagaccatctggttgccctggcgccactgtcaattgggagatccagacttgagagcggactggttggcgccctttggggctgtggccatgatgcagggcaagtcattttcggcctgctcttcttgctactcaaggaccggttgcacatcgaggtgttccgtgcatggggaacaagagttgtaggcctgacccttctgatcataggagccatgggtgtccgggaagcttcggaggtccaagagtcctcgctggtgctggagggcgtggacaccagcagcatgagcagcaacgagcctctgcagcccgcttcagctccccggaagaagaaagtcggtttcgcaacgttcgccacggggatcgtccatgggctccagccggacgcgctgctgatggtcctgccagcgctggctctcccgtcgcgcttcgccggcgcggccttcctcggcatgttcctggtcggcaccgtgttctcgatggggagctacactgcctttgtgggctcctgtagcgaggccctgaaagagaaggttcctaggataacagagaaactgacctgggctgcctcgctcgtagctatagccatgggtgtagccctcctggttgggcagttctttgggttcagcctgtactgatgctagcagctacggtacgtgtgttttactcgatcggcgcggtattgtttttctgtaagagcatcgctggcaattagtttgatattatcattatcatagatggttattgtttgtgagactactgttgcaactagacctgtcacctgcttactttacactgattttctgctctgtaaaaaaaaaaaaaaaaaaaaaaaaaaaaaaaaaaaaaaaaaaaaaaaaaaaaaaaaaaaaaaaaagcggacgcgtgg

SEQ ID NO: 184099 - DNA, 227 bp, Zea mays
  unsure (1)..(227): unsure at all n locations
  Clone ID: MRT4577_99485C.1
gactatgtngagatngancnatgtanatcctcctgtcaaaatnaaaatgnatanncgcctagtattgtgtcgactgccattctnccatctgctcccantcattangagacacctngtctgtcatggtaaggctgncaatctttcaaactaaagatctcctctnatnatatccgcttcgaattgttaatactctacgatagtgtttggtncataaatttgngatgcca

SEQ ID NO: 184100 - DNA, 346 bp, Zea mays
  Clone ID: MRT4577_99486C.1
cttttttttttttttttttttttttttttttttttttttttttttttttttgtttgcgggggagagcaaccacgtacccatctattcaaaaaaaaaaggaaggaagactacattgaggggtccaccctctagcaccataacaggaaaggagcatgaccacggccaagaaaaaaaaccaaaaaccctgattagcaaggacagaaaacaaataccactataaaaaaaaaaagcctacctggagaggggcccccctgcggaaaaaagggccagaccaggggggggcccacagggttaagaaggggggggcgaaacagggggggtccacacacaaaaaaagaggctggcc

SEQ ID NO: 184101 - DNA, 182 bp, Zea mays
  Clone ID: MRT4577_99487C.1
gacaagcttgcgcacacgcatggttctttctatgatggccaccaaaaaatggcggactgtgagctacgtcatgccgtcaatgactcgggatagaatgccagcacagtagtagcagggcgcgcccaacccaatgaggatggagtgaaagcttgtgatcagtggccacaaacaccgcaagagcc

SEQ ID NO: 184102 - DNA, 316 bp, Zea mays
  Clone ID: MRT4577_99488C.1
ctctcgggggccggacgctttttttttttttttgtggcaaagaacaggcctgctatcagctcgtatatgcagcctatcagagggcgtggagcagtacattgactaccaggccactgccaacaggcgagactccggaggaagtgaggaaaggcgacagcctggagatatcgagacatggaacttcgctgtgcaggagcacctcacgcctagcgcaggcgccagcccctagggcagtcagcgctaggacggaagcgagcgtgcccagctgcggacagtggggctgtgatctggagccggacctcgaacagagctagtc

SEQ ID NO: 184103 - DNA, 566 bp, Zea mays
  Clone ID: MRT4577_99489C.1
atagtctattcataaaaaatgaaaccacgccctgcatgagtggggtacgccatgcactaaatcccacacaaaaagaatccaacaaaagggacagtcagatgacggaacggggccatcggcccacagaccaaacgcgagaaaacaagaaactgcagagaggtccatgggccgcaggctcacaaccttgagcggcttctcaaatgcaaagcttgggagggcgcttgcacaccccatttttcatgcccacaacctcatgcaacaaaatgggtttcagagtcatgttggccaaacgctactacgccttggtacactcctcaacataaacttgcacaagcttgggaacatgctccttgctagtgggtgatgaacaccttgatcatttcttgggtgggaggggggcccttcaccttgctagcgaccttggccacgagcttcctcaccaggggcctgtggaccttcctgagaaattgcccgtcaattcacgttgggaacagagcctgcttaaccaagtgcgtaagacgcacacttgaacaataccatctgcttggagtgcttaacaatggtag

SEQ ID NO: 184104 - DNA, 371 bp, Zea mays
  Clone ID: MRT4577_9948C.1
aagacatacaccagaaaaccatgttatatttgacgcaacgactttacatttaaatgcgtttttttgcaaccagggctggcggatatgcattatgtattgcctccacacaacggggatagcaacctattatatgaatctggccaatttggaaagtacagacaagtttacaggtacaaatacacactatacaacacgggcaatacttaatgcttcttgcaccaatcagatcgatacaacatctagctggagtgcgagtcatcaaaaccagtgaaggcctgatgggaacacaagtgcccatctgcgcctgcctcatgtgaaatagaacacgagtacttgcatggaacgtggtcattgtgctcccatcttagaaa

SEQ ID NO: 184105 - DNA, 111 bp, Zea mays
  Clone ID: MRT4577_99490C.1
gtcttgtgaagtgtagtcatgctgttctaggtgctttggaacctgtcaactacgaaactggggcagaatggttccattctacttggctcttgaaccatacgctaaggctag

SEQ ID NO: 184106 - DNA, 537 bp, Zea mays
  unsure (1)..(537): unsure at all n locations
  Clone ID: MRT4577_99491C.1
gagaagcgggtatccctaaattcgcaacctccaacactatataactacagtgaaggtttgaattgtcgaaataagaggtttcacaatgaaaatcttcgccgttgccatcttcgctgcccttgtggccgtaggcagttccgcttcgaacgatacgtcgaaaaagtgcttcgatggaattaatatgttctgcaaggatggaaatccagacaggatcgtgcacgagtgccgggcgattatcccgcaatacaaagtctcaggaaatcatctgattaactttgccaaccgtcaactcgagatctcctacaagtacatgctcctcgccgcccagttcaagagctacgttaaggaccgtcccggcttccatggaaaattcaagggaactctcggcaccgctcctgggcaacaggngcattggcctgatcaagtacatgacgaagcggggtggaaagatgaagttcggcaacaccaacgagctgaccgacggagtctccgaggtgagtgaactgcaggccatggccaccgtcctggacacagaga

SEQ ID NO: 184107 - DNA, 376 bp, Zea mays
  Clone ID: MRT4577_99492C.1
atatttcgctcaaaatttttttgtacatttttatttttttatgtgattttttatcatttgtttagacggtgattgttttttatttagttgggggataatggggggcgggcccccattatttgggaagggagggagggggcaaccggaaagaaatagcccgaaaagggaaaacggatacaagggggggggggagggttgttccttaaatggcaaaaaagaaccaaaaagagttccagcccatccgggcgggaggcgtaaaaaaacctggcagaggaagggggggaacacccctcggggcataggagtgaaaaaaaaaatttgcaccccagccaccacccaaatggtttgaggggaaatggaaggggtcccaaaggcc

SEQ ID NO: 184108 - DNA, 134 bp, Zea mays
  Clone ID: MRT4577_99493C.1
ccggaaaaccggacgacccacgcgaccggctagaaaaggcagagaggctactcatgaaacaccccgaagcaccaggcagggggcaggcggggaagcaacggaggacggagacgaacaaggaacgtggacgggac

SEQ ID NO: 184109 - DNA, 184 bp, Zea mays
  Clone ID: MRT4577_99494C.1
ggatggcactgaacatacacacagaggaatttatttcatgtcctccagctcgcttgcatttcacagattctatttatcttgcatctcatagactttattccttactgaagactatcagtggcataactctgccttgctaggaagcactttttgaacctgttatggatatatattgccactgaaa

SEQ ID NO: 184110 - DNA, 248 bp, Zea mays
  Clone ID: MRT4577_99495C.1
gttgggcatgaaatttaaaacatgtatatattttgaatggaattattgatccacactaggagaaagaataagaaagctcgcagattggcaaaggcctcacaaaacactggctacagtgagaaaaaaagaggtgactaatagcgagtgatggatccaagtaggtttagactcaggagagctccttcgccatgccaaaggacttgccgagggcaatcttgcagaccgacatggtcttgttggcagacctg

SEQ ID NO: 184111 - DNA, 666 bp, Zea mays
  unsure (1)..(666): unsure at all n locations
  Clone ID: MRT4577_99496C.1
gggaccctcgaggccggccgggccgggattcttgtacacaggatgaatcaagtctacaattcccacatattcatttaccttcagtatcttcttcattcactatatctcaatattttgcacattcacttgtattttgatttaaccacagtccacaaccacgcgcggcgggggagattcggacgtcgctgtcggtgattcttgcggagggggagaaggtggcgccggcggacagtctggcggccgttgctgcttgggtgctgctgccatggcgcctagcgagcgaagacggcgaccggagtacaagtcacaggggctcggacagtcacgggttctgcagctccgaggagaaagtcagagcggggcactataatcattcattcggcaagatcagagcagacaacgacattacaagtgaaaggctccatttctgaacttgggaatacttgattctataagtgaaagcttgtgttgttgtgtagactcgattctataagtgaaagntgtggttggtgtgtgtgtcatgatcgtaaaaagctccgattaaagtgtcctaaggtgcaattaatagtttccaactaaactcttcgntcttcgntttattctcatatattcgatcttttaaatcactatcagacacaattctcattgattcaaacaagcttccta

SEQ ID NO: 184112 - DNA, 463 bp, Zea mays
  Clone ID: MRT4577_99497C.1
gccacaccaaactgtaaggaaagctttaactaactccaatttgattccactgacccactctaaacaaaagggggtaccaattctggacaatttcctgacagatttcataccaactatcttaaatcgcatgctgaagttgcaggtgctccatagcacaggaaccataacatccccgctactgaggtacaacttacagcgtttaagaacgacgtagcacccttgctaattccttgacctatctacatggggccatcatttatacgtaccactgcaacacaagctcctccaggtcctgcaagactgatgcaacagtgcatcttaccccactctacaaccaactttcttagcgttacataactaacttgccaatctgtgccaaggtgccaacattactatcaaacttgtggaaccgtttgtcctcaagatcatatagggaaccatccccagtcacatgtcctcatta

SEQ ID NO: 184113 - DNA, 305 bp, Zea mays
  Clone ID: MRT4577_99498C.1
ggcatacacccccaggcgacaagaacccaccggggggaaataaaaaaacaagcggggggaccccacccccagccaacaagagacagggaaaaacagaaccacacagccagagacacgcacaacccgacgccaacagcagacggacccgacaaccacaaccaaaacgaaaccacccaccgaaaggaacccacaaaaacccaccaccaacccccacaaacacagagcgagacaccgcaagaccaacgaccaaggcgacaccccgagccaggcgaaccacaggcagacacaccccccccaccaagagc

SEQ ID NO: 184114 - DNA, 632 bp, Zea mays
  Clone ID: MRT4577_99499C.1
aagaaaaaaacacgagtaaaaatcaaatcaggagacggggattccagagagcccctctcgggtagggaagggaaggagaggcgaagcggaggcgagatgggggcggccgaatccgtgccggagacctccatacacgaattcaccgtcaaggattgcaacggcaaggaagtgagcctggaaacctacaaggggaaggtcctccttgttgttaacgtcgcctccaaatggtacgctatctttccctgacagttggaagaatctgttcttggtattctcgtggttcgggagatgctgagacggttttgatgttctcgatgccgtcagtgggttcacggagaccaattacacgcagctgacggagctttatcagaagtacagggacaaaggtctgttctttgcctgctgtggttcttgatctgttgttgcgcctgaaatgtgaatctctctggaagttggtgcgtagaagtgggtaattggagtagtgcacgttgatgcttgttggaacagtggttcttgtcttctgtttgaagtggaatggcaaaaaatcacgaaaaatattctcctgaaaaaagtgtgcgagtagtcttgcacaagggagattttacattgcttgccacacagcattcatacca

SEQ ID NO: 184115 - DNA, 640 bp, Zea mays
  Clone ID: MRT4577_9949C.1
cattgggtacctcgaggccggccgctgtggaggtgctatctccaacgcgtcacttctcttctctgcttctcgcttcgcttgcgattctgcgaacctgtacctccctgtgttgcttgggcatgatgtactaccacttcgtgtatacagactggcagggagctcagcgacaaagtgacgacgaacatatcatcagtcggcctacgccgaagctgtcccccggaagcctggaggaccttcttagcgcgcacggcccttcgacacactaatgtctgaccgcctgacccagcaccaccatgtgccaatggaactgcgcttggacgagcggcgagtgcctaactactccacgcgtactaccaggacgatctggatgacgaccgcttgctccagaacacgagaagatggaggctctgatagctgatggatagccgcatgagccgatggatttgagactatactttgcatcactgcttgctactgcgtgcgctaggagccccagggagaatcagatgctcgagtagtgctcttcctctacgagatgtgatacatgatatgtgcatgtggtatcgcaattgctagtgagaatggtgtacaaggcattatgcgacgaggtgtggtaaaattatctccgcagagtgctagt

SEQ ID NO: 184116 - DNA, 731 bp, Zea mays
  Clone ID: MRT4577_994C.1
tattacatggaaggcagaccggctattggctccattgctccaacgtctgctttggctggcttgcctcgatgcaccggatgcagtgaggaatccagtcgaacgacagttttgaaggataggaaggggagctggaagcagtcacgcaggcagcctcgccgtgattcatatggaacaagctggagtcagtttctgctatgccactcactgtttaccttaagattattacctgtgttgttgtcctttgctcgttagggctgataacataatgactcattagaaaaccaaaaaaaaaaaccgtgctcccttcttgacacaacaacagttgctgcctttttaccagcagtttggggctaaccccgcaacccttttaaaaatacaacaattgttgccctttgtccaacttgcttttaaaaaaccaaaagcctcctaccaaaaaaaaatcattggtggggccctcttttaaattgattattagttgtaattcaaaaaaaaagttttttggataatgtatgtggccaaccaaaaataaaaagttacatttccaaattttaatgtgaaattggtctccaagggtgttcaaaaattacttttcctaaaattgggagtaacaagcttttaatccaaaaaaaaaaaaaaaaaaaaaaaaaaaaaaaaaaaaaaaaaaaaaaaaaaaagaaaaaaaaaaaaaaaaaaaaaaaaaaaaaaaagcacctgcccgggcggccgctcga

SEQ ID NO: 184117 - DNA, 592 bp, Zea mays
  Clone ID: MRT4577_99500C.1
ctcgaggagctctccgtcaagcgcctccgtggcctcgctgagtcagagcccatctccgtctccagcccacgccttcaatctctatcgcttaaggatctgtacaacggccagtgcttctcctgtttgatcactcagtcgccaaacctcaaaaccctcaagattatcagatgcgcgggtaactgggatatcgtgctccaggacgttccaagggattctctcctagccgagctccatctcgagaagctgcaggtcagtgactggggtgtagctgccttatatgggctcgaggtactctaccttgccaaggcacctgaggtcactgatatcggattagctgagcttgctgctaagtcgccacgcctccgcaagctgcatgttgatggttggaaagcaaacaggattggtgaccgggggcttgcggctgttgcacagaaatgttcagcttgcaggaactggtcctcattggtgtgaatttgacatcattaagtcttgagttgattgcaacgaactgccccaccttagagcggctcgcactgtgtgggtccgacacgtttggtgatgcagagatgtcatgtgtcgcctccaaatgttc

SEQ ID NO: 184118 - DNA, 420 bp, Zea mays
  Clone ID: MRT4577_99501C.1
gtcaagcttgctgagctagccgccatggtctgcctcgccgccgactccttcaaggccgcggccatcaagggtcttgccggtagctgcatcttcggaaggaagctcgccgacgccaggccgtgcggaccgctgcatgcgcaggccccgcgcagccgccgtggtggccaagtacagtgacaagagcgactactatgacctctgcgacatcagcaacgccaccggacagtgggacctgtacggctctgacgcgccctcgtcctaccacccgctacagagcaagccattcgagacgttcgctgatccgttcaccaagagaggtctgctgctcaagttcctgctgctgggcggcaggctcacttctggcctacgtgagcacgtatgcgataccggaccttctgtcgatcatgaagggacctaagg

SEQ ID NO: 184119 - DNA, 418 bp, Zea mays
  Clone ID: MRT4577_99502C.1
gttggcttctcctccccctccggttcgggttcgggttcgtgaggcatctccagggcgttcaggttcatagggtagagcatgatcagacataggccggctgtctggatagttagagctaccggcctgctctcgtacggcaagcgctcgaactggagtcactagacagaccactaccctccacaactccttcagcacctacggggaggtcctcgagtccaaaattatcctagatcgggacacgcagacgacccgcggcttcaggttagtcaccttgttcactgaggaagcgatgcggaacgccatcgagggcatgatcggcaaggagctggacggccgcaacatcaccgttaacgacgcccagtcccgcggcggccgtagaggcggcagaggcagctacggtggtaggccgaggaagcgg

SEQ ID NO: 184120 - DNA, 281 bp, Zea mays
  unsure (1)..(281): unsure at all n locations
  Clone ID: MRT4577_99503C.1
gaacaggcaggcgcgngcaccaccgcgcagagaagcaacangcgagncgaaggggcaaaaacagaaaccccgcgccagaacaacgccgagacnccgaaagaacggggaccagcgcggcaaacggccaaaggcaccagacagngnagcacnagcggacgagggcgccagaaacgggncgaaaaacccaagaacgacacgcgagaggcgagnagcaagaggaccagcacggcagcgcaagagccggagacagcgaacgggccaaaangaacacaacagagaag

SEQ ID NO: 184121 - DNA, 374 bp, Zea mays
  Clone ID: MRT4577_99504C.1
gttgtctatttggaaaatccggtcgtttccccccaagggaaaaagttagccaaaatttccagatttgcctccactcatgttttttccgaagcggagagattgataagccgatctgatcattcggtcctctatgcaaaaagttgagagcttttgcaaggcctggtggaccccttcatgcctaaaaatcccgggcccaccccattacaagtttggccccctttgttcccccttgacctttttttgccagaccagcccgaaagcaaaccccgggaaattgccttaatacccgacatttattgttcaaaacaagatttggggacaatgaagctaaaactgtcccatttttacatttaacgggccccaaaatttttttg

SEQ ID NO: 184122 - DNA, 379 bp, Zea mays
  Clone ID: MRT4577_99505C.1
cctttggtacatttgcatatctcttatcttcattgtgtgccaaggctaagactaatatgttttcatgagtatctcatgtattaagtcttagattgaaagggaaatggagtattcggtaaagacatcgcttccactcaactccgttggtattatccactctttgccggtatcccgctgtctctccgtctttggtatattcttcactcatgttttatttgccaaaggggagaaagtagttatttaagggcttgtatttcactcaaagtatccgcttttggcgattcatgccaaagggggagaaagtattagcccaaagcaaaaggaccgcaccggccaccacctaggtttagaaaactaataactttcaattggtaatttt

SEQ ID NO: 184123 - DNA, 488 bp, Zea mays
  Clone ID: MRT4577_99506C.1
gcgcaagggctgtatgaaggccaccgtcgacgacgaggacgccaccgcgttggtaaccacggaccggttcatgaaggacctgaccaccttgacgatgaaaaacgagaaggtggtggtgcactagggcttcatcctcctcatcatcgccatgggcatgaactacatgcccaagtactacgtattccagctgatatggcccgtttgatcggatctaggcgacaaggtccggatggtttccagatcctctccgccgtgtgatcggatgtccctgacagggcccgggtgaggtccgtccgcaggagtttggagcttgtactctatttgattacatatctgcgagattgagctgaacaaggtggatcatgctttgtgggcaaatttgaaggattcggtataatacttttggccgggcggcagttttctatacatggcatccacaatgtgacggctatgggaactgcacatgttatcatggtatgcactatatg

SEQ ID NO: 184124 - DNA, 215 bp, Zea mays
  unsure (1)..(215): unsure at all n locations
  Clone ID: MRT4577_99507C.1
cccctttnttttttttttttttttttttttttttttttttggggaccggaaatcaaggtttggaattttaattgctctggaccgtgaagcaccaaagctccaaaattaggacaagggtgttacacttatacttaacccgccccaacttggtcccttttaaaccagcaacacatttatcactgggggttggttggggtttaaatccaactgaaacg

SEQ ID NO: 184125 - DNA, 362 bp, Zea mays
  unsure (1)..(362): unsure at all n locations
  Clone ID: MRT4577_99508C.1
gggaaaacctagcacattgttagccaattggtcaaaagtcaaaaccaattttgtggtccggtcagtttttattttgacaggggtggcagggcaacaacagatttttagccccgcacaacacaacagcaaaggaatcgaagccttttttcgagagcgacggatcttgtcgcgctcagtgataacgcgatcgggggtgatttttttaagggacgcgcaaccgctcagcgccatggggattttgagctcatccctaagaatccggagggcttttttaacccttgccttgccgnccacgggggggggaaacagnacgggcctttcaaaaaaaactccngaggctcccagcgccaaggccttgaaca

SEQ ID NO: 184126 - DNA, 4369 bp, Zea mays
  Clone ID: MRT4577_99509C.1
aattcggcacgaggttattgtgaaagcctttctagagcgcctagactggagttctacctcctcggcatcttcgcagaaggatttcattcttcttgctgcctgtgaagcacatcagacgcttccccagagtgcagaatttcctgctgatgtgtttacggcttgcctcacaacgcccatcaaaatggctttgcactggttttgtaagcgaacatcactccatggtcctctggatcgttctcttattgaccaaattcctggaaggcaaaatgaccgtaaaacacttcttggagagctcaattggatttttactgctataacagatactatcgcatggaatgttcttccacgtgatctgttccaaaggcttttcaggcaggaccttcttgttgctagtctcttccgtaacttcttgcttgctgagagaatcatgcgatctgcaaattgttctccagtttcttatccgttgttacccccaacacatcaacaccatatgtgggatgcatgggacatggctgctgagatttgcctttccaagcttcctcagttaattgctgatccaaacacagagtttcagccaagtcctttttttatggaacaattgatgaccttcgcgtccgggcttgatcatggctctaaggacaagaaacctcctgaattgttacccatagttcttcaggtcctgcttagtcaaccacacagatctagagtgcttgttctgcttggaagatttcttgatatgggaccatgggcagttgatttggccctgtctgttggaatatttccttgtgtgctcaaactgcttcaatcaagtgctatggatatacgtcaaaatctagtgtttatatggacaaaaattctctcccttgataagtcatgtcaggttgaattggttaaagatggaggacatgcatattttattaagtttcttgacagtttggatgctttcccagaacagcgtgcaatggccgcttttgttatagcagtcattgtggatgggtataggatgggtcaagaggcttgtatgaatgcagggcttatagatgtttgcttgagacacctgcaacctgagaatcctcatgattcacagacagaacctttacttctacagtggctttgtttatgccttgggaaactctgggaagatttccctgatgttcagctgcttactttacaaacaaatacgccagaaattgtactatgcttattgtcggagcctcaacctgaggtcagagctgctgctgtttttgcacttgggactctcctggatactacatcatcaaatggcgctgatgatgattctgactatgatgaaaaggtgaaagctgaaataaatgtagttcgaagccttctgcagatatcttcagatgccagtccccttgttcgatctgaggttgctatagcgcttactcgctttgcattgggtcataacaaacatctcaaatctgttgcttccgagtattggaaacctcaatccaattcattgctgaaatcactaccatcattggcaaatataaataatccaaacaatgtttacagtcccaacaatattctacaaggcaggattggtcctgtgttgagggttgccagtgatagcggtgctgctggtcgtgatggaagaatgtctacaagtagcccaattgcaacaagtagcatcatgcatggctctcccgagtcagacgattcttcccaactctctgattctggcttattactgagagagaatgctagtaatggtggtcccggctacactaggtccaggcctgttgataatgtcatttattctcaatttatatcaactatgtgttcttttgctaaagatccttacccaagaattgcaactattggtcggagagcactgtcccttataggtgttgaacaagtagtcatgaaaaatactagatttaatagtggaggtgcacatcggggagagacatctgcttcaaactttggaatggcacgctcttcatcctggcttgatatgaattctggaaacaacttgataaaatttaggacccctcctgttagccctcctcagcatgattttcttccaggattacgccgagtgtgttctatggagtttggacaacatcctataagttcacctgatggcttagctgttccccttttaagctccgctgcagctaccagtaatgctgaactaagtatactccctcaatcaacaatttataactggagttgtggtcacttctctaggcctcttttaattggctctgatgataacgaagaggcaaatgctagaaggcaagagagagaacgacttgcactagattatctcgctaagtgcaagcggtcaggaatgagcacgtacactagttgtcattaggtcctaagtggttctctcccataaacattgcttggtattggctgctcactgggcgatgggagtggtgcttacgaggcctgatcgcacatttctggtcagaaagggtgttgtatagatagaagtatacccacagattagtttgcatagacagaggtctgcgtacaggtgttgttgaataggtagatgccattgtacatctaagatagcgccaaataagtgaacatttctaggttaaccaaaatgtaaatagacaccgcgtttcgggttgtcggtggctcagcattcctccttttgaagatgcttgtgatgatatgagaaatcaggtttggtaggggctgctgcctgggcaagtggggtatgtgcatgtgggcccagtctcatcggttcagggacatcgagctgctggtcgcagtattgtgattgactggcagcagcaatctggttatctgtatgcatctggtgacatgtcttccatcttggtatgggatcttgacaaggaacaacttctcagcaccattcagtcaactgctgatactgccatttcttcactgtctacatctcaggttcgctctggacactttgctgctggttttgctgctggttctgtcaggatatatgatatacgctctcctgatagggttgtctatacggccaggccacacgcaccaagaacagaaaaggttgtaggcatagggtttcaacctgggtttgatccttacaagattgtaagcgcatctcaagctggagacattcagtttcttgatgttagaaggtcagcagaaccctacctgactattgaggcacacaggggttcacttacagcattggcggttcaccggcatgccccagttgttgctagtggctcagccaagcagatgattaaagtgtttagtcttgaaggagagcagttgacaataattcgctaccagccatcttttatgggccaaagaataggcactgtgaactgcctttcttttcacccatacaaatcactcctatctgctggtgctggtgataatgctcttgtctctatctacgccgaggaaaattacaagtaaggtgaggcctacatctcatgacaatgcagccacaaggcaaccggcaggcctggtgtttttttggccaagtgatgctcccccgcagcatggtccagctacaagatccaagatggcgtgaagaggctcccggtgcgtattgcctgttgttggacgacgtgtgcaatttgtaagatagagccaagattcgttagccgcctccttgcagaaggtttgtggaacccctaccctgatcatgtcattgaacttggaggctccccccaaataattaatcatacctaggttaaccaaaatgtaaatagacaccgcgtttcgggttgtcggtggtcagcattcctccttttgaagatgcttgtgatgatatgagaaatcaggtttggtaggggctgctgcctgggcaagtggggtttgtgcatatgggcccaggtagtatggttgcacatgtctgctcacagatgctgttgaatggaaggaatgttgtctagtcgcttgcattgtaaccattggagattgtccatttgtatgtatggatcttgtctgtacatctgtaatccgtgcgatggtgtgttttatggaacagtccaaggcttcaggtcttgtggaagagaaaagtgtatttgtccagctaaaatatggcgttagatgggggtagtattggcctgcatgaatgaatgaatgaatgttgagtcatttgcattgtaattgtaacccttggatagatgactgcccgcttgtatatatgagtcgtgtttgtacagttgtctgctttctgtccccaagttgtaatccgtccaatgatgtgttttatgctggtgcattccggtagagatgaaccggaggtgctggaacatataggtggtcttgtggtctgtaactgtaatggatatgtgaatcttaatatgagtaattgattaccgccgcgtcctggacatggacaataaaaaaaaaaaaaaaagggcgccaacagaaa

SEQ ID NO: 184127 - DNA, 309 bp, Zea mays
  unsure (1)..(309): unsure at all n locations
  Clone ID: MRT4577_9950C.1
acagaacancatgaagagtgtcagtgttctcttcttgtgcctggctctttcaactgccagcgcctttgaaatgcatatgccctgcccctgcgcggttctgcaaggcttttacagagctggcccctgcctttctacgattatgggcgcctgcgatctatacccctacgctgagtacctgaaacagtcgcattacactcaagtggcatatgacccctactactccgggtgttttcagactagcgccatgtaccatacgctcctactacactgctgacatgttcacaccatgatgatagactttcattcctt

SEQ ID NO: 184128 - DNA, 2148 bp, Zea mays
  Clone ID: MRT4577_99510C.1
aatttatgacccctcctgttagccctcctcagcatgattatcttctactaggattgcgccgagtgtgttctatggagtttggacagcatcctataaattcacctgatggctttgctaatctccttttaagctctgctacaggtcccagtaatgcagaactaaagaaacttcccgaatcaacaatttacaactggagttgtggtcacttctctaggccacttttaactgcctctgatgataatgaagaaaccaatgctagaagagaagagagagaacggattgcactagatttcatcactaagtgccagcgctcctcctgcaagattacaagccaaattgctagttgggatacaagatttgagttggggacaaaggcagctttattattgccattttctccgattgtcgtagcagctgatgaaaatgaaaaaaataagtgtgtggaactatgacgatgcacaaccagtgaactcttttcacaaccataagttgtccgacagagggctatctaaacttttgcttatcaacgagcttgatgagtgcttgcttttggctgcctcaagtgatggaaatgtacgcatatggaaaaattttgcttgtaagggagggcagaaacttgtaactgctttttcatcagttcagggacatcgagctgctggtcgcagtattgtgattgactggcagcagcaatcttgttatctgtacgcatctggtgacatgtcttccatcttggtatgggatcttgacaaggaacaacttctcaacaccattccgtcatccgctgatagtgccatttctgccctgtctgcatctcaggtccgctctggatactttgctgctggttttgctgatggttctgtcaggatatatgatgtttgctctcctgataggcctgtctatgtggccaggccgcatgccccaagaacagaaaaggttgtgggcatagggtttcagcctgggtttgatccatacgagattgtaagtgcatctcaagctggagacattcagtttcttgatgttagaatggcagcagaaccctacctgactattgaggcacacaggggttcacttacagcattagcggttcatcggcatgccccagttgttgctagttcagccaagcagatgattaaagtgtttagtcttgaaggagaacagttgaggataattcgctacctgccatcttttatgggccaaagaacaggcagtgtaaattgcctttcttttcacccatacaaatcactcctggctgccggtgctggtcataatgctcttgtctctatctatgctgaggaaaattacaagtaagatcgaggcctatatctcatgctcatgataatgcagacacagtgcgatcgacaggccttacatttttggccaagtgatgctccacagcatggtgcagcttcaagatccaagatgatggtaagctttgtcacagagaaggtgttgatggctccatggctttcggtgcatattgcctgttggacggcgtgtgcaatttgtatgatacagtcaagaactcaagattcattaggcctccttgcattgtgaaccctaccctgatcctgccgttgaacttggaggccccatcaacaaattaatcatacctaagttaaccaaaatgtaaatagccagtgcattcgggttgtactttgtcagcattaatccctttttcaagtgtaaaaaggtctgaaggtgcttgatatgataaacatggcttggtagtggctgctgactgggcaagtggggttgtgcatatgggcctggtcgcacatttctgctcacagatgatgttgaatagatagatgtctgctcacagatgaggttgaatagatagatgtctgctcacagatgttgttgaatagatagatgcatttgtccagctaatatagcgctagatgggggtagcgttggcctgcatgaatgaaggaaagttgtcgagtgaggagtgaccttcattgccattctgtgccgcaacaagtctccatgtgttatcagatggccctgtagataatacatatatttgtagatgtgttttgttcggtgaattgtgctgaccgctgagtaaaatgtattgtgaacgttgttgataaatgctattgtaatgaatttgcaacaagaaaaaattatatgctattgtagtgt

SEQ ID NO: 184129 - DNA, 810 bp, Zea mays
  Clone ID: MRT4577_99511C.1
cattgggtacctcgaggccggccgggattgattcctgtttgcaactccaatcaaaccaacaagacacatcacttcaatatgacttccgtccagcttgagacgccgcactccggcaagtacgagcagccgactggcttgttcatcaacaatgagttcgtcaagggccaagagggcaagaccttcgacgtcatcaacccctccgacgagagcgtgatcacccaggtccacgaggccaccgagaaggatgtcgacatcgccgtcgccgccgcccgcaaggccttcgagggctcatggagacaggagacacccgagaaccgcggcaagctgctcaccaacctcgccaacctgttcgagaagaacatcgacctcctcgctgcggttgagtcgctcgacaacggcaaggccatttccatggccaaggttgatatcagcatgtgtgttggctgcctgagatactatggtggttgggcagacaagatcaccggcaaggttattgacactactcccgacactttcaactatgtcaagaaggagcccattggtgtttgcggtcagatcattccctggaacttccccctcctcatgtgggcatggaagattggcccggccattgcttgcggtaacactgtcgtcctgaagactgccgagcagacccctcttggtggtctcgtcgccgccagactcgtcaaggaggccggtttccctcctggtgtcatcaacgtcatttccggtttcggtaaggtcgctggtgccgctctctcttctcacatggacgtcgacaaggtcgccttcaccgggtccaccgtcgtc

SEQ ID NO: 184130 - DNA, 157 bp, Zea mays
  Clone ID: MRT4577_99512C.1
agaatacaaccaaggaggtgatagccaatgacggcatctcacgatatgttacatctaaaattaagcttcacaaaacccatattataaacttcgcacttctcacatattaatgtgacctatacttacacataacattatgcagtcggcttctacaaag

SEQ ID NO: 184131 - DNA, 470 bp, Zea mays
  unsure (1)..(470): unsure at all n locations
  Clone ID: MRT4577_99513C.1
aaaaaaaaaaaaaaaaaaaaaaaaaaaaaaaaaaaaaaaaaaaaaaaaaaaaaaaaaaaaaaaaaaaaaaaaagtttttaccttagaccgccccccccctgggggctgagtttttgcatttttccttcccccctggtggccggatctttcttggggtgggggggggcccttttgggcccttgtggggggttttttttaaagggtcgctggccggcctttttacaggggtgtgtgactggaaaaagccctggcgttccccacctttttcgcctgggaacccatccccttttccccctttggcgttttggggaagaggcccctttcgaccgcctttgcaaattgttccccagcctgattggtgaatggtccccccctgttgcggccctttaagcggggggggtgtgggggttcggcgcaanatgacccctacctttgtcagcgccctaccgcccggtcctttcccttttttc

SEQ ID NO: 184132 - DNA, 465 bp, Zea mays
  Clone ID: MRT4577_99514C.1
tgctcctcccgattcttccattccacggtgatccctcgcctggttctcctccatccgcgcgatccgatcgcctcgagcccagcgagcgtcgccgccgttggtagcgggccgtgctgcgtctccctgctgctgctgctgctgtaactccggccggtggagacggtgccggcggcgaggcgaggcgagagcgctaacgcccgtggcctgttcgacgaaatgcctacggggaaggaggggatggaagagcctttgccgaccgacgccgaccacattggggctctcccggacacagtgctccaccacgttctctccttcctgccgtcgcaggatgccgtgaggacgtgcgtgctcgccaagcggtggctcgacctctggaagtctgtcacggcattgcgcattggtgaccgtgacatgaggaagttgtggaccgtgaagggcctccaggggttcgtggacccattttct

SEQ ID NO: 184133 - DNA, 676 bp, Zea mays
  Clone ID: MRT4577_99515C.1
agcagtggtaacaacgcagagtacgcgggaataataataacaaaataaatatatagagaaatgaaatagtaaattcagatatctcaaattatacctgagtattaaaaatcgaggactgaattttgaaaaaaacaagaattattttagaaaaggagtaatagaaaagttttctattcaaccaaatgattatgcatatcattaaatgatgcactataagcatttatttacatgaatatttaatcttgaagtaacttttaattcttatcccccattcaaaatactatttttttctaaaaaggaaagtaaaccatatgagtgtttttcataattcaaacatcttccaaacaaataaataaattaaaataaatatatatctattgcttcataattgattttgagtatttattaaaaatgtgaattcctaaactccatttttgaatttgaattgaatttgaagtgggaactttgaaatggaaaagaaaaattttagaattaaatggacaagaggaggagaaagaaaatattatgaggacccaaataagtataaaaatatatataataaaaatatgttatttttctactaggatttgaaattttaaattataaataaaaaaggaacttggaaaaaaaaaaaaaaaaaaaaaaaaaaaagtactctgcgttgttaccactgctt

SEQ ID NO: 184134 - DNA, 140 bp, Zea mays
  Clone ID: MRT4577_99516C.1
ccggccgggagatccgcttttccctcaacagcccaccagcaccgcctgcacctccagcaataatggccgagaaggttgtgaaggtgttgtggatgtgatcgcgccgtacatataatcccgccccaccgcctgtcatcccc

SEQ ID NO: 184135 - DNA, 367 bp, Zea mays
  Clone ID: MRT4577_99517C.1
aatagtcattatcaccatcttgataaaacacgtaagggtcaacggatacaaccagctagatagatggactaaggcatcgtatataatgggcctagaaaaactaccacactcgctgcaacaaagggaaggtataatgcctgtcccttcatcattattatcacaagctccagggcataggactgcccactaggtacagcgttacaatgggatcaacgactaccataaaagaaacaccagaccgtcgttagctcaaaaaaaacactgggagaatgaaatgatgctctacacagtgatggcgtactctacgcagaacgcaacgcggggagcagtcgcgccgaacatgacgaagccaatggcctttacctgg

SEQ ID NO: 184136 - DNA, 2649 bp, Zea mays
  Clone ID: MRT4577_99518C.1
gtttatgcatccaggggctcaagctggattatcgacagcggatgcacaaaccacatgacgtgggagaagaagatgttcacctcctacgtcaagaacaaagattcccaagattcaatcatattcggtgatgggaaccaaggcaagatagaccttgtgcagcttgtcaagcaggataaatctgaaacccaagggacccttaaacgcttcctaaggagagctcaaaatgagtttgagctcaaggtgaagaagataaggagcgacaacgggtccgagttcaagaaccttcaagtggaggagtaccttgaggaggaaggaatcaagcacgagttctccgttccctacacaccacagcaaaatggtgtggtagagaggaagaacaggacgcttattgacatggcaaggacgatgcttggagagttcaagacccccgggcggttttggtcggaagccgtgaacacgacttgccacgccataaaccgggtctaccttcatcgcctcctcaagaagacgtcgtatgagcttctaaccggtaacaaacccaatgtgtcatactttcgtgtttttgggagcaaatgttatattctagtaaagaaaggtagaaattctaagtttgctcccaaagctgtagaagggtttttgttaggttatgactcaaatacaaaggcgtatagggtcttcaacaaatcatcgggtttggttgaagtctctagcgacgttgtatttgatgaaactaatggctctccaagagagcaagttgttgatcttgataatgtagatgaagaagacgttccgacgaccgcaatacgcaccatggcaattggagatgtgcggccacaggaacaaaaggagcaagatcaaccttcttcctcaacaatggtgcaacccccaactcaagatgatgaacaggttcatcaagaagaggcgtgtgatcaagggggagcacaagatgatcatgttatggaggaagaagcacatcatgcccctccaactcaagttcgagcgacgattcaaaggaatcatcccgtcgaccagatattgggtgatattagcaagggagtaactactcgctctagattagttaatttttgtgagcattactcttttgtctcttctattgagcctttcagggtagaagaggccttgctagatccggactgggtgttggccatgcaggaggagctcaacaatttcaagagaaatgaagtttggacattggtgccacgtcccaagcaaaacgttgtgggaaccaagtgggtgttccgcaacaaacaggacgagcacggggtggtgacaaggaacaaggcacgtcttgtggcaaaaggttatgcccaagtcgcaggtttggactttgaggagacttttgctcctgtggctaggctagagtcaattcgcatattgttaccctatgccgctcaccattctttcaggttgttccaaatggatgtgaagagcgctttcctcaacgggccaatcaaggaggaggtgtacgtagagcaaccccctggctttgaggatgaacggtaccccgaccacgtgtgtaagctctctaaggcgctctatggacttaagcaagccccaagagcatggtatgaatgccttagagactttttaattgctaatgctttcaaggttgggaaagccgatccgactttattcactaatacttgtgatggtgacttatttgtgtgccaaatttatgtcgatgacataatatttggttctactaaccaaaagtcttgtgaagagtttagcagggtgatgactcaaaagttcgaaatgtcaatgatgggcgagttgaactacttccttgggttccaagtgaagcaactcaaggacgacactttcatttcccaaacgaagtacacgcaagatttgctcaagcggtttgggatgaaggacgccaagcccgcaaagactccaatgggaactgacggacacgtcgacctcaacaaaggaggtaagtccgttgatcaaaaagcataccggtctatgataggttccttgctttacttatgtgctagtagaccggatattatgcttagtgtatgcatgtgtgctagatttcaattcgatccaagggagtgtcacttagtggtcgtgaagcgaattcttagatatttagtcgctacgccttgcttcgggatctggtatccaaaggggtctacctttgacttaatcggatattcagactccgattatgctggatgtaaggttgataggaagagtacatcagggacgtgccaattcttaggaaggtccctggtgtcttggagttctaagaaacaaacttctgttgccctatccaccgctgaggctgagtatgttgccgcaggacagtgttgcgcgcaactactttggatgaggcaaaccctctgggactttggctacaatctgagcaaagtccccctcctatgtgataatgagagtgcaatccgcatggcggataatcctgttgaacacagctgcactaagcacatagacatccggcatcactttttgagagaccaccagcaaaagggagatatcgaagtgttttatgttagcaccgagaaccagctagccgatatctttaccaagcttttagatgagaagaccttttgcaggctgcgtagtgagctaaatgtcttagattcgcggaacttggactga

SEQ ID NO: 184137 - DNA, 5031 bp, Zea mays
  Clone ID: MRT4577_99519C.1
atggatcctaggggcaaggggacagtggtcaacgataaggagaaggagtccttcgtcaacgagcctaaagatgacaagcctaccgactcgagctcgggccacaaacaaagagatgggaagaagaagaagaagacgaggcgcatcaaggagatcgtctactacgacgacaacgacgagtcctcttcttcccaaaaggacgacgacaacgtctacgagaataagaagacgattaattcaaacttctcttttgattattctcgtattcctcaaagtaccaatgctcatttactctccattccacttgcctcattgtgcagggacgagtatcataaggtgagcggcttggacaatgccaagcagatctgggacaccctcaagatctcacatgaggggaacgacgtcaccatactcaccaagatggagttggtggaaggcgaactcgggagattcgcgatgataagaggggaggagccaacccagacgtacaacaggctcaaaaccctcgtcaacaagataaggagctatggaagcacgcgatggacggaccacgacgttgtccgcctaatgctaaggtcctttaccgtccttgatccacatcttatgaacaatattcgtgagaatcctaggtacacgaagatgacgcccgaggagatccttggaaagttcgtaagcgggtggatgatgatcaaggaggctagatacgtcgatgatgcattaaatggtccaatccaagagcctcaaactattgctctcaaggcaacaaggagcaaggaggcactacctagcaaggtggcgcaagttgaggcggccgggcttaatgaggaagaaatgacccttatcatcaagcggttcaagacgacgctaaagggtcgcaaggagcaccccaacaagaacaagacgaaggggaagcgctcctgcttcaaatgtggtaagattggtcattttatcgcaaattgtcccgataatgatagtgaccaggaaaagaagagtggaaagtgggaaaagaagaagaactacaagaaggcgaagggcgaggcacatcttggaaaggagtgggattcagattgctcctcgtccgactccgacaacgaaggactcgccgccaccgccttcaacaagtcatccctcttccccaacgagcatcacacttgcctcatggcaagggaaaagaaggtaagcactcgtaatactagtacttatgcttcttcaagtgaggatgagtctagtgatgatgatgaaatagattattcatgtttattcaaaggcctagatagaaccaaggttgataaaattaatgaattaattgatgccttgaatgataagaatatgttattagaaaagcaagagaatcttttgtatgaagagcatgataaatttgttagtgcacaaagttctcttgctctagaagttaaaaggaatgaaatgctttcttgtgaactatctacttgtcatgaaaccatttctactctaaaaggtattaatgatgatttaaatgctaaactagaagtagcaaataaatctaactcttgtgtagaacatgttataatttgcaataggtgcaaagattttaatgttgatgcttgtagtgaacacctagcttgcatttctaaattaaatgatgaagtggctagtcttaatgctcaacttaagactagcaagagtgaatttgacaagctaaaatttgcaagggatgcctacacgattggtagacacccctcaattaaggatggtcttggcttcaagagggaagtcaagaacttaacaagccaaaaggcttccatctccgccaaggagaaagggaaggcccctatggctagtagtgctcaaaagaaccatgccttcatgtatcatgataggagacattctagaaatgactatagaagttataatgattttgattctcatgcaatggttgcttctagctcctctattatgcatgatagaaacttagctaggagaaatgttattaataacatgcctagaagaaatgttgttcatgtgcctaggaaaacaaatagtgaaccttctacaatttatcatgctttaaatgcttcctttgctatttgtagaaaggataggaagataattgctagaaaattaggggcaaaatgcaagggagataaaacctgcatttgggtccctaaggctatttgtactaaccttgtaggacccaacatgagttgggtttatgcatccgggggatcaagctggattatcgacagcggatgcacaaaccacatgacgggggaaaagatgatgttctcttcctacgtcaagaacaaggatccccaagattcaatcatattcggtgatgggaaccaaggcaaggttaaaggcttaggcaagattgcaatctcaaatgagcactccatttctaatgtattcttagttgagtcgcttggatataatttgctatccaccttgtgcagcttatcaagcagggaaacaggtgggaagctctcatcatgccaaaaatgtgatgacaacatcaagacccctggagttacttcatatggacctcttcggacccgtcgcctatctaagcataggaggaagataaatctgaaacccaagggaccctggcgcttcctaaggagagctcaaaacgagtttgagctcaaggtgaagaagataaggagcgacaatgggtctgaattcaagaaccttcaagtggaggagtatcttgaggaggaaggaatcaagcacgagttctccgctccctacgcaccacagcaaaatggtgtggtagagaggaagaacaggacgcttatagacatggcgaggacgatgcttggagcattcaagacactcgagtgcttctggtcggaagctgtgaacacggcttgccacgccatcaaccgggtctaccttcatcgcctcctcaagaagacttcatatgagctgctaaccggtaacaaacccaatgtttcgtatttccgagtttttgggagtaaatgctacattctagtgaagaaaggtaggaatttcaaatttgctcccaaagccgtagaagggtttttgttaggttatgactcaaatacaaaggcgtatagggtcttcaacaaatcatcgggtttggttgaagtctctagcgacgttgtatttgatgagactaatggctctccaagagagcaagttgttgatcttgatgatgtagatgaagaagatgttccaacgaccgcaatgcgcaccatggcgattggagatgtgaggccaatggaacaaaaggagcaagatcaaccctcttcctcaacaatggtgcatcccccaactcaagaagatgaacaggttcatcaagaggaggcgtgtgatcaagggggagcacaagatgatcatgtaatggaggaagaaacacaaccgacacctccaacccaagttcgagcgatgattcaaagggatcatcccgtcgaccagattttgggtgacattagcaagggagtaactactcgttctcatttagttaatttttgtgagcattactcttttgtctcttctattgagcctttcagggtagaggaggccttgctagatccagactgggtgttggccatgcaggaggagctcaacaacttcaagagaaatgaagtttgtacactggtgcctcgtcccaagcaaaatgttgtgggaaccaagtgggtgttccgcaacaaacaagacgagcacggagtggtgacaaggaacaaggcacgacttgtggcaaaaggttatgcccaagtcgcaggtttggactttgaggagacttttgctcctgtggctaggctagagtccattcgtattttgctagcatatgccgctcaccattctttcaggttgttccaaatggatgtgaagagcgctttcctcaacgggccaatcaaggaggaggtgtacgtagagcaaccccctggcttcgaggatgaacggtaccccgaccacgtgtgtaagctctctaaggcgctctatggacttaagaaagccccaagagcatggtatgaatgccttagagactttttaattgctaatgctttcaaggttgggaaagtcgatccaactctttttactaagacttgtgatggtgatctttttgtgtgccaaatttatgtcgatgacataatatttggttctactaaccaaaagtcttgtgaagattttagcagggtgatgactcaaaagtttgaaatgtcgatgatgggcgagctaagctatttccttgggttccaagtgaggcaactcaaggatgggaccttcatctcccaaacgaagtacacgcaagacttgatcaagcggtttgggatgaaggacgccaagccggcaaagactccaatgggaaccgacggatacaccgacctcaacaaaggaggtaagtccgttgatcaaaaggcatataggtctatgatagggtctttactttatttatgtgctagtagaccggatattatgcttagcgtatgcatgtgtgctagatttcaatccgatccaagggaatgtcacttagtggcggtgaagcgaattcttagatatttagtcgctacgccttgcttcgggatctggtatccaaaggggtctacctttgacttgattggatattcagactccgactatgctggatgtaaggtcgataggaagagtacatcggggacgtgccaattcttaggaaggtccctggtgtcatggagttttaagaaacaaacttccgttgccctatccaccactgaggccgagtacgttgccacaggacagtgttgcgcgcaactactttggatgaggcaaaccctcagggactttggctacaatctgagcaaagtcccactcctatgtgataatgagagtgctatccgcatggcggataatcctgttgaacacagccgcacaaagcacattgacatccggcatcactttttgagagaccaccagcaaaagggagatatcgaagtgtttcatgttagcaccgagaaccagctagccgatatctttaccaagcctctagatgagaagaccttttgcaggctgcgtagtgagctgaatgtcttagattcgcggaacctggattga

SEQ ID NO: 184138 - DNA, 884 bp, Zea mays
  Clone ID: MRT4577_9951C.1
gccggccgggccgggagcaactctctatcctcttcccccctcgtccatccccatcccaccgccttgctctcccctctccacttccagctgtccatggctgcagcagcgtgctcctctgcctcgccgctcctcctcccctcagggccgagacatgcgtcggcctccagggcgtggtttctcggcggcaggagcagggcgctgagatcagaggcgccgtgctgctgcaaggccgccgccgcccgtggaagcgctccgcaatgcgggacggtcggtggtggcagcagcagcacccggagggggctgctaggcgtggccctgggagcctctgccttggggctggccgcgtttgacgccgtcgccgccgggttgccgccggaggagaagcccaagctctgcgacgccgcctgcgaaggcgagctcgaaaatgttgcagcaaattatgttgctatggtgccaactgggcagatattcgacagttcgctggagaaaggtcagccctacatattccgtgttggatcagggcaggtgatcaaggggcttgatgagggaattttgtcgatgaaggttggaggactacgtcggctgtacatacctgggccattagcgttccctaagggtcttacttctgctcctggaaggccaagagtacccccaagcagccctgtcgttttcggcgtcaatttactgtacataccaggtctcgatgatgagtgaaggcattctgtggcaacagtcatctttttttgtatacttcattcgagagcacatactgtacatctagagcacaattctttcaagctataaatctatgccgatatctatggttaccacatcataaactcttaaaaaaaaaaaaaaaaagcccctagggccgcggccgctct

SEQ ID NO: 184139 - DNA, 4953 bp, Zea mays
  Clone ID: MRT4577_99520C.1
atggatcctaagggcaaggggatggtggtcaatgataaggagaaggagtccttcgtcaatgatccaaaggatgacaagcctactgactcaggctcgggccacaaaagaaaagacgggaggaagaagaagacaaggcgcatcaaggagatagtctactacgacagcaacgaatcttcctcttcccaaaaggacgacgacaatgactacaagaaaaagaagacggttaattcaaacttttcctttgattattctcgtattccgcaaagttccaatgctcacttgctttccattccccttggtaaacctccccactttgatggagaggactacagattttggagtcacaaaatgcgtagccacttgttctctctccatccaagtatatgggagatagtagaaaatggaatgcactttgatagtacagatagtcccatgttcattaatgagcaaattcacaaaaatgcacaagctactactgttcttctagcttcattgtgcagggatgaataccataaagtgagcggcttggacaacgccaagcagatttgggacaccctcaaaatctcacatgaggggaacgacgtcaccatgctcaccaagatggagttggtggagggcaaacttgggagattcgcaatgatcaggggcgaggagccaacccaaatgtacaaccggctcaagaccctcgtcaacaaaataaggagctatggaagcacgcgatggacggaccacgacgtcgtccgcctaatgctaaggtcttttactgtccttgatccacatcttgtgaacaatattcgtgagaatcctaggtacaccaagatgacgcccgaagagatacttggaaagtttgtaagcgggcggatgatgatcaaggaggcaagatacgttgacgatgcgttgaacggtccaattcacgagcctcaaaccgttgctctcaaagcaacaaggagcaaggaggcgctacctagcaaggtggcacaagttgaggcagctggacttaatgatgaagaaatgaccctcatcatcaagcgctttaagacgatgctaaggggtcgcaaggagcatcccaacaagaccaagacaaaggcgaagcgctcatgcttcaaatgtggtaagattggtcattttatcgctaattgtcccgataatgatagtgaccaggaacaagggaacaagagggaaaagaagaaggcttacaagaaagctaatggcgaggcacaccttggaaaggagtgggactcggattgttcgtcgtccgactccgacaacgaaggactcgccgccaccgccttacaacaagtcggccctcttccccaacgagcatcacacctgcctcatggcaagggaaaagaagaacatgttgtagtttgcaataggtgtaaagattttaatgttgacgcttgtagtaaacacctagtttcaatttctaaattgaatgatgaagtggctagtcttaatgcccaacttaagactagcaagagtgaatttgacaaactaaagtttgcaagggatgcctacacaattggtagacacccctcaattaaggatggtcttggcttcaagagggaagtcaagaacttaacaagccataaggcttccatctccgccaaggagaaagggaaggcccctatggctagtagtactcaaaagaaccatgctttcatgtatcatgataggagacattctaggaatgcttttagaagttatgatgcttttgattctcatgccacgattgcttctagctcttctattatgcatgatagaaatttggctaggaaaaatgttgtttatcatatgcctagaagaaatattgttcatgttcctaggaaagtaatgaatgaaccttctacaatttattatgcttgcaatgcttcctttgctatttgtagaaaggataagaagattatcgacagcggatgcacaaaccacatgacgggggaaaagaggatgttctcctcctacgtcaagaacaaggatcctcaagattcgatcatattcggtgatgggaaccaaggcaaggtgaaagggttaggaaaaattgctatttcatccgagcactctatttctaatgtgttcttagttgagtcgcttggatataacttgttgtctgtgagtcaactttgtaatatgggatataactatttattcacaaatgtagatgtgtctgtctttagaagaagtgatggttcattagcttttaagggtgtactagacgacaaactttatttagttgattttgcaaaagaggaggtcggtctagatgcatgcttaattgctaagactagcatggactggctgtggcatcgccgtttagcacatgtggggatgaagaaccttcacaagcttctaaagggagaacacgtgataggtctaactaatgtaactttcgaaaaagttagaccttgtgcagcctgtcaagcaggtaaacaggtgggaagctctcatcatgccaaaaatgtgatgacaacatcaagacccctggagttacttcatatggacctcttcggacccgtcgcctatctaagcataggaggaaggaccctcaagcgcttcctaagtagagcccaaaacgagtttgagctcaaagtgaagaagataaggagcgacaatgggtccgaattcaagaaccttcaagtggaggagtatcttgaggaggaaggaatcaagcacgagttctccgctccctacacaccacagcaaaatggtgtggtagagaggaagaacaggacactactagacatggcaaggacgatgcttggtgaattcaagacgcccgaacggttttggacggaagccgtaagcacggcttgccacgctataaaccgggtctaccttcatcgcctcctcaagaagacttcatatgagcttaactgcaaatgttacattctagtgaagaagggtaggaattctaagtttgctcccaaagctgtagaagggtttttgttaggttatgactcaaatacaaaggcgtatagggtcttcaacaaatcatcgggtttggttgaagtctctagagacattgtatttgatgagactaatggctctccaagagagcaagttgttgatcttgatgatgtagatgaagaagatgttccgatggccgcaatacgtaccatggcgattggtgatgtacgaccacaggaacaaaatgagcaagatcaaccttcttcctcaacaatggtgcatcccccaactcaagacgatgaacaggttcatcaagaagaggcgtgtgatcaagggggagcacaagatgttcatgtgatagaggaagaagcacaaccaacacctccaactcaagttcgagcgacgattcaaaggaatcatcccatcgaccagattttgggtgacattagcaagggagtaactactcgctctagattagttaatttttgtgagcattactcttttgtctcttctattgagcctttcagggtagaagaggccttgctagatccggactgggtgttggccatgcaggaagagctctataacttcaaaagaaatgaagtttggacgctggtgcctcgtcccaagcaaaatgttgtgggaaccaagtgggtgttccgcaacaaacaggacgagcacgggatggtgacgaggaacaaggctcgacttgtggcaaaaggttatgcccaagttgcaggtttggactttgaggagacatttgctcctgtggctaggctagagtccattcgtattttgctagcatatgccgctcaccattctttcaggttgttccaaatggatgtgaagagcgctttcctcaacgggccaatcaaggaggaggtatacgtggagcaaccccctggcttcaaggatgaacggtaccccgaccacgtgtgtaagctctctaaggcgctctatggacttaagcaagccccaagagcatggtatgaatgccttagagactttttaattgctaatgatttcaaggttgggaaagccgatccaactctttttactaagacttgtaatggtgatctttttgtgtgccaaatttatgtcgacgtcataatatttggttctactaaccaaaagtcttgtgaagagtttagcagggtgatgactcaaaagtttgagatgtcgatgatgggcgagttaagctatttccttgggttccaagtgaagcaactcaaggatgggaccttcatatcccaaacgaagtacacgcaagacttgatcaagcggtttgggatgaaggacgccaagcccgcaaaaactccaatgggaaccgacggacacaccaacctcaacaaaggaggtaagtccgttgatcaaaaggcataccagtctatgatagggtctttactttatttatgtgctagtagactggatattatgcttagtgtatgcatgcgtgctagatttcaatccgatccaagggagtgtcacttagtggccgtgaagcgaattcttagatatttagtcgctacgccttgcttcgggatctggtatccaaaggggtctacctttaacttgattggatattcagactccgactatgctggatgtaaggtcgataggaagagtacatcggggacgtgccaattcttaggaaggtccctggtgtcgtggagttctaagaaacaaacctccgttgccctatccaccgctgaggccgagtatgttgccgcaggacagtgttgcgcgcaactactttggataaggcaaaccctcagggactttggctacaatctgagcaaagtcccactcctatgtgataatgagagtgttatccacatggcggataatcctgttgaacacagccgcacaaagcacatagacatccggcatcactttttgagagaccaccagcaaaagggagatatcgaagtgttttatgttagcaccgagaaccagctagccgatatctttaccaagcctctagatgagtcgaccttttgtaggttgcgtagtgagctaaatgtcttagattcgcggaacctggattga

SEQ ID NO: 184140 - DNA, 502 bp, Zea mays
  unsure (1)..(502): unsure at all n locations
  Clone ID: MRT4577_99521C.1
ggtggattctggattataataccaggcattggtgaccatgcaaacggaatgtggaggtagactgccgatgcacgacaatgaaggaatgcgttggagatgtatagagggacacgctatccgaccagtgggggaccaggaacgagagccatgtccagtacttacgcgcaaggaagtacaccttacgtacaggatgaaggaatggttggagcgttcccagaagctgctttatgtactgaatatacacaaaaccgcacacctcacttcgcatggggatgctttagaaaaataactgatgctggtggtctatgaccttcttagcatgaaggctacatgctctcattgcagaacaggttacgctgcctgcggnatcacctagggttgtcacacaacgtgtatcatgtgctggaaccgtacactaatgtgttctacttattgttcaatggaaagacatgctaatggttttctaatgcagactacttatctggtacaagacatgaaattg

SEQ ID NO: 184141 - DNA, 4356 bp, Zea mays
  Clone ID: MRT4577_99522C.1
atggatcctaagggaaaggggattgtgatcaacgataaggagaaggagtccttcatcaatgagccaaaagacgacaagcccactgacttgggctcaagtcataagaagaaggacgggaagaagaagagacgcatcaagaagatagtctactacgacagtgacgagtcctcttcttcccaaagagacgacgacgagaaaaagaaaacggtcaactcaaacttttcttttgattactctcgtattccgcaaaattccaatgctcatttattttccattcctcttgctaccactgttcttttagcatccttgtgcagggaagagtatcataaggtgggcggcttggataatgccaagcaaatttgggacaccctcaagatctcacatgaggggaacgacgccaccatgatcaccaagatggagttggtggaaggcgaactaggaaggtacaccaagatgacgctcgaggaaatactcggaaagtttgtaagcgggcgaataatgatcaaggaggcaagatatgttgatgaggcgttgaatggcccaatgccgatccacgagcctcaaactgttgctctcaaagcaacaagtagcagggaggcgctacctagcaaggtggcacaagttgaggcggccgggctaaatgaagatgaaatggccctcatcatcaagcgcttcaagacggcgctcaaaggtcacaaggagcattccatcaagagcaagacgaagggaaagcgctcctgcttcaagtgtgtgaccaggaacaaggaaagaatgggaagagagagaacaagaaggtttacaagaaggctaagggcgaggcacaccttggaaaagaatgagactcggattgttcttcgtccgactccgacgacgaaggactcgccgccacggccttcaacaaatcgtctctcttccccaacgagcgtcacacctgcctcatggcaaaggagaagaaggtgtaaggatttcaatgttgatgcttgtagtgaacacttaatttccatttccaaattaaatgatgaagtggctagtcttaatgcccaacttaagactagcaagaatgaccttgataaactaaaatttgcaagggatgcctacactattggtagaaacccctcaattaaggatgggcttggctttaagagggaagccaagaacttaacaagtcaaggggctcccattttcaacaaggaaaaagggaaggctcctatgattagtaatagtcaaaagaatcatgcatttatttatgatagaaaattttctagaaatgcttatcataataggagttgtaatgcttatgattcaaatgccatgattgcttcgagttcttcctttatgcatggtacagatatgcctaggaaaaatgttattcatcatatgcctaggagaaatgttgttcatgtacctaggaaagcaagtaatgaaccttctacaatttaccatgcttgcaatgcttcttttgcaatttgtaggaagaataagaaagtgattgctaggaaattaggggcaaaatgcaagggatataaaacttgcatttgggtccctaaggctattgttactaaccttgtaggacccaacaagagttgggtttatgcatccgggggctcaagctggattatcgatagcggatgcacaaaccacatgacgggggagaagaagatgttcacctcctacgtcaagaacaaagattcccaagattcaatcatattcggtgacgggaatcaaggcaaggttaaaggactaggaaaaatagctatttcatccgagcattccatctctaatgtgtttttggttgaatcgctcgggtataacttgttgtccgttagtcaattatgtaatatggggtataattgcttatttacaaatgtagatgtgtctgtctttagaaggagtgatggttcactagcttttaagggtgtactagacggcaaactctatttagttgactttgcaaaggaggaggctagtctagatgcatgcttaattgctaagactagcatgggctggctgtggcatcgccgtttagcacatgtggggatgaagaaccttcacaaacttctaaagggagaacatgtattaggtctaacaaatgacaagtctaaaacccaagggaccctcaagcgctttttaaggagagctcaaaatgaatttgagctcagggtgaagaagataaggagcgacaacgggtccgagttcaagaaccttcaagtgaaagagtaccttgaggaggaaggaatcaagcacgagttctccgctccctacgcaccacaacaaaacggtgtggtagagaggaagaacaggacgctcatagacatggccaagacgatgcttggagagttcaagacgcccgagcggttttggtcggaagccgtgaacacggcttgccacgccataaaccgggtctaccttcatcgcctcctcaagaagacgtcgtacgaactcctaaccggtaacaaacccaatgtttcatattttcgtgtatttgggagtaaatgctacattctagtgaagaaaggtaggaattccaaatttgctcctaaagctgtagaagggtttttgttaggttatgactcaaataccaaggcgtatagagtcttcaacaaatcatcgggtttggttgaagtctctagcgacgttgtatttgatgagactaatggatctccaaaagagcaagttgatcttgatgatgtagatgaagaagatgttccaacggccgcaatacgcaccatggcgattggagatgtgcgaccacaggaacaaaaggagcaagatcaaccttcttcctcaacaatggtgcatccgccaactcaagatgatggacaggctcatcaagaagaggagtgtgatcaagggggagcacaagatgatcatattatggaggaagaagcacctcaggcccctccaactcaagtccgagcgacgattcaaaggaatcatcccgtcgaccggatattgcgtgatataagcaagggaataactactcgctctagattagctaatttttgggtagaagatgccttgctagatccggactgggtgttggccatgcaggaagagcttaataacttcaagcgaaatgaagtttggacactggtgccacgtcccaagcaaaatgttgtgggaaccaagtgggtgttccgcaacaaacaggacgagcacggggtggtgacaaggaacaaggcgagacttgtggcaaaaggttacgcccaagtcgcaggtttggactttgaggagacttttgctcctgtggctaggctagagtctattcgtattttgttagcctatgccgctcaccattcttttaggttgttccaaatggatgtgaagagcgctttcctcaatgggccaatcaaggaggaggtgtacgtagagcaaccccctggctttgaggatgaacggtaccccgaccacgtgtgtaagctctctaaggcgctctatggacttaagcaagccccaagagcatggtatgaatgccttagagactttctaattgctaatgctttcaaggttgggaaagccgatccaactttattcactaagacgtgtgatggtgacttatttgtgtgccaaatttatgtcgatgacataatatttggttctactaaccaaaagtcttgtgaagagtttagcagggtgatgactcaaaaatttgagatgtcgatgatgggcgagttgaactacttccttgggttccaagtgaagcaactcaaggacggcaccttcatctctcaaacaaagtacacgcaagacttgatcaagcggtttgggatgaaggacgccaagcccgcaaatactccaatgggaaccgacggacatgtcgacctcaacaaaggaggtaagtccgttgatcaaaaggcataccggtctatgataggttccttgctttacttttgtgctagtagaccggatattatgctaagcgtatgcatgtgtgctagatttcaatccgacccaagggagtgtcaccttgtggccgttaagcgaattcttagatatttagttgctacgccttgcttcgggatctggtatccaaaggggtctacctttgacttgattggatactcagactccgattatgctggatgcaaggttgataggaagagtacatcagggacgtgccaattcttaggaaggttcctggtgtcttggagttctaagaaacaaacttctgttgccctatccaccgctgaggccgagtatgttgccgcaggacagtgttgcgcgcaactactttggatgaggcaaaccctcagggacttaggctacaatctgatcaaagtcccactcctatgtgacatgagagtgcaatccgcatggcggataatcctgttgaacacagccgcacgaagcacatag

SEQ ID NO: 184142 - DNA, 309 bp, Zea mays
  Clone ID: MRT4577_99524C.1
tatcgacaggagttaattacacttactgatcaacagaccgaccagaaccaaaattacatgttccataggaaggtactaccaaacggctgcgcccatccgtgatcgccgtccggcccgaatccgaacagctcgtcggcatcgcgcgccgccgccatatagccagcgtcgtggtcgatccactccgggtcgcgccaagacgcttgcgtagcgtcgtggaacgagaaagacgcggtgccgagcgggacgagcagctcggagaagtcctcgtcgagcggcgggatctcgacgatcgcctcgagctcgtcgtca

SEQ ID NO: 184143 - DNA, 4548 bp, Zea mays
  Clone ID: MRT4577_99525C.1
atggatcctaagggcaaggggatggtgatcaacgataaggagaaggagtccttcgtcaatgagccgaaagacaacaagcctactgactcgggctcaagtcataagaagaaggacgggaagaagaagaggcacatcaagaagatcgtctactacgacgacagcgacgagtcctcctcttcccaaaaggacgactacgagaaaaagaaaacggtcaattcaaacttttcttttgattattctcgtattccgcaaagttcaaatgctcattttctttccattccccttggtaaacctcctcactttgatggagaggactacggattttggagtcacaaaatgcgtagccacttgttctctctccatccaagtatatgggagatagttgagaatggaatgcaatttgatacctcattgtgcagggatgaatatcataaagtgagcggcttggataacgccaagcaaatttgggacaccctcaagatctcacatgaggggaacgatgtcaccatgctcaccaagatggagttggtggagggcgaacttgggagatttgcaatgatcaggggagaggagccaacccaaacgtacaaccggctaaagaccctgatcaacaaaataagaagctatggaagcacgcgatggacggatcacgacgtcgtccgcctaatgctaaggtccttcactatccttgatccacatcttgtaaacaatattcgtgaaaatcctaggtacaccaagatgtcgcccgaagaaatacttggaaagttcgtaagcgggcggatgatgatcaaggaggcaagatacgtcgatgatgcattgaatgacccaatccacgagcctcaaaccgtggctctcaaagcaacgaggagcaaggaggcgctacctagcaaggtggcgcaagttgaggcggccgggcttaacgaagaagaaatggccctcatcatcaagcggttcaagacaacactaaaaggtcgcaaggagcatcccaacaagaacaagacgaaggggaagcgctcatgtttcaaatgtggtaagattggtcattttatcgctaattgtcccgataatgatagtgaccaggaacaagagaagaagagggaaaagaagaagtcttacaagaaggctaagggcgaggcacaccttggcaaggagtgggactcggattgttcgtcgtctgactccgacaatgaaggactcgccgcctcagccttcaacaagacgtccctcttccccaacgagcatcacacatgcctaatggcaaaggagaagaagggatgcctacacggttggtacccctcaattaaggatgggcttggtttcaagagggaagccaagaacttaacaagtcataaggctcccattcccgccaaggagaaagggaaggcccctatgacaaatagtgttcaaaagaaccatgccttcatgtaccatgataggagacattctagggatgttcattataatagaagttataattctcttgcttcacatgccatgattgcttcaagttcctctaatgtgtatggtagaaatatgcctaggaaaaatgttgctcatgctcctaggaaagtgattgctaagaaggtgggggccaaatgcaagggagacaagacttgcatttgggtccctaaggctattgttactaaccttgtaggacccaacaagagttgggtttatgcatccgggggctcaagctggattatcgacagcggatgcacaaaccacatgacgggggagaagaagatgttctcttcctacgtcaagaacaaggattcccaagattcaatcatattcggtgatgggaaccaaggcaaggtgaaaggactaggaaaaattgctatttcatccgagcactctatttctaatgtattcttagttgagtcgcttggatataacttgttgtctgtgagtcaactttgtaatatgggatacaatcgcttattcacaaatgtagatgtgtctgtctttagaaggagtgatggttcattagcttttaagggtgtattagacgacaaactctacttagttgattttgccaaagaggaggccggtctagatgcatgcttaattgctaagactagcatgggctggctgtggcatcgccgcttagcacatgtagggatgaagaaccttcacaaacttctaaagggagaacacgtgataggtctaacaaacgtaaccttcgaaaaagatagaccttgtgcagcttgtcaagcaggtaaacaggtgggaagctctcatcataccaaaaatgtgatgaccacatcaagacctttggagttgcttcatatggacctcttcggacccgtcgcctatctaagcataggaggaagtaagtatggtcttgttatagttgatgatttttcccgcttcacttgggtattctttttgcaggataaatctgaaacccaagggaccctcaaacgtttcctaaggagagctcaaaatgagttcgagcttaagaaaaatggtgtggtagagaggaagaacaggacgctcatagacatggcgaggacaatgcttggagaattcaagacacccgagcggttttggtcggaagccgtgaacacggcttgccacgccataaaccgggtgtaccttcatcgcctcctcaagaagacttcgtatgagcttctaaccggtaacaaacccaatgtttcgtactttcgtgtatttgggagcaaatgttatattctagtaaagaaaggtagaaattctaagtttgctcccaaagctgtagaagggtttttgttaggttatgactcaaatataaaggcgtatagggtcttcaacaaatcatcgggtttggttgaagtctctagcgacgttgtatttgatgagactaatggctctccaagagagcaagttgttgatcttgatgatgtagatgaagaagacgttccaacggccgcaatacgcaccatggcgattggagatgtgcggccacaggaacaaaaggagcaagatcaaccttcttcctcaacaatggtgcatcccccaactcaagacgatgaacagcctttcagggtagaagaggccttgctagatccggactgggtgttggccatgcaggaagagctcaacaacttcaaaagaaatgaagtctggacactggtgcctcgtcccaagcaaaacgttgtgggaaccaagtgggtgttccgcaacaaacaagacgagcacggggtggtgacaaggaacaaggcacgacttgtggcaaaaggttatgcccaagtcgcaggtttggactttgaggagacttttgctcctatggctaggctagagtcaattcgcatattgttagcctatgctgctcaccattctttcaggttgttccaaatggatgtgaagagtgctttcctcaacggaccaatcaaggaggaggtgtacgtggagcaaccccctggcttcgaggatgaatggtaccctgaccacgtgtgtaagctctctaaggcgctctatggacttaagcaagccccaagagcatggtatgaatgccttagagactttttaattgctaatgctttcaaggttgggaaagccgatccaactcttttcactaagacttgtgagggtgacttatttgtgtgccaaatttatgtcgatgacataatatttggttctactaaccaaaagtcttgtgaagagtttagcaaggtgatggctcagaaattcgagatgtcgatgatgggcgagttgaactacttccttgggttccaagtgaagcaactcaaggacggcaccttcatctcccaaatgaagtacatgcaagacttgctaaagcgatttggaatgaaggatgccaagcccgcaaagacaccaatgggaaccgacggacatgttgacctcaacaaaggaggtaagtccgttgatcaaaaggcataccggtctatgatagggtctttactttatttatgtgctagtagaccggatattatgcttagcgtatgcatgtgtgctagattccaatccgatccaagggagtgccacctagtggccgttaagcgaattcttagatatttagtcgctacgctttgcttagggatctggtatccaaaggggtctacctttgacttgattggatattcagactccaattatgctggatgtaaggtcaataggaagagtacatcagggacgtgccaattcttaggaaggtccctagtgtcatggagctctaagaaacaaacttctgttgccctatccaccgctgaggccgagtatgttgccgcaggacagtgttgcgcgcaactactttggatgaggcaaaccctcagggactttggctacaatctgagcaaagtcccactcctatgtgataatgagagtgctatccgcatggcggataatcttgttgaacacaaccgcactaagcacatagacatccggcatcactttttgagagaccaccagcaaaagggagatatcgaagtgttttatgttagcaccgagaaccagctagccgatatcttcaccaagcctctagatgagtcgaccttttgcaggctgcgtagtgagctaaatgtcttagattcgcggaacttggattga

SEQ ID NO: 184144 - DNA, 143 bp, Zea mays
  Clone ID: MRT4577_99526C.1
gacacattgccttctgttttctccagcatgcgcttgctccagctcctgttcagggccagccctgccaccctgctcctggttctactgcctgcagttgggggccaacaaagctcaggacaacactcggaagatcataataaaga

SEQ ID NO: 184145 - DNA, 325 bp, Zea mays
  Clone ID: MRT4577_99527C.1
aaaaaaaaaaatttagaattttttggcccagggggaggttttttatggccattatcccggaaacggggttaaggcaccattttttgttttcttggcccccaaaaaaaaacaatttgggaagggcaaccccgggggaaaaaaggggggaaaaccctggccaataatgggcctttaaactccatacccttttgggcctgggggggcaaaaagggaaaaaaaccccttgggggtttggaacccttaagtggtggtttcccccccaaaaaaaagggggggggggccggcccttcgaaaggggcccttttttcgggaaggggctccgggg

SEQ ID NO: 184146 - DNA, 4143 bp, Zea mays
  Clone ID: MRT4577_99528C.1
atgacgcccgaggaaatacttggaaagtttgtaagcgggcggatgatgatcaaggaggcaagatacgtcgacgatgcgttgaatggcccaatccaagagcctcaaatcattgctctcaaagcgacgaggagcaaggaggcgctacctagcaaggtggcgcaagttgaggcggccgggttcaatgatgaagagatggccctcatcatcaagcgcttcaagacggcgctaaagggtcacaaggggcatcctaacaagaacaagacaaaggggaagcactcatgcttcaaatgtgtgactaggaacaagggaacaagagggaaaagaaaaaggcgtacaagaaggctaagggcgaggcacaccttggcaaggagtgggactcggattgttcgtcgcccgactccgacaacgaaggactcgccgccaccgccttcaacaagtcgtccctcttcccccaacgagcatcacacttgcctcatggcaagggaaaaggagggcttagatagaactaaggttgataagattaatgaattgattgaggctttgaatgataaaaatagattactagaaaagcaagaggatcttttatatgaagaacatgataagtatgtagaggctcaaaaatcccttgctttagaaattaaaaggaatgaaatgctttcttgtgaattgtctacatgccatgactctatttctagcttaaagagcataaatgatgatttgtatgctaagttagaaatagctaataaatcaacatcttgtgtagaacatgttacaatttgcaataggtgtaaagatttcaatattgatgcttgtagcgaacacctagcttcaatttctaaattgaatgatgaagtggctagtcttaatgcccaacttaagactagcaaaagtgaatttgataaactaaaatttgcaagggatgcctacacgattggtagacacccctcaattaaggatggtcttggcttcaagagggaagtcaagaacttaacaagccataaggcttccatctccaccaaggagaaagggaaggcccctatggctaatagtgctaaaaagaatcatgcatttaattataagaaattttctagaaatattcatcatgataggatttgtaatgcttatgattcaaatgcaatgtttgcttcaagttcttcctatatgcatggtagagatatgcctaggagaaatgtcattcatcatatgcctaggagaaatgttgctcatgttcctaggaagattaatgaaccttccacaatttatcatgcttgcaatgcttcctttgcaatttgtagaaaggatagaaaggtgattgctaggaaattaggggcaaaatgcaagggagataaaacttgcatttgggtccctaaggatattgtcactaaccttgtaggacccaacaagagttgggtttatgcatccgggggtacaagctggattatcgaccgcggatgcacaaaccacatgacgggggagaagaagatgttcacctcctacgtcaagaacaaggattcccaagattcaatcatattcggtgatgggaaccaaggcaaggtgaaagggttaggaaagattgctatttcatctgagcactccatttctaatgaattcttagttgagtcgcttggatataatttgttatccgttagtcaattatgcaatatgggatataattgtttattcacaaatgtagatgtgtctgtctttagaagaagtgatggttcattagcttttaagggtgtattagacgacaaactctatttagttgactttgcaaaagaggagggcggtctagatgcatgcttaattgctaagactagcatgggctggctatggcatcgccgtttagctcatgtggggatgaagaaccttcacaggcttctaaagggagaacatgtgataggtctaactaatcttgtcaagcaggataaatctgaaacccaagggaccctcaagcgcttcctaaggagagctcaaaatgagtttgagctcgaggtgaagaagataaggagtgacaacgggtccgagttcaagaatcttcaagtggaggagtaccttgaggaggaagggattaagcacgagttctccgctccctacacaccacagcaaaatggtgtggtagagaggaagaacaggacgctcatagacatggcgaggacgatgcttggagagttcaagacccccgagcggttttggtcggaagccgtgaacacggcttgccacgccatcaacagggtctaccttcaccgcctcctcaagaagacttcgtatgagcttctaaccggtaacaaacccaatgtatcttacttttgtgtatttgggagcaaatgttacattctagtaaagagaggtagaaattctaagtttgctcccaaagctgtagaagggtttttgttaggttatgactcaaatacaaatgcgtatagagtcttcaacaaatcatcgggtttggttgaagtctctagcgacgttgtatttgatgagactaatggctctccaagagagcaagttgttgatcttgatgatgtagatggaggagacattccaacggccgcaatacgcaccatggcgattggcgatgtgcgaccactagaacaaaaggagcaagatcaaccttcttcctcaacaatggtgcatcctccaacccaagatgacgaacaagtacctcaagtggaggcgtgtgatcaagggggagcacaggatgtccaagttgaagaggaagaagcacctcaggcacctccaacccaagttcgagcaacgattcaaaggaatcatcccgtcgaccaaattttgggtgacattagcaagggagtaactactcgttctagattagttaatttttgtgagcattactcctttgtctcttctattgagcctttcagggtagaagaggccttgctagatccggactgggtattggccatgcaggaagagctcaataatttcaagagaaatgaagtttggacactggtgtcgcgtcccaagcaaaatgttgtgggaaccaagtgggtgttccgcaacaaacatgacgagcacggggtggtgacgaggaacaaggctcgacttgtggcaaaaggttatgcccaagtcgcaggtttggactttgaggagacttttgctcctgtggctaggctagagtctattcgtatattgctagcatatgccgctcaccattctttcaggttgttccaaatggatgtgaagagcgctttcctcaatgggccaattaaggaggaggtgtacgtggagcaaccccctggcttcgaagatgaacggtaccacgaccacttgaactacttccttgggttccaagtgaagcaactcaaggacggcaccttcatctcccaaacgaagtacacgcaagacttgctaaagcggtttgggatgaaggacgccaagcccgcaaagactccgatgggaactgacggacacatcgacttcaacaaaggaggtaagtccgttgatcaaaaagcataccggtccatgataggttccttgctttatttatgtgctagtagaccggatattatgcttagtgtatgcatgtgtgctagatttcaatccgatccaagggagtatcacttagtggctgtgaagcgaattcttagatatttagtcgctacgccttgcttcgggatctggtatccaaaggggtctacctttgacttaattggatattcagactccgattatgctggatgtaaggtcgataggaagagtacatcagggacgtgccaattcttaggaaggtccctggtgtcatggagttctaagaaacaaacctctgttgccctatccaccgctgaggccgagtacgttgccgcaggacagtgttgcgcgcaactactttggatgaggcaaaccctccgggactttggctacaatctgagcaaagtcccactcctatgtgataatgagagtgttatccgcatagcggacaatcctgttgagcacagccgcacaaagcacattgacatctggcatcactttttgagagaccaccagcaaaagggagatatcgaagtgttctatattagcaccgagaaccagctagccgatatctttaccaagcctttagatgaaaagaccttttgcaggctgcgtagtgagctaaatgtcttagattcgcggaacttggattga

SEQ ID NO: 184147 - DNA, 2283 bp, Zea mays
  Clone ID: MRT4577_99529C.1
cgcttcctaaggagagctcaaaatgagtttgagctcaaggtgaagaagataaggagcgacaacgggtccgagttcaagaaccttcaagtggaggagtaccttgaggaggaaggaatcaagcacgagttctccgttccctacacaccacagcaaaatggtgtggtagagaggaagaacaggacgcttattgacatggcaaggacgatgcttggagagttcaagacccccgggcggttttggtcggaagccgtgaacacgacttgccacgccataaaccgggtctaccttcatcgcctcctcaagaagacgtcgtatgagcttctaaccggtaacaaacccaatgtgtcatactttcgtgtttttgggagcaaatgttatattctagtaaagaaaggtagaaattctaagtttgctcccaaagctgtagaagggtttttgttaggttatgactcaaatacaaaggcgtatagggtcttcaacaaatcatcgggtttggttgaagtctctagcgacgttgtatttgatgaaactaatggctctccaagagagcaagttgttgatcttgataatgtagatgaagaagacgttccgacgaccgcaatacgcaccatggcaattggagatgtgcggccacaggaacaaaaggagcaagatcaaccttcttcctcaacaatggtgcaacccccaactcaagatgatgaacaggttcatcaagaagaggcgtgtgatcaagggggagcacaagatgatcatgttatggaggaagaagcacatcatgcccctccaactcaagttcgagcgacgattcaaaggaatcatcccgtcgaccagatattgggtgatattagcaagggagtaactactcgctctagattagttaatttttgtgagcattactcttttgtctcttctattgagcctttcagggtagaagaggccttgctagatccggactgggtgttggccatgcaggaggagctcaacaatttcaagagaaatgaagtttggacattggtgccacgtcccaagcaaaacgttgtgggaaccaagtgggtgttccgcaacaaacaggacgagcacggggtggtgacaaggaacaaggcacgtcttgtggcaaaaggttatgcccaagtcgcaggtttggactttgaggagacttttgctcctgtggctaggctagagtcaattcgcatattgttaccctatgccgctcaccattctttcaggttgttccaaatggatgtgaagagcgctttcctcaacgggccaatcaaggaggaggtgtacgtagagcaaccccctggctttgaggatgaacggtaccccgaccacgtgtgtaagctctctaaggcgctctatggacttaagcaagccccaagagcatggtatgaatgccttagagactttttaattgctaatgctttcaaggttgggaaagccgatccgactttattcactaatacttgtgatggtgacttatttgtgtgccaaatttatgtcgatgacataatatttggttctactaaccaaaagtcttgtgaagagtttagcagggtgatgactcaaaagttcgaaatgtcaatgatgggcgagttgaactacttccttgggttccaagtgaagcaactcaaggacgacactttcatttcccaaacgaagtacacgcaagatttgctcaagcggtttgggatgaaggacgccaagcccgcaaagactccaatgggaactgacggacacgtcgacctcaacaaaggagtcgctacgccttgcttcgggatctggtatccaaaggggtctacctttgacttaatcggatattcagactccgattatgctggatgtaaggttgataggaagagtacatcagggacgtgccaattcttaggaaggtccctggtgtcttggagttctaagaaacaaacttctgttgccctatccaccgctgaggctgagtatgttgccgcaggacagtgttgcgcgcaactactttggatgaggcaaaccctctgggactttggctacaatctgagcaaagtccccctcctatgtgataatgagagtgcaatccgcatggcggataatcctgttgaacacagctgcactaagcacatagacatccggcatcactttttgagagaccaccagcaaaagggagatatcgaagtgttttatgttagcaccgagaaccagctagccgatatctttaccaagcttttagatgagaagaccttttgcaggctgcgtagtgagctaaatgtcttagattcgcggaacttggactga

SEQ ID NO: 184148 - DNA, 533 bp, Zea mays
  Clone ID: MRT4577_9952C.1
gagtcaactaaccatgtgtacctgccttagcttattatttattcgtcatcaacagatccatccagaatgagcaacaaacagatgcagatgcagatgtgcttgcatcattcgtatcaccaccaccatccataatccatggatgcatcgtcatcggacgggcgggcgggcgggcgaggcgagcatagcacggcagctcatctccttctcgaaccgccacacgtagttgagccccaccaggagctccaccaccgccgcgtccaccttgtcgcgctccgcgaactgcagtgtctgcagcagcagcacgctgccgttgccgctcccgccccgctgctccaggctgcgctccgcctgccaccgcaccgtcgcgtgcgccatcggcgccagccactccaggatcccagccagcgccgcgcaccactgccctgcgagccccgggtccgccgcgggcaccgcgccgcgcagccgcgcccggagctgcgcgcgcacgctcgccgtcagcatcccgtacagctcgtcccgctcctcggggccca

SEQ ID NO: 184149 - DNA, 416 bp, Zea mays
  Clone ID: MRT4577_99530C.1
gagctaattgtggcgtgacacgcctgcgtaagctcggaattcgtctcggggggatttcgcacgcctgtgttgtgggacatcaagatggacagggcagtgggggaggcttaaaaggagggtttccatgtttacctaaaggggatggcatcacgttttttctgtgaagccagcctccagaactagcactggtaaaaaaacacattatatgcgccatgtgcacgatatctagataatgaatgacgtacgctacagtgatctttcgataacctagcgctatcccaccgagggagacggtcattcacattgttcggagctggaggagtacgagaaacgcgcctttcatccagagagaccacatgttccatactatcatgagctttggcagccacctcttgcgaaggggctacttgtgggct

SEQ ID NO: 184150 - DNA, 3195 bp, Zea mays
  Clone ID: MRT4577_99531C.1
gtttatgcatccgggggctcaagctggattatcgacagcggatgcacaaaccacatgacgggggagaagaagatgttcacctcctacgtcaagaacaaagattcccaagattcaatcatattcggtgacgggaatcaaggcaaggttaaaggactagggaagattgctatttcatccgagcactccatttcaaatgtgtttttagttgagtcgctcgggtataacttgttgtccgttagtcaactttgtaatatgggttataattgcttattcacaaatgtagatgtgtctgtctttagaaggagtgatggttcactagcttttaagggtgcactagacgacaaactctatttggttgattttgcaaaagaggaggccggtccagatgcatgcttaattgctaagactagcatgggctggctgtggcatcgccgtctagcacatgtggggatgaagaaccttcacaaacttctaaagggagaacatgtgttaggtctaacaaatgtgaatttcgaaaaagatagaccttgtgcagcttgtcaagcaggtaaacaggtgggaagtactcatcatagcaagaatgtaatgaccacatcaagacctctagagttacttcatatggacctcttcggacccatcgcctacctaagcattggaggaagtaagtatagtcttgttatagttgatgatttttcccgcttcacttgggtattctttttgcagaataaaacagaaacccaagggaccctcaagcgtttcctaaggagagctcaaaatgagtttgagctcaaggtgaagaagataaggagcgacaacggggccgagttcaagaaccttcaagtggaggagtaccttgaggaggaaggaatcaagcacgagttctccgctccctacacaccacagcaaaatggtgtggtagagaggaagaacaggacgctcatagacatggcgaggacgatgcttggagagttcaagacgcccgagcggttttggtcagaagccgtgaacacggcttgccacgccataaaccgggtctaccatcatcgcctcctcaagaagacttcatatgagattctaaccggtaacaaacccaacgtttcatactttcgtgtatttgggagtaaatgctacattctagtgaagaaaggtaggaattccaaatttgctcccaaagctgtagaagggtttttgttaggttatgactcaaatacaaaggcgtatagggtcttcaacaaatcatcgggtttggttgaagtctctagcgacgttgtatttgatgagactaatggctctccaagagagcaagttgttgatcttgatgatgtaaatgaagaagacgttccaacgactgcaatacacaccatggcaattggagatgtgcggccacaggaacaaaaggagcaagatcaaccttcttcctcaacaatggtgcaacccccaactcaagacgatgaacagccttttagggtagaagaagccttgctagatctggactgggtgttggccatgcaggaagagcttaataacttcaagcgaaatgaagtttggaccctggtgccacgtccaaagcaaaacgttgggggaaccaagtgggtgttccgcaacaaacaagacgagcacggagtggtgacaaggaacaaggctagacttgtggcaaaaggttatgcccaagtcgcaggtttggactttgaggagacttttgctcctgtggctaggctagagtccattcgcattttgttagcctatgctgctcaccattcttttaggttgttccaaatggatgtgaagagcgctttcctcaacgggccaatcaaggaggaggtgtacgtagagcaaccccctggctttgaggatgaacggtaccccgaccacgtgtgtaagctctctaaggcgctctatggacttaagcaagccccaagtgcatggtatgaatgccttagagactttttaattgctaatgctttcaaggttgggaaagccgatccaactttattcactaagacttgtgatggtgacttatttgtgtgccaaatttatgtcgatgacataatatttggttctactaaccaaaagtcttgtgaagagtttagcagggtgatgactcaaaagtttgagatgtcgatgatgggcgagttgaactacttccttgggttccaagtgaagcaactcaaggacggcactttcatctcccaaacgaagtacacgcaagacttgatcaagcggtttgagatgaaggacgccaagcccgcaaagactccaatgggaactgacggacacgtcgacctcaacaaaggaggtaagtctgttgatcaaaaagcataccggtctatgataggttccttgctttacttatgtgctagtagaccggatattatgcttagtgtatgcatgtgtgctagatttcaatccgatccaagggagtgtcacttagtggccgtgaagcgaattcttagatatttagtcgctacgccttgcttcgggatctggtatccaaaggggtctacctttgacttaattggatattcagactccgattatgctggatgtaaggttgataggaagagtacatcagggacgtgccaattcttaggaaggtccctggtgtcttggagttctaagaaacaaacttccgttgccctatccaccgctggggccgagtatgttgccgcaggacagtgttgcgcgcaactactttggatgaggcaaaccctcagggactttggctacaatctgagcaaagtcccactcctatgtgacaatgagagtgcaatctgcatggcgggtaatcctgttgaacacagccgcacaaagcacatagacatccgacatcactttttgagagatcaccagcaaaagggagatatcaaattgaagattttggtgaggcaatggggtttaagggccaaaaatgatcccgttttggtgcttaatgccaaagggggagaaattaaggccaaagcaagcaaatggatcagctaccacgtgctctcagaggcgaagacctccttccgaggccgaggcctaaggtcgggcgaggcggagcttcctgttgcgcccgaggctgaactcggttgttgtcagtctcaccctggtgggtggcacagcagtcggagcggggcgagtggcgctgttaacctgtcaggtcggtcagtgaaagggcgaagtgactgtggtcacttcgaccttgccgactga

SEQ ID NO: 184151 - DNA, 1317 bp, Zea mays
  Clone ID: MRT4577_99532C.1
atgcaggaggagctcaacaacttcaaaagaaatgaagtttggacactggtgcctcgtcccaagcaaaatgttgtgggaaccaagtgggtgttccgcaacaaacaagacgagcacgaggtggtgacaaggaacaaggcacgacttgtggcaaaaggttatgcccaagtcgtaggtttggactttgaggagacttttgctcctatggctaggctagagtccattcgtatcttgctagcatatgctgctcaccattctttcaggttattccaaatggatgtgaagagcgctttcctcaacgggccaatcaaggaggaggtgtacgtggagcaaccccctggcttcgaggatgaacggtaccccgaccacgtgtgtaagctctctaaggcgctctatggacttaagcaagccccaagagcatggtatgaatgccttagagactttttaattgctaatgctttcaaggttgggaaagccgatccaactctttttactaagacttgtgatggtgatctttttgtgtgccaaatttatgttgatgacataatatttggttctactaaccaaaagtcttgtgaagagtttagcagggtgatgactcagaaattcgagatgtcgatgatgggcgagttaagctacttccttgggttccaagtgaggcaactcaaggatggaaccttcatctcccaaacgaagtacacacaagatttgatcaagaggtttgggatgaaggaagccaagcccgcaaagactccgatgggaaccgacggacacaccgacctcaacaaaggagtcgctacgccttgtttcgggatctggtatccaaaggggtctacctttgacttgattggatattcagactccgactattctggatgtaaggtcgataggaagagtacatcggggacgtgcaaattcttaggaaggtccctggtgtcatggagttctaagaaacaaaccttcgttgccctatccaccgctgaggccgagtacgttgccgcaggacagtgttgcgcgcaactactttggatgaagcaaaccctcagggactttggctacaatctgagcaaagtctcactcctatgtgataatgagagtgctatccgcatggcggataatcctgttgaacacagccgcacaaagcacatagacatccggcatcactttttgagagaccaccagcaaaagggagatatcgaagtgtttcatgttagctccgagaaccagcaagccgatatctttaccaagcctttagatgagcagaccttttgcaagttgcgtagtgagctaaatgtcttagattcgcggaacttggattga

SEQ ID NO: 184152 - DNA, 268 bp, Zea mays
  Clone ID: MRT4577_99533C.1
acacgcgcagaccaagagctcggggggcatggtttaccaagactatcagtgttgagctcccctgaaccgcaacgctagggcgtgagccgagactaaccgcgggccggtagaccggcacaaaatggataatactcagagctcgacaaccggaacgggacggcggacatggagccgatgcggaacgaattggacagcaaccgggacagccagaggcacaatgtctccaggtgatggaggcgctacacacgctgggggccaacagggccga

SEQ ID NO: 184153 - DNA, 125 bp, Zea mays
  Clone ID: MRT4577_99534C.1
gagaccaaggccctgaattcctactcggaggcgattcagaacaccctgaagctgggttacaaggccgggatggccaaggggcttggcatcggctgcacctatggaatcgcctgtatgtcatgggc

SEQ ID NO: 184154 - DNA, 2940 bp, Zea mays
  Clone ID: MRT4577_99535C.1
atggacgaaggccttaagccgaagctttctgagcttcggttaaaaagacgcatttttgccatttctgaaggagaaatatctcaagacaaaaaggttgctgctgagacgaagctaaccgaagaggagaagcgttttgaggagaaaaaggttgtgtatccttacattgctggatttatcgagtcaatggcaaaaacaaatacagagaatattaccaaggagatactggaaggcctgtatgaagatactggtgacagtgatagttatgatgcagaaagtggaggcgaagattctgaggatcgaccctggagaccaagtcatgcaattttcggaaaatcaaccatcaagcaaagtcaccttgagaacatgagaggaagatactttcgggatatgtctattgtgggagctggcggagacaacaacgtccctgcccctgaagaagatgaagttgtgatttaccgaagcttcttcaaagctgggcttcggtttccattgagcaggtttgtggtcgaagtgttgaaaatttatcagatcttccttcatcagataacccccgaagctattattagaatggcaatttttgtctgggctgtgagaagccagggactggagccaagcgcgaaatgcttctgcagtatgcacgaacttgcatatgagacgaaggccatgggcaaagaacaatatcataataactttggctgttatggatttactgcccgccccaacgcaagctacccggtgccaacataccgaaaaaggtggcctggggcctggatggaggaatggttttacgtgaagaatgacttgaagggaagagaagatattaatgaagttattatgcgccctatctggtcccgcttcggccttcgaaagccgaaggttgaaatcgataaagctgccgaagcatgccagaaggcctttggtactccacaagtgatgaactgcttgagtcataatccaaggcagaagataacacattatccacatccttcgagggccaaggaaaaaaagagattgaacagagtttttgatgccattggttttgtttaccccgactattgctacccgctgcggggacggggaaagaagaggaaaaccgctgcttcgaccactctagatgagtctgcgccgaagagcaaaaagttgaaagtccttacccaccggccacgttatattgaaccggccgtggtgcctgagtttggcggggagacttcttcagctactaaaccaaaagagcccatttctcctacgcagaaggctgaagatccgactaaaatgccgaaggtacccttaggcgagccagctgagtcaaagactgataaagataaggctgaagagccaaaaattgaaggaacaaaaatgtttgaaattttaagcccttcggcagaagtaacagtgccgaaggcacaaaaaggtttttcggcaactcccaaaagaagaaggatggcaaatgtgctagatgtgttagaaacagtaaaggctttaagctctactccttcagagaaaatcggcgaagcttcaaaagtgcaaatcgaagctgaaacaaaaccggccaaaattgaagctgcaataatccaagctagtgccgaagctgagccttcagagctcgccgagaaaaaaccttcggaaattgaagaaagggcaatagaagaaaaggccatagagcaagtttcgcctgaaaaggttgctactcctgctcccgaagctttgaaagagagcattgattacatcatccgccatgctttgggaaaagtactttctaaagaagaaaaacgagaagctcaacattatgcccaaaaactgaaatacccgaaggaggcattggtatttaatggcagcgaggaagatgattttttgtactgtctcccagataacaaagagatatctgtcaaatgggagataggaagaagcttcggatttccgaagctagaagatggcctctcagtactgtcaaaggatgaattggctgacagtctagcatataatagcctaaagggcttgatccttagcaatgcccttagagcacagaaaaacatcgaagatgaagggtgtacaatggctctgaacaaccttcgttcagaggtgattgaaccaaggaacgaaggccttgaaaaggataaaatattaatttcattggtaaacaaaataaaagaagacgaagttagttccaaagctcaagctgagacccagaagaatgaaatcgaagaccttcagaaacaattagctgaggccaaagaaaaatgcgttgtcgctgaagctaatcgagatgccagcgaatattggaaaaaatatttagaaaaaacagttgcagagcttcgcgcatccaaggaaagatgttttgaaaaatctatggagtgcgtgaagaaaataaagactagcttcgccaacgtgggcgattattcaaacgaagataacttcatacgaggcgaccctgagggtgtcatcgagtggatcagcgaagaagccgaagcttttgaggaaatcttaagcgatcgtgaggacgtctgcgcattctctggtgcgagaggagttgcagccgtcttggagaaggcgggttgcgatcatgttaaaaccttggcccaggccgaagctgccttctccgtgggtgacacgaaggacccctcgaccgaagcaaatttaataggcggaaaatttttccctgatatctgggaaaatggcagccgagaaatggctcatgaaataatgaagaagagcgaaaaagatattcatgatgctcgagaagcaacgaaagaagctgagaaagctgcagaacttgagagacggatagttgaactacctcctccaccagagccattcgacccactagccgacccagaaacaaagaaagcaatagaaattattaatatggccgaagctattgtcgacgaagttgttaccaaattgtttaacgaagttgcagagaaagttctgaaggaagactag

SEQ ID NO: 184155 - DNA, 431 bp, Zea mays
  Clone ID: MRT4577_99536C.1
cttcttactatccggtagggacagtgcgagatctgctctgttacacttcaggtggaactggtgcgcgctggatacaatgaaacagttactgaaccgacaacatacacatgcgatacgaacatcaaaatcttcctttactaaagaggaagtcaagattgaaacaagtgggtttccaagatccatgatactctatgggcagtgcatcctaaacctaaactacatgaaaaggcctactactcgccgagatcaaccatggcgctttcctggcgtcattgctgaagagaggcgccaaaagaggttccacctgattatctggcatctgcgcaactggcagagcatgatgtggtgactccttcgtgccctctcttccagacaaacacgagcatagcgacagcccaaatatgggactgctaaggcccaaattgtcctta

SEQ ID NO: 184156 - DNA, 500 bp, Zea mays
  Clone ID: MRT4577_99537C.1
aattcggcacgaggcccaaatccatggcgccaccgggctaaaaaccccaaccgccggtccgccctcgctccatggcgctctccgagctcccgctccaccactccttccgcctctcgtcccgccccagcatccacagcctcctcccgctccgcctcctctcctcttcctcttcctcgtcctccgccgccgcggcttcggcctcctccccttcctccaccggtggcaatcgcgcggcccccagcaccggcgctccgtggctgcagaggtgggcgccctccgacccctcccgtcccgccccagctccggctcccatcccgtccccgaccacgtccatagaccgcatcgtccaccgcctccgcaacctcggcctcgcctccgacgaagacgacccctctgcctccgcctccgcctccgctgccacggccgccgcacccccggacggcaccgaacgcctcggcgacctgctccaccggggctgggcgcggcccgcccaccagttc

SEQ ID NO: 184157 - DNA, 605 bp, Zea mays
  unsure (1)..(605): unsure at all n locations
  Clone ID: MRT4577_99538C.1
ggctcggtccctataaggccgcatgtgctgattcccttacgtggtccggccgagtacaatggctctgaacaaccttcgttcaggggtgattgaactaaggaacgaaggccttgaaaaggataaaatattaatttcattggtaaacaaaataaaagaagacgaagctagttccaaagctcaagctgaggcccaaaagagtgaaattgaagaccttcggagacaattagccgaggccaaggaaaaatgcgttgttgctaaagctaatcgagatgccagcngaatatttggaaaaattatttagaaaagacagttgcagagcttcgcgcatccaaggaaaggtgttttgaaaaatctgtgggatgcgtgaaaaagatgaagactagcttcgccaacatgggcgcctattcaaacgaagataacttcatacgaggcgaccctgagggtgttatcgagtggatcagtggtgaagccgaagctttttaggaaatcttaagtgatcgtggnggacgtctgcgcattctctagtgtgagaggagttgcagccgtctttgagaaggcgggttgcgatcatgttaaaaccttggcccaggccgaagctgccttct

SEQ ID NO: 184158 - DNA, 255 bp, Zea mays
  Clone ID: MRT4577_99539C.1
tccgattgacccacgcgtctttttactcgtgcagttgtgcatgctccgactctagttgacattgtaatgacatgcaaccgtggaccatggaattgcacgcaggttgaccaacaccttcacatctgctttgcctcatgtccacaggtatttatccaccatggataaccagcctaacttcaagaaactcattggtgaagtcaagcagtcagagtaaagacctgatataccccaaggagctcctcgttgtaacgatcc

SEQ ID NO: 184159 - DNA, 1158 bp, Zea mays
  Clone ID: MRT4577_9953C.1
ctgtgcggcgctcaggcggcggttcacattgggtacctcgagggaggccgggaactctctatcctcttcccccctcgtccatccccatcccaccgccttgctctcccctctccacttccagctgtccatggctgcagcagcgtgctcctctgcctcgccgctcctcctcccctcagggccgagacatgcgtcggcctccagggcgtggtttctcggcggcaggagcagggcgctgagatcagaggcgccgtgctgctgcaaggccgccgccgcccgtggaagcgctccgcaatgcgggacggtcggtggtggcagcagcagcacccggagggggctgctaggcgtggccctgggagcctctgccttggggctggccgcgtttgacgccgtcgccgccgggttgccgccggaggagaagcccaagctctgcgacgccgcctgcgaaggcgagctcgaaaatgtgcctatggtaactacagaatccggactgcagtacaaggatatcaaagtgggcgaagggcctagcccacccgttggttttcaggttgcagcaaattatgttgctatggtgccaactgggcagatattcgacaggtgggattcggatagctgatgcctgacgtccagctagagatctgggattttatctctacttcgtttgcaaaacacaactcaactaattattgtcttcacaatcagcttgcagacttagaatctgttcctgtagaattttgttgtttattgggccttgggggatggaagccattctagttcttactgttcttcgctgctctgtgatgcagttcgctggagaaaggtcagccctacatattccgtgttggatcagggcaggtgatcaaggggcttgatgaggggattttgtcgatgaaggttggaggactacgtcggctgtacatacctgggccattagcgttccctaagggtcttacttctgctcctggaaggccaagagtacccccaagcagccctgtcgttttcgacgtcaatttactgtacataccaggtctcgatgatgagtgaaggcattctgtggcaacagtctctttttttttgtatacttcattcgagagcaacatactgtacatctagagcacattctttcaagctataaaatctatgcgaatatctatgttaacc

SEQ ID NO: 184160 - DNA, 278 bp, Zea mays
  Clone ID: MRT4577_99540C.1
cttagcaactaaacccatcaggtgaattttttttcgcacagaggctggacaactgggacaacatatcacaagttcacaaaacactaacatacacgattgttggttctcacactcacacacattttagcagcatcaactgatattcggaagtgcatgaattcttacccctaaaagagtatcggatagtggtaacttattcttccaattgatggtccacacttttaaaaactgtgatgcccgttggatctatcaggcacgctccatctcgacgtgctggt

SEQ ID NO: 184161 - DNA, 718 bp, Zea mays
  unsure (1)..(718): unsure at all n locations
  Clone ID: MRT4577_99541C.1
tcgagggccggccnnggaaaaaaattaaaaaaaaaaaaaaaaaaaaaaaaaaaaaaaaaaaaaaaaaaaaaaaaaaaaaaaaaaaaaaaaaaaaaaaaaaaaaaaaaaaaattcctcttcgttccgttgttcgcctcgggttaaaccctaagaagggagttgatttatccgttgcacccatgagaaatttgcagtctgagtctgtcaaggatgccatctcccaaattgttggggatgccaaggaaaaaaaaaggaagttcactgaaactgggaaatttcaaattggtctgaaaaattatgatccacaaaaggacaagggtttcaggggttctgttaagttgccccatatccctcgccccaaaataaaggggggcatgtttggggatgcccaccatgttgaggaggccgaaaaaatggaacttgactacttggatgttgaggttctcaaaaaaatgaacaaaaacaaaaagtttgttaaaaggtttgccaaaaagaaccatgttttcttggcatcaaaggccatcatcaagcaaattccccgtctccttggcccgggcctcaacaaggaaggaaagttcccgaccctggttactcaccagaaatccctcgagtccaaggggaacgaaactaaggcaaccgtcaagttccagttcaaaaaggttctttgcatggggtgttgccgttgcaaacttggcaatggaggaaaagcaaatccagc

SEQ ID NO: 184162 - DNA, 286 bp, Zea mays
  Clone ID: MRT4577_99542C.1
gtaaaaatataaaaaaaaaaaaacaatacaaatacaaaaaaaaaaaaaaaaaataataacagaaattcctggtggaaaaatccaagtgagaagctcttttccattatccattactccccttttgtgcttctttttttttggaagcagttgtccttggcatactcataatgtttctcttttgaagtgttatccattacttcgtgttcaacgcaaccttccctttcaccgttgattagtaataaagcacctaacgctttttctcattacctatattctttaatatttc

SEQ ID NO: 184163 - DNA, 423 bp, Zea mays
  Clone ID: MRT4577_99543C.1
attcacgggtcgacgcacgcgtccgaggacgcgtgggcggacgcgtgggctggcaggaaccagaaaaattttggaattcatggactggggtgactatggggcgaagggcaccttcattaatattggagcagtaggtgcgcagggcgtgcagatcgtgacgacggggagcgcaggggcgccagcgttgcttgggaagatgggtctgccgtgggggagtccaggcatgctacagatgagcacaggcgcgccgtggggtagagcaaaccaccgtcgtcgttgctgaatgggaaggccgttggccccaataacgcaaggcccgttctggggaaggcaagggcaaaacggggcctgttggtccgaccaaaaaaggctactggggaacttggtaccggtgaatccccccgttccccaagccaagccaca

SEQ ID NO: 184164 - DNA, 238 bp, Zea mays
  Clone ID: MRT4577_99544C.1
tcttttacgcgtagaccgccagcggtggaccgtataaaatatacaaataaaaagttaatactagactaacccgatagggggtgtttctgtatatgacaccaaaaacaacgtacgcacacatgctaagaagtttcatttgtagattgttgcctagttttaattgagtggggcctgttttaaagctcccgaattggaagaatccctgtctgtaccaaacttattcaacccctgcaacctg

SEQ ID NO: 184165 - DNA, 518 bp, Zea mays
  Clone ID: MRT4577_99545C.1
aagtaccctttctttgctgagttcttgcaaactactgcagcacgcaactgagaagcatcaagctctactcttgttgtgtactgaacgtgtgactagataacattaagcgtgaaccatggcggacaagatcgggacgacacggctacaggaggtacgtggcctgcgaccactaccacagactctacatgaggagggcgggggcttattactacaggcggggtaaacgtggctactacaagtgaggcggggatgacaactactggctgagcggaagatattgatactgtaggtgcacccgagacgactacacaacactgcacccaaggtggagactacaactagtgcctaccgggcgatgactacggacagagcggcgtttacagactactatcaccgcacctgcgtaggtatgatacaacaagggctgaaaccactgttactacagtgttttcaacagattgtgcaccaccaactacgacgaatacagacataggcaccgatggtaaagtacggctagc

SEQ ID NO: 184166 - DNA, 1206 bp, Zea mays
  Clone ID: MRT4577_99546C.1
agaccacccgaaaaacaagggaaaaaatagtaaagaaacggagcgaggctcctcctcgtttcctatctatcctgatccaaatccgccctactcgcttcatatatcctcctgcgaggaaaacaattcattccgcgccgcatctgggaaggtctcgtcttgctcgcctccgtccgtcgccgcaccctgcgtcgtcgccatggccaccgacgaagccaccaagccgtccccgatcccaccctatcccgagatgatcctggcggcgatcgagggtctagacgacaagagcgggtcgaacaagtccgccatctccaagtacatcgagggcaagtacggctcgctgccccccgcgcacgcgtcgctgctgaccgcgcacctggcgcgcatgaaggagtccggagagctcgtcttcctcaagaacaactacttccgcgcgggcgcccccgacgcgccgccgaagcgcgggcgcgggcgccctcccaaggcgcgggacccgaacgcgccggcgccggcgcccaagtcgccgtcgtccacggggcagcttgagtgctgtgttggtcgattaattatttaagctgaagccgccgtgaagcaggccaccgcggggatgcccaagccccgcggccgcccgcccaagaaggccaagaccgacggcgccgcgtccccgtccccgtcccctgcccctgcccctgctggcgacgggtccacccccggcaagcgcggccgcggcaggccccccaaggtacgccccgccgtgcccagcgagacggccgcggcttgaccccgcttcttggggataatagttcgtcccgccgcgagatgggatggttagggcgtagcaattcgtcccgctgcagctgcggctgcagctgccgtgttaatgttggtaggcttggtctccatgcttcatctaattgttgtcgtcgtcggcgtcgtcgttgctcaattaattaatggagtaattaggaggattcgatgtgctgtcttctgtgctgtgttgtgttcagttcagtttcaccgtgtgtctctggtgttatgtgctggatctgttgtaagctaagctagggagcttgagtgctgtgttggtcgattaattattataagctgctaatgtggatgtgtacaattaattagaggatggtgatgatgttcgtaaaatgttgatttgaaaaaaaaaaaaaaaaaaaaaaaaaaaaaaaaaaaaaaaaa

SEQ ID NO: 184167 - DNA, 331 bp, Zea mays
  Clone ID: MRT4577_99547C.1
gcctcacctgtgtcactcatcctccgcctgttcctccgtctcgattcagacacacgtgattgtgttagctccggagcaggctacgtgcactgtacgtgtgagtgccgcatctgcttaagctgtcgcgccgtcaatggaagccacaacgtcaaacccgcactcctcaacctcacttactcccacgcccgcgccgtcaatggaaggaaagccaaatctccttgcccgcagtcctcggaaggttcgcacattcacctactgtctcgctcgtcatggaagccagatcttcaaacccgtcgaccttgcaacgtctattgaatgtccatcaacttct

SEQ ID NO: 184168 - DNA, 2561 bp, Zea mays
  Clone ID: MRT4577_99548C.1
cgggctttctcagaatgcttgcttggggctttgtctggccagacagtagtttatgttactcatcagattgaatttctaccggcagctgatctcattttggtcatgaaagatggtaaaatagcacaggcaggaaaatacaatgaaattcttgattcaggagacgagttcatggagttagttggtgcacacaaggatgctctcgcagaattggacacaataggtgctgcaaacagaagcaacgagggatccccttccagaggtacagcaaaacttaccagatctctatcatcagctgaaaagaaagataaacaggacgaagggaacaatcagagtggacagctggtgcaggaggaagaaagagagaaaggcaaggttgggttttgggtctactggaaatacctcaccttagcttataagggtgcactcgtaccgctagtgttgcttgcacagctacttttccaagtcctacaaattgggagcaattactggatggcttgggctgctcccgtttcaaaggacgttgagcctccagtgagcatgtcaacactgatatatgtctatatcgcgttggctgttggaagctccttctgcgtcctcctaagagcgttgtttcttgtaacagcctcatataagacagcgactctattattcgacaagatgcacatgtccatattcagagccgctatgtctttctttgattccactccgagtggacgcatcctgaacagagcttccactgaccaaagtgaggtggacaccggcatcgcataccagatgggttctgttgcatttgctgtcatacaacttgttggaatcattgccgtgatgtctcaggttgcatggcaggtgttcgttgttttcattcccgtggctgctacgtgtttctggtatcagcgatactacattgataccgccagggagatgcaaaggctagtaggtgtctgcaaagctcctatcatacagcattttgccgaatcaataacaggatcgactaccatcagaagttttggcaaggaagatcagtttgtatcagcaaacagccatctaatggatgcctactccagaccgaaattctacaacgctggagcgatggaatggctttgctttcgcctggatgtgctgtcatcccttacatttgcgttctctttgatattcttgatcaatctacccccgggtttcatcgatccagggattgctggtcttgcagtcacatatgggcttaacctgaacatgctgcaagcatgggttgtctggagcatgtgcaatttggagaacaagattatatcagtagagagaatcctgcaatacataagcattcctgcagagccccctctttccattccagaagataggctggctctggctcagaactggccatccgaaggagagattcagctccttgacctccatgtaaaatatgccccgcagctgccatttgttctgaagggacttacagtcaccttcccgggaggcctcaagaccggtattgtcggaagaacaggaagcggcaaatcaaccctcatacaggccctcttccgtatcgtggacccgactattggccagatactaatagacggcgtcgacatctgcaccatcggtctgcacgatctgagatctaggctgagcatcattccacaagagccaaccatgttcgagggtaccgtgaggagcaacctcgaccctcttggggagtacactgacagtcaaatctgggaggccttggattgctgtcagttgggtgaggaggtgaggaggaaggagcacaagcttgactcaccagtgatagagaacggcgagaactggagcgtgggtcagcgtcagctcgtatgcctcggcagggtgatcctgaagcggagcaagatcctcgtcctggacgaagccaccgcttcggtggacacggcgacggacaacctgatccagaagacgcttcggcagcagttctcggaggcgacggtcatcaccatcgcgcacaggatcacgtccgtcctcgacagcgacatggtcctgctcctcgacaacggtgtggccgtggagcgcgacgcgccggccaggctgctggaggacaagtcgtcgctgttctccaagctcgtcgcggaatacacgatgaggtcgacgcacacgtagccacactactaggcagcccgcaactgagaaaggttgctttgctccacgccgtttgggggccgcggcaggctgactcgtcgaccacgccggcagatttttatgggtcgccggtgaggcaggcagcaggcttacttgtcgatgatgccgaaaagtgaaatattagaaagctagcgctattctgaacgtttgaggagttgagggggtacagggaatgagtcaagggcattaaggagttggtggaagtggttttgtgttagcatactatactagtgtagttctctgagcatgcatagcatgcatcaagaatatcttgagcttttagccacgtaccaggaatgtctcaaagttttttttttgggtaataatacctgtattcgatgggtggtaacactcctatactacgcctgaagaaatagtgaagcgtttgcacgttagct

SEQ ID NO: 184169 - DNA, 288 bp, Zea mays
  Clone ID: MRT4577_99549C.1
atgagaaaccgcatccctgaagtcaccgaggcagcggtgattgaagatttctaccggggatccaatgactcggccttcgttcgagccatattgcagaaagcgccgaccacctccgaacaactgtttcgagaggcagacctctacatcatcgctgacgagcgggcccaggacctcatcggagtgccctatcacaaggacatgcgccacaccctacagaactgcagggacttcaagcactccgtcggacacgaccggttgttccagcctctaccacctcccccaccatga

SEQ ID NO: 184170 - DNA, 438 bp, Zea mays
  Clone ID: MRT4577_9954C.1
gtctgggtcgctcgctacattctggataggatcacggagatcgcctgtgtggtggggacgggggaccctaatccgatcccgggcgactgaaacggcacacatgcgcactctaactacagcacggagtcgatgaagaaggaggtcgtatactaggtgatcaatgcggccatcgagaagctgaagctgcggcacatgtagcacatcgcggcatactgcgagggcaactagcgccggctcaccgtcattcacgagacctcctacatcaacacgttcagctggggcgtgaccaaccgatgcgcgtcaatgctcgtgttccgatagacggatcatatcgacaaggtctacttctaggaccgtcgcccagcatccaacatggacccatacgtggtcacctacatgatctccgaaaccaccatcatctggaagccctgaggtcta

SEQ ID NO: 184171 - DNA, 1974 bp, Zea mays
  Clone ID: MRT4577_99550C.1
ccggccgggaagggagaccgagacatcgggatcagcccgtgctcagtgctgacgtcgtcactcaaatgctgtttcgtccccgtccgcccatgtccatctagaattcgatccagtccaaactacctttcccggcttggtcaatcctgtcgccttcggtccatctcacacagactccggccggcggctccactccactgccccgccgctcggtgccgtacgtcgtcgtgctccaccgcctcgatcctcggtttattgctttgctgcatagcttccttggctagctaggtctcgtttcatcagtctcgatctgctgctcgttggccgccggcggctacgagcatggaaacgtacactacggacgacgcgctgacggccatggggtttggcaagttccaggcgcttgttcttgtgtacgcagggacgggctggctggcggactccatggagctcatgctgctctccttcgtcggaccgctggttcggcagcagtggaacgtctctgcccagcacgagagcctgctctccagcgtcgtcttcactggcatgctcctgggagcctgttcctggggctatatttccgacaaatacggaaggaggaccgctctattgttctccgttactcttaccgctggagcagggttgacaagtgctctatctcctaactacatatccctgctggcacttcggtttcttgtgggtgtaggagttggtggcacgcatgtattttcgtcttggtttctggaatttgtccctaccaagaaccgtggtgcctggatgcttgtgttctctgctttctggaccatcggaaccatcttcgaggcttcgcttgcgtgggtcgtgttgtcaagactgagctggcggtggctgctggcgttcacctccctgccatgcttcgccttgctcgtgtttttcgtcgtcgcaccggagtcgccacggtacctctgcgcgcagaacagaatatccgacgcgacccttgttcttgagaggatgtccaggacgaacaaggccgctcttcctcccggagctctggcataccaccacacggaaacgcagctgggactgggagagagtacaacagacgacgcctccaaatccggttccggtggcatggctgccctgcgcaggctgttctcgcgcaaactgctgagatccacgcttctcatctggttcgtttggtttgcaaactcctttgcctattacggcctagtgttgctgacgtcgcagctgagtgacgcgaaccggaggtgcgcatcgtcgtctgctcacaaatctcaagcgcacgaaggaaacccgaatctctataaagatgtcttcataactagcttagcagagtttccggggctggttatttctgccattatcgttgattggcttggccggaaagctacaatgtggatcttgctgtttggatgctgtggcttcctcggacctctggctgttcatcagaaggagtcggtgacaaccgctcttctgttcggtgctcgcgcctgtggcatggggagctctacggtcttgtgcttatacgcaccagaggtgtacccaacatcagcgcgctccacaggtgttggcattgccaccgccatcggaaaaattggcggcatcgtttgccccctcatcgctgtcggcatgctgcggagctgccaccaaatgcaagccgtcctggtctttgagcttgtcctaggcctcgcgggagtagcctgcatcctcttccctgtggagaccaagggccgcgagatgaaatgacagacccttcacagcacccaaagcgaccactactttcagcggcgtacgttcgaacataaagtatttttgttgaagacgcgtactcagaaaattgctcaagctatatctttaatgaaatattctgagtatcctttttatcaattagtttttttctaccctgcaacatcttactgttgactaattagaaaagaggggcggccgcccttaaaagcgctccatgaccctggaatt

SEQ ID NO: 184172 - DNA, 367 bp, Zea mays
  unsure (1)..(367): unsure at all n locations
  Clone ID: MRT4577_99551C.1
gacatacaacactacgaatacataaactcctctccacaaccacnaccgtgtcaaaaacatttactggtgggacaaacacaacattaacctctccaaaatatatgtcctaacacagttcaactctgcttcgctcaaccgccacctctctatctcctatataaacaacattgccttttacaagaatgacccattcattgaactccttccaccacaacatattccatataatcccaactgttttcaacgtactccaaataccattcatcaatatatctggctatttcactaacataatatcattcaattccttattcttgcattatatcatctcaaccctatgtactaccaaaagttcattcaacctcat

SEQ ID NO: 184173 - DNA, 763 bp, Zea mays
  Clone ID: MRT4577_99552C.1
gcacgaaggaaacccgaatctctataaagatgtcttcataactagcttagcaggtaggtactactactattaattaattgttggtgctgcctctaacccaaatatggcatcgccagagtttccggggctggttatttctgccattatcgttgattggcttggccggaaagctacaatgtggatcttgctgtttggatgctgtggcttcctcggacctctggctgttcatcagaaggagtcggtgacaaccgctcttctgttcggtgctcgcgcctgtggcatggggagctctacggtcttgtgcttatacgcaccagaggtaatggttgtgagttgtttcttgtatggttgagtactctctatattatattagctacccttcttcctctttgattggcaggtgtacccaacatcagcgcgctccacaggtgttggcattgccaccgccatcggaaaaattggcggcatcgtttgccccctcatcgctgtcggcatgctgcggagctgccaccaaatgcaagccgtcctggtctttgagcttgtcctaggcctcgcgggagtagcctgcatcctcttccctgtggagaccaagggccgcgagatgaaatgacagacccttcacagcacccaaagcgaccactactttcagcggcgtacgttcgaacataaagtatttttgttgaagacgcgtactcagaaaattgctcaagctatatctttaatgaaatattctgagtatccttttttccaattagttttttcg

SEQ ID NO: 184174 - DNA, 939 bp, Zea mays
  Clone ID: MRT4577_99553C.1
cctcgaggccggccgggaaaaattcaaaaaaaaaataaaaaaaaaaaaaaaaaccttctagaattcgatccagtccaaactacctttcccggcttggtcaatcctgtcgccttcggtccatctcacacagactccggccgggggttccactccactgccccgccgctcggtgccgtacgtcgtcgtgctccaccgcctcgatcctcggtttattgctttcctgcatagcttccttagctagctaggtctcgtttcatcagtctcgatctgctgctcgttggccgccggcggctacgagcatggaaacgtacactacggacgacgcgctgacggccatggggtttggcaagttccaggcgcttgttcttgtgtacgcagggacgggctggctggcggactccatggagctcatgctgctctccttcgtcggaccgctggttcggcagcagtggaacgtctctgcccagcacgagagcctgctctccagcgtcgtcttcactggcatgctcctgggagcctgttcctggggctatatttccgacaaatacggaaggaggtaacttgacctctctctgactctcttttcgtttgctatgttttgacccttccatatgtgaaaagcacaaatcttgtaccttgtgatgattgcaggaccgctctattgttctccgttactcttaccgctggagcagggttgacaagtgctctatctcctaactacatatccctgctggcacttcggtttcttgtgggtgtaggagttggtggcacgcatgtattttcgtcttggtttctggaatttgtccctaccaagaaccgtggtgcctggatgcttgtgttctctgctttctggaccatcggaaccatcttcgaggcttcgcttgcgtgggtcgggttgtcaagactgagctggcgggggctgctggcgttcacctccct

SEQ ID NO: 184175 - DNA, 321 bp, Zea mays
  Clone ID: MRT4577_99554C.1
ggccgctttttttttttttttttttcttctctttttttttttgtccaaacggcagcatttcaatgaaaagagtaaacattgagagctcaagctcgaaactaacagaaacagttgtgttcacctggcaaaacttaaccacaaaatgcctattgcagttctacaggtccccggataagacagtacacaagtgctgatcgctggcttgagatggcactacttttttggcatttaactttacttggagtcctgatcggcgtcctcagccccaccggtggagttgcgttgctatggtcctttccatcgaggctgcccttcctccgc

SEQ ID NO: 184176 - DNA, 437 bp, Zea mays
  Clone ID: MRT4577_99555C.1
gggggggcaaaaaaaaaaacccccatggggaaaatttgaaaatcaaaaaaaagcatccttaaaaaaggggcttacaagagggaaaaaaccacaaggggaagggaaaagggggagggaaaaattgtcccacaaaaaaaaggtaaaaaaaagggcgggtcccccaagtatttggggaaaaaccccttaaaaaaaaagcagggtattttaaagggggtttaaggggttaaaatttggaaaagggtccaaaaaaaaaatgcttctttttccggaaacaatgggcccatgggagaaaaaagtttatttattccagggtgggggggccaaaactttggtttaaaacaatccccgggcacaactccgggaagcaacataacctgcaaatgcctttggggaggggggaaaccttgcattgcacttgcactgcttcgggggaattt

SEQ ID NO: 184177 - DNA, 843 bp, Zea mays
  Clone ID: MRT4577_99556C.1
ttggggaccctcgaggccggccgggccagctttcctgcttactcgaaaaaggaacggagaaggcgtcctcgacgactgcccatggccgccgcccggacctaggctagggattgctgtctcctgagtcccgacctaccaaggcggaaagggagagggggcgctgtggcgtcaggaaataactggaagccgagggctgagggcgagttcagagtcaggtggttatcgctttctttttcgttttctttttccggagggtagtattggggatgccggttgctaggccggagccgcaggagccccgggtgatcgcccatgtcgacatggactgcttctatgttcaagtcgagcagcggaggaacccggcgctcaggggacagccgaccgccgtggtgcagtacaacggctggaaaggcggcggcttgattgccgtcagctacgaggctcgtggatttggtgtgaagaggtccatgcgcggagatgaggccaagagggtttgtcctggtattaatcttgttcaggtcccagtggcgcgtggcaaggctgaccttaatctttacagaagtgctggtgctgaggttgttgcaatccttgcaagcaaagggaagtgcgagcgggcatccatcgacgaagtttatcttgaccttactgatgcagcaaatgaaatggtcttacaagctcccccagattcaccagaggggatttttatggaggcggcaaagtcaaatatcttgggccttcccgctgatgccatgctctatcagttagatttgttactgctctgctatttgatgtagcatggtcataggccctgatatattcacgatggagcccgtaattgttgca

SEQ ID NO: 184178 - DNA, 431 bp, Zea mays
  unsure (1)..(431): unsure at all n locations
  Clone ID: MRT4577_99557C.1
ggcgcctcccggcgcttccccgccccttccccccactctccggcccgcgcttcctgggcagccttttttttttgcctggcatggccttttgggggggggggcttnttnccancnnncacacatctccggggggagtacccactgggagcggagctgtgaacctcctcctctcgcgcctctcgttgcccccgcggctggtcgtcccctcggcgccttcttgtncctgccggggggggaacccgcggcgttttttctcgaggacagctgggcacgtctccggtggggcgtggctcacacgccggtcccacgaccgcacgctcgcgcaggggctcaagggtgaccccacgttcctggtggtggggcctgacatgacgctggcccccttcgggatcaacgccgtgtgctctcacctccgcttgcgtcgtgccgtg

SEQ ID NO: 184179 - DNA, 656 bp, Zea mays
  Clone ID: MRT4577_99558C.1
accaatgcacatcttctctgggtctcatctccatcctctactcttcttgctcatactgctacactctatctcattctgctagatcctcgaaaccctaggagatgtgctatgaccgctgacgcggaagtgatggccatggagcctgatctagtaacgaaaggtcttcgcggacgattactacctaacggtcgagaccaaccgcacgtcgctgctctgcttgtaccagcagacctccatgctcaccttcgacgttgacaagaacctcggatcgctcgccattgacggctggctcgaatctctccctttccacgactgccagcattagatcgcccccgtagactggcacgcatccggctcccagtgagtaatgatcgtcttcgactacgactccatacagatcgcccccgagttacaccccatgacggtctctcaggcattctatttgctgacggacgttgtccccctcttctagcagaatgaactgtccctactgatgtatggataaagacaatcaatactcttgtgatgaaagaattgataattaatgtcatggctaaactatgaacacttaaagctgccgctactctggcctctcttgaatcctacaagttggatgcttgctgtattacaagagattgctagacttggattatttc

SEQ ID NO: 184180 - DNA, 292 bp, Zea mays
  Clone ID: MRT4577_99559C.1
gtccaagctctaaagctggtgtgcgaccaaagcggcgagtgcaacggatccacgggctttagccaaaatctgcgtatccaggatgttgaggctattagtagagcgagtggggatgtagacttctttgacccaacgctatttgccgagctgttcacctcatcaacgcggtatgatgctatggatgcctctggttttttccgaaaaaactccagttcaggtactctctaagaaaggagagctggactggacaaaaaaagggggctgtgtcaagcagcttctgtgagcccacttg

SEQ ID NO: 184181 - DNA, 446 bp, Zea mays
  unsure (1)..(446): unsure at all n locations
  Clone ID: MRT4577_9955C.1
aacccccgggtncgnacccacgcgttcctgcccacgcgtncnncgcttgtgggcacgctgtggcccctnatcacgngtatcacataccactcccggcgatgcccttccacnnccgccgcgtccgtacatcggnaccccatgctctccacnnacccgccgcagggctgggcgcccttccgccggggnaggggtctgccctgggaggcgttcacnnacgtgcttctgcgcttggcgtgcgccgggtgtgcttccagaaggnncggcgaagcctnngaaaaggcgagnngcctttcctgcgcgggagaggggtaccgggacccggtgtgcgtcaagaagaatatatnnttcggatgggcagtnnntctaagctttgcaactnnncgtttggagaaaagcatnngaatctcncnnagtgaacccggtgtgnngaagaatgaagaaatgca

SEQ ID NO: 184182 - DNA, 320 bp, Zea mays
  Clone ID: MRT4577_99560C.1
cgtaccggaactgaattctcgactcacgccacgcgtacgcagactcacgcgaagcaggacgctgcacacctacctgttagcctactccagagtcggggagccagactgagcgacagaccgactgacatggcctctcacatgggctctcaccgaggccctctcctactgcctccgatactgccttcgtaaccgtgcctacagcctgctgaaggaactgatcagcgaactgcacctacgcatcgactatcactacgaagccaattcggtacatgctctgcatgatcttattgatcagcttgtagtccacattgctttctaca

SEQ ID NO: 184183 - DNA, 263 bp, Zea mays
  Clone ID: MRT4577_99561C.1
ggcccggaatttatggccggggccacgcgcctactagtcggggggcgccctctttttttggggggcctttttaggagctgggagcttgaaacgaacacgaagtgacttaggaagggccggacgccattggatggagaaagggcaaatgccctatacagcaacacgcgtcatgacacacgaggcagcaaggaggggtcgggctacctatacaattgctgtagtgggccaggcactgacgatggcaactaggggggacacacggg

SEQ ID NO: 184184 - DNA, 551 bp, Zea mays
  Clone ID: MRT4577_99562C.1
ctggccttgacgtccaatatccccggtccgtatgggtcgttacgccgagcgccggggctccggcgttccgcttcctcccgtccgaggtggaggacatggaggcgcgcctgctgcttgtcacaaccgcatccccacaccgcgccgtgctggacaccctctcctataagttatacgcttagtccgagcgcgctggcaaggcggacatccagaccaaccaggtgtggaactggtttaccatctactgcactaacacctgcccaaaacttccagagacctgaacggaccggcagctaaaagacgccctatgcagctgatcaccccaacatgccgctaacgcctgcggcttgaggggtgttcagctctcttctggtgctggtgcgcaccaatggtgctcctctccgggaagaatcctgtggaaagtgtgtcagttaagtttgacgccacgacagcgtcggatggggcttgggatgatgttgctgcctttctttccatacgatgttggaatccgctgacccggaggtgctggttcgttcttctggatttactgcaga

SEQ ID NO: 184185 - DNA, 919 bp, Zea mays
  Clone ID: MRT4577_99563C.1
gattgggtacctcgaggccggccgggatgtcactatatgcatgttgtgatttcagctggtaccttaaatctgaagatttagtaaaaaaaaaaaaattaaggagtgaggaaccagatccttgcttgcattggcggagcagcatcatgccttccacgacagcgcagcagaagccccacgtcgtgctggtgccgttcccggcgcacggccacatcgcgccgcacgtgcagctggcgcgcgccctccgcgcccgcggcgtccacgccacgctcgtccacaccgagctgtaccaccgccgcctgctgcgcaccaagcagcagcaggccacgggcggcgacgacgccctggacccggacgagggcttctccgtcgaggtcatcccggacgggctatcgctggaggacccaccgcgcacgctgcgtgcgtaccacgaggcgatggagcgcaactgcctcgagccgttcaaggcgctgctgcgggacctgctgctgccgcccaccggcgtgccgccggtcagctgcgtcgtggccgacaccccgatgccgttcgcggccgtggcggcgcgcgaggttggcgtcccggacgtgcagttcttcacggcgtccgcgtgcggcctcatgggctacctccagttccaggagctcttggcgagggaggtcatccctcttagacccacctacgagaccgacggctccctcgacgccccgctggactgggtgcccgggatgaaggccgtgcgcctaagggacctgccgacgttctgccacaccacggacgccgacgactggcttgtgcacttccacgtccaccagatgaagacggccgccgcctccaaggccgtcgtcctcaacactctctacgacatggagaaggacgtcgtcgacgcgctcggcgccgcactttgccggccatctacaccgtc

SEQ ID NO: 184186 - DNA, 820 bp, Zea mays
  unsure (1)..(820): unsure at all n locations
  Clone ID: MRT4577_99564C.1
gaagaaacagaggaacccaagaaaaggtaggtggcctccttcctaccaaccccgggcggcggaaataaatcggcaatcccctgcgatttactgccgcttcaagttcaactcctcagattcgcagcttcgggggagcggattgctgcgcaaatggggtccggatctttcctcaaggtgctcgtcagcaacctggacgttctcgccgggcccatagtttcactcgcttatcctctgtatgcgtctgttcgagcaatagaaacaaaatctcctattgatgatcagcaatggctcacttactgggtgctgtactcgtttatcactctgtttgagctcacttttgctgcagtaattgaatggctccctttctggtcttatggaaagctgtttttcaattgctggttggtcttgccctactttaacggtgctgcgcatgtttatgagcattttgtgcggccaatgattgtgaaccagcaggttgtaaacatctggtatcttccaaaaaaggaaggttcagacaaacctgacgatgtaatttcagctgcacagaaatacattgaacaaaatggatcaaaagcatttgagactctcgttaacaagtttaagactacaaacgcgaggcgctcaattttggaggaggtagaggcggaaaggagagccagggctgaacgagagctggcagcgagggatgtgaatccattcttccacccgaattactgattctgcaaagctctactggtcangcatcaggtgacacaatgtatgttcacctgatgcgctgctagttctttttagctatatactatatttagccctgcatttt

SEQ ID NO: 184187 - DNA, 380 bp, Zea mays
  unsure (1)..(380): unsure at all n locations
  Clone ID: MRT4577_99565C.1
ngacattgttctgcttgctctgcacatcggcatgacgacgtctgatgatgctagctatccacaaatgagcacaggctatcgcatgctactactgcatctactgcatgtaaccttagagctaaacttgatcgctggatgatcatgtccatcattagttctagtgattagtccttgcattttgtttggttggacttggacatattgctagtagctaggcctagtggagaagttcttcgatcgtgtcctccaagtctgtattgtagggccgcttttcaagggattaaacaaagctcgccgcactttggcgttcgtgcccagaaaaaaaaaaaagacgagttgatggcgttatttcataagattcaaccggctggccagcattt

SEQ ID NO: 184188 - DNA, 452 bp, Zea mays
  Clone ID: MRT4577_99566C.1
ataacaccccccgcggccgcccgtggaggcgagcacccccccaagcggggcggaaacaaggagagacccccccccggggaaaaagggggaaccaatcacaataacacacaacctccggggaaaaaagcataaaccgaaaaaacccccgcacacaaaagagggagcaaacaaaaagtaaaagcgcggggcccactgaccggggaacaaaccaaaaaccgggggggcccgccgacccaccgaatcggacaaaaaacagcgagaggcccaacgcaaaaaaagaacccccccacccccgagaagagggactcggagaggggggcccttctcctgctgccagcggaatcacctgactcaaaggggggaatacggggggccacggaaataggcgaaaacggaggaaagaacatcggaccccaaagccagcggaagccacgaaaaaaaaaacagcccaa

SEQ ID NO: 184189 - DNA, 192 bp, Zea mays
  Clone ID: MRT4577_99567C.1
acgcggggttccttatgtctccatgtaacttcgtcaacactaggttaagaggaggtttgagagttaacctgacagatacactcaagattaacagctatttattcatgttctgttgaagataaaaaaaaaaaaaaaaaaaaaaaaaaaaaaaaataaaaaaaaaaaaaaaaaaaaaaaaaaaggtccctgcgc

SEQ ID NO: 184190 - DNA, 424 bp, Zea mays
  unsure (1)..(424): unsure at all n locations
  Clone ID: MRT4577_99568C.1
cgcgtgcctgtggtgctatantgagttggtgggccttgcntggcggaggcgtggacccgtactctatggagccacncnngcctttggaatttgatagcccgatcggnngcgggcggtccctgnnggcggctggaccgactgcatctcaaaggaacctggaattggaagctcgctgtngcggtcagatgaagatggaagagtcaatagctcataagaccaactaggacaaagggtcatccattcataagttcaacgggatccgccttctctgttgagggtcggcaaggcgcgccgctctgaacgaactcacnaagccgcaaaagcgtggtgtggtcgcatgcatttgggggcaaaaggccaagggcggcagccgcactgcactgcaccgcccgctgctgctagctagtagctcgcccggtaccta

SEQ ID NO: 184191 - DNA, 835 bp, Zea mays
  Clone ID: MRT4577_99569C.1
tgggtacctcgaggccggccgggataccatccctcgaccggccacctctccccaattgcatcgcatccccaggacttgccgcccggtccagagacggcgataatgggggcttctgaggtgtggtcatcggtgccggcctggctggcgatcgccgtcggcttggcggccgtggtttcctcgtcggaggctcacgtcttctacgccggtggccgcgacggctgggtccttgaccccaccgagagctacaaccattgggccgggcgcagccggttccaagtgaacgacaccatcgtgttcacgcacgaggagggcgtcgactcggtgctgctggtgacggagcaggacttcgacacgtgcaacacgcgcaacccggtccggcggctccaggccgtcggcagcagcggcagttcggagcgttcggtgttcaagctcgaccggtccggcccgttcttcttcatcagcagcgacgaggaacggtgccaaaagggccagaagctgtacgtaatcgtgatggcggttcgccggtcgacgacgccggcggcaccggcaccggcacccgacgcggcgttcccgccggcgccttcaccggtacccgattcggcgttcccgccggcgccttcaccggtgtgggcctcggcgcccgacaacgcgcacgctccaccaccgacggcgggtgcgtcacgtctggacgacggagcgatcatcggctctgtgcttggggttataggagctttggtgctctgtaccgtgtactaatcagaaatcagaaaccaagactccaaggggcgttccgcctgtgtggttttcaccgtctcttttgctaatcatgtttctt

SEQ ID NO: 184192 - DNA, 508 bp, Zea mays
  unsure (1)..(508): unsure at all n locations
  Clone ID: MRT4577_9956C.1
gaccggccggaatttcgggcgccaggagctcgcaccggccacaccccccgcccggcgcacagncgagaacggcggccgcaccacggcgagccccaccacggcgttggccggcacccccancaaggngggcacccccggcgagggccgcaacaactagtgttgngttgagggtgtgcccaacgcgccggcgaccggcagcccaaaggacccccccgaccgcgggaaggacccccaccccttgttcggcgagcccccgagctacctcaccggcgagcgccccgagcgacgacggctgggacaccgccgggctgcccgccgaccccgagaccttggccaagaaccgcgagctggaggagaaccactcccgctgggccaagctcggcgcgctcggctgcaacttccccgagccgctctcccgcaacggcgtcaagatcggcgaggccggcgggctcaaggccggctcccagatcgtcagcgagggcgggctggactacgctagcaaccccag

SEQ ID NO: 184193 - DNA, 463 bp, Zea mays
  Clone ID: MRT4577_99570C.1
atatggggaaccgatctcctactcaatagggggcctgacacaggacctagtggatcgaaacagctgcagcgtcggcctctgacctgcaaacggtgcctgcataacctgatgtggctacataatcacataattattgggctctcatgaccacacacccatggaatacatggctgtgcctagagcttgagattcccactgtgtaaggggtggactgaaaggaaccgctgtgatccgatctgggacggatcatgtacaaccactgggcttgcttgttactctatggctcacgaatgtggcggaaatatgcgtgcacacacacataatgttcatcagaaggcggtgaaccatactgagggtgcaaatggaccaaccgagaaccctggaaatcggcacccatacgtattgccactgatgagatgagaatcaactctggatgctgccaatactgctgcaagaatcaaag

SEQ ID NO: 184194 - DNA, 295 bp, Zea mays
  Clone ID: MRT4577_99571C.1
gggggttgtgggtttttgggaggggggggtttttttttaaacactcatctgaaacttgattaaaggcaatatatggaagggaaattgcccgggtggaacaaagggcaaactaaacacaccctatgaccatgttttggggacccatgccaccacctatgaggacaggtaccaggggtttgagataaaagtctccccccaaaacaaatggtggaaaaattcccccacaaaaataataaattccttcgatatgaaagggaaaaactggaccaaatctccactgggctggaccgggagg

SEQ ID NO: 184195 - DNA, 455 bp, Zea mays
  Clone ID: MRT4577_99572C.1
attaaaattcacttttttttataaattatttgtgtttacattttctatttcgattgaaaaatactttttttatcaaacagaaaaaccccccaagatcggaccggttcccaccagaaaaccaacccgacatacgggggcggactaacagctatcaaaaaaaatgataataaatttttcctgtgtaaaactcttatccgttcccaatgccaaaaaacataccacccaaaatcataaagatgaacaggccgcggtacctaaaaagggaactacctcacattaaaagcgttggcctaactgacattaattcagttgggaaaactgtccggccaacaaaataaaaaaaaccccccacacggggagaaaagaaaattccaaattgggcgccaagggggtttttgttttaaccaccaaaaccggtaacaatttgatgcctttaaccaaccgcccctgaaaaa

SEQ ID NO: 184196 - DNA, 510 bp, Zea mays
  Clone ID: MRT4577_99573C.1
aactgaaactaagtcatatcccaaatcactcactgcagtgttactgaaaatagaacaaacatagaaatagttgcagtggtacaaaaacgacacaaaaaaaagaatagttatttttctaatcagaccgggactttcattaggtggctcacgcatagccagtcatgccaacgctgggagttgtcttactgatcctttttgtagcttggctagtggccttagaatagtacatgtagaagtagacgtccaaaatcatggtgaacaccacgaagactgctccggcaataaacactcctttgcgcagagtttggcaggtccagttaccagcatataccatatccctatacttggtgtggtatgcgttctttgttgctccggcaattaggcaggcctcagcaactgcaaatgtgatccgtagccagtagcaatatcggagtcataaacacaaaatgtggcattggagctgtctgtgactattgaacccgtgctgcggcggcgctcggcggcgacggc

SEQ ID NO: 184197 - DNA, 262 bp, Zea mays
  Clone ID: MRT4577_99574C.1
gacgcatacgtaacggtcggatacacaaaaaccacccgctttttttctttaccattactcccacctctgggtcggtcccatttgaaccaaaacccagaccaaaacaccacaattaccaccaccttcaccactcatacagcgggagaaagagagccgagaggcgagccgtattgtcaaaccgggcgagacgcattgctgcaaccgcccaccgcgcacacgcattggatgcacacgatcgtcaccatacgagcgagcccagcag

SEQ ID NO: 184198 - DNA, 948 bp, Zea mays
  Clone ID: MRT4577_99575C.1
gcgccgccgggcaccggcccggccgctcggatttacccgccgagaaggccggtgctgttctactgctcgcataactttccctttccccatcccacgcagcagcgacaagagcaaatcgaagggctaacgactgagcgagtgccactatccctttgcttgccctggagaggagagggtgcgctatgggcgatacagggagcagctccattctggtgcacattctggtggtcgccctatgcctgaccgcctttggcttcgccgtcgccgccgagcgccgccgcagcacgggttcaatagtcacagacagctccaatgccacattttgtgtttatgactccgatattgctactggctacggtgttggtgctttcctgtttcttctctcaggccactcactgctcatgggtgttacaagatgcatgtgcttcggtgcaccacttgcaccaggtggaagcagagcatggtccatcatatacttcgcatcgtcatggatcacatttgcagttgctgaggcctgcctaattgccggagcaacaaagaacgcataccacaccaagtatagggatatggtatatgctggtaactggacctgccaaactctgcgcaaaggagtgtttattgccggagcagtcttcgtggtgttcaccatgattttggacgtctacttctacatgtactattctaaggccactagccaagctacaaaaaggatcagtaagacaactcccagcgttggcatgactggctatgcgtgagccacctaatgaaagtcccggtctgattagaaaaataactatttcttttttttgtgtcgtttttgtaccactgcaactatttctatgtttgttctattttcagtaacactgcagtgagtgatttgggatatgacttagtttcagttaaatattttatgcatatatatatatgcctgatgatggattggtttgg

SEQ ID NO: 184199 - DNA, 203 bp, Zea mays
  Clone ID: MRT4577_99576C.1
ttctcgcgtacgctcacaggtgccagcctatggggactctgtcaaacgcggaccatgttcaaaaccaagagtgcaaactcgcttgtcaaatagacagactccagcacacacccgctagctatcatcactgacattctgtggggaccgcggatacaggggcactggtggttgatccacacggactgaacagaggagagcatgat

SEQ ID NO: 184200 - DNA, 1041 bp, Zea mays
  Clone ID: MRT4577_99577C.1
atgggggggcacccgcgttgccttcgtcttgatgccgttggaggtgcgcgacttcgcgggggttggcgcccttcagccatcgctcggcttcaaggattttcatcatgcagcccggctgcattccctcaccaatggtcatccaggatgatgaccaccagttcggtggtggggagaagcaagccgggctacggcctctgccccgccctcagcttcaaggatcttcatcatccttgctgtggcggagggcgagctgagccggggttctacctcccgcatgggccggcaggctgcctcttccttcagcattcaggggagagggcgctcaccggccttgcggagggggcgaactttgccaacgcgggaccggtcggccgcaagcgtcgtcagctccagcgtgcctggctcgctggctcagctggctctgtcgcggcgtccgacgctgcctcctgccgcttgatccgggcgtggccgtccgtccacctcaggggcgactgttgcgctgcgcgcaccaggggatcgtccaagacgtccacgacgcctccgcgcggaggtctgtgcatgcccgtccgcgaggacttaagtggggatctgccgatgcgggctggggcggccgccattcgttggcatagcgctggcacgcaggtggccactgtcgtcggtgctgaggtggtggtcgctagaggaggtttctccgccgatgagaccgtcggcgccacccgcggtcagacctccgactctttggctttgatggtttgtcctcgcccctcgagtggggacgtgggcgagggccttcttacagcagcgttttcccagaggtcatcgctgctgctgtttagctgcccaaggcggaggtcgttgtcgttgctgatggagcggtccccagcgagccacccgaaatttgttgtcccgcaggccctctggtgtagaggttgttcatacccacgggagtggaatcggagttccgtttgtaatggcaccctgagtatgggtgtttgttcattgtggctgacgaggcctgaacatctgggtatttgggcgtga

SEQ ID NO: 184201 - DNA, 445 bp, Zea mays
  unsure (1)..(445): unsure at all n locations
  Clone ID: MRT4577_99578C.1
aaggacgcatgtgccctcaggcacttaggttatccccggaatattcccataaaggaggggtacagactgtaattatagggaaacctttataaattaaactcgtaatgcgcagcggccccgcagggcctgttacaatgggccgggtcacacgtgggcttccatttcaagtgaggctgcgggatgggataaccttgtcataggccttcgtccaacgatgcatgggacgaagggtaagtctgccaatcgttttgggaccaagggtaaatctgtcaatcgtcttgttttggttgatgcaacgaaactgacaaaggcattgagcgaagggtgacgtttttaccttcgccccaacggagggaaaaaaaacaagggcccagcgtantgaacaacnaccgaccctagggaaaaagcgcaactgcagggcatgcccacgtccgcgctggggaaa

SEQ ID NO: 184202 - DNA, 717 bp, Zea mays
  Clone ID: MRT4577_99579C.1
tgggtacctcgaggccggccgggatcctgttaccctttttttctttccttcctattttcggttcgtgcaaacttggggcggcggcggtcgtgcctacctacctccgaggctgcggcgccggctggcgcgcctgccagccttcggggcggtggtgcccgcgccagcctgcgtatcttcgaggtcgtgtcgccggtggcggtcggtgcctgcaggctcgtgtgcccatggagtggcagcggcggcagtcggaacgccgcccgcggaatcagccgcgcctacatattcacttgcaacggcgcaggtggcttaacctgtgtgttcgtgctcgtggcgcagtggcttggcttgcgcgcttgccgcgggacggcggcggcgcatgggagctggcctgcgcagcaatagcatgagcttcgtacgcaacagcgatggcctgtgctcggtcacgatggggtcgcgtctgctcgtcagcacacctttgaagcaacagcggcgcgacgccctcgtgccgtagaggtggtgctgcgacggctgcgcgcccacttgccggagcggcgatgtctggtttcgcctgcagtagtagcggctgggcccgtgctcgcgcgcctgcgtacggcagcgcgacctgctcgctcgcctgcgtggcggtgccctgcgtacggcagcgcggcctgctcgctcgcctgcgtggcggtgccatggccgttgtgcccgcatgct

SEQ ID NO: 184203 - DNA, 359 bp, Zea mays
  Clone ID: MRT4577_99580C.1
gcctgcggtaccggtctcggaattccggggtacgacgtcacgcgtacgcggacgcatcgagtcgttccaaatccatgcatgctcgtctgctcatttccgcagcgatgtaacacggatgtccaagatcaagatcgggatcaatgggctcggcaggatcggacggctgatggccagggcgaccctgcatagtgacaacttcacgctcgtaagcgggcaagactgcttaatcagcacagaatacatgtcctacatgaccaagtacgacactgtgcacggactgtggacgcactctgcaaccaatgcgaagtgactgcaaaactcctgttcgtttagcgagaaggatgttgcctgtgttagtc

SEQ ID NO: 184204 - DNA, 427 bp, Zea mays
  unsure (1)..(427): unsure at all n locations
  Clone ID: MRT4577_99581C.1
gagcctcgtatacgcgtacagccgccgcccttttttttttttttttttttttctccngaaagacaagggttttttttgggtggggttgggtttaaagctttagttttttttatttttacatgaatatattttggaaaaattggctaccaagttgttttacttcgtttgttatatcccgaaaatttccaggttcattttcaaaaattacctaaaattctttttggtcggatttttttcctactatccaaccctttctcttactccacaaaatttattcacccagatgcttgttcctcaaaaaatcgccgggcattttatttaaaattcttttgaactctaaaggccgattttttggatttattgaaaattttagcccccgattcatttgattgaagttaatgtaaaaaaaatcttcaggggttttttt

SEQ ID NO: 184205 - DNA, 465 bp, Zea mays
  unsure (1)..(465): unsure at all n locations
  Clone ID: MRT4577_99582C.1
catacaancnnnnntagttctaaaacaaacaatattaaaaaataccaaacttacatacacatagggaaagagatcataaataataaggtggtgggacctaatttaaaattcgctgcccatttttttatctccttccttttctttacaattccttgactttactcatactttatttgggggcccccttttcttttcccttcttctctccttttacctttacaggccttcacctttcttcgttgcccccaatttcttttcctgggttgcattttcaactcgccctgttgtgtatctttcagccctcccccttttttattccctttcaaaaattccccttcacttactgtgggatttatataacacatcctttcccctctctttccttccttaattttcgccctttcccttcttttttttcccccccccttttttttgggccttttttctccgtttttttgttttttt

SEQ ID NO: 184206 - DNA, 121 bp, Zea mays
  Clone ID: MRT4577_99583C.1
tccgttttctgctcctcggccttacgcttgggcggtgtccatgccacgccaatgacctataaaaaaaaggtccagttagtcctagcttcaactaccctcactccatggaggaagtgatgcc

SEQ ID NO: 184207 - DNA, 122 bp, Zea mays
  Clone ID: MRT4577_99584C.1
cgactggcgccggcgctgccagacttcgctgggcatctcgccggctactagctcccaccatgattagagcaggtgatcgcgacgagtgacatctgcctggcgcgcgtgggtgcccgagctgc

SEQ ID NO: 184208 - DNA, 1270 bp, Zea mays
  Clone ID: MRT4577_99585C.1
agctcgccattgcctcccgtctcccccctcgcaccatcaccgccgcccaccgttcccaccgccgcggcctttatttctcccccttccatgccccgctcgcctccgccacctccccctccttccgtccctaggtgactgtgactccctccggcgcctgaatcttcatctcgctccccacgcgccgactccgccgagagatctgcggatgtccgcagccatggtcgtcgcctccggccttgcgctgtcgaacccggctgcatgccgccctctcctttgtttgctctcgaggccggccggcgctccggggcgcgaatggaagagtccccgagtcgacaggccacaaatcccaattccaaaaccttttctccgtcccatcgccggcgatcttctccttcgccgccaatggatctctccgctgtccaggctgccctctccgacaagtcctactccaccctcgcctccctctgcgacgaacttctcctccaggccgcgtcccagggattcaccaccgacgaatggccctactctgtccacctgcttgcccacctctacatcaatgacctgaacagcgcgcggttcttctggaagtcgttgccgcagggaggtcaaggacacgcggccggagctcgccgctgtctggaggattggtcagtgcctctggaaaagagattatgctggcgtcaacacggctgcacaggggttcgagtggggtcctgacctcgctgacttcatcactgccttcctagagagctacagacagaggatattcaagctgttgacttctgcatattccacaattagagttgctgatgtggctcatttcatggggatgagtgaggaggatgcgacaaactatgctgcgcaaaacggttggagtttggatgcagcggccaagatgcttactgtcaaaaagccaaagtctcagaccaaccagaagcttgatgctagcaaactgcagcgtttgactgagtgtgttttccaccttgagaactgatgttcactgtcaatcgtgttgtgtccctgtttcttctctgctccacattgtaagaagcatgtttaccatgtgacagctatatgcctgagcgacttggcccctttcggccgaaaaggggtgatctctgaatttgcatcttatgtgatttctgacagcgtgctatgggttaatgtgcccaaaaaaaaaaaaaaaaaagcggcctgcattggaatggggcacactttgtgattaggggaagtgtaataagagcctatgagcccggtaaatgcgtggttg

SEQ ID NO: 184209 - DNA, 466 bp, Zea mays
  Clone ID: MRT4577_99586C.1
ttttttttttttttttttttttttttttttttttttttttttttttttttttttccaacccaaaaactttttttttggaactatacctaaaaaccatttaaaagagggccccccccaatgagggttttttggaaaaacactgttaatttttaaaaaccaggttgtttaaagggcacaatttgttccatttaaaaaagggccccacctttaggcataccgggcaggaaaaacggaaccacttttttttgttaaaaaaaggcaaaggggctaaaataaattacttggttaaagggaaaaattttttgctgtttaaaaaaacccccaaattccaatgcttttattgggtaaaaagaaaaaaattgctggggggaggcaaaaactaccgggctaaagggaaattgttgtggaaaaaaacccccaaatttcattgcccccctttggttaaagggaaaaaacttattttttt

SEQ ID NO: 184210 - DNA, 307 bp, Zea mays
  Clone ID: MRT4577_99587C.1
cggcgccctttttttttttttttttattggccaaaaggtacactttcggccataaccccttatgccattgggccaacccttcttcattccccgaaccactaccacaatgcttcacaaattcactttccggtattctaattgtcaacttaacacaactgtagccttccccctaacttatgcggctgggcggggaatattaaaaaaaccttccttcctattggctggggcttaccatttcaaaagcttccttttatatacacacgcctctattagactgaatctcggccattcagagtggtgaattctt

SEQ ID NO: 184211 - DNA, 367 bp, Zea mays
  Clone ID: MRT4577_99588C.1
ggcgggagccagatgattttaaaatttggtggggttcactaccctcggggggttacctgggaccccttaaaaacacacaccattggggggttttttagggcctccaggtttacttgaacacaaaaaatttttttgggtgccttgaaccaaacaccccattggcgggtttttgaatgggtacaggtttgtttgaacacaaaattttttgggggaaggcccaacataaaagttttaacaaccgggaaaggttttaaaaggggttttttttttgtaagagcttttggggcatttaagggccttagggggaaaagaatttgtaccattggggggttttgacttttctggggtcctgggggggtgggccccc

SEQ ID NO: 184212 - DNA, 1896 bp, Zea mays
  unsure (1)..(1896): unsure at all n locations
  Clone ID: MRT4577_99589C.1
cggacgcgtgggctcccggccccccgctgcataaatacctcctctcgcggcccattcccacctccccctcctcgccgctccgggctgaccaagggctcgccgcctcccgtgtcctccgactccgacagggaaaggcgaaaccttgggtcggctcgctagtggagtgcagggtacgttgatgacggagctgtggatggaggtgctgccgccgccctacttcgcggggcaggcggcgggcgggtggttcctgccggaccggcgggccgggcccggggcgtggacgctggaggagaacaagatgttcgagcgcgcgctggcgagggtcgactgggacgcgccggaccggtgggagcgggtggccgcgatgctgcccgggaggacggcgtccgacgtcgcggcccactacgacgacctggagtgcgatgtcggctgcatcgaggcgggcttcgtgcccttcccctgctacggtagcggcggcggcggcggcgcgtcgcaatccgccgggttcacgttcgactgggacgccggcgggctgggctttaagcgctcctgctacgtggtcggcggcggcaagcgcgagcgcgggccggaccaggagcgcaagaagggcgtcccctggacggaggaagagcacaagcagttcttgatgggcctgaagaagtacgggcgaggggactggaggaacatctcgcgcaacttcgtgacgagccggacgccgacgcaggtggccagccacgcgcagaagtacttcatccgcctcaactccggcggcaaggacaagcgccggtccagcatccacgacatcaccaccgtcaatctccccgacgacgacgcgggcggtaccgcctctgcctctccgccctccgtgctcacctccgcctccgcgccctcgtccaccggcggcggcggccctgtcgtctccgagcagttcggcgtgctcgtcgacagcaagcccccggcgccgcaccaccacttcgtgccgcacccttacggcaacgtgaagctcgagcccgtcagttcccaccacggcgggttcctggacgactctgtcctgatgcagatgcactgcgggcagctgcagcctctcggatgactggttgtttgtgcagcaacaatggtagaaagagggaaatgcctctcgtctctttggccagttacgaggggtggagggtaccataccgctctgttgcgttgcgcgtgtctgttgttggatttcaatcaggcaaataacaattgggtacagcacacattcttgtcaagggtggatggctcatacaaacagctccgaggcccgagctcagcgcagctcgcagccgagcgctagcgttctgctgcagctgaagccactgaactgagctccctcccgtgtgttccagagacgggaggaagagggtgaaaaagaaaagaaacacacacacacacacacacacaaaaagtagaagatatggacaatgggatctctgcatttcggctatgcatgtgtatacataagcccacgcccgctgtgaaataatttcctactgtgatttgtttcccgtgttatgggaaccacactgctagatgttgtgattgattacgctagctagccctttctttgtagtaatgaggtattggtcggttaacgtcatgtatttcgacagcgagtagcatcagcagcatgctgtctggtgtcttgtaatggttttttatctttataagctggggatgtattagcctctcaaaaaaaaaaaaaaaaaaaaaaaaaaaaaaaaaaagagaggagagaacacaaacaaaaaaaaaaaaanaaggccgtccctccgacccccatccgtttgttccctttaaagagggatataatctgcccgccttgggaaaatacattctcatacctactttcctgaaaaaaatttaagc

SEQ ID NO: 184213 - DNA, 139 bp, Zea mays
  Clone ID: MRT4577_9958C.1
tgcacagctctcgataagatttcagatccaagagtcatgtactccaatatattctgacttgaaaaggtctaaaagcgcatctttcttggagacataattgcccattgatacaaggatatggctattcgctgtacatcat

SEQ ID NO: 184214 - DNA, 490 bp, Zea mays
  Clone ID: MRT4577_99590C.1
aaaacataataaaaaaatgatagccgaggatgagaatttagtatatatgttggtccgtacattggattccagcattggtcactcgaaatcgagactccagctattaaaggagaaagaacaaaccccacgatctttatctgttatagcagatttataaatagatgggggaggtgggcgatcaaacagaaagagatagcaagtgacgaacaaagcgagtggaatcttcacggataatataaacagttcatagcggaccaaatggctcagggagcggctcgaacctatgatcaaacaccgggctctggtccgacttgtcatccacgctgtgcaaccaactcatgttcttggtgtcctccttcagcaccatcgcctcatatcttgaattggcatatatatccagttcacacagaacatcttttgtcgcaaaggtttccctatcaggggaaccaattgagctcccaccgttatgtgaaagagcaccactagaatc

SEQ ID NO: 184215 - DNA, 504 bp, Zea mays
  unsure (1)..(504): unsure at all n locations
  Clone ID: MRT4577_99591C.1
tccttcttggtatgcggctgaggggggcgcgttgctggctatacacacaccattatctgccatgtcttgatgttggaggactctgacaagggccacgtccccgctgctccgattgttccctactacctctncgtcactccgcacgggaacgagaagaataccgaggatgagctacaggttgggggggtctacgccaaggaccaaatcttgattgtgggtcgacgctaccgcatgcgttccaaactcggcactgttgaccttcgtaacgcgcaaagcttacgctcaacctacagctatctcatcttagacttactactaattgtttttttatatatttaatacaagagcgagtttattgtgtccgtgcagctgcatataagcaggaactataccaacatgaggaacctacatcgcaggtacctttgccttgctccgaagcccaaaccaactagcttcctgccgatttgatcatatgcttgctacaagtgagacaacctatgcttg

SEQ ID NO: 184216 - DNA, 345 bp, Zea mays
  Clone ID: MRT4577_99592C.1
gtgagtggagtaatctttattaactacatcatatataaacaatatatatgaaggcactggatgacaacaccttgacagaaaaaaactaatcagcatgacatagacaccttatgttattaagactaatgaaaaaaaaaacaaccaacactatcctccataccaacccattaaaacaaaaagctgagaaccctaaaaaaaaaaaaaaactcacaaaagaaaacttgcagggctaaaacctatgtacaatccggaaacaaagaaataatgagggggcatgtgaaattgttcccctgtcacaactacaaactaccttcgaaccataagcaaaaaccggaaacccttgga

SEQ ID NO: 184217 - DNA, 581 bp, Zea mays
  unsure (1)..(581): unsure at all n locations
  Clone ID: MRT4577_99593C.1
gccgcccgggncnnaggtacaanngcttttnntttttttnntttttttgttttnnttttctctttttttctnnttttttnnttttttttattttttcttttctctttttttttatttattattttttctttcttttatttattattttttcttttccacaaaaaacgcttttacccctaaaaatttatcccttcggctcccaaaggggtatatggaggcacatgcgtaaaactagccccccatgagcgaggggggaaacttccgggtacctatgcgccgctgaaacgagggaaattagtaataagggagcgtggggagggggccccattaaagggtaaaaaaaaacccaggggggggaccacccaagggggaaaatcaaaaaaaaagggggggggtaataagggacccaagttcggtcccaagctaggggtaatcagggcaaaagggctcacctgtggaaaattggattccgttaccaattacccaaaacatcccaacgggagagataaaataaaaaacctggggggccaaaaaagggagctaaccaaaaaaaaaaacaaggggccaactcgccgttttga

SEQ ID NO: 184218 - DNA, 141 bp, Zea mays
  Clone ID: MRT4577_99594C.1
ctttactcaaccacgggggagcggtgaaatcatataaacaatggtaaaggctttttcttttcttggtaacaccaatggtgtcaagggccccatttttttcacccaaggggggaggggccctaccccttgccccgggagtgt

SEQ ID NO: 184219 - DNA, 578 bp, Zea mays
  Clone ID: MRT4577_99595C.1
cctcttgcaattcgctcgctcgtagctagcttggggtgcaagaacgcagcgcccatgggcatgtccacgcaagcctccgccgccacgcgccacctgctggccgccgcctgggcgccggcagcgcaaccgcggcagctgagctcgtagctcgcgctgccgtcgtcttcctcccgcggggggggcccgctccgcgcgtccaccaaggaggcggtggacgcacccaaggggttcgcggccccgtagatggaccccagcacgccgtcccctatcttcggaggaagcacgggcgggctgctccggaaggcgcaggtggaggagttctacttcatcacgtggacgtccccgcaaggagcaggtgttatagatgcccaccggcggcgcctccatcatgcgggagggccccaacctattgaagctggcacgcaaggagcactgcctggcgctccgaaccaggttgcgctccaagtacaaaatcacctaccagatctaccgtgtcttacccaacggggaggtgcactacctccaccccaaggacggtatctacccagagaaggtcaaccccgggagggagggcgtca

SEQ ID NO: 184220 - DNA, 1003 bp, Zea mays
  Clone ID: MRT4577_99596C.1
ccgtgctcggcggctgccacctgtacctgctcggcggcagggacccgcgcaggggcagcgccatgcggcgggtggtgttctacagcgcccggagcaaccggtggcaccgcgcgccggacatgctgcgccgccggcagttcttcgacgtgtgcgtcatgggcaaccgcctgtacgtcgcgggcggtgagggtggcggcggcgggctcaggtccgctgaggtgttcgacccggccaagaaccgctggtccttcgtggccgagatggccgcgccgatggcgccgttcgtcagcgcggtgcatggcgggcggtggttcgtgaagggtattggcgcgcagcagcaggtgctaagccaggcatactccccggtgtctgactcgtggtccatcgtcctcgacggcatggtcaccggctggcggagccccagcgcgtgcctcaacggccggctctatgctgcagagtgcatggacggatgccggttgagggcctacgacgaggccgtggacgcgtggagcacctgcgccgacagcaagcagcaccgagggagctcccaggcggctgccattgtcgccctccacggaaggctcttcgtcgtccgcaacgacatgagcgtctcggccgtccaggtggcggccgaggcgggaaagcagaggtggcagaccctcgccggcaaagcgcataccaagagctttgtcacgggcctgttgtccaacctctctggtcgcagccgcgccaagaacaacatcctccattgccaagttcttgaggtctagctgtcttgctccctgatgagctatgcttataagttactagaatcacgcaatgaaaaagtacgtgagaaatctccatgtctgctcaagagtgctaattaaataagcgagaattacaggcatctgaagaacgcgcgtgatcgttgtataaaactacaaatacacagtttatatggtatacagtatacagatttattaaaaaaaaaaaacgagggcggccgccgacaaaacagctc

SEQ ID NO: 184221 - DNA, 319 bp, Zea mays
  Clone ID: MRT4577_99597C.1
cggacgcgtgggggatgacaagcttgacatcccaaaataaatggctgtaactggtgatatctgcctatatatccatgcatggtcgacagatcatgcatctatatatgtactatgcatatatatatgcctgtccatgaaatttggtttcccctttctatatttttggcgtccgacaaagttcgacaagctataagtcacccatgttcctccatggatccatcggatctgtagtaatgtaatcggtccattcaagggatcagtgcttgttattctatttgtattccacattataagaaatacaaaggcatgcaattgagcc

SEQ ID NO: 184222 - DNA, 303 bp, Zea mays
  Clone ID: MRT4577_99598C.1
caactcctcgccaaatccacgctgctattaactcgccgtcgtccgcgccaagcagcaaagctccgatggtccgcactaaacagacggcgcgcaagtcgacgggcggcaaggcgtcgcgcaagcagctggcgaccaaggcggcgcgcaagtctgcgtcggcgagcggcggcgcgaagaatccgcaccgcttccgccgcgtgcacgtcgtgctcctggagatatgcaagtaatagaagaccatggagctgctgatgcgtaacttggacttccagcttctcgctcgtgacatcgctcaggacttca

SEQ ID NO: 184223 - DNA, 414 bp, Zea mays
  Clone ID: MRT4577_99599C.1
tcaagctttctttttcgaggttctgtttgctttatgtaatacaaaacacatgacgcccaccgccagcaggaaaaaggctgactttgtttttgttttaaagaaaaaacaaaaacctaagaaaaagacccttctaacggccctggcggctgatctaaaccccacaattccaccacccctggcagccattaatgtgtgaccccgtcgtccgaacaagcgtcggaccactattagtaggacgtggctctggtcggtgattagcatacgacacgagcccgcacagaacagccattggtgcaaatattggcgcttgtcgccactcttcaaatgagaactttaaaagcctaagtggggaaaggctccatgtcaactgcacttgcacatgggttagccgcccctctgagacggggagaagcc

SEQ ID NO: 184224 - DNA, 1195 bp, Zea mays
  unsure (1)..(1195): unsure at all n locations
  Clone ID: MRT4577_9959C.1
gggagctacaggagactgttcaatatccagtggagcatccagataaatttgaaaagtttggcatgtctccttcgaagggtgttttgttttatggccctcctggctgtggcaagactctgttggccaaggcaatcgctaatgaatgccaggctaacttcatcagtgtgaagggtcctgaactgctcaccatgtggtttggtgagagcgaggccaatgtccgtgagatttttgacaaggctaggcagtctgctccgtgtgtcctcttctttgatgagctcgactccattgctactcagagaggaagcagtgttggtgacgcgggcggtgctgctgacagggtgttgaaccagctgcttactgagatggatggcatgaatgccaagaagacggttttcattatcggcgcgactaacagaccagatatcattgaccctgccttgctgaggccaggacgcctcgatcagcttatctacattcctctgcccgatgagcagtccaggcttcagatcttcaaagcctgcctcaggaagtctcctgtggctaaggacgttgacttgcatgctcttgccaagtacacccagggtttcagcggagcagatatcaccgagatctgccagcgtgcgtgcaagtatgccatcagggagaacatcgagaaggacatcgagcgggagaggcgcaggaaggacaaccctgaggccatggaggaagacgaggtggacgacattgccgagatcatggctgcccacttcgaggagtccatgaagtacgcccgccgcagtgtcagtgatgccgacatccgcaagtaccaggccttcgcccagacactccagcagtcccgtgggtttggcagcgagttccggttctccgaccaaccgacggcagctgccggtgcggccgacccctttgcatccgcagccgacgatgacgacttatacagctaaactgcacttctattgtgacgcatctttcctccctccgttatatatgattatatcatatgttaatgcgtgtgtgggagagatggggagttgctgtacctatacagtgaagttaatatttctgttttgcatgcttgcctgttgcctaatttcgactaatttggagatgattaaggtagtgtttgtccggagccanttttaagaagagtgggtctccgaaagggntccgntttttttgggggaccggtttaannttt

SEQ ID NO: 184225 - DNA, 363 bp, Zea mays
  Clone ID: MRT4577_995C.1
aagaaaaagaagccccaaacacgaaactaagggggggatattgggggggggaaagggccctcctttaactgggacttaagccggacgggtttaaggccaaacaagcacaaaagggggggaccgggggggggcacttgaatttgggggggaggaactctaggccacccaaaagggggcttagggggtttggaaccaaaaaggacccatgggccgggggaaaattttttaaaagggaaactattaaacgagggccccccactggtggaacgttgaggggggggacaaaccgggtagggcctgagggagcccccttcccttttttggggcccggtgaggggggctcccagggggaggggggggaac

SEQ ID NO: 184226 - DNA, 266 bp, Zea mays
  Clone ID: MRT4577_99600C.1
aagaaaccaggaaaaaccccttttaagccttggtggggtacccttataccccccttaatacatatattatcgatttatagggggttgggataaaaaaaaaactaatttttattaaaaacaacccccccacatgggtgggggggggccaagagcccatgtcccccccaatttaaattttccagcatccccgagcacacaaaaccggtaggaaaacatactgggaacaaaaatggaaccggtcccacccctccggggacccggggggg

SEQ ID NO: 184227 - DNA, 128 bp, Zea mays
  Clone ID: MRT4577_99601C.1
gtgactcgtgggcttgcccgtttttgcattatgtgaaaaggctttgatctggagggaggggacactctttcacacaccttaccactgcactacccatcctattatataaagcgccggaaactgatgct

SEQ ID NO: 184228 - DNA, 398 bp, Zea mays
  unsure (1)..(398): unsure at all n locations
  Clone ID: MRT4577_99602C.1
aatcgccattgatgaaatttattatttgaaaggctcgggttcgaaaagttgtgcttacgtattatgacttataaaggctgccaattggggatgtttaaaaacagggggcgtggggganagttacaggatttgatgcaataatgtttcaggggcgcagggctaggagctctggctggattggttattatgtaataatgttacaatggaaatcatgttggatggattcaaaatctttttggctactcaggagggtaaaccatggatgtggctagaccagtgatcgatcttatcagttttttggtgcattagcacatctgcttggtaatggggggggggtaagttggctgttgaaccattgttataaagctggtggttgaattgggtttttttccaaggga

SEQ ID NO: 184229 - DNA, 984 bp, Zea mays
  Clone ID: MRT4577_99603C.1
atcggggaaccagtatttcgtgggaccctcgagccctatctgccggccggggtcgggcgagcccgagaatcccgcctcctcggtgcttcgctcgggagaaactggtagtttagttcggcttccagcttttgaccatcagaatctcacaagaaatccaaatattcagactccagtctagcattgagcgacgagcccgagtatcgtctttagactcctcattcctcaacccgacgcggcggtgtgcccccctgcttttttttggcctctcctctccgttggcgacgcatacatccggcgagggagcggaagaagtcagtaaattctgtcgctccaatccggacgaggagatgccgcggatccctctgatcaagttccccaagcggaatctgaaagccccatccgcgccagtgccgtcgcaacccgcagatcagcacgcgaccctcatgtcccggttgggggctaaagcagaggcaccatcttctggagggattaaaaattaccgctttagttcagatgtgccttccccaccgtcgcatactgctgtaggaggtcaagcttcactccttcctaagcgtaaacctctgactgaagaagagattgaggctattatgctgggtggctccatctgatatcacctcatatgaattggaatttctaggaacatcaataagatcgcatacccggacttattgccttcgacctctgttattgaagtcatgttgatacagaattgggttttttttttctaattctctgcaagtcagttgtggagacattaatttccagtattctgcacatgtaactgaccaaatcgtgaacacattgaggtccttgaggaagaagtgttgatcatggaatgtttttgcatctgattattttgtattgatgtcttgaattcttgccacaaataaagatctgatgatcatgccttttgaggcatgcctattttttgaagcaggccataagttccgtgtgtttttggat

SEQ ID NO: 184230 - DNA, 698 bp, Zea mays
  unsure (1)..(698): unsure at all n locations
  Clone ID: MRT4577_99604C.1
gggnatgccgagcgcggcgagctggctgntgagtctgtgcgtttgcgggctgagctcaagaagggcgcaaccggcctgcccttccccgaggtcatttccgccaacattggtaactcgcagcagttggaccaaaagcccatcacctttttccgccaggtgttgagtctgctggagaacccgcagttgttggagcacgaggatgtgcttttggagaagctcggctacaagtcggacgtcattgcccgcgccaagtggctgttgagcgaggtgtcgtcagttggagcatacagcgccagctccggcgtttccggcatcaaggagagcattgcccgcttccttgagcgccgcgatggcatcccggccgaccccaagcacatttacctgtcggccggtgcctcgtctggcgtcaacacactcttgcacatcatctgtgccaacaagaactcaggtgtccttgtgcccatcccgcagtaccccctgtacacggcctcgctgtccgtcttggatgctgtgtgcgtgccgtacttgttggacgagtccaaggcctggggcacggacttggacatcatgcgtgcttcgtacgaaaaggccaaggccgacggtgtcgacacccgcgcgctggtcgtcatcaatcccggtaaccccaccggtgcttncttgtccgaggctgacgtgcgcgcgactatccagtttgcagc

SEQ ID NO: 184231 - DNA, 761 bp, Zea mays
  Clone ID: MRT4577_99605C.1
gggcgattgggactctcgaggccggccggggtgcccccctgctttttttccgcctctcctctccgttggcgacgcatacatccggcgagggagcggaagaagtcagtaaattctgtcgctccaatccggacgaggagatgccgcggatccctctgatcaagttccccaagcggaatctgaaagccccatccgcgccagtgccgtcgcaacccgcagatcagcacgcgaccctcatgtcccggttgggggctaaagcagaggcaccatcttctggagggattaaaaattaccgctttagttcagatgtgccttccccaccgtcgcatactgctgtaggaggtcaagcttcactccttcctaagcgtaaacctctgactgaagaagagattgaggctattatgatccaatcagtattgagaagcggccaaactatgggcgtgtttggcatggctctgctccaccccagagcagctctactccaaaactctgggtggagcagctctgctccagagtttagattgtttctcataaccggtggcagtggcgggtaaataactccaaactccatgactaaggtgttttttggagttttcggagtagcaaaagagctgggtggctccatctgatatcacctcatatgaattggaatttctagagcatcaataagatcgcatacccggacttattgccttcgacctctgttattgaagtcatgttgatacagaattgggttttttttttcctaattctctgcaagtcag

SEQ ID NO: 184232 - DNA, 388 bp, Zea mays
  Clone ID: MRT4577_99606C.1
ggggcaaccgggacgggggcagcattaaaataaacaacttgctatagggaaaccgagccatggggggggggggggaaggcatgccactatcactaaaaaaacaaggtttttttgaattccagggccagcgaccgggttttccccgcttgggggaccacttggaaacacaaataaaaagggccacaaaaaaagcgaaaattgccaaaactggaaaaaaaaaagccccaacaggtgatgcaactaaaccagggccctctcaaagatccttgttgaaaaacttccaacaaaaaaatatgggtggaaaggcccaaatcaaagggcacaaaaaacctaaaaaaaaaggggaccattctttcccaaaaccacaggaagggagcccccctttaaa

SEQ ID NO: 184233 - DNA, 293 bp, Zea mays
  Clone ID: MRT4577_99608C.1
gggcaaaaggggtcttttaataaagattcgtaatctgtgcttgtttacaacaaggcactgcgtgacaacagcatagtagcatagcaaacaagaaaggcttggcgccgacaaatgacttcctgagcttcaattctttggatggaacattacttctccattcataccattagcaaagaacgaaaaaaaaaagagaagatcaccagcgctccacaggattgcaggaaccagcttattgcattgaagacactgacgtacgcatactctccttgcacgcagtttgcgtcatgaattca

SEQ ID NO: 184234 - DNA, 378 bp, Zea mays
  unsure (1)..(378): unsure at all n locations
  Clone ID: MRT4577_99609C.1
cacaccaccaaatccctacctcctcagtcctcacccattcattcgtccatcccacgtaccatggccaccgcctccggcactgacgccggccacccccacactcgcctccgtcccctccaccctccacctccccactcaaatctctacactcgccgtctgcctccacccctccgccgcgcagccctcctcccgccgcaccacccgcctcaattccgccacctcctccgtcatcgccccgctgccctcctcaacgcccggcctctcccgctccttcccttcgggcgcgcccgccgcagcagggcgccgccgcacgctcgtctggttccgcgccgacctccgcctncacgaccatgagccgtttcacgccgcagcgggggc

SEQ ID NO: 184235 - DNA, 3058 bp, Zea mays
  Clone ID: MRT4577_9960C.1
attgtaaccatccgcggtggcactttggaaccaaacccgggatacttcatcgcggtgaagccctgcacggcgatacgatgatccaatgtgaatgcaacctaaacttctcattgaacgaaaatttatcattcacaatggtagagctggccatctttgataatctcaaatgaacacaaaccatggctcatggcacgattcagaggatcgtaccaaaatattaacttaagtattatataggtacagcgactccgcgtcttgggccgcttttttttttttttttttaggctcatggcacaattcagaggatcgtgccaaaatattaacttaagtattatatataggtacagcgactccgcgtcttgcacgtagtctactataataagcatatataacgaagcaaagtactcaatattcgtcacaacgcagggctgctaatttaactgtataagtcatcatcgtcagctgctgctgcagcggatgcgaagggatcggccgcaccagcagagcctgcagctgccgtcggttggtcggggaaccggaactcgctgccaaacccgcgggactgctggagtgtctgggcgaaggcctggtacttgcggatgtcggcgtcactcacgctgcgacgggcgtacttcatggactcctcgaagtgagcagccttgatctcagcgatgtcgtctacctcgtcttcctccatggcctcggggttgtctttcctgcgcctctccctctcgatatccttctcgatgttctccctgatggcatacttgcacgcgcgctggcagatctctgtgatatctgcaccgctgaaaccctgggtgtatttggcgagagcattcaagtcaacatccttggccacaggagacttcctgagacaggctttgaagatctgaagcctggactgctcatcgggcagaggaatatagataagctgatcaagacgcccaggcctcagcaaggctgggtcaatgatgtccggtctgttagttgcaccgataataaaaaccgtcttcttggcattcatgccatccatctcagtaagcagctggttcaacaccctatcagcagcaccaccggcgtcaccaacactgcttcctctctgagtagcaatggagtcgagctcatcaaaaaagaggacacatggagcagactgcctagccttgtcaaaaatctcacggacattggcctcactctcaccaaaccacatggtaagcagttcaggacccttcacactaatgaagttagcttggcattcattggcaattgccttggccaacaaagtcttgccacagccaggagggccataaaacaaaacaccctttgaaggagacatgccaaacttttcaaatttctctggatgctccactggatattgaacagtctcctgtagctccctcttaacattttccaggccaccaatatcttcccaagagacatttggcacttcaacaacctgaaaaaaagaagttcaaggttgcttttggaataagtagaaatttatcacaacatacagaagaggctactactagagatactcacagtttcacgcagagcagatgggttgcttgtcccaagtgcagtcttgaaatgatcatttgaaacagccatagagttcagtatctcagcatctattgtctcatcctcaagatctataatatccatcttctcacgaatgcattgaagagcagcttcagtacaaagggcagcaagatcagcaccaacataaccatgagtatccttcgcaatgagctccaagtcaacatcttcagcaagcttcatgtttttcgtgtgaatccgaagaacctcaaggcgcccaacttcatctggaacaccgatatcaatctcacgatcaaaccgaccaaaccttctaagagcaggatcgatactgtttggacggtttgtggcacccataacaataacatgtgcacgagacttgaggccatccataagagtcaagagctgtgaaacaatacgcctttcaacttctccatgggtcttctctctcttgggtgctatggaatctatctcatcaataaaaatgattgaaggtgcatttttctcagcttcttcaaatgcctttctgaggttgctttcactttctcctgctagctttgacatgatttctggtccattgatcaaaaagaagaaagcacctgtctcattagctacagctctagcaataagggtcttgccagagccaggaggcccatacagcaatatgccctttggtggcttcacaccaatagacttgaaaagctgggggtgacgaaggggaagttcaaccagttctctgatttgggccatctgctttctaactccaccaacatcatcatagccaacttcatcgagtctttcctcatcctccctcttaataggctcaccctcacagaatatttctgtatctggtgcaacaatacaatactctgcaggatcagtctctataactttgaattctacacttctcatgccacccctgactaggaaaaggtctcctttcctcaaaggacgataggcttcaagaaagtatggtttcagaaaggcatcaaataagttgccagtgatgccttcaatggtgtcatcaattggaagtatgtgcacacgcttcccgtatttgacatctgggcattgatggacagataccacatcactaagccgaaccctcaagttcttcctgacaaccttgttcatccggacctttggctcctcacacgtctcgtctgcgagcacaatgcagatagtgtcctttctcttcttacccttgagcaggaccgtgtcaccgcggaagagctggagcctctccatggtgtccgggtgcagagcgacgacggagttgtcatcattggtggcctcgtcgaccaccagccggttcggcgacttcttcctctccaggatcgccgtcgagtaatccttcttccccttcggatcggaggaagacggctcgccttggctcgccatggcggtcgagttctaggaggcggttggtgctgttggcgtttggcgagacggcgacagatatttgcgacttgcgattgcgagtgttcgggtttgggggctgaac

SEQ ID NO: 184236 - DNA, 856 bp, Zea mays
  Clone ID: MRT4577_99610C.1
cttcttattcagttctgtttcgtgccaatcagacggcggccgcctcctctccccccgctgccgagctcacccctccgcctgccgcctgaacttgtctcgcccgcggcagatctgctccttccgctcgctgcaccgcaacccggataggagaccgcgcgcggtcgagaactacctggggaccaacgtcctcgaccagctccggtgcggccggcacacagctccacagatttggacagcgcaattacttaagctatttgtattcggatctgatccaaccctggtggtcagctggactcatcgcccatggagcacactaagtcaggccccagcagttggccagaactggccgacgtggtgccggtgccgcaggacgatgggcctagccctgtggtgtccatcgcctatcgagatgactttcgtgaggtcatggattacttccgcgccctctacctcaccggtgagcgaagccctcgcgctctccgcctcaccgccgaggccatcgagctcaaccccggcaactacactgtctggcatttccggcgccttattctggagtcactagattttgatttactagaggagatgaaatttgtcgaaaaaattgctgaatgcaatccaaaaaattaccaaatctggcaccataagagatggcttgctgagaaattaggacctggtattgcaaacaaagagcatgaattcacaatgaagatacttgctattgatgcaaaaaattatcatgcttggtctcataggcagtgggttcttcaagcgtggggggatgggagactgaattagaatactgtgacacttactttagggagacgtcttcataattcagcttggaatcagagatact

SEQ ID NO: 184237 - DNA, 1310 bp, Zea mays
  Clone ID: MRT4577_99611C.1
tccacaccaccaaatccctacctcctcagtcctcacccattcattcgtccatcccacctaccatggccaccgcctccggcactgacgccggtgcccagccgcgcgacgaccccagcctcctccccttcgcgtccttctcgctcggcctctccatccgcgcgccggccacccccacactcgcctccgtcccctccaccctccacctccccactcaaatctctacactcgccgtctgcgcacgagacgaggtccgcgccgaggagagggtgcaaaaggctgtggagaaggagggtatcaacgtgaagtacttctggggtagcacgctataccacgtggaagaccttcccttccgcctcgaggacatgccgtccaactatggcggcttcagggaggccgtgaaggggttggaggtcagaaaggtgctggaggctcccgaggaggtcaagtgcgtgcccatgaagaatgtgctcgagcccggtgacatccccacgcttgctgagctcgggctcactgcgccaccagccatgtcacaggactcaaaacctgctgttggctctactctcattggtggtgagacagaagctctggagaggttgaagaagtttgctgcagaatgctctatgcagccaaacaaagtagacaaaagcaatacccaagatagcatatatggtgctaatttctcttgcaaaatttctccatggcttgctacaggttgcctctctccacggttcatgtatgaggagttgaagaagcatgctactaaagcaattccttttgggtcaacacccaagaataatgatggcacatctgatgctggaacaaattggttaatgtttgagttgctgtggagagatttcttcaggttcatcacaaagaagtacagctctgtacagaagacatctgaagttgccactggctgcactcccgccccagcgcttgcatgaacttacttagacaagctgattgccagctgcttttttggggtgataaacttatgtgcattttcaatggagtcttttttttgccgccaataatgttggtagtcaaagtgaacgccgaatgcgcattcctgcgttttggtttggtcgatgtatttaatgctgtcgacatccctccaaatgactgttgaatgcaaatgatactgtgagcaacctatcatctgctgtgtaaatgtgttctgtcgacgttcctccaaatgacacttcgatgcaatgatattgtgagcaaaaaaaaaaaaaaaaaaaaaaaaaaaaaaaaaaaaaaaaaaaaaaaaaaaaaaaaaaaaaaaaaaaaagcggccctcgaggggg

SEQ ID NO: 184238 - DNA, 792 bp, Zea mays
  Clone ID: MRT4577_99612C.1
ccgcagttccacaccaccaaatccctacctcctcagtcctcacccattcattcgtccatcccacctaccatggccaccgcctccggcactgacgccggtgcccagccgcgcgacgaccccagcctcctccccttcgcgtccttctcgctcggcctctccatccgcgcgccggccacccccacactcgcctccgtcccctccaccctccacctccccactcaaatctctacactcgccgtctgcaaaaggctgtggagaaggagggtatcaacgtgaagtacttctggggtagcacgctataccacgtggaagaccttcccttccgcctcgaggacatgccgtccaactatggcggcttcagggaggccgtgaaggggttggaggtcagaaaggtgctggaggctcccgaggaggtcaagtgcgtgcccatgaagaatgtgctcgagcccggtgacatccccacgcttgctgagctcgggctcactgcgccaccagccatgtcacaggactcaaaacctgctgttggctctactctcattggtggtgagacagaagctctggagaggttgaagaagtttgctgcagaatgctctatgcagccaaacaaagtagacaaaagcaatacccaagatagcatatatggtgctaatttctcttgcaaaatttctccatggcttgctacaggttgcctctctccacggttcatgtatgaggagttgaagaagcatgctactaaagcaattccttttgggtcaacacccaaagaatatgatggcacatctgatgctggac

SEQ ID NO: 184239 - DNA, 520 bp, Zea mays
  unsure (1)..(520): unsure at all n locations
  Clone ID: MRT4577_99613C.1
tcgaggcnncggccgggccccgggactcataccattaccatcactcaccttgccagtatagtctcgtgcgcgttctacaataccaggggcaaggacgacgtgatcgagagcgtcgatggcgacgacgagttcgctggcaaggactacacggaccctcccccggtaccgctgatagcatgcggctgaccgtgaagacgtgagctcctgtgacctgcgcctgagattgccgaagattgtcgacacgctggtgctcctgcactatatgatccggacatggtagctacgtcaacaatgcatacattgacaggaagatctacctaaggcaaggcatcggtgtgggtggctttcagaagatctacggcggccgccagaggaatggctcccgcccaccacacttctgcaagagcagtggtgctgttgcacgcaacatcctgcagcagctgcagattatggtcatcatcgatgtcgatcccaatggtggacgcctcattaccaatcagggaaggcgtgatctggacca

SEQ ID NO: 184240 - DNA, 2121 bp, Zea mays
  Clone ID: MRT4577_99614C.1
aaacccgaatggttggtgggggtcccgaaattctccaccaccttcccccgccttcctccgagtcgacccacccgcacctctcctcccccggcatctcactcctcatccgcagttccacaccaccaaatccctacctcctcagtcctcacccattcattcgtccatcccacctaccatggccaccgcctccggcactgacgccggtgcccagccgcgcgacgaccccagcctcctccccttcgcgtccttctcgctcggcctctccatccgcgcgccggccacccccacactcgcctccgtcccctccaccctccacctccccactcaaatctctacactcgccgtctgcctccacccctccgccgcgcagccctcctcccgccgcaccacccgcctcaattccgccacctcctccgtcatcaaccccgctgccctcctcaacgcccggcctctcccgctccttcccttcgggcgcgcccgccgcagcagggcgccgccgcacgctcgtctggttccgcgccgacctccgcctccacgaccatgagccgtttcacgccgcagcgggggcgtcgtcctccctcctccccgttttcgtcttcgatccgcgggacttcggcaagtccccctcggggttcgaccggacgggcccgtaccgcgccaacttcctgctcgattcggtcgccgacctgcgccggagcctccgcgcccgcggtggggacctggtggtgcgcgtgggtaggcccgaagtggtcattcccgagctcgcgcgggcggcgggcgcggaggccgtgtacgctcacggggaggtatcgcgggacgaggtccgcgccgaggagagggtgcaaaaggctgtggagaaggagggtatcaacgtgaagtacttctggggtagcacgctataccacgtggaagaccttcccttccgcctcgaggacatgccgtccaactatggcggcttcagggaggccgtgaaggggttggaggtcagaaaggtgctggaggctcccgaggaggtcaagtgcgtgcccatgaagaatgtgctcgagcccggtgacatccccacgcttgctgagctcgggctcactgcgccaccagccatgtcacaggactcaaaacctgctgttggctctactctcattggtggtgagacagaagctctggagaggttgaagaagtttgctgcagaatgctctatgcagccaaacaaagtagacaaaagcaatacccaagatagcatatatggtgctaatttctcttgcaaaatttctccatggcttgctacaggttgcctctctccacggttcatgtatgaggagttgaagaagcatgctactaaagcaattccttttgggtcaacacccaagaataatgatggcacatctgatgctggaacaaattggttaatgtttgagttgctgtggagagatttcttcaggttcatcacaaagaagtacagctctgtacagaagacatctgaagttgccactggctgcactcccgccccagcgcttgcatgaacttacttagacaagctgattgccagctgcttttttggggtgataaacttatgtgcattttcaatggagtctttttttccggcttgccgccaataatgttggtagtcaaagtgaacgccgaatgcgcattcctgcgttttggtttggtcgatgtatttaatgctgtcgacatccctccaaatgactgttgaatgcaaatgatactgtgagcaacctatcatctgctgtgtaaatgtgttctgtcgacgttcctccaaatgacacttcgatgcaatgatattgtgagcaacctgtaagctgttatgtaaatgtgatagttagatgcatatcatgcatgtgacctgctattgttctattgttctatatatcatattattgttctatatagcaaaaaaaaaaaaaaaaaaaaaaaaaaaaaaaaaaaaaaaaaaaaaaaaaaaaaaaaaaaaaaaaaaaaaacccaaaaaaaccccaaaaaaaaaaaaaaaaagggccccaaggcccgggcccccctaaaaacaagggaccccccgggcttgaagaatttgaatttaaggtttttcaaacccgccacccccagggggggccccggaaccaattcccc

SEQ ID NO: 184241 - DNA, 1308 bp, Zea mays
  Clone ID: MRT4577_99615C.1
caaacgccggcggagtcgtcagtcgtgcgtgcccgggcccgtcccgttctgcccccacctcccctcccccgactccctcactcttcctctttccgttccattcaagatccctgcagccgtccgtccatccatccatccatccatccgttaagaggagaggggaggccggccggccggccggtggagcggagatgagggggcagacagagacaggccggtggcgaggaggcgacggcgttgcggcgtggtgggtggccgtggtggccctgcagctgggccattcgctgagccgcgcgcgggcggggctgctggagtccaacccgggccttgcctacaacttctaccagagcagctgccccagcgcggagtccatcgtccgcagcgtcacctgggcgcaggtcgccgccgaccccgcgctcccggcccgcctcctccgcctccacttccatgactgcttcgtcaagggctgcgacgcgtcgatcctgctggacaacgcgcagagcgagaagacggcggcgccgaacctgtcggtgggcgggtacgaggcgatcgacgcgatcaaggcgcaggtggagaaggcgtgcccgggggtggtgtcgtgcgcggacatcgtggcgctggcggcgcgcgacgcggtgtcgtaccagttcggggcgtcgctgtggcaggtggagacggggcggcgggacggcggggcgccgtcgctggcgtccgacgcggcggggttgggggcgctgccgtcgcccttcgcggggttcggcggcctgctggcgggcttcgccaggcgcgggctcaacctgacggacctggtggcgctgtcgggggcgcacaccatcggcgtggccagctgctccagcgtcaccccgcgcctgtaccaggggaacgccaccagcgtcgacccgctgctggactccgcctacgcccgcgcgctcatgtcctcgtgccccaacccgtcgcctgcgtccgccaccgtgggcctggacggcggctcgccggccaggttcgacagcgggttctacgcccgggtgcggcggggccagggcacgctggcctccgacgccgcgctggcgcagaacgccgccgccgcgcaggtgatggacgacctcgccacccccgccagcttctacgccgccttctccatgtccatgaagaagatgggccgcgtcgacgtgctcaccggcaccaacggccagatcaggaagcagtgccgccaggtcaacacatcctgattgccttgcctgatgcctccctcccattcatcatcatgcgtcgattcggcgcgcatcaatatatttcttcgtcccgcgc

SEQ ID NO: 184242 - DNA, 191 bp, Zea mays
  Clone ID: MRT4577_99616C.1
gcggtcgacgggtacattgctcctgagtacgcctacaccctgaagggggacgagaagagcgacgtgtacagcttcggcgtggggctggtggagctcatcttttttttgcaagcgcggtgggggagatccagcgacgggcgtggacatcactgcacctggggtgcggccggtgacccggggcgagcaaaaga

SEQ ID NO: 184243 - DNA, 631 bp, Zea mays
  Clone ID: MRT4577_99617C.1
ctgctggcggcttcgccagtcgcgggctcaacctgacggacctggtggcgctgtcgggggcgcacaccatcggcgtggccagctgctccagcgtcaccccgcgcctgtaccaggggaacgccaccagcgtcgacccgctgctggactccgcctacgcccgcgcgctcatgtcgtcgtgccccaacccgtcgcctgcgtccgccaccgtgggcctggacggcggctcgccggccaggttcgacagcgggttctacgcccgggtgcgccagggccagggcacgctggcctccgacgccgcgctggcgcagaacgccgccgccgcgcagctcatggccgacctctccacccccgccagcttttacgccgccttttccatgtccatgaagaagatgggccgcgtcgacgtgctcaccggcaccaacggccagatcaggaagcagtgccgccagatcaacacatcttgaataccttggtttctcttcaaattttttttcttctctcctggcttgcctgatggctccctcccattcatcaccatgcgtcgattcggcgcgcatcaatatatttctcttcgtcaaaaaaaaaaaaaaaaaaaaaaaaaaaaaaagtactctgcgttgttaccactgct

SEQ ID NO: 184244 - DNA, 907 bp, Zea mays
  unsure (1)..(907): unsure at all n locations
  Clone ID: MRT4577_99618C.1
gnttaccctggcgttggacctgagcacagtttcttgaaggacatcggacgcgctgaatatgacagcgtgactgatcaggaggcactggatggtatgtgcctcactccctttccatcttttgtatcgattgaactaatttttaacaagttgttgctgttagcgttggtgtcagctttcagtgccttgacatctgtatcaatcactaacttttataaataacacacggacattctgtttttttcttgatctgaaagagtcactagtgaacgcgtgtccaaatctccacagtgtgcttataccagtacaactgcactgttttgtcatttgtgccagaatttattttaatacacctatgtgaattatctcaaacgtggcgaatcagcaagatgttatcttaaatgattaattgtcatgtatttggttgatgtagccgttcaggatattgcaatgccaataatatagtcgtagcctcctaggttctgctcagtagatacgccaaatgtttaatatatgccttattattgagctgatgctgattttttcaataaccaaacttaatgttaattcttgagcactctgtgctatagatcggagattagaattagcttacaaatcaatagtcctcagatgtgacactaaatacattgcggactgttcaggatacataaggcctgtagttttttttgtcgtcctcccggcgaacctgccagcgacgccatgattctgcctccgagccaagcttgaaggacagttgcggcccagagggggctgtggctatcgcctagcgcccgaggcactggtcagattcttgaaggactttgaggattagcttggcatcacaattacttgctcccaagagactgagccctttggaaccgctgggcctcttgctctcgccagggacacg

SEQ ID NO: 184245 - DNA, 1704 bp, Zea mays
  Clone ID: MRT4577_99619C.1
cattgggtacctcgaggccggccgggaacgatgatgaaaagctctgtgacgatgggtcgtcacgttgtcaccttctccgatgatacgagcacctctgagcttgtcatcaccaaacgccggtggagtcactcgagcccgcccgggtctcttcctcttccattgattccattcaagatcactactgttaccagccagccagtcgttcgttaagaagagagcgagcgagcaagagagagagagagagggagaagggggaagatcagaacgaagagagggagatgagggggcaaacgcagacagcttccgcggggggccggtggcgaggcgacggcgctgcggcgtggtgttggtggtgggtggccgtggtcctcctgcttggccatttaccgagctgcgcgcgcgcggggctgctggagtccaacccgggcctggcctacaacttctacaagaacagctgccccagcgtggactccatcgtccgcagcgtcacctgggcgcaggtcgccgccaaccctgccctcccggctcgcctcctccgcctccacttccatgactgcttcgtcaagggctgcgacgcgtcgatcctgctggacaccgcgcagagcgagaagacggcggcgccgaacctgtcggtgggcgggtacgaggtgatcgacgcgatcaaggcgcagctggagagggcgtgcccgggcgtggtgtcgtgcgccgacatcgtggcgctggcggcgcgcgacgccgtgtcgtaccagttcaaggcgtcgctgtggcaggtggagacggggcggcgcgacggcacggtgtcgctggcgtccaacacgggggcgctgccgtcgcccttcgcgggcttcgcgggcctgctgcagagcttctcggaccgggggctgaacctgacggacctcgtggcgctgtcgggggcgcacaccatcggcgtggcaagctgctccagcgtcaccccgcgcctgtaccaggggaacgccagcagcgtggacccgctgctggactcggcctacgcgcggacgctcatgtcgtcgtgccccaacccgtcgccggcgtcggccaccgtggcgctggacggaggcacgccgttccggttcgacagcagttactactccagggtgcagcagaagcagggcacgctggcctccgacgccgcgctggcgcagaacgccgccgccgcgcagatggtggccgatctcaccaaccccatcaagttctacgccgccttctccatgtccatgaagaagatgggccgcgtcgacgtgctcaccggcgccaacggccagatcaggaagcagtgccgccaggtcaacacctcctgatcaacaaggcgtcacagggaggggccatggtttttccctcttcgttcttctctttttctgcaccgcctggtattattgttccatgcatccggtttcggctcggcttcggctcggcgcgcatcaaatatatttcgcccccgcgccgtgattgagggccctcctccgacgaaagaaatccattgctttctttgttatttatattagtttactcactgtcctgtgttccattgtcttgccttgcaaaaatgtaagaaagattaaagatgtaagcaaaaaaaaaaacaatgcggatcatccactctaaaaaaaaaaaaaaaaaaaggggctttttttaaaaaaaaaatgaagaaaatccactctagagatcggtgttgaaaaaccttag

SEQ ID NO: 184246 - DNA, 1756 bp, Zea mays
  Clone ID: MRT4577_99620C.1
atccggcgcgaccccgccccgatccgccacggggtgcggcaccttcgtggtcagccgccccggtgtgcgctgcgtcggctcctccgcttgcgacgggcgccgcctgcacttccgcggttgtctcgctggcacttcgcccacgtcggaagcccgcaggcggctccgagtcgaggggtcccgtgggccttggggcctgggcccgtcccctccttggccccatggagggccgggacgagttggccgtcccttcgctggcaggggacgtcagctgcggcgaccgggagtttattgcggaggtggaaatgctcagtcgactgcaccaccgtaatcttgtcaaattgattggtatttgcgttgatcggagcaaaagatgtcttgtgtatgagctcatacgcaacggaagtgtggaatctcatcttcatggcgctgacaaggctaagggtaagctgaactggcctgtcgtccggaaaattgctcttggggctgctcgaggcttacatatctgcatgaagattcaaaccctcatgtcatacaccgtgacttcaaggccagcaatatattattagaggaagatttcactcctaaagtgaccgattttggtttagcaagggaagcatccaatgcaactcaacctatatctaccagggtaatgggtactttcggttatgttgctccagaatatgcaatgacgggtcatcttcttgtgaagagcgacgtctacagttatggggttgtcttgctggaacttctatcaggaaggaagcccgtaagcatctctgagtcgaaggatcccgagaaccttgtaacttgggcccgtcctctgctaagccacaaggagggcctggagaagttgatcgacccttctctggaagggaactttaacttcgacaatgtagctaaagtggcatccatcgcttccatgtgtgtgcacacggacccatcgcagaggccgttcatgggtgaagttgtccaggcactgaagctgatctacaatgatccagatgaggcttgcgacgattcctacagtccaaggaattcatctgatcaagacggtgactacgaaggagacctggtctttgagagcggaagctggggctttggggcctctgggtgtctagactaccggaattccttaccgtttgtcactatggactacagttctggacgaatagaagggccgcacgaccctcgcgcggcattgtcagcgggatcccatgcccagtcaccagtgctgcagaatagatcaggccccttgcggatgaagaagaagctggcctccttctaccgctctagaggcagcattagtgagcatgggcacctgccgcgccattgatcagtcagtgaactagtgttaggctgttagcttcggttgactctgggattgaggctggcgggggttgtcattacctgattcgtgcctcatgttagtgtacagttcgtggtgacccttcacccttgggtatgggtgttttctctctctctttgccttctgcttcttccccggaagcaatgaggatggggttggcaggtgctctctaattttcgcaaattgcggttcatttctcatgcatctgattggtttcttgccggagttctgggcatcatgatgttgtgactaggtggttgtactggatgcagttcgttgtaaacagacagtgtcagggatctacctcgcgttggagaggtgaactatacagccggctcagttcctcaaatgtcaggtggtacctgtgttaataaaaaaaaaaaaaacccc

SEQ ID NO: 184247 - DNA, 306 bp, Zea mays
  Clone ID: MRT4577_99621C.1
gattgagcgtactcactttaggccgactccgattagtgactcttcaggaggaatatccttgtacctgcgtatctacctacccgcgatgcacgggtgcctccactatgttgccagttaatgctcctcccgataccgctggatggtgaagttgttccccacatatgactccaagaagtcttgatcatctctctgccttccttggttactagggtggtatgactcatattgccacgaaggctgcaaattctccatccatactgctcagaatgaaaattagcgaaggtggtaccatcattaaaatccctc

SEQ ID NO: 184248 - DNA, 240 bp, Zea mays
  Clone ID: MRT4577_99622C.1
catgaaattgccagcacggcaacgacagaatgacaggatccacacagttgcttcaccagacagggagtgccctggtagagggaaaaggaagaggatttcctggtgttcaaaggatccaagctgcctcaaagacccaagaaaagagctaaggtccatcaaaggaccggccattttggaatgccaagaaccttggcaaggggccttgcccctggaaggttatgaagtccggaagaagaaggt

SEQ ID NO: 184249 - DNA, 520 bp, Zea mays
  Clone ID: MRT4577_99623C.1
atataaaaaaatggcagaaatttactgggggggggggggaatcacacggttttatacagattataatggaaaagcctgcctttaagtttggaaattttaattcacaaaaccagagctttctattgattacacagatttttccccaagaagggaggagggagaactggtggcaggttggtttttctttttatgggacatgcttgtgatggttggcagcatgaagcttctcctcagaagcggtctggtgttcctatgcccggcggttttttaaaaaactttcccaacttaagtctgaggtacaggaagtcatacactttcaaggttttttggccctggcgacgggtgagcctttgggggtttttttccttcttgcggcattttttgagcttaccttctataggctttttgggtggctcaaccaattctgccctttttaagggcttttctggggcaaatccatggccctcatttcttgggggccggtttaaatttcttggaatgcctattctcactgggtttg

SEQ ID NO: 184250 - DNA, 516 bp, Zea mays
  Clone ID: MRT4577_99624C.1
gacgaaaaccatatttcaatatcgtctgatgaatacattttgctggaatgaatacattttgctggaatgaatacggtgatacagccaaaattagaacaaaaaaatcgagtaacagaaataaaggggttgaaaaccgatataaaagaactcgaatagagcaagaaacaggagtgtggatctagcttaggtttgaagagacacccgggaggatatgctcaatgcaagctcaaactgaccaccatcgtcggtcggtcgttaaccggattagggtttgttgacgtagccacacatccgtctgatctccccattggcggccgtcttcacctggacgccacccatcttcaccatggcttctccaaacttgtcctgccacagcttctgagagaaggcggctacatacaccagcccaagcgtgtcgcttgacttgaggagtgcggcatccgacgcgaagagcaccttgtggctgatgacgttccggtagtactggttgtccagctggtcaggggtcctgtagtc

SEQ ID NO: 184251 - DNA, 452 bp, Zea mays
  Clone ID: MRT4577_99625C.1
aaaccagatttgctatccaacccgcgtgtgtctgaaagtaaataacatattttgaagtgcgcgtgtatactttttcataaggtgtttgggaattttttttcctaaaataatttattccatatctacatcactgagagctgtttgcctatcctgaagtccatctgtaaaagaaagttagcttttgtcctgaatttgctttccatgcttttattaatctagtttaatctcattgttggaaaaagggatagtgcattttaaattgaccttcatatgcttttaaaaataagacaaatctacttgataatgtactttttatttgatctcaagttgtataaaaccaataaattttgtgttactgttactgcagtagtaatcttatgcacacagtgattccatgttaaatgcaaagtagttaggcaactgttttcttacaggagtttccaagctttact

SEQ ID NO: 184252 - DNA, 258 bp, Zea mays
  Clone ID: MRT4577_99626C.1
ctgcttttcagtatagaacagctgcacaaccacatacatcacacaaggacaaagaaaaagggaaaattgcaaccatgcttcgaagaactcctgaacaagttctggatgagaagctttcctcagggtcacaccaccaaaccaccatggaagcatgcactaagtctaaggctgacagagattatgtcaacaagcaatgggctatgtggttctatgagtgtggtttaccttttaacgtcattaattctaagcaatttcaca

SEQ ID NO: 184253 - DNA, 228 bp, Zea mays
  unsure (1)..(228): unsure at all n locations
  Clone ID: MRT4577_99627C.1
accctcgcaggccgtccgggcatgcctagttcatctatacttgccactattcagatattttgccagagagacctgggtttagattaaattttcatgtcatctgttcagaacttgcaattctgtgattcctcaagattagtnngacctgtagntctgggagccactatactcattatactgctatgtgcaaaataaataatgcttgcttcatctcctattttttttttt

SEQ ID NO: 184254 - DNA, 359 bp, Zea mays
  Clone ID: MRT4577_99628C.1
cgacccacgcctccgcccacgcgtccggatcgatgtgctgaggaggaaaagagaattatattttagggattattaaagttctgtcacgtgtttttgctgccggctatcgatcatgtggagcctggtgcggcgatggcgatgggggcggcggaggcggacggcgcgggtggtggacgagagcgcgctcggcgcagacggcgatactgacggtggcgccgccgctccggccgcgggcggcgcggtggtggcgccgacactgggtggcgctctagccagggcgctgctggcgctggcgtgcgccatccgcttcgacggcgcggacgtcagcgcgaccgaggaagcgtgggccgtcactgcgt

SEQ ID NO: 184255 - DNA, 746 bp, Zea mays
  Clone ID: MRT4577_99629C.1
cctcgaggccggccgggcccaccgtcctcctcctccaccaccaccctctctcctaccaacagggtgctcctcctctcacgccaacccccagactctcgttaccatcgagagcctaccaagcagacataccaggtagctgaacgctcacctgcctgcttacgaccaaacacccgaggagccaatttcgcggcacaaacactcctcccttccctcccacaggatgccttcgcatcagcccgtcgccggcatgtccgccgtggacccggcctacctctccagccagccttcggctgcgtccaagcctcaccctcaagagcccgtcaggaacaaggcctacgaccccaagaagcctcacatcactgagactcccatgacaaagaagaactggtacaagcacgtcaactggctcaatgtcatcctcatcgttggcattcccatgtgcggtctcgttgctgcttactggacacctctctacctgaagactgccatctgggccgttgccttctacttcgccactggcctcggtatcaccgccggctaccaccgtctgtgggcgcacacctcctactctgccagcctcccgctcaagatcttcctcgctgctgttggtggcggtgccgttgagggttccatcagatggtgggcccgcgaccaccgcgctcaccaccgctacaccgacaccgacaaggacccctacagcgtcaggaaaggtcttctctactctcacttcggctggatgctcatga

SEQ ID NO: 184256 - DNA, 268 bp, Zea mays
  unsure (1)..(268): unsure at all n locations
  Clone ID: MRT4577_9962C.1
ggtaccctncgcggtccttccgggnaaaaaaaaaaaaaaaaaacacacacacacaagnacacatctcaacttcgtaggccagcgaggcgttctcttccttcttctcttctcccacgcancgcgcgccagaggaagcacagaggaggagatcgccgcttccttctttcttctgcgnntgcgggtggtgcggnnttgaccgcccttctctggnagcgagaatctctgctttgcagtccccctcgagaatctgggtcaccagaatcttatc

SEQ ID NO: 184257 - DNA, 337 bp, Zea mays
  Clone ID: MRT4577_99630C.1
tgctcacgcgcccacggccacccatgacgggggcattagacacttcacacggctaaatcacgccaaccaaggggcaggggcaccatggacgggcgccaaccccagcgcagcagccgaccggcactgcatgggctacacaatccagacacagactgccaagggcgctataccctacaaccaaaagggagcaggaaggaaccaccgaccaacatgacagcgaaaccaggagggccaacgacgcatattggcagggtatgagcgactaccagagccagggacgagctactatcctccatggctggaagcaccagggagctagacgcccctggacagaccc

SEQ ID NO: 184258 - DNA, 657 bp, Zea mays
  unsure (1)..(657): unsure at all n locations
  Clone ID: MRT4577_99631C.1
gtccggaattcccgggtcgacccacgcgtccggcagctgaagcggcggccgagtcggagcctccggcacaggggcgggagctgaggcggtagcggaccggctggcgggctagcgaaaggcggcggaatggtggactaccacgcagcgaaccaggcgtaccagtacggcccgaacagcggcggcggcaatggcgcgggtggcggcggaagcatgggcgactacatggcccaggaggatgactgggaccgggacctgctgttggacccggcctgggagaagcagcagcgcaagaccttcacagcctggtgcaactctcatcttcggaaggctggcactcagatcgagaatatcgatgaggacttcagggatgggctcaaacttatgcttctgttggaggtcatttcaggggagcgtttgcctaagccagagcggnggaagatgcgagtgcacaagatcaacaatgtaaacaaagccctggacttcatcgccagcaagggagtcaagctggtgtccatcgnggcagaagagattgtggatggcaatgcaaagatgaccctgngaatgatctggaccatcatcctcagatttgccatccagnacatctctgtggaagagacctctgctaaggaaggactcctcctctggtgccagagaaag

SEQ ID NO: 184259 - DNA, 316 bp, Zea mays
  Clone ID: MRT4577_99632C.1
gggacaacggtgacaagaggatgacaaggcgggccgactcagccgcattgtagtgggtgtgatcttggagagagccttatctctagagcctagagcagcaataggtccacataagaaacaaacaaacaaacaaaaaaggagacatgatgattggtgcgctctctagagatgttaactaagggggtgtttggtttctagggactaatttttagttcctacatcttattccattttagatgcaaaaatgctaaatatagaaactaaaagtctattctagtttctaaatttgagcattttatagcctaacatggaataa

SEQ ID NO: 184260 - DNA, 170 bp, Zea mays
  Clone ID: MRT4577_99633C.1
cccacgcgtccgcccacgcgtccgggagaccatgagtgctgcaattctttcggtttctgcccttaatatggggtcttcttcctcaaagaacttttaacccttgctttttaagaatggcattatcttaatggctattccttaatatattccttggtttctctaaccaaaac
